United States Patent Application Publication US 2011/0183924 A1 - sequence listing, part 66

SEQ ID NO: 230709 - DNA, 2260 bp, Homo sapiens
gtgcctttaaggacctttgggtgattagagacaggcaggcagcttgccgcctggaaatgatcaagtggtcagcctgaccaaattcaggacagctgaagggtctgactgggcactgtgtgactggtgggttggaggctgtcgtgtggctgagcagagatggccagctgatgggtcacacagttggggatggtgtcaggaggtcaacctgaccagcagagacggctggcaggaaggtcacggaaggccagccaggcatggtgccactgggtgcaggcaggtggcggatctgagtggcctgacacattggatggtcgcttatttgggcagcgtgattgtcagaacagtgttgcaggggctgctgcagggagccatttggacatctgcagggcccccccggaggcctcggatggccacgtagggtctgcctatcaggagaacccccagatgatcacagtcccccagagacagccagacccccggggacccagcctctcacagtcagtcctcccacccgagtgaccccgatggcggcctcccggctggcggcgctggaaggagtggactccggtcccagggtgcccggggccagccccggcttcctatattccgagggccagcggctggcactggaggctctgttgagcaagggcgcggaggcgttccagacctgcgtgcagcgcgaggagctgtggcccttcctcagtgcggatgaggttcagggcttggcagcggcagctgaagactggacagtggccaagcaggagcccagcgggatggcagagggagccaccaccgccgatgtggacgcgggcagcctgagctactggcctgggcagtcggagcagccggcgcccgtcctgcggctgggctggccagtggactctgcgtggaaaggcatcacccgggcgcagctgtacacccagcctcctggagagggtcagccgcccctcaaggagctggtgcggctggagatccaggctgcccacaagctagtggccgtggtcatggacgtcttcactgacccagacctgcttttggacttggtggatgctgccacgcgccgctgggtacctgtctacctgctcctggaccgccagcagctgcctgccttcctggaactggcccagcagctgggggtgaacccctggaacacggagaacgtggatgtccgtgtcgtgcggggctgcagcttccagagccgctggcgacggcaggtgagcggcaccgtgcgggagaagtttgtgctgctggacggcgagagggtcatctcaggatcctacagcttcacgtggagtgacgcacgcctgcaccgaggcctggtgaccctgctgactggtgaaattgttgacgccttcagccttgagttccggacgctgtacgcggcctcctgcccgctcccacctgcgcccccccagaaaccctcggtcataggtggcctgcagcggggccgcagcctgcaccgcgtgtcccgccgccgctccgtggcccccgcgtcgcctccgccgcctgacggcccgctggcccaccgcctggccgcctgccgcgtctcccctgctaccccggggccggcactcagtgacattctaaggagtgtgcagcgcgcccggacccccagcggccccccggcccggcccagccgctccatgtgggacctaagccgcctgtcccagctgtctggctccagtgatggggacaacgagctcaagaaatcctggggctccaaggacactccagccaaggctctgatgaggcagcggggcactggaggaggcccctggggggaagtggactcccgatctccgtggggcggtgccctgcccctgccccccgcccaccgcctccgctatctgtccccagcccgaaggcggttcggtggggatgctacattcaaacttcaagagcccagaggcatcaggccgtcagactgggccccccgggcaggacttggggggcaaccctgaacaggagcccaagccaaatctgctggcccacccaaggagcagtgccggacaactgtcggctcagagccctctgcctcaatgccctgccttggacaaggcttctggcctcggcgtctgtcaagcagaagggatgtttgtcacttgttctgcaacttgggccgggagtggtggctcatgcctgtaatccctgcactttgggaggctaaggtgggagggttgcttaaggccaggagttggagaccagcctgggcaacatagtgagaccccatctctacaattaaaaaaacaaattagttggg

SEQ ID NO: 230710 - DNA, 1014 bp, Homo sapiens
gtgcctttaaggacctttgggtgattagagacaggcaggcagcttgccgcctggaaatgatcaagtggtcagcctgaccaaattcaggacagctgaagggtctgactgggcactgtgtgactggtgggttggaggctgtcgtgtggctgagcagagatggccagctgatgggtcacacagttggggatggtgtcaggaggtcaacctgaccagcagagacggctggcaggaaggtcacggaaggccagccaggcatggtgccactgggtgcaggcaggtggcggatctgagtggcctgacacattggatggtcgcttatttgggcagcgtgattgtcagaacagtgttgcaggggctgctgcagggagccatttggacatctgcagggcccccccggaggcctcggatggccacgtagggtctgcctatcaggagaacccccagatgatcacagtcccccagagacagccagacccccggggacccagcctctcacagtcagtcctcccacccgagtgaccccgatggcggcctcccggctggcggcgctggaaggagtggactccggtcccagggtgcccggggccagccccggcttcctatattccgagggccagcggctggcactggaggctctgttgagcaagggcgcggaggcgttccagacctgcgtgcagcgcgaggagctgtggcccttcctcagtgcggatgaggttcagggcttggcagcggcagctgaagactggacagtggccaagcaggagcccagcgggatggcagagggagccaccaccgccgatgtggacgcgggcagcctgagctactggcctgggcagtcggagcagccggcgcccgtcctgcggctgggctggccagtggactctgcgtggaaaggcatcacccgggcgcagctgtacacccagcctcctggagagggtcagccgcccctcaaggagctggtgcggctggagatccaggctgcccacaaggtgggttgtcgcgggggccctgtgt

SEQ ID NO: 230711 - DNA, 2404 bp, Homo sapiens
gtgcctttaaggacctttgggtgattagagacaggcaggcagcttgccgcctggaaatgatcaagtggtcagcctgaccaaattcaggacagctgaagggtctgactgggcactgtgtgactggtgggttggaggctgtcgtgtggctgagcagagatggccagctgatgggtcacacagttggggatggtgtcaggaggtcaacctgaccagcagagacggctggcaggaaggtcacggaaggccagccaggcatggtgccactgggtgcaggcaggtggcggatctgagtggcctgacacattggatggtcgcttatttgggcagcgtgattgtcagaacagtgttgcaggggctgctgcagggagccatttggacatctgcagggcccccccggaggcctcggatggccacgtagggtctgcctatcaggagaacccccagatgatcacagtcccccagagacagccagacccccggggacccagcctctcacagtcagtcctcccacccgagtgaccccgatggcggcctcccggctggcggcgctggaaggagtggactccggtcccagggtgcccggggccagccccggcttcctatattccgagggccagcggctggcactggaggctctgttgagcaagggcgcggaggcgttccagacctgcgtgcagcgcgaggagctgtggcccttcctcagtgcggatgaggttcagggcttggcagcggcagctgaagactggacagtggccaagcaggagcccagcgggatggcagagggagccaccaccgccgatgtggacgcgggcagcctgagctactggcctgggcagtcggagcagccggcgcccgtcctgcggctgggctggccagtggactctgcgtggaaaggcatcacccgggcgcagctgtacacccagcctcctggagagggtcagccgcccctcaaggagctggtgcggctggagatccaggctgcccacaagctagtggccgtggtcatggacgtcttcactgacccagacctgcttttggacttggtggatgctgccacgcgccgctgggtacctgtctacctgctcctggaccgccagcagctgcctgccttcctggaactggcccagcagctgggggtgaacccctggaacacggagaacgtggatgtccgtgtcgtgcggggctgcagcttccagagccgctggcgacggcaggtgagcggcaccgtgcgggagaagtttgtgctgctggacggcgagagggtcatctcaggatcctacagcttcacgtggagtgacgcacgcctgcaccgaggcctggtgaccctgctgactggtgaaattgttgacgccttcagccttgagttccggacgctgtacgcggcctcctgcccgctcccacctgcgcccccccagaaaccctcggtcataggtggcctgcagcggggccgcagcctgcaccgcgtgtcccgccgccgctccgtggcccccgcgtcgcctccgccgcctgacggcccgctggcccaccgcctggccgcctgccgcgtctcccctgctaccccggggccggcactcagtgacattctaaggagtgtgcagcgcgcccggacccccagcggccccccggcccggcccagccgctccatgtgggacctaagccgcctgtcccagctgtctggctccagtgatggggacaacgagctcaagaaatcctggggctccaaggacactccagccaaggctctgatgaggcagcggggcactggaggaggcccctggggggaagtggactcccgatctccgtggggcggtgccctgcccctgccccccgcccaccgcctccgctatctgtccccagcccgaaggcggttcggtggggatgctacattcaaacttcaagagcccagaggcatcaggccgtcagactgggccccccgggcaggacttggggggcaaccctgaacaggagcccaagccaaatctgctggcccacccaaggagcagtgccggacaactgtcggctcagagccctctgcctcaatgccctgccttggacaaggcttctggcctcggcgtctgtcaagcagaagggatgtttgtcacttgttctgcaacttgggccgggagtggtggctcatgcctgtaatccctgcactttgggaggctaaggtgggagggttgcttaaggccaggagttggagaccagcctgggcaacatagtgagaccccatctctacaattaaaaaaacaaattagttgggtgtggtggcgcacgcctgtggtcccagctacgcaggaggctgaggtgggaggatccctcgagctcaggaggtggaggcagcagtgagccaagatcatgcccttgcactccagcctgggcaacacagtgagaggccatctcttta

SEQ ID NO: 230712 - DNA, 1328 bp, Homo sapiens
ataagtgtcttaacttgggctgtcttcactccacccctcccgagtaggtacttcagttgtgcccattctacagacagggaagctgaggctggagaggtcaggactcgcctgaggtcctacggtctcccctgggacctggctgaggatgggggccgggctgggccctcagggttggagactctgaccccctactccccgacccccagcttcacgtggagtgacgcacgcctgcaccgaggcctggtgaccctgctgactggtgaaattgttgacgccttcagccttgagttccggacgctgtacgcggcctcctgcccgctcccacctgcgcccccccagaaaccctcggtcataggtggcctgcagcggggccgcagcctgcaccgcgtgtcccgccgccgctccgtggcccccgcgtcgcctccgccgcctgacggcccgctggcccaccgcctggccgcctgccgcgtctcccctgctaccccggggccggcactcagtgacattctaaggagtgtgcagcgcgcccggacccccagcggccccccggcccggcccagccgctccatgtgggacctaagccgcctgtcccagctgtctggctccagtgatggggacaacgagctcaagaaatcctggggctccaaggacactccagccaaggctctgatgaggcagcggggcactggaggaggcccctggggggaagtggactcccgatctccgtggggcggtgccctgcccctgccccccgcccaccgcctccgctatctgtccccagcccgaaggcggttcggtggggatgctacattcaaacttcaagagcccagaggcatcaggccgtcagactgggccccccgggcaggacttggggggcaaccctgaacaggagcccaagccaaatctgctggcccacccaaggagcagtgccggacaactgtcggctcagagccctctgcctcaatgccctgccttggacaaggcttctggcctcggcgtctgtcaagcagaagggatgtttgtcacttgttctgcaacttgggccgggagtggtggctcatgcctgtaatccctgcactttgggaggctaaggtgggagggttgcttaaggccaggagttggagaccagcctgggcaacatagtgagaccccatctctacaattaaaaaaacaaattagttgggtgtggtggcgcacgcctgtggtcccagctacgcaggaggctgaggtgggaggatccctcgagctcaggaggtggaggcagcagtgagccaagatcatgcccttgcactccagcctgggcaacacagtgagaggccatctcttta

SEQ ID NO: 230713 - DNA, 2279 bp, Homo sapiens
gtgcctttaaggacctttgggtgattagagacaggcaggcagcttgccgcctggaaatgatcaagtggtcagcctgaccaaattcaggacagctgaagggtctgactgggcactgtgtgactggtgggttggaggctgtcgtgtggctgagcagagatggccagctgatgggtcacacagttggggatggtgtcaggaggtcaacctgaccagcagagacggctggcaggaaggtcacggaaggccagccaggcatggtgccactgggtgcaggcaggtggcggatctgagtggcctgacacattggatggtcgcttatttgggcagcgtgattgtcagaacagtgttgcaggggctgctgcagggagccatttggacatctgcagggcccccccggaggcctcggatggccacgtagggtctgcctatcaggagaacccccagatgatcacagtcccccagagacagccagacccccggggacccagcctctcacagtcagtcctcccacccgagtgaccccgatggcggcctcccggctggcggcgctggaaggagtggactccggtcccagggtgcccggggccagccccggcttcctatattccgagggccagcggctggcactggaggctctgttgagcaagggcgcggaggcgttccagacctgcgtgcagcgcgaggagctgtggcccttcctcagtgcggatgaggttcagggcttggcagcggcagctgaagactggacagtggccaagcaggagcccagcgggatggcagagggagccaccaccgccgatgtggacgcgggcagcctgagctactggcctgggcagtcggagcagccggcgcccgtcctgcggctgggctggccagtggactctgcgtggaaaggcatcacccgggcgcagctgtacacccagcctcctggagagggtcagccgcccctcaaggagctggtgcggctggagatccaggctgcccacaagctagtggccgtggtcatggacgtcttcactgacccagacctgcttttggacttggtggatgctgccacgcgccgctgggtacctgtctacctgctcctggaccgccagcagctgcctgccttcctggaactggcccagcagctgggggtgaacccctggaacacggagaacgtggatgtccgtgtcgtgcggggctgcagcttccagagccgctggcgacggcaggtgagcggcaccgtgcgggagaagtttgtgctgctggacggcgagagggtcatctcaggatcctacagcttcacgtggagtgacgcacgcctgcaccgaggcctggtgaccctgctgactggtgaaattgttgacgccttcagccttgagttccggacgctgtacgcggcctcctgcccgctcccacctgcgcccccccagaaaccctcggtcataggtggcctgcagcggggccgcagcctgcaccgcgtgtcccgccgccgctccgtggcccccgcgtcgcctccgccgcctgacggcccgctggcccaccgcctggccgcctgccgcgtctcccctgctaccccggggccggcactcagtgacattctaaggagtgtgcagcgcgcccggacccccagcggccccccggcccggcccagccgctccatgtgggacctaagccgcctgtcccagctgtctggctccagtgatggggacaacgagctcaagaaatcctggggctccaaggacactccagccaaggctctgatgaggcagcggggcactggaggaggcccctggggggaagtggactcccgatctccgtggggcggtgccctgcccctgccccccgcccaccgcctccgctatctgtccccagcccgaaggcggttcggtggggatgctacattcaaacttcaagaagccctctgcctcaatgccctgccttggacaaggcttctggcctcggcgtctgtcaagcagaagggatgtttgtcacttgttctgcaacttgggccgggagtggtggctcatgcctgtaatccctgcactttgggaggctaaggtgggagggttgcttaaggccaggagttggagaccagcctgggcaacatagtgagaccccatctctacaattaaaaaaacaaattagttgggtgtggtggcgcacgcctgtggtcccagctacgcaggaggctgaggtgggaggatccctcgagctcaggaggtggaggcagcagtgagccaagatcatgcccttgcactccagcctgggcaacacagtgagaggccatctcttta

SEQ ID NO: 230714 - DNA, 427 bp, Homo sapiens
atccctcatggataccatggaccttgggttaacaatagctttgtagaggtagactttttaaaaaactacattttatccaaatttgtaactgcaatccactttcttctgagaagcctagtggatctgctttctacccagtggttctacaaacactcagaccaccagtcgtttctgagtgtagtgaatctttgagtgtattgaggggaaagaatcagaaaaatggaatagaacaattacatgaaaggcaggagcaggctagcaatgagactcaggtgctagtaggactagagaaaaaggctggcggccggtgggacggggagaggggagtttagaagagggaaatctgaaattagagacatgggttgttgaaggaacttatttggtaattagcatatattaccttgcaagaatgatacaaaaaaaaaat

SEQ ID NO: 230715 - DNA, 253 bp, Homo sapiens
gcctctgcgagcctgtcgccacaccaggctgtccttgccctcggtggggcccgagcacatggtacacaggaaagacttgcccgggtccttgccctgttgcctcttgttaccttcccaccagggctctgcaggagcctgggcttgaaatctagctcttccttttgctaactgcgtttatgggagtcaatgaattagtttttcccaagcttcaaataagaatgttaacactgggggcaggacaaggcaggattta

SEQ ID NO: 230716 - DNA, 190 bp, Homo sapiens
ccttcatgaaaaatcagtcatagatgctggaatctccaaacctccaaggggcttacaacattgtgtgcagggaaacctctaattcacagccttattgagagcatgtgtcaatggcccatagcaggggcccattctggcttttgtacaaccccaaagacacacgtgggttttccatttttaaatggttgaa

SEQ ID NO: 230717 - DNA, 496 bp, Homo sapiens
catcagaagaaaaataaaaggtagtttataaaaaaaaatttaacgggaatcaggccaggactggaatcaggcagaggcagtgagaatgaatgattggaactgaaatactcttaagatcctgatcattgagatagctcttgataccagtatggtcgataagaccattagtttattatattttctagtactaagtggccttcactgcctactcgtccagtctcttatgattcctcctcatatccaaatagatgacctttctgaacatcatcctgctccttgataactctagcactcattgatcactctcacccttaaccctttctcttctatttgcaaggaagatgttaactcttaggctgttctctctccatgtcctccagatgccgttttcttttgcttaaatctttgcctcagtgatatctgttgttcgtaaatatttagtgcctcataaagattttcttcagccttaagtcactcataattcaccctcatcttt

SEQ ID NO: 230718 - DNA, 479 bp, Homo sapiens
acatgggattctagaggatcccgctgctgactatttgtgggtgtttcttatgacttggagaatttctagtgctttccatgcactagcttatttgttctttatgacagttctattttattctgattttaaagatgaaaaaacaaacacacacaagttaactgtacagatgaactggtggcacaatcagcggggcagagccagaatcaaacctcagcagctaggttggaacactcagtgactgaataaccttgggcaagttacttgacctttctgtgcctcagttttcttacccgttaagtagggatgatattaataactacctcgtaaagtttctgtgaagactaaaagagatatgtaacatgtttgaaatagtgcctcgcatgtagtaagtcctctgtgtattatagactaaagctggccttcatcttctacagataagttgaaaaatgcaacaaatagtcagcgaggaaaggtatata

SEQ ID NO: 230719 - DNA, 443 bp, Homo sapiens
acatgggattctagaggatcccgctgctgactatttgtgggtgtttcttatgacttggagaatttctagtgctttccatgcactagcttatttgttctttatgacagttctattttattctgattttaaagatgaaaaaacaaacacacacaagttaactgtacagatgaactggtggcacaatcagcggggcagagccagaatcaaacctcagcagctaggttggaacactcagtgactgaataaccttgggcaagttacttgacctttctgtgcctcagttttcttacccgttaagtagggatgatattaataactacctcgtaaagtttctgtgaagactaaaagagatacctccacctcttacatatatgatccacagatactaattcgacgtctcggtatctcatgctgctgactactttgtgtgagctaagaaagat

SEQ ID NO: 230720 - DNA, 640 bp, Homo sapiens
ccggccttattaaatatatgttcctcaatatcaaattgtactaaaaatcaggaaactaagctcctagtagagaactggtcaaagggaagatctttgtggagtcagcagtttcctctgtcctacaatttggcaaaataatctcataagcacaagaaggttaatatgcttgcattaaaaatgttaagttacttataatccaatttaaatgtaagttcaaataccttaacatgttcacattacttttttaattcacaaaaacgttcttatctatctttattttaagatgttttccacatacatgcttagtgaattttcttttaggagatgtaagagagtctacaaatctttattctactatttcccaaaatatacccaattactggcaaaaaatgttattattaaactgatgagaaaatataaaggtttattactggattaaataagtttttccatatgcttgaattttttatacacacagtatatactctattatatgtatacacagaatacaactctatcagtattgaacttagtttgtcattccataaaatggccatagatggccagatcaagtaatcctactcattttaccctgtattactgaaaataaaaatggggggggggcaaataaagactttaa

SEQ ID NO: 230721 - DNA, 682 bp, Homo sapiens
gcaacatcccagctagaagcctgctgaactagaaatattaattttccttttctcccaagaagatgatacgtgaatgctgtgctcttccttcatgatcctaacattctgctacaagggttttgctgacatgttgtgttggagaactactgaaaggttgtgaataggaactacacaacatactggctttgcctctacactataggagtgtgttaaatttcctctgtattcccagcgtcttacactgagcctggtccttactacatcttctattaaatgtttagtgaataaactctgtgatggattaaagatggctacatattctttactacataagcaggtgatgtaattggataaacagaatatggcagaagtgatgttgtggcaatttctgggcactggaagcttctactttctgtccttcagaacactttctctggaagccctgccatgtaagtctgaataccctgagactgttttgctggagaagtcagttaacagtcccaagtcccagaagagttcagccttccatacatctgtcaaggtgcagagggatgagtggagcctgcagactcttagcagaataccacttggaacagaacaatcacctggctgggccctgccagaattccctgacccacaaaatctgtgatataataaaattattgtttttttagccacttaa

SEQ ID NO: 230722 - DNA, 659 bp, Homo sapiens
agttcgagcttcccggctgctttgtttacctaagcaagcctgggcaatggcgggcgcccctcccccagcctcgctgccgccttgcagtttgatctcagactgctgtgctagcaatcagcgagattccgtgggcgtaggaccctccgagccaggtgtgggatatagtctcgtgctgcgccgttttttaagccggtctgaaaagcgcaatattcgggtgggagtgacccgattttccaggtgggaagtgggaagataaatcagatccctgctactccttaagcagaagtgaaattcattcatggttagaagccggtgtaagagagatggctgctgaagacacatagccgcacgtgtgaacatggcctcacagcttgcctctccataagaggtttatttgtcttctcatatttgttcaatgtggacaagaaccttctggcccctgctcctcttttgcatttggaatcctttgacttctgctttcttgaggagtgaggctcctgggcaagttgtcacccaactctgggcagtcatcccaggacctgagagtcactgcaaatccttgctcagaaccccatgcccatgtgttcatccttgcgtactttcccaggccccagaccaaattaaaacttggcagttgaatcacggttttcacaaaatca

SEQ ID NO: 230723 - DNA, 535 bp, Homo sapiens
cctgcttaatatccttcagtgacttcccactgcacctctcataacagccacactctgaacagagacctcccaagccccacgtgacttgcccaggcctcccccggggctcctctcttctcagggcctccagcactccttggcctcatgcctctggatacgctgttccttctcaccaaaactctctgttccctccactggagcccagctggctcctttcccgtcttttagtgtcaggttaaatgtgatgcactcagagttttctctaaaccccctgcatctaagcagggccccaactttgttcttcattactgcccttactcattttcctcagaacattcattaaaaattgtccttagatacctgtctacctaccttcattgacagaatctcccatcagactgtaactccaagagctgggaccacagtgtcttgttcactgctgtactcccagggcctagcatggtgcctgacctagagctgatgttcagatattggttggttggatgaatcagcaaataaactctttggagtattc

SEQ ID NO: 230724 - DNA, 475 bp, Homo sapiens
ctataggcagaggacatgctggagtccctgagttaggctccaaggtactgagggctatacatacctggttgttatggagtatcagtgggcaaaccaggacctgaattgaagcatcttaaaccacagaaaacagccagcatttcttacctcttttgaataactttatttaatcagatagattttgggaaaatcccagctctgccacttacgtagtattcgtcctataataagtgactcaaatactcacatataacaaagaggtaataataatgcttgcctgcctcattggatccactaggttctggctggcatagaacttatacaaaataaatgatcaatatatgctagtattcatttttaacacagagataatatttcaccagaaaatcaaactattgtcatgcctcatttttgtttaaattttagaagggttttgtgattcatgaaaggtaataaaattataataaaggttttg

SEQ ID NO: 230725 - DNA, 443 bp, Homo sapiens
tcagtccacgagaagaaactcctgtggagagaaggctgtacggtagaagctcctgcaaggccaggctgtgtgggcagtgctgcccatctactgtgtcctcagtcactgcttatttgcgtgaaataagaaatattaccagtggttttctccttttagataaagattgagtcaagcacagagctggaaaacacagcaaattaaaattttaatgcaattataactcacagactctctcttttgcctcatctttcttcatatgctgaaattctgagtgtgatcatttaatatttgcccaatttctggaacttgtaaaagaagtcacaaggatgcttattacattagatagtgtttgcatataatgctgctgatacatggttctgttggctcatattaagtgtcatccgtaccaagtgaaagagaaaataaaattatctaacttccta

SEQ ID NO: 230726 - DNA, 388 bp, Homo sapiens
cttttcttgtagctcactgcccacagactttctacagagtcaccaatctgtcagtaacaacagagagtccagcaataatcggtgactggtgtgcatagcggaggttgcggcattactttgcacaactagctctttgtttcatgaaggaagtttttattttttcaccgattattgccagtccgcaggatggcatgaaaagggtccatagcagtagcaacaatagcattataatatattacagggtaaatgggcatgaagactatatatagctaaaagagatattgtttatatattgttttaagtaatatttgcacctttttctttaaattaaatgctagcgtgttcactgtcgtgtcgcatgtgcaccagaaacacaagtttaactgag

SEQ ID NO: 230727 - DNA, 460 bp, Homo sapiens
gaatggactaatttaaataatttgttctgcttattctgtaggggttgtttaaaccagtgttatcagaattttgcatttctaagaatcacctgggaagctatgctgaaaatggtgatcctgggccccaaccacagcaaatatgatttgatagttctggggtggggcccaggagtctgcttctttcatatgaattaccctaagtgtttctgatgctgatggcgcatgttctgtgttttgaaaaaacactgatagatgtactggagcttggcttgctagtttctttttctatttttaatgacttgatcatgtaacttttaaatgtacctgtggttttgtattctgttgtaatctgtatagcttcatgatttataaaataaaagattctgttctctttaaaatattagatctgagctagctggatagtttttaaaagttctaagtcattgtttacaaaactgag

SEQ ID NO: 230728 - DNA, 493 bp, Homo sapiens
cagaagtgttggtgtcaccaggacacagcctcagagcttcattctaaaaggaaatgtctcacatggatcttatgcagagaagcctgagcgacttgcactttcaacaatggttttgtcatagatgtaaaggtctgtttccatggttacccaaattccaggcactggccccaggcccaccacaacgcatccctcaaagtctctttggcagaggaaaagcatttctccttgctgcggcaagtcagagccagaatctcgggttctcctgctccaaagcccccactacaccctcattcgcgtgtgattcatgcgtttaggtggttctgctcagcgtcgttttttgagttggggggcggtgagtaagcacaatataagtttccttcatttctcttctccttgtttgagctaaggaattactttcttgtaccaaacattacacccttggaaaacactccagatggttctcattaaaattccaattcctttttttgcaatt

SEQ ID NO: 230729 - DNA, 420 bp, Homo sapiens
ggattcacagctgaattctatcagaaatttaaaggagaattggtaccaatcttactgacactactccacaaggtagagaaagaggaaaatcctccctaaatcattctaagaagccattatcaccccaacaccaaaaacaggacaggatataaccaccacaacaacaaaaactgtagaccaatatacatgataaacatagatgcaaagtcttcaacaaaatactagctaactgaatccaacagcatatcaaaaggtaattcaccatggtcaaatgggttttataccagggatgcaggatggtttaacatatgcaagtcaataaatgtgatacaccatgtaagtagaattagaaacataaatcacatgattatctcaatagatgcagagaaagtatttgacttgcaacatcactttatgatt

SEQ ID NO: 230730 - DNA, 367 bp, Homo sapiens
ggattcacagctgaattctatcagaaatttaaaggagaattggtaccaatcttactgacactactccacaaggtagagaaagaggaaaatcctccctaaatcattctaagaagccattatcaccccaacaccaaaaacaggacaggatataaccaccacaacaacaaaaactgtagaccaatatacatgataaacatagatgcaaagtcttcaacaaaatactagctaactgaatccaacagcatatcaaaagatatgcaagtcaataaatgtgatacaccatgtaagtagaattagaaacataaatcacatgattatctcaatagatgcagagaaagtatttgacttgcaacatcactttatgatt

SEQ ID NO: 230731 - DNA, 511 bp, Homo sapiens
ccaacgcaaaagaaaacctggtcacttaaacatttcaggagtgtctatgtgatgaaaacagaccaattagctagaagagccacatctattcctgatactaagattaaataacaagttctccactgcttcctcacaaaggagacctagtgagttccctggttattatccttaacatttgaatggcttcataatcatgaaagttagataaagaacagaagctttaaaaaaaaaaaaaagcttttacaggcatgagccaccatgcccagccagaatcctcttaatgtgtgaaaatcagtggaaagagtattccagacagaagaaacaactagcccaaagaccctagaagaaaatgaaatggttattttgagaaacaatgctagtgtggctggagtatagtgaagggtaagaaaaatggtataagataaaattagagaggcaagtgaggtcagattgcaattggtcctctgtatccatggattttgcatcagtggattcaaccaatcgtggatca

SEQ ID NO: 230732 - DNA, 543 bp, Homo sapiens
ccaacgcaaaagaaaacctggtcacttaaacatttcaggagtgtctatgtgatgaaaacagaccaattagctagaagagccacatctattcctgatactaagattaaataacaagttctccactgcttcctcacaaaggagacctagtgagttccctggttattatccttaacatttgaatggcttcataatcatgaaagttagataaagaacagaagctttaaaaaaaaaaaaaagcttttgtaggctgggtgcaatggctcatgcctgtaatcccagcactttgggagaccgaggttggagggtcactttagcccaggagttcgagaccagcccgagcaatatagggagaccccatctctattaaaaataataataataaatgccaggcctggtggcatgcacctgtggccccagccactccagtggccgaggcaggaggatcacttgaacccaggaggtcaaggctgcagtgaaccgtgatcactgaaacgtgatcaccactgcactccagcctgggtgtcaaagcaagaccctgtctca

SEQ ID NO: 230733 - DNA, 562 bp, Homo sapiens
aaaaactccaactcacagccagcccacaggaagggtcccagccagctaagcccagagccaaagcagcaagaacaaacaacacagtaatccccactgaccaagcaccactgcatgcctgacactgtgcacatgaccaaacctgattccaatcctgtcacaggtcaggctacagaggcaaagtggggctgacccatctcctgaccaactctatgtcattgccttaccacgagccctgagaacagtctaaacaggccctgatggggccaagggaagaagagcaccttgacttcccctaaggacaggccctcaaatcccaggacagaaaaactcaatgctgtacagtccaggtggcagcagggctagaagtcaaagcagagatggggatcccagtgctcctcctgctagtctggttacctggaataaatgtgcctcagctttctaatgtatctcattaggcttattctaaggactaaaagaagaacaggccttgagcagggcttggcctacagtaaacaccatggaactgtttttaacgttaaaggccaactcttcccaaactaac

SEQ ID NO: 230734 - DNA, 2784 bp, Homo sapiens
gttctgtgctttgaaagcttttatctatttcagatcataattttttaatggcagccctttctaggatgctttcggcagaaaaatgtactggcaaaatcgtctcctgaaaagatttacgatgagacacataaagtacattgagtagtatagttattcttaaactagtcataagagtattaactagcaataaataataaaaaataaaccagaggtaggagaaggtatggtgatttcaatgtgagttgcttttggatttatgatttcttggtttctgtgcctaaggaggcatggatggtattattttcttttcttttttttttgagacggagtctcgctgtgtcgcccaggctggagtgcagtggcgccatcttggctcactgcaacctctgcctcccggattcaagccgatttcttctgcctcagcctcccgagtagctgggactacaggtgcctgccaccacacccggctaattttttgtatttttagtagagacggggtttcaccgtgttagccaggatggtctcaatctccttacctcgtgatccgcccgcctcggcctcccaaagtgctgggattacaggcatgagccactatgcccggcctggatggtattattctttttcttcagttgctgctgaaatctaaaaaaaccaggtttttcaagtccttatgtgttcgtgtgtgaaactttgcttgtacatacaaaatttttacattgtttaactttactgcatgcagtttagtttgccttttccttttaatataacttaaaggtattctcttacgaagtggagaactgttctgtggactgatcagcagtgggtttgagcctgtaaatcgccactgcactccagcctgggtaacataatgaggctttgttgctttaaaaaaaaaaaaagtggaggattacaggcatgagccaccgcacccggccacctggggaatcttctaatagtcttagggcagcttagctggcctggacccacctcccttgccacctgccccctgcaccgactgatcatgttcagtcacccaggagatgatggagaggctgatcaggcctcctggaaagggaggaagagggccctagttggagagatccatcagcagaagccagggaggagatacagacccttgctccctgacgctcctcagggctagcatggggcaggagtttagctgggaggaggcggaggcagctggcgagatagatgtggcggagctccaggagtggtacaagaagtttgtgatggagtgccccagcggcacactctttatgcatgagtttaagcgcttcttcaaggtcacagacgatgaggaggcctcccagtacgtagagggcatgttccgagccttcgacaagaatggggtaaggcaccctgaagggaaggaccagtggccagtccacctggcgccttcctccacaagtgtcctcagggagagctcccagttccccactcctcggctctttctctgctcttctttccactccgtctctctttaccttttctgtctcactcaccaaacccttctgtctcttctcttccttttgtccctttccatcttctctgtctctccttccctccctccatctcttagctgtcggctgatgctccctgtgtcctcttcttgagagctgaagggcgactggcagacagtccaggtcctctctttgtgtatttttgaccaagactctgcagcccaatgaccgggttttcgcatctgccagagcccctgtcactctaaacactaggagcaaaagagatgttctaaatgagacaaggtatcttagcatgggctatgagctccctcttgttggggttcttctgagactggtcagatcctccctgtcaagaatgctggaagaggctcctgcatgtattgggagactgggcgaatgactgcaaaagcccctttcagctcttcaagtcctgaaaggtttcattaaatcattcagactagagtttctctaagcccacaatgtcactagcagctaagaagataacacatcttgtaaatgcaccaggggattgaattttaaatttcaattcagttaaaaaccccttgattatttaaggttatccagttcagtgccctggcaatcctcaaatacctcaaatacctcaaatgccctggtatttgcctcaaataccaatttaatccgaagaaagtgtcagttctccattcctcagtgcgtggagaacttagctttctaagctgaatcactgggaatgccacttcaggtctcatcctgtcgctggtaccagtcagtgcacgtccccacagtgcctgtcccgggacaggagggtgaggtcagcaccttcaattcaacagaacctccttagagatgaaccccatcgaccaccccacagggcacagagccagtttcggacttctcagcgctccgcctctcttaggtctcctctgagtcagcagcaaccctgggtgggaggggcagacttttgttattccaaattaaatgatgagaaagctgggcaaaagggaatgaatcgatttgcccaaggtcttaagtgctcctgcctagaaggcaggttttttaaagagagaagatgactttttaaaataattgatgatttttttaaaatgtaagaaaagtaaacaaatatatcaggtcataaataataagactcatttaagtccatcaatcttccccagattcatctaaaaatcaatacgatcatgattcaagatccaaagggctgattaagcccctaggcatatagttgtactccagtctgggcaacacagtgagactccatctc

SEQ ID NO: 230735 - DNA, 427 bp, Homo sapiens
caatccgtgaatctcaaggatttcaaatagtgtgagctgtttgtattttaacagcaatggtaacaataaaaatatcattttaaaatccagtgcactgcttgttcagtacatactatatatattcatcatttctttgccttgtagctggctactcagaaactaaaaagttgtaggttgattttctggttttgttgtttgttgttgctgtttgtttgtttcatttaatctctctttgaaacattttccagacttaaaaagtaaaatttctggagttttaaaagttaagactgaagttattgattattctctgaaagggtaactgacaaactagttaataattatacagatagcaagttttaccgtttcatcttgtgtacacgaccagattaacaatggcagggaaagcacacacaacttggcagggaca

SEQ ID NO: 230736 - DNA, 480 bp, Homo sapiens
tatacttctgtaatactgtgaaatatatatatttggccttcctcctcctcttgacttacagcttccaatacccttggaaactctggagtggtaagtgtcttctgtatgctaatgggataaccagagacagcttcaggatggggactggtctctagtaggaccaaggcatgactaaaggatcaggactttcaaccacccactgttacgggacaggggctgaaggttgagctgatcatcaatggccactgatgtaatcaatcatgcctacacaatgaagcttccataaaaaccacaaaagacagagtttagaagagcttccagatagcgcaacactatctgaaggttcctggaggggggtagatgcaccaatgccccttcctgcatgccttgccctatgcatctctccttcttccatctggctgttcatctgtatcctttgtaataccctttataataaactggtaaaagttaagtgtttca

SEQ ID NO: 230737 - DNA, 186 bp, Homo sapiens
ccactttccaaaatgaactttattttttaacctttcacatggcagaacttatacagttaattagcttgtgagcaacacagttaaaaactgtttttccaaacttaattttgtatttcaggtgcaaagctatttgaaaatttaagacagagtagcatggtttgatattagtgtttatggcgcttttta

SEQ ID NO: 230738 - DNA, 284 bp, Homo sapiens
ccgtgcctggccgccattctgtctcttaatgggcgtgcctaggaagttgtttctccctggcacccgcattcggttaacactttagtggaacaggtggggaccattaggaaatagtctctccctggcatcagctcccaatttatcacttttaagaggcaatgtgataattgtcaaaccatcactccaagttcctagtgggtgggggagagccctctcctgccccacccatgcctgtctaactacctgtagcgagaggagttcatgactttaaacatctagtaaag

SEQ ID NO: 230739 - DNA, 349 bp, Homo sapiens
cttgactgcctagcagtatgtgacgtgagagaaatacttgactttgctgctatgtcaacatgcagaacgtgagatgtttttgcttcctaccgtccacctaccagattgaccatccctctcatcatggaaaaacatgcttaattttcccccaataagcttaggctaggatagccaacttggccccctcttaggtgcaaagactccagaactttggaaactaccctatttattagccccaaactcttactaccccttctcatctttatcctcacattaaaataacttacgttcataatttatgtgttttaatggaattgaattcaacaggcattccacaggctttttctgg

SEQ ID NO: 230740 - DNA, 472 bp, Homo sapiens
taccgcactgtgcacgtacaccctctgggtatcttccaggtgcctttcccagctgagctaagggcaattgaaccctcccaactattcagaccaaaatacttggtgccatacttgccttccctttcctttcacatcccacatcgaatcagtcggaaaattctgttgcatccactctccaaatatgtgccaatccaaatctcttctcaccccttcctgctgctgccactataatccgagccaccattctctactagattacgacaaaacctctgaacaagtctccctgtttccactcttgtccttctacaatccatcctcatccaggaccatggggatccttttaaagtataaattagatcacagcattcctccgctcaaggggtaaaagccaaactccctagagggacccacaaagcatatcacccctctggcctcgttattacttctctgtcctcatctcctgctgcttctc

SEQ ID NO: 230741 - DNA, 510 bp, Homo sapiens
attcccttagcctttcccatagtgtgtttcaaatcagaagggaaaggaattggttttctggaatgtgtaaaagatgctgaaaccatattattgtttagagcctgctttggacataaacccagtaaaatttccgtataaaatcttggcatttcctaaaagatattaagtctccattggatgtcttagatctctccagtcttgttaatttgagctcatcaatgcactagtaacccttgcctaacatctacttgcttctgtcatgccaaaagatgctgggagaagaggggtgacaatatcctacaaagtgtcctcagggccaagggtcctcaaccacacagtgcattcccagaataaacctaatagggtaatgtattatctttttgagatgtactggattctattaatgtttggtattattttatttagaaacttttaacttataagtgccattcatgtgtagtttctattatctcgtactacctgtactaaagttattctagatgcatggga

SEQ ID NO: 230742 - DNA, 385 bp, Homo sapiens
tggggaatagtgggctggttctggtcctgacagtccctttggtacattcatgtgtggactgagaggaggctccagtgttccagggagtgtggggctaggctggggcgtgtgatacacactgtagagcacctctgtggggtgctaagagccctgaagagagtctcctgtgctagagactgtgtggcttgctccattcctgcccgagggcagagtcttaaattctgcatcctggcctagaacttttgcagacacactggagactcatctgaggttttagaactgaaggtaaagagatgcaatcttacagaatcacagagcattagaatgaaatgagagggatcctacagatgatctaatcaacaccattattctaaggatttgtaaa

SEQ ID NO: 230743 - DNA, 539 bp, Homo sapiens
ccacattattgcatacaatttttaaaaagatacaatttttcttgaaaaatcctcgctttaatctttattttacccatttctttattcagttagtgtttattgagttctgtttcatgccataatgctgtaccacattctgagattagaacagagtacccaccttcatgaaatttcacagttgattaggaacacagacttgccgacatgctgtaagaaaataggggttccaatggaagtgcacattctaaagcagttggcctgcaggggaaggagattgtgtatgaaataaaatgatgctgtcactgtataatttgatagttatttaaaaactgctccctaatggcatggtttggtgaggctacttaagcgtcagtggcactatactggaactgggtaactccctgactccagactcgcatcaatttggagtcactctaacataaaaaatcatcaggttttgaaaatattggatctttgtagcctcacgactaatctctaattccatgaattaaaacataaggctcacctaaaaaaaaaaa

SEQ ID NO: 230744 - DNA, 646 bp, Homo sapiens
aggtaacaaagtagaatatatacattattcagtttccggtagcacaaatgtgtgctttcttctacatggcattttttaatgaaatatgttgagggtatagaagtaatagagaaggaaatccttgaagtagtatgctattgccttgaaaagtaaggttttttcattgtattctcaacttttacagatgttttaaaatgcccaaggtatttcatttattcgataatgaatactacacatgaagaaagtctgcatgtttgcttcttcgaggattttctcccaaacaagtactatcttgtacaccaactgcaaatatacattgcgaagctctacataaagagtattgtctgggccaggcatggtggctcacacctgtaatcccagcactttgggaggctgaggcggggcagatcacctgaggtcaggagtttgagaccagcctgaccaacatggagaaaccctgtctctactaaaaatacaaaattagccatgcatggtggcgaatgcctgtaattccaccaacttgggaggctaaggcaggagaatagcttgaacccaggaggcagaggttgcggtgagctgagattgtgccattgcactccagcctgggcaaaaagagtgaaacgctgtctcaaaaaaaaaaaaaaaa

SEQ ID NO: 230745 - DNA, 605 bp, Homo sapiens
tcccgagccttttgatttcctgttgttctgtgacttacttagaagggaagtgggcaggagagttctctgcagaggatatggagaaatacaggtatttcaagtgctccttgtcctctcctcagtcaccacacatgcacagatagcactcgggcgttctcacagagttggagcagggctcccctcaatgtggaaaagggttttggttgttaggtggaaagagagatccttagaagaaaaaggacagatgaatacctaaaaccagaaagaaggggaagttgacctctgcgtaggtttctcatgttgttgggaacagaagaatgcaggtcaattatctgagccctgtggctaaactcaagtcactttacttcatgtctgttagcagttttaaaacagcatttgtgtactatcttccaaatagaaaggccccaatataaaatgacatgtgaatatgctgtcttccttgaaactttttctggaaaatattttatgaactaagataagttctgtcataagagaccagaacttggtactcccatttttggatcgatatgtttatcaatgaggtaattttgtgtgcccctgcaagactaatgagccagaaagct

SEQ ID NO: 230746 - DNA, 412 bp, Homo sapiens
ctcatgctcacttgaggtgttctttccttaccagtttagcattcctagaagaagttcatttagcagtgaaactctgccattttgcctcctaatgcacatgcttgagtccacttgcctaactcctgagatcttatcaggaagcttatgatcaggttttttctacctattggaagcctacctttccctagtgccggctgtgaccaattattattttacagagaccgttaacaatcacctgatcatcacctgatgatcttctgagattcccggtgcggggtgcctctcctgccctgttcatgcctgactacctacctactgtaacatacctagtagtgggattgttggatcatatgttagtactattttagctttttgggtaacctctatactgttttctatatgatgtactaac

SEQ ID NO: 230747 - DNA, 282 bp, Homo sapiens
aaccaacatggtcttaacttgaacgctctaaaaggaataaaatggtttcttttattggtttatcaattcatagcctaaaagaggaagttagcttgtcgcctgggcacctgtgtaagcccttgctgctccatgtggaagattcatgctttagaacacagcctttctttctttctgtagattcggatattatagggagacagaatctagggctgtggctggtgacctacttccttcttatggtgaagaaggtcagggagagagagaaaatgaggaagggagaag

SEQ ID NO: 230748 - DNA, 460 bp, Homo sapiens
agtcctaaagtaaatcattggaacacatgtagccagtttgttgtttttaatatgccaggtatcaaaatataactgaagaaccaatgctaaactgacttaattttaaaatgttgtatggggcatgaaaatgattgctctggctgggcgtggtggtttacgcctgtaatcccagcactttgggaggccgagccgaggaaggcggatcatttgaggtgaagagttcgagaacagcctgggcaacatggtgaaaccccgtctttactaaaaatacaaaacatagccgggtgtagtggcacgcgcctgcaatcccagctattcgggaggctgaggcacgagaatatgaacctgggaggttcacattgaatgaaccagcttgaacctgggaggcggagggtgcagtgagccgagactgcactactgtactgcagcctgggtgacagagctagacctgtcttaaaaa

SEQ ID NO: 230749 - DNA, 349 bp, Homo sapiens
attctgtgtgcactcagtggtatccttgaagaggttactattcctggcatgaacattacaattgaaatgtgctcttctgtactcctcttcatttgtgtgtaaaactcacaaaagtgggtctttcatcaaatttaaagaaataaaaatattataaagacagagaaccagctgggtagcctgtctcatgttgagggtaactctggactgagtgggtccacttgttctggtttgaacacaatctctgacagacagctttggtagagagagatttatgttaggaacaggcatgaggcagatcttctgcatcatatttccatggctgatctgttgcccaagtggtgtatttggc

SEQ ID NO: 230750 - DNA, 483 bp, Homo sapiens
gtcaggcattctggctgcaggaactcgcttggcagctgtcagagggcggtaacctcaggggagcttggcgaccgaccctccctccaactcccgggggctgtttctctgcacccttggggatctgatgtgggctccctattccaccccacccagtctggtgacaaaggctgcgtatttacagaatctttcatcctaagagctcaaagagctccatcaccaggtgacaaccgcagttaaactcattttatggaagaaggctactctgaggagtgcaggcgtgggatccaggttacaaagtgggtcagctagggtgccaggaacacaacgtgggtccctgactgagggggacagtcttaggcatgcagagatttggccagactcttatgggtgactgtgccttagtcacctctgtcccccacacctattacagtacctggctcctaataaatgctcaataaacgttcatcgagcgacaaaaaaaaa

SEQ ID NO: 230751 - DNA, 620 bp, Homo sapiens
aatagtccctgtgtgggtctacctttatttaaatgatttttctgtgttctgaatattgtggagtcttctatttggaattattgttagaattctgaagtcccactttgggggaaaaaattattcattccagagccatatacaacctgtttctctttctgtgatttcttcccttcctacttcactttcatgagttcatcctatgtcatctttctgtccctcccaatgtcaaaggccctgaggaaagggcctggtgaaatggactctggagttagactgaggcccaacagcctaacaagccttaagtaaatgtgtgatctttctgcctgtttcatccaggtatcactaacttagtccatgttccagcgatgacctgttacttctacataacagaaaaataaccccaacttaagtacaaacaaaattcctagagcctcagggctagaactggccctcagaatatttttccttgtctttatttctctttgactgttggcttttcctctcctactacaggcagattcttccattgagtcaggaataatgaccaacaggatccctatgctcatatcaccttagcagtcattaaggaaagaaggattaggactgagtttctttctttc

SEQ ID NO: 230752 - DNA, 382 bp, Homo sapiens
tgcatcccaaaacattccctttgcatgcccccatccccccaccgtccatggaaaaattgtcttccatgaaaccagaaccggtcactggtgccaaaaaggttggggaccactgcttggtgggatggagctgtgtagtgtaagatttcatcatgctgctcagaatagcatgcaacttaaaaacttgtgaattgcttattttctggagttgttcatttaattttttcagattgcagttgactgtgcgtaattgaaaccatgaaaagtgaaaccttggataaggatttctgtaatcagttacatccctgccctcataacgcttaaaatttatcaaggactgtaaactcaatgtttggcacataataggtactcaatctaagcaaat

SEQ ID NO: 230753 - DNA, 557 bp, Homo sapiens
gaacatgtcttagttactgagatgtcatggatctgtgcacttgccagtctgttgatgtggttgtgctatgaggaccaggactccctcccagcagtgttacaggtacatcctaccacctctgcattcatccactggcaatgtacatagagactgaacccacgggccctgaaactttaagtgtgtgagtataggtggaagccagaagatgagaacattttagccaccctctaaacaactcaccctctacttgccatgtggcctccacacaggtggagacaacaccctggtgggtcttgattagtcataagacgtggtataagcagtgtgttactgataagaggcacactactgagttcataaatgatctctttttgcaaaattaattggatcaaattcaaggttatccctataataatgtaaatctcacttgcatttcagtgttttcctgagcagaagaggaaagggtgggaaatgagcataaacctgaagtgtaagaaatttatgttgaagcccatagtgaactctactgctgaaccattaataaatgtgatcacaca

SEQ ID NO: 230754 - DNA, 360 bp, Homo sapiens
gtttgttcttaattctatttttctctttgtggcattatcacctaccatgcctccgaaatttgagactttgaatccctgcccccatcccccattccctggcatcatccatcactatgtcctgtctgtttttcctcttggatatattcctctttcctggtcttctaaccatttccctttctccagacttgaacctccagaactgcgatgtccagtgtggtagccactaaccacgtgactgtttacattaaaattgactaaaattaaaaagtcattgagaccagtctggacaacatagtgagtcctctgtctctataaaatgggaggatcgcttacacccaggaggttgaggctgcaatgagc

SEQ ID NO: 230755 - DNA, 354 bp, Homo sapiens
atgacatggaagttccatacagcccagagtaatttatcattagagactagctttacatttttaatttaatttctgataaattttatttaatttctgataaagtggggacagatacatgagttttaaaaagctacagacagattattagggcagtaaaactattctgtctgctactgtaatggtggacacatgatattatgcatttgtccaaacctgtagaactgtacagtctgaagagtgaacccttagcttgtgaagactggtattaataaatgaataaataaatatatatattggtttatcagttgtaataaatgtgccacactaaggtaagatgttagtaatgggaaatgg

SEQ ID NO: 230756 - DNA, 532 bp, Homo sapiens
acatatccttcatggatctagacacaaaatcctctttatttttttcaaaaatccttttaaaatttagcaaaatgaatacagtagtaaatacaaacaataatgcaccatgaccaagttagtttcatcccaggaatacaaggttggcttaatattttaaaatcaatcaatataatttactatactaacaggctataagacaaaacccatatcaccatctcaatagatgcagaaaaagcatttgacaaaatttaatacctattcatgaaaggaaaataaacctctcagccaattaggaatagaagggaattcctgaaactgataaagggcatccataggccaggagcagtagctcatgcctataatcccagaccttgggaggacaagatgggcggattgcttgagcccaggagttcaagaccagtgtgggcaacatagcaagacccttctctacaaaaaataaaataatttttaaagggcatacacaaaacacctacagctaatatacttaatgatgaaatcagaaagttttgcc

SEQ ID NO: 230757 - DNA, 561 bp, Homo sapiens
ctttcagagcaggagatgaggaagacagacagtaaatcacaaacatagcaaacaagtaaattacatagtttgctaaaaggtactggggctacagatgaaagaagggcagagccgggggattcagtgttgaatgaggaaactcaggtagagaacaccaagtcagcagccgacatctccagctggctagtaacagagccccattctaacttgggcaatctggccacgttcctgctcttcacctggactctgccttctctttcagttctgacgtgcgtcaaaccgtgcagcatgttcaaattcattcaaatccatcagtggcacagaagaacacacaaaatctggcaatacttccttgaactaaactcagtgtccgcccccccaacccccgattgatgccagacatttgccaccctggggacttgatctgagtgaccttgggttcataggagatgctgggcccttggaattgattgtctaccctgtaggaatggaggccacatctctgttctgcctggagagcttgtcgacgcggccgcgaatttagtagtagtaggcggccgc

SEQ ID NO: 230758 - DNA, 604 bp, Homo sapiens
tggaacccaggaggcggaggttgcagtgagctgagaacatgccattgttactccagcctggacaacagagtgagactccatctcaaaagaaaaaaagaaagaaataaacttgctttacaaattgtgataaactttaggaactaatataatatgtgccctatagtaaagtaagccaacgtctagaggtaacattgttgtgacataacaatgcaataagtatgcattctactgctgctatttattattcctcatttcccaatcttgcttttgtcctttttttatacgaatacatcattttgcctaattacataaataaatatcttcatttgtaaaattggagatctaataaaatcccacagatctcttccaggtctaacatcctgtggtttcttagtcttttcctcagatcactcagtatctcttcttcacagcaagatacccagcttgaattcagagaatctttaagtggtacaggatactatgcaaatgcaaaaaagtcactgtttgacagaggagaaatgaaatgctaataataagtgggcataattcatgacaaccattatgattctaatgagcgaatcatgatggcaaaaccaacaactta

SEQ ID NO: 230759 - DNA, 318 bp, Homo sapiens
ttctccagggatgagccaagcagctctagttcctcttacgtttttatcatgcatttaaaagagcgtcctcaaaaatcgtaatttcagttgaagcgggagaaagctcacggaatttggaagctgaagccttcaatccaaatccctcctctgccttttagtagctgtgtgcatggctctaaaggaatacctggggctgcgtaatttataaagaaaagaggttgattttggctcacggttctaaagtctgtacaggaagtgtggtgctggcatctgcttccagtgagggcctcaggaagcttccaattatggcgaaaggtg

SEQ ID NO: 230760 - DNA, 466 bp, Homo sapiens
ggctgagtggggaggatcacttgagtccaggaggtcaagctgcagtgtgccatgaccacatcactgcactccagcctgggcaatagagagagaccctcttttaaaaaaaaaaaaaaaggcttatagagtcagttttcatgttctcattaaatgtaagccactccaccaaaatgatctctgagagttgaggcttaaggctttataaggctgccttcctaaggaatgaatatcaaggaatgctccaggcggccaggacctcaccctccctgcgcctcctgcgaccacgctagaagcacgggatggtccctcgggttccctcatcaggccggccacctcccttttccactcagataattccttaattcttccaaccccgactcgagcatcacctcctcaatggcgcctcctgggctccttgggtggttatttgggtactatctggcttttgttttttgttttttgtttt

SEQ ID NO: 230761 - DNA, 406 bp, Homo sapiens
ggcggtttgtgctgagagctatgtaagcgcagcctggacgctggagggtagggtggttgctacctttaatcagtactatggatttctaaatgcatttaactgtggttaataaaagcgtgtatgggccgggcatggtggctcacacctgtaatcccagcactttgggaagctaagacaggtaggtcacctgaggttgggagtttgagaccagcctgaccaacatggagaaaccccgtccttactaaaaatataaaattagctgggcatggtggcgcatgcctgtaatcccaactactagggaggctgaagcaggagaatcgcttgaacccgggaggcggaggttgggatgagttgagatcgtgccattgcactccagcctgggcaacaagagtgaaactccatctca

SEQ ID NO: 230762 - DNA, 614 bp, Homo sapiens
tgagctaggaagcttttaaaaattacaagtaatcattcagacttagttaatggaactattcctcagagacagccagaaactcagcagggaaggagacttggtaaagagcagacatcctgtattctgtggaatcggtgctgaaaacactatttgatcattatggggaaagatgactcctaaaagaacagttggggacatctgatttggaaagcatttaagtcccaaaaggaagaattacatgaaccctggccattcaccctgcaagacagaaggggtaactcaatcactattgtatagggagtgtcaagctgttcttgactaccatggacaatctcatagaaggaaatagaaacagttgcaagtggacacaagaaacaactaagtatcactatgatgttaactgtttaagaaaggttgaaaattactggttctgaatggtaaaattcatctgaagtacaaaggttgagatccttgtgtccttccaaagttatttttctacagatcttaagcacaagttaaagttttatttacttcaggcaactacaagcatctattaagtttttttccctgtgccatgatcaaatattaaataaatccatacagtgaaacacaaa

SEQ ID NO: 230763 - DNA, 548 bp, Homo sapiens
cttacaactaaaaactcttctaccatttccactctatttactctgctgtagcagggagacctatttgctgtcccttaaacaaagcagatgtctttctcctctggtctttgcatttgctggtcctattactgggagtgttctttttcccatcctcttgatgacttccctcatctccttcaagtcctcgatggaatgttcttacacagtgaggacttccctggcaaccatatttaaaacagaatcttcagtcccatgtccagcactctttatgcaccgtccctgttttataatagtttgagaaaatgagtaagtgttttggggacacagcacttactatcatctgacatcatgaggcataaaactgtatttcttacttattttatgtatttgtttgccttccatcataactaagcatttagtagagattgtctattttattcacaatggtattcctaattccttaaaagtgtttggtataaaacaaacatactttgagcatttgttgaataaaggaattatatgtaaaattatggtcaggcattattcga

SEQ ID NO: 230764 - DNA, 426 bp, Homo sapiens
aagactagagctcaaggtatcactctattaataactttattaataagaatctgctctccgaagaacaggctttctcataaaagttagatttgagcacatggctggaggcctaactaaagctcctgattgctctactcaacctgaatctgacctaccattggtgccagtgtgctgaggggagagagggagggccaggtaccttgcctcagcttataaatttctctggatggtgtagaagctggggctaccagagaatagctggcttaccccaaaggacagcttacctaggtgtgaggtaggaggtgcaaatgatgaggaggacaaggggtctgacttggaggcttgataacctccctccatagtaaaatgtggcccaagtagtgctttgaactctgacttacctgataactattcttcctacctgtg

SEQ ID NO: 230765 - DNA, 552 bp, Homo sapiens
tgcaagttattttaaattcattcaaattgtaaagctaagtatatgctgcttagcattcttagggggtggagttttataaagtcacacaaattgcccaaaataaatggagactcattgattttctgttatttaaaatattcccagttaatcaatgcatatgcttactattttgtatattgagtgtacttagaaaaagaatgcatacttgtatctgttgtttgcaaaggagataattgtatgcatgctcagtgcttggatttgctaaatagaagatgcatgcttgtgagccaaaactcatactctgttgtcatggtttctcttaaggtatagcagcatttagtttttgagtcttgtggcttcatttatttcttgtcattatacttaattatgaatactccaaaggggtagttgagaaaaatgtagctacacttcatcaacttttatcacaagtgtttttaaagtttttattatggacattttcaaacttgcagtcaaatagaggaaatagtatatggaacctatgtacccataaaccatctttaagattatcaa

SEQ ID NO: 230766 - DNA, 568 bp, Homo sapiens
ggctgcagggtgggaggaaactcatcatttttattaaggagttgacaagaataggatcgcggcttgtctttgatttgcgttaagcagtaaaatgaagggataggctggagggctgagagcagggtggcagcaggtgcgtgcagtcggtatgcctctgctggagggagtggccaggccacagacatgggacaccacatagcagtcctcacactcctcctctgaggtcctcagggaggcatttgtgtctcgagactgtttcagagacccatgtcttctcaggagatgccaaggctcaggtcagagacttgttgagtttttaagagactgtctgaagcacacaccctgccctaataagtcaatatttctgttcctcctggagacctcacattccaaagtgtggtacttcgggctcttgtaaatgttggaattcctaagactctctctggaggacaggtaagatgtcagtgggaacacacatacacacatgcacgtgcgtgtgtgcacgcacggctggcatgtccatggaaactgccttggcgtggaatgagcagggctgcctctcaatgag

SEQ ID NO: 230767 - DNA, 659 bp, Homo sapiens
tgatgaggtgggttgagttaaaggaattaaactagtagaattataatgatgataactaaaaagggatatacggactttaaaagttgattgttttacattaatgaacaatttgatttttaaagtggtattcacattttaacaaaagagcaatgaaatgaaactaaccagttttacaaagcattggatgccatgatgtagaagttgaaacttttactcaattttaaaatattaaaatggtttaaatgtgtgaaaacagggatgccaattttagagcataatgaaatatattttacacaacattttctcttaagacaagaataaataatattttcttattcataactttattatgcactgcaaatggtgctatgattgttttggggaaagagtagtagctatcttggtatatgatatgcagtctggcatattagacattttcaagttacttttgagtacagtatttttcagtgactaacatgtacattctcaaaatcatatggctttaatgcatactctttggccagaagttttactcctgggaatatattctaaagaatagttcaaaagaagaaaatagctctttgcataaaaaatgtgtatagcattgctgtttatgatagcaaaaaaaaaaagactagaccaattctaacttcaaaact

SEQ ID NO: 230768 - DNA, 418 bp, Homo sapiens
cagttttacccaccatggtttttgctctatctgagcaaacgctaacacagtgccacagaccggtggtgtcttagcatcgtgaaaacagtttcaacctgtggacttggtgacatggtctgagggacacgcaggattctgaggtccacaccatgagaaccgctggggaaggcgattctaacctcatctaacgcagtctggaagactcgaaacacaccataaagacagtgttcattttcttctccagcagcggagttcacttcaaggcatatgtccaattactgcatgtaacgtgagtggacagtcagtactcacagcaggcaaagccacaacacagcttacctcagtcattcctagttctgcagcctcactcagagagcctgactcctgaaggtgctttgggagacactgaactttagat

SEQ ID NO: 230769 - DNA, 448 bp, Homo sapiens
ccgtgggatagggccacgcagaagcagggcaaggtctgacccccgctcctgacagctcccactggctgctgatggagagcaaagccacggtcagcgcccactgctggacgctgcagcagggatggcagccaggggggcccccaacagcttagggctgctctgtccccctggagaggtctcactacagccctttcctttcccccgtccccactcactggctgcggaaacccagcctcatgagttctgtttgtctgaagaagcatcgttgggaggaaaaattatcaaactaagctcatgctatcagtcaggccctcctcctactccgtatgtctttatttttttactgaaaaaaataaaatacagtaagcactcggatgagaatattaatccatggagattgcccccttcagcattcactgtatgaggcctttttatatttgctttttta

SEQ ID NO: 230770 - DNA, 150 bp, Homo sapiens
gcccaagtacatatacacaggtcctgtatataaaagatgcagtaaaaacagttataattccaagctgagatttcttaaagccaccacagattaatttgctatacatactttgaactttctctaaaacccaccaaaatggttgcgtttgtg

SEQ ID NO: 230771 - DNA, 280 bp, Homo sapiens
tcccttccatttgaaggatttctagattagtggttggccttgtgaaatagagaagctttccaaagaggggaagaagaggggctagcctttgccatcttggatgagtggtggtttttatacagttgttatacagaaagcacatgtaaatgtcaggggtaatcccaacacctagggatgatgctttttgttggatatccttccagtcttttttccagcatatatatttatctactggaaggaaagcagatgaataaacacagaattttgtgcagcaggtgaa

SEQ ID NO: 230772 - DNA, 673 bp, Homo sapiens
gagaggggagaggggaggggagagggagaatttttgtatttttagtagagatagggctttaccatgttggctaggctggtcttgaactcctgacctcaggtgatccacctgcctcggcctcccaaagtgctgggattacaggcatgaaccaccacatccagccagttccatattttttaatgagattataaatagtattggattttagatttcaatttgaataatttattcttagtatatagcaatacagttgatttttgtatttttgcctaatatattataactttgctaaattaattttagtagcttttatgtagtttgcttaggattgtatatataggtgatcatgtctgtgaataaagacagtttaattccttcccttccagtcagcataccttttttttcttgctctattgttatggcgagtacttctagtacattgttgagtagacatctttgttttgttctcagtgttcggggtgaatattaagatgttatgggtctgctgatctgctttgtattagtatagtattgtttctagaatttcatataaatcccatgtaatcataaagtatgttgtgtcagcttcttttttttctttacgtatattttgttgctgttgttgtgtcatacttcttttgcttagtctaattccctgagattcattcatgtt

SEQ ID NO: 230773 - DNA, 664 bp, Homo sapiens
gggtgtgctgggtgatctagaggatccacgtatatgtagcagagtatgatcacacgcacacgaacattagatcatctaagaaatgactggtgagtgggtcacgctcggcctcccaaagtgctgggattacaggcatgaaccaccacatccagccagttccatattttttaatgagattataaatagtattggattttagatttcaatttgaataatttattcttagtatatagcaatacagttgatttttgtatttttgcctaatatattataactttgctaaattaattttagtagcttttatgtagtttgcttaggattgtatatataggtgatcatgtctgtgaataaagacagtttaattccttcccttccagtcagcataccttttttttcttgctctattgttatggcgagtacttctagtacattgttgagtagacatctttgttttgttctcagtgttcggggtgaatattaagatgttatgggtctgctgatctgctttgtattagtatagtattgtttctagaatttcatataaatcccatgtaatcataaagtatgttgtgtcagcttcttttttttctttacgtatattttgttgctgttgttgtgtcatacttcttttgcttagtctaattccctgagattcattcatgtt

SEQ ID NO: 230774 - DNA, 368 bp, Homo sapiens
atcactgtgccctgggaaatgtgcagctctcttagcccaggcctaaacccctccctcccctgaattgagtggagagagcgcaggtcagctacaccactggtctgggagcagtgggaaagggattctccagcagaatcaggacaacatggccaaaagaagtggacgttgggcggctatgctagttaagacaaggcatggctgggccgggtgcggtggctcacacctgtaatcccagcactttgggaggccaaggtgggaggatcacttgaggtcagggatttgaaaccagcctgaccaacatggtgagccaagatcgcaccactgcactccagcctggcgaaagagcaagactccatctctaaaacaaa

SEQ ID NO: 230775 - DNA, 465 bp, Homo sapiens
tatgtaaagctactagcacagagcctggcacatgtttgtttaataaatgtttgctgtttgatgttaaatgaataaatgatgcgggatttatgtttttctttcatggcaattcagtcaaaaagggtaatgggattattttcacatgaattattttgagaactcatgctgtctctgaggggtcattatatttaaaattgcttataggttaaatatttttaaaacaaagcaaatccattctagtgttttcactgagatctacatttccggaattcactttcttttttttgttttttaattgtgacatttgccatactttggtgttttagtgtggctctctttttccagagctgctccaaggttactgatagttacggagtaatcctgtacgtaagctctcttaacttatatagagtccccaagctctcgtgtgatttcctcgctgatttgaggctttgataaacttgg

SEQ ID NO: 230776 - DNA, 406 bp, Homo sapiens
cgcctcccggtttcaagcgattctcctgcctcaacctccctagtagctggcattataggcacccgccagcacgcccaactaattttttttttgtatttttagcagagacagggtttcaccgtgttagccaggctggtcttgatctcctgacctcgtgacccgcctgcctcggcctcccgcagtgctggaattacaggcgtgagccactgcgccccgccccgctaatttttaaaagaaattttgtagagacagggtctcactatatttccaggctggtctcgaactcctgtgctcaagcaatcctccgacctctacctcccaaagtgttgagattacaggcacgagccactactcccggcagtccagcattcttaatagcgcaccacaccttaaaaagcacaccctt

SEQ ID NO: 230777 - DNA, 470 bp, Homo sapiens
ggggtttgccaatctttaaatacctctctggccgcaggcaaggagtgaagccaagagacccagagatggctccctttggttatagtggctctccccagacagatctgaccatctatccctagttctcaggccaggatagtgatatctcctggtgtctgggctggccacgtgggccagtgcgcaagagacaaaaaaagtcagcagtgtggcaccaggctggtctggtgatgccgggaggctgggaagtgccggtttgaaggcaggaacaaattactctcctggagacaaggccaggccagttcctgccgtgttacattattaaatttgtaatcttcattctaatactttccagcagtgaataagaaccaaatttaaaatgccggctttatatttctggaacgaagctctttgtcaagaactcttgaagcccataatttctctccagaggtaaatgtctaagtctttaaaaa

SEQ ID NO: 230778 - DNA, 466 bp, Homo sapiens
aataggttcattcctttaataacaaaatttcatttatgagggcacagtagcacccagaacaaattttgattttgcaaaccaatgacctttttatggttctttagaaatggaagtcagctgttgcccagaagggttggtggcatggggacttagaaagccatgaagtttgagcgccgctttctaatgcctgacctgatgtttgtggctgcacttgctgtatgtcctcaggcacaacagctattagctttgttgtgaattttagagggagtcacttgttcaggcaatggatactgcatatgtggcactctttgcaggtccagctgggtgacatgctgagaacaaccaggtgtgctccccgagctcatagcacatatggtcaggtggataaaacaaccttgatttcaaacaaaacacccaaaggagtgcatgtgtaatcacacactgaaggaagagctccgaaggaaaa

SEQ ID NO: 230779 - DNA, 536 bp, Homo sapiens
cttccaaacttgtacatgtccttacccatccaagatcttgtaaccgtaataggcttgtctacagacttccttgctggaatgtgttcttgttgttgaaggctgtattctctccagtcctcactaggaatcttggataacaagggggttatcccagaaggcagcctctgcacattgcagaggaaatttaatgtgatctatggcttgagaaactgaactgaaaaacaggaaaggcaggctgggcgcagtggctcacgcctgtagtcccaagagctgggattataagcataagccaccttgcccagcctgttattgctttaatagtatagcaataataataataataataataataataacagggcaggtttctgaaatccagccctcccagtagcctgatccccttgatgtgggggacctctccaggtctccagggatgagcactagactgacatgctggggacctcaccttttctctttgtatgtacatatatgtataccattgtgtttattacaaatgtcatgcatatttactgtag

SEQ ID NO: 230780 - DNA, 1542 bp, Homo sapiens
tctattattgatttcttatttaattttggtatagccagagaacaccatttatgtggatgatctcggctcaccacaacctctgcctcctgggttcaagcagttctcctgcctcagcctcccgagtagctgggattacaggcatgtgccaccatgcacggctagttttgtatttttagtggagatggggtttcaccatgttggtcaggctggtcttgaactcccgacctgaggtgatccactgcctcagcctcctaaagtgctgggattacaagtgtgagccaccacgcccggccttgtgtggttttaatttattaaaaattgttaaagtttactttatgacccagaatatgatctatctgggtatatgttctgtgggcacttggaaagaatatgtattctgttgctcttgagtagagtgttttataaatgtccgttatattaaaccagttgataatgttatccaggttttatatatcctttttgatttccatctatttgtttatcagttattgagaacagagttattgaagtctcccagttatgactgtggatttttccatgtctcttttagttctatcaatttttgcttcatttattttggatctttgttagttgcatactatatttcagtgtttatcttcttggtgaattgacccttttatcattatgtaacttccctatatttatatctttatatttaaaatagatttccttaaaccataagacatttgagaagtaaaaataaaataaaatagctttcttgctgatagcatatagtcgggtcttgtttttttctttttccaatccgataatctttgtcttttttttttttttggaaatggaatcttgctctaccacctggactggaatgcaatgacgtgatctcagctcactgcagcctccacctcccaggttcaagcaattctcctgcctcagcctcccgagtagctgggattataggcacccgccacgatgcccagctaatttttgtattgttagtagagacggggtttcaccatgttggttaggctgggggagttttctattatttatttcttgtttaattttggtatagccagagaacatgctttatgtggttttattaaaaattgttagtttattttatgacccagaatatgatctatctgggtatatgttctgtgggcacttggaaagaatatgtattctgttgttcttgggtagagtgttttttgtaaatgtccattatattaaaccagttgataacgttatccaggtttgatatatcctttttgatttccatctatttgtttatcagtcattgagaatggacttattgagtctcccagttatgactgtggatttttccatatctcttttagttctatcaatttttgcttcatttattttggatctttgttagttgcatattatatttcagtgtttatcttcttggtgaattgacccttttatcattatgtaatttccctatatttatatctttatatttaaaataggtttccttaacatttgagaagtaaaaataaaataaaatgtaatagc

SEQ ID NO: 230781 - DNA, 449 bp, Homo sapiens
caataaatgagatttgtgtgagatctaggaaaggcaggacataccaggagaaagtgaagagaattcccaaggtacatataaggaaagtccgaggaaaacagccacatgcacgtgaaaagagtagccaacaggccccagtttgcctgggagtttccagttttagcactgaaagtcctacaccccgggaaacccctcaatcgtgggcaaaccaggatggctggccaccttacaccacaaactgtccatgcggagagcaggaaaaaagatggctccaggaacaaacattcagaaagaagaatgaaatacgttgaacacatcaagaattgtacagctgttaatagcactgggtttcatcttttgtttgtaacccattttgttttttatttcccatctttgttattttatctacatattgaattatgtgaaatataacatgattacaaatcaaa

SEQ ID NO: 230782 - DNA, 467 bp, Homo sapiens
acatggaagcaggggcaagactcccctgccagcgtggcagatgtgaaggaagaaggggaaaggcttaagtactagtgaagtttaattaattgtctcatatattgccaattctaggggtaggtagttcaaaggctggaatgggagcttggcagtgtcactagggagccacacttcctctgcctgtgagcttccatccttactgtgtgggctcctcatcttcagcctcactgctttgtatccagtcatcccccattatccgtgagggatacactccaagacccccagtgaatgcctgagaccaacaacagtatcaaaccctgtgtagactatgttttttcctgtacatacatacctatgataaagtttagtttataaattaggcatggtaagaaacgaacagcaatagctaaagataaagtagaacaattaggatggtacattgtaataaaagttatgtgaatgttgta

SEQ ID NO: 230783 - DNA, 548 bp, Homo sapiens
tcctttttttttcagcaaagcatttgtattggtccattctcatgctgctaataaagacatacccgaggctgggtaatttataaaggaaaaaggtttaattgactcacagttcagcacagctggggagtcctcaggaaatttacaatcatggcagaaggcgaaggggaagcaaggcaccttcttcacaaggtgccaggaaggagaagtgcaagcagaggaaatggccgaggcctacaaaaccatcagctctctgagactcactcattatcacaagaacagcatggggtaaacttcccccatgattcaattacctccacttggtcccactcttgacacatggtgattatggagattataattcaagttgagttttgggcgggaacacagaatgatatcatttgaaaacatttttggtataaattataccatcatattgtcatatatctaaattcagatgggaaatgcataattactcaaattaaaattgtataaatttaattcttgttatttccttattatcaatatctctaatgtatattctatatact

SEQ ID NO: 230784 - DNA, 424 bp, Homo sapiens
gtagaggtttgaagagatgcacacccagaagtcctcattccgaggagtggcaggtgcacgggtctttctaaatcattcaaaaagccagttcttcctcaggaattaatttttgcctttactgatgaaatatctttggcagcccacttccttctggccagccattacatggtgttaattcctttattcctctcttccacgctcacaccttgctctcctacctccttcctttcttcttccttcctccctctctcccttcctttcttttcagaagaattgatggttcagtgtaaaagctagtacagactgggcacagtggctcacacttgtaatcctagtgctctgggaggctaaggcaggaagaccacttgagaccaggtgttcaagaccagtctgggaaacatagacctcagctttttttaacaaa

SEQ ID NO: 230785 - DNA, 785 bp, Homo sapiens
tttttttttgtatttttagtagagacggggtttcaccatgttagccaggatggtctcgatctcctgacctggtgatccgcctgcctcggcctcccaaagtgctgggattacaggcgtgagccaccgcacccagccaaaactttattttcaaaaacagttggtggggtgtagtttgcagatctgatctagagtagtgttgcctgatggaattctaaggaacattactttcagggcatgttaatagctaatgtgaaaaaaaataaaagtgggggtaagggagtggcccatggtaaaacagattaggggaaaactgggaaaagtttactatagcactttccactaactttatttgtgagggagggtctcgctctgctgcccagattgcagtgcagtgatgcgatcctagctcactgcaggctcaaactcctgggctcaagtgatcctcctgccttagcctcctgagtagctggattataggtatgcaccaccacaccagctaattaaaaaaaaaaacaaaaaaaaaacaaaacaaaaaaacaaaacttgtagatacaggataccactatgttgttgcccaggctggtctcaaactcctgagctcatgcgaccctccagcctcagcctccaaggtattgggattacaggtgtgagccactatgcccagcctccactaactttaaaatgctaatgtgcaatatttttgcaatttttttcaaaatctcaactcaaagattactgtgtttcttaaaagcttttaaaaaatatatagggtcggccggctcaca

SEQ ID NO: 230786 - DNA, 472 bp, Homo sapiens
tcttatataaactaaaaattaaaataatagggcttgaaagttgaaattactccttgatccatgggctgcaaaatggatattgtgttagcaggcataaaaacgacactaataatctccttgtacatctctttcagagctctgggatgaccaggtgcgttgtcaatgagcagtcatatttagaaaggaatcttttttcctaagcagtaggtctcaacagtgagcttaaaatattcagtggtggctcatccctgtaatcccaacactttgggaggttgaggcaggagaatcacttgagcctacaagttggacaccagcccaggcagcataacaactttatagtttttattttttatttttatttttattttttttcgagactgagtcttgctctgtcacccaggctggagtgcggtgagctgagattgtgccactgcattccagcctgggcaatagagtgagactccatctcaaa

SEQ ID NO: 230787 - DNA, 494 bp, Homo sapiens
cgtctgagatcctaaagacatcagtggttctagtcaagatgtagctatgttgttttataaagaattaaaatttaccccccagatatgttaaacagtctaggattttttagcctgacgaagaaagggctgataattttctatgcctatattaagaacatgctggagtattttactctgttgtagtgctgcacagttccatcacagcacttacactggtggctgccctacgtatctatctccccaacttgagttccttgattgattgcaggggctgtagtttttacccgtctatccacatggctggtatattgcctgggccacagtgggcattcaataaaatgttaaatgaatgagtgaatgaatgcctgattcagtcagtcaatgaagtgaataaatgaatacacacagtggaagacacagatgatggaggatggaaggaaagccaatttgcattgtagcttgtcaacctcaaataattattttaaaaaaagaaa

SEQ ID NO: 230788 - DNA, 466 bp, Homo sapiens
ggagatacgataaaagtttttctgaacacattagcatttaaaatttacttactctaaaaataaatgacagttctttaaattgaattaattcagctttgtgaaaaactcattacattgttcttgttttgctatggaactgtgaaaaatttaacacggaccagcattttgtcgtcagtggtttactaaatcacctagaggccatttttatgctttgttttgacctatttacaagcaatggaactgtggtttgaagaaacagactcccttgaaaggagaaggtgggattataaattagtgcagtatttatcgagggccttctggaaacacatattaatataaaatgtgcatatccttagacccagcatatccacatccaggaatgtattctcatggaatgattggatgggttcacgggttcacagtgatgtatattcacagatattattccaacacagtttataatatt

SEQ ID NO: 230789 - DNA, 384 bp, Homo sapiens
tctgccagcaaatcctatggaaaaatacatgattcagtgtcagggtcaaagatgatggtctcataatgatatatagcttgctcagtaagggaatgggtgtgtatgtgttggaggggaccacagtggtaaatgctgagtatgagacatctcctgggactgtgaaacagagtaacagtaagatagaaagataaaaaatagggaggcaggctgagtggttgtggtggaagggtaagagctaggttagcaagatcatgccctccggatacaggtagcgctgccctgtttccctgggggctgaattctccaggccatggacaagaagaccgactggaactgtccttatgccagtgctaaaagtatagtgtagaagaaaggtggtgtttg

SEQ ID NO: 230790 - DNA, 441 bp, Homo sapiens
ggacagcattcttgttctttttttggaagggatgcccttgtcttaaatagcaatttttgcctgcagctaaaaagaatgattacagagatcttttgatttggccactgagtaaccccttaggagagttcgttgcagggaattaatttttgactgtttctttaaggtttgagaaactttgctagtcaactgtggacatcaggaggggatcacttaatcaacccctgggcagaggcagctttgctcacgtgtccttcagataatggcggtttgggcttaacttggttactgtctcagcactttttctatttctacatttatgtatctttcccttcacaatgttcttaagtctaaaaacacatcctgtgcagttctcacagggatttacagcaggtcttatttttgaaagatgggacaggcggagaggtagtgagcaggaaatag

SEQ ID NO: 230791 - DNA, 543 bp, Homo sapiens
cggccgcgagtccccggccctgcggccaccggcggaggcagaggaggaagaggaggacgaggaggtggtcgtcgaggtggtggacggcgacgaagacgacgaggaagacgaggacgaggagggcgggagcaggcggcggagggggctcgggcgtgtggaggagaagccccgagggggcgcggaggaggaggatgacgacgaggaagaggaggacgaggaggtggtcgtcgaggtggtggacggcgacgaagacgacgaggacggcgaggagcgtttcgtgcccctcggacccggccacgcagtccccaggggcccggcccggggcgcgttgaaggtggggagcattaagcgggaaatgaccttcacatttcagtcagaggacttaaaacgtgactgtggtaaaaaaatgtctcatcaacacgtgttttccttggccatggaggaagatgtgaaaacagcagacaccaaaaaagccagccggatccttgaccatgaaaaagaaaacactcgctccatctgtctccttgagcaaaaaagaaaagt

SEQ ID NO: 230792 - DNA, 419 bp, Homo sapiens
tatcaaaggtaaaacaacaaaaagacacaaaaaccctctgacttttcttatacctggctgccttcacttgcctaccttatctatgtagccctgtaggcatgttaacttccattcctgtaagtagcttttaatggccttgtgctcttttggaggggccaggaggaaatgatgagtcttagtgatctggaaacattccagactaatttattatcttctcttttttcccttcttctcccaactaccttttccccctttggttttaggtaaaaaacatcttttttttttcttgccaattccatagtttgggtagaaaaaaaaataccatttaattttgttattttttatatgcttatgcttttagaattagaatattcaatagatcatacaggcattttaataaaggaaatgtcactgtttca

SEQ ID NO: 230793 - DNA, 444 bp, Homo sapiens
ctggctgctttgggtgctggcaggagcaagtttcatgtgggccctgcgatggcacccaggttggggtgcctgcaacccctgaagccctagagggcatgttacaatgctgtcttagctccaccgtctgtggacagcggtgtgttaccagctcagtaggctccttgccttgttgcgtggggcagccgccctccactagtgagggcaaagggccagtgtgatagcctttatttatttatttattttttagatggagtttcgcccttgtcgcccaggctggagtgcagtggcacgatcttggctcactgcaacctctgcctcctgggttcaagcgattctcctgcctcagtctcttgaatagctgggattacaggtacccgccaccatgccccactaatttttgtatttttagtagagatggcgttttgccatgttggccaggctgga

SEQ ID NO: 230794 - DNA, 313 bp, Homo sapiens
catcacaaaaaaaggtcgctggatcctactgaaaatgcagcccctcagcacttcatctcaaacactttctcccacagcaggtggctgagggctggtgtgctgaaaagctcacattctgcatgcgggaacactgactccggagccatccggctctgctgcttgctggctgtataactttgaatgagtcccctagcacaaggcccagaaagggggaaccctcagggatctggctgtccccagccctgcccctctctcagactcgaccctgcctctttctgcaggttggctcagagacacaggcccccagggatca

SEQ ID NO: 230795 - DNA, 484 bp, Homo sapiens
tcatttgcaagatttcacacgttccctaattatttcaagaggacttgcagatggaggtaatgggcccccttttaagatgacttgccacacatataatgtcagggctctcgcattcatcagcgccatcctcccagcccccgtcctccacctccatcaccaaaaacccaaataatttcaaaaacatttttatcctaaaatgttcccctcaatttaaaaaaaaaattatcttcaagagaagagatttctttccatttcaatcccacaacaaggagaatgtcagcccagcttttttttgacagacaaattattgaatcaaagagaaaatgccattaagctcacaggttagcaagtgtcaggaatggtttaaagagatatccccatttatcttccaaacatgcacgaaatgtcactaatgtgtgtttatcatgtataatcagacaaagaaaatatcgaaataaagtactcccgcatacaatagaaatct

SEQ ID NO: 230796 - DNA, 345 bp, Homo sapiens
gtatgccttgtaatttttttgttgaaagctaaccacaatgtgctggttaaaaggaactgaggtaaataggcctttagtgatgtagtgctaaggtgtggtggggaggggaagcattctatagtcctaggattaggtctcagtcttttagtgagctagtgcttctgtgctgtgacctaaacaaatgcttcttagcttcccctcccccactcccaattaagtcagataagaagtatagaactggagatttcccttctcccacatggaaagctagaggtgtctaaagttgggtatttccctttccctgaattgggtaggcaggaggttaggctctggtaaaataatttc

SEQ ID NO: 230797 - DNA, 202 bp, Homo sapiens
cagtcatccattgcactggggttgggggtgaggggatgcctggaactgtcccagtgccaaaggcaccatgtcatttttttttttaaaggtgtcaaagggccactgcctcattattgacttgagacccagaaatagtgctgtgtgttcttttgatacatttatcttctgtttttctcaaataaagttcaaagcaacaaaaaaa

SEQ ID NO: 230798 - DNA, 461 bp, Homo sapiens
gaggaaagaagaaagaaagaggaaagaagaaagaagaagaagagaagaaaagaagaagaagagaagaaaagaagaagaagaagaaaagaaaaagaagaagaaataaacaaagtgtgccaagagctcaaaaggaccatacctgttggacgggattacaggcccttggacccatcctcatgaaaaagatcagtgtacaaacatttgcctcctgggctctgcatgactgtgcatttcagtagaatcacctggaggtctgttaacagtgattttttaaaaagcccttaaatgatggtcatcttctgttcaggtggctccacacgctgaggtcccacgtgcctgaaggtctggcccctccggttacatggctgtgcacctcctgggggcactcggggctgcgtttgctttcttcctgatattttctgttaaaaacaagaatcttacttcctctgttgcctaagctc

SEQ ID NO: 230799 - DNA, 494 bp, Homo sapiens
ccatgaagacgaaggtcctggtagctgaaggctactgctaaacactgaaacttaaccttcactggctactttatagataacattcatgtgtcatcatggtaatggtcatttcagtagtttttcaggaactggacccaactcctgtccggttcaaacctgttgagaccactaactcttcaaatgggcctgaacaagtgcccaagaagggggcttttgacatcagagagccaaaaactccaccctcagatcatgctaatgctgccattttctgtacatgtattttatggaatgccatgaaccctgattgtgcctgcacagaagggacctgttatttcactgttcctcactgccagtcacctttccccataccttagaccactccacttccctaacccataaatatctgtaagacttatatttggagaggtggacatgagagttgttctcccacctcctcacttggcagccttgcgaataaaacttttctcttttgt

SEQ ID NO: 230800 - DNA, 318 bp, Homo sapiens
atattagaaaatgaaagagaaatgttaccttaaaaaaacgaaatgttttctagccttctgacatttttccaattcatatccccatacaactattcttcaaagcaacacacagaattatctgcaagtataaaactactaaaaattacttctcctggggatgaatgaagagaatttctagttttctgaatattaatggcagaggaatagttaggacatgttcatttaaaactactctttttcactagagatctcaacaaagtaaataaagttctattctacctagaaatctccttattctcgctgaaaaaacatttaagg

SEQ ID NO: 230801 - DNA, 283 bp, Homo sapiens
tccccacagagaatcccaccctatacactgggggaaggaatggtgacatcatgaagcttccataaaaacccaagaggatgggttttggagagctgaacctgtggaggctgacaggaaggtgaagaagaactcgcatgtgctgggcggatggcaccgctcaactcctggggacagaagctcctacgcttgggacccttgcagacccacaccctatatatttcttcatctggctgtttatttgtattctttaaaatatccttcttaataaaccggtaagtgtgtt

SEQ ID NO: 230802 - DNA, 319 bp, Homo sapiens
cagcaagaaaaagaaactcactgaataggcttaggatggttttccttgccctgtgcaagaaatccctgtttttcagtttttctgcgtgccaatcagtttgggacttagaaatttggggcataaattctggattacactgaaggcaaaatttagactcagaagtaaagcatctttctccacacacacgtaaatatgtctctttggtgagcaggctgaccaaaggagaaaagaaaaagaaaaggttcactgaccttgacactgatgcttcaagcaactacaaaagaactccacaaatcatacccatgtccacgctgctgtg

SEQ ID NO: 230803 - DNA, 670 bp, Homo sapiens
ttagtaggccctctctcccctaagccctatggtgattcactgattttcaattatggcacagtaattgcaaatgacaagaaatgaaagatgggtttgtttgttataacaataaaaagtctgggaaatagactgtttggggttattacaacttggagaccgtttttaaaagcctcttgttgatttccctgtcttatttttttttagatttgactgaatttgagggagaaaagcgaaaccgatttaatttttattgctttgaggggacatgcctgttatttgcatctcatttcatttctgtgcaccagcctggtatccttgtgatctatctttatgtgctattgcttcatcaggtacatgccaataggctactgagttaaaatttttctcctttggacccatatctttatcacccttaaatcttgcctcaaacttgacttaatgtggtgtattctgggtggctcctttaagggcagttgagaatagtgttgggggatatgtttgtagtgatttaagtataagggttctctactgtcagagatatgtaagtgaggaaaggatacatggtaggtgaaaggatatctttgttgtatggaattgagatcatcagtagagacttatgttactgcattttgtcctgttcaaatgtctgcattatatattaactcatagt

SEQ ID NO: 230804 - DNA, 355 bp, Homo sapiens
tcgggttacctgctgcatgggccaggggtcagaaccccagcgaacgctgcctgggcccacctctccacggggctaccccttggaatcaaactgagactgtcactccctgtagagatggagaaactgaggcacgagcaggtggctggccccagattccacccaaggtgggccaccccatgtttaactgccgagcaccccttcttggcctctctggcccctcccacctgaagccaggcttcctaggaggcaagaagagtacggcgttctcagggccagggcgcaggccgggggccggggatgacgtgagcttatcagagaaggaaagacgaggccagtccaagaggcggcagcccgt

SEQ ID NO: 230805 - DNA, 150 bp, Homo sapiens
atgttatttgcctttttcactgtattatttacatagtggtacagaaatctatggtggtcacgtgaaactgttagtgcctgagcacaaatcaaggtggtgacaccaagctgtacaggtaggtcatgttcttcactgccataagcttacagt

SEQ ID NO: 230806 - DNA, 392 bp, Homo sapiens
agccccggggctgccctgtacagaccatgccctgagagagctgccccagggcaattccaagaggggcacagaactgtccccatcttccgctgctccctcaccgagtcacatccctagatgagcagatgtcactgcactcacacatgctcagttccctgaggacagcaccccaggctcttccctctctttagcctccagagtaaatgacagttgtgttttgtacaatggggcagctcaggtgattgaatgatgggagagcccttagctaggcatggtggtggcaggcgctggggcaggagaatcgcttgaacccgggcggcagaggttgtggtgagccgagatcacaccactgcatcccagcctgggcaaccgagtgagactccatcttgaaa

SEQ ID NO: 230807 - DNA, 518 bp, Homo sapiens
aagtcaccgcagcaccacgaggtggccatctgggcaggcccaggcagtctggcggccgggtgagtcccgcaccaggtacacgcactcgtgcaagcacacgtgtgacggcaggtctgccttcctccatcggaaaggaacgtagcgtctcttcgcaccccccaccccaggcgcggggcgcaaaagtcacaggaagggccgccagggcggcagagtccatcggaattgaaatcccgttactggtgtgtagagaattctacgtgggtgtcaagagcccctcagggcacgggctggcccgggtgggccctgcctttcccccaccaaggctaggggtggcttggcccctaggagtggagaactggcccaggccaatggggcaaggcggcggggaagtgagactcccccattctccgcttgaaatcccattcaaggaaactcactacgagtgaatacagattgaaatggaaactgggatcgctcgaagtctcttgattttaaaaagaagctcccctcccttgccc

SEQ ID NO: 230808 - DNA, 1092 bp, Homo sapiens
ggggtggggcgggggctggggaccagggagtccgaggtggccggggctgcgacggggaattcgagactgtccgaactgggcagagaagaagggccgaccgggagagtcgggcagatccgcaggtgacaggcacttccgactccagcagagaaggggacactgatcacggaaaaccttcggaggcaagagacgcggggctccccgggtttcacgttcggtccctgtctcgcaacccccgcgggcccggcagagttagttttgaatttatggcagcgctttgccgagcgctatttgggtaaacttcggtctccggcgggggtttccgtgggcaggtggtttgggtgttggtggtagaataatgcaaacccactttcatcacttttagcacaactaaaatgcagtcccatggaagtagctgtccccttcctttaaaaacgtccgtcagatgctccctgaccctcttctaaaaaaaaaaaaaaaagaaagaaagaaagaaaaaaacgtgtatatgttctttggtctgggaaatggatttttattagcattgggagactcccctggcgatggactacaggactgaaggagaacagctcaaattggcggtgtagccaccttactaattcaagagaaatggctgtggctagaaggtgtgattgcagggtgctctttagaaaggttttagaaggaagacatgtgttaactttagttagaggcgatgggtaactgaacatagataaacttactggtattccttaggtgaaaatgtgtcatctatgaccatttattggtatttggataaaaatctaatacatatttccaaactgtgccttgtgcaagtttttccaactcagttgacaaaataagcatatagatgattacatctacttccttcccaatagtagggaacttcttaaatactggagttaattgaacaccctaaaagatggggaggtgaaaatatttgcctcattcactcagtcttgaggctgggagatgtctactcattagcatacctgttggcacagcaggcctcatcatcatttaagtatccaaataatttgatttttgactggtatttattcatgatatgtc

SEQ ID NO: 230809 - DNA, 1137 bp, Homo sapiens
ctgcacagcccgccaaatcgaaaggtcctttcttttgagcaaatagcatcatacacgttgccatcaagaaaatgaaagcatttgcagtggcgcagcatccagcttctctctgtggcctttggaaacaattttgtgaccagagaatggttggagacaaaggtctttctatctgatctgctcaccaggctggcatgggatcgtggggggcctatgtccctctttcctggcaccacatggattgctatcactgcatttgtctcctctctttgattaggacaagacaggcaggcaggcagagggttgtatttcaactgcccttgactctgtttataatcacaaacatgaaaggaaggggaagagattgagtttataggactggttctttgtgtagcctaatttatctctctcaggcagcagtgggccgagcgagtttcctttttgtttccaatgcaggaaactgaaatatgaatctatgttgatgagagaataaaggaattgaaagaggcataaatcttatcttctcgcaaccctagaagatcagcttcttgtgaagaaggggattatacttctgtaattaactgctttgcagctcctggtgatggctcagagctgaataatagcacccagccaagttggataaaaggctgttggatgggcaggtgcggccgctcatcgtgaacaatggtctcagggcttgacatctttttccagtgccccgtgctcagagagtccaaccaggggatatttgttccctgtctatcaacattcacagcagagaataaaattccagaacaaatagctcaaagagacctgtttcactggaggccagtagctgcaatgagctgccttgaaggaccaacccagattctacacctctttgtgttccgaccagtgcccgggacctgttaggggcttatggaacgctggttggcagtgactgcttctcagccgctgtgctgtctcaggaaagttgcgtgagttctctgatcttcagagttaaccgtccacacaatgcaaggggttcttatggaattcttatgaggaagaaatcagatcatgagtgtaaacaaattacttagtacagtgcctggcacagggcaggtgatcaataaatggtagctattattattaaattgt

SEQ ID NO: 230810 - DNA, 378 bp, Homo sapiens
tgggattacaggcatgagcctgcatgcccggctaattttgtatttttagtagagatggggtttctccatagttggttaggctggtctcaaactcccgacctcaggtaattcacccaccttggcctcccaaagtgctaggattacaggcgtgagccaccacaccctgccctgagtattttttaatgactacaatgctatgttgaactcataagtagttttcaaacattttgaagttgaaagctaactactttcttataatgtatgtctcgctgtagaattatccctaacgcttgaatttttattcctttagcaaacatttaatgatcatcactatgtgccagatagtgaaatcatttcagaacttgaggggctcaagcc

SEQ ID NO: 230811 - DNA, 207 bp, Homo sapiens
tcagtacattatggctgcaatatcagtagagggtgaagctggaacttgaacacaggtgtgcccggaagctgtaattttgtcgttctgcagtcccagcttctgagatttttcagaagaaacctttccatcaggcactaggttctttcagaggatcctggggctgttgcaaccgagttgatcaacctacaaaaaggagaaggaatatta

SEQ ID NO: 230812 - DNA, 483 bp, Homo sapiens
ctgataatcaagaaggttaggaataaacaacacttcttcaatctgatcaagggcatctacaaaaaccctacagctaacatcacacttaattgtgaaagacaatattccccaccttcccaacgtcaggaacaaatcagggatgcctgcttttaccgcctctgttcaacattgtactgaaggctttagactgtgcaatcagagaacaaacagaaataatggacatccaggttggaaagaaagaaagaaaaatgtattcacagatgacatgattatttatgcaaaattcagcggactctacaaatgagctactagaacaaataagtgagtttgtcaaggttgcaggatacagagtagtgtacaaaaatcagttgtatatggtagcaatgaaaaattgataattgaaacaaaaaatcaacatttgcaatcacataaacaatactacctttgcaatagcataaatacctgggataagtctgaccaaaa

SEQ ID NO: 230813 - DNA, 389 bp, Homo sapiens
agtggctctttggagtagctgtatcttggatcttgatgctccaagagtgaaactgtttctttcaactatggagttcagatcttgagccaaaaatctttcagcggctggtacaaaaaaaatccgctgtaaaaccatttacaatggtaccagccagaaatgtgataacctgtgtacattcagatttctgggttacctgaatggaactcttacacttattacctagcacaaggcttggacaaacacaagtaccttacattctctgcatgaaagaatgagtagaagtaggattctggagggaatccaacctgacccaaatgtactttttactggaaaacaaaagcatttgaggaattgctgtgtctgtggatgatttacctgccaaaaatgaa

SEQ ID NO: 230814 - DNA, 579 bp, Homo sapiens
agtaggctgtatatgaagtctgttgtgttctagtgatgtatatttccacctcaatagatgaaaattcagtttctccacatccttgccaatacttcatattgtaggtcttctaaatgtgagttattgccattctagtgggtgtgtagtaatatctcatgtggccttaatatggttactgtagctttgtagcaagtcttggaatcatatcatgaaagtcatacaaatttgttctttttcaaaattgcttttggcttttctaggttctttaactttccatgtatattgtataatcaacttacctgttgctacaaaaaggtcttgctgagattttgaatctatagatcagtttgagagaattgacatctcaactgtattgaggtttccaaagtgtaaacatggcatgtctctccatttatttaggtttttaatttctctctgaactgttttgtagtttttagtgtatgtattttgttaaatttgtccctaagtgtttcatggggttgttgtatataatattgcttaacattttaaattgtgggaaaatatatacaaaaataaatgttaccattttgatcattt

SEQ ID NO: 230815 - DNA, 438 bp, Homo sapiens
gggttgggataccctttgcattgaataaactagcccaggatctcagtttgctgggggcggggctggagtggggatgtgccttctagatgttggcaccagtaaatgatcatcagaaagggctcaaagtttatatagcctttttccctagctatagtggctggcaggtgggaccaccccacgtgatagtttgaatttattgatatcagtgataacgtgaaacagttggcatgagaagcagcgtttaagaagtgtcagtgtttgtggtatggtgcaagagttgtttaaaagaactgtgtaaaaattgaggactgactgcctgtttacttaagaaagtgcatgataatttaactgcggaccatgttctgtggttagagataggttgtctttttagaaaggtgcttgtctctaccatctatatagtacacaatagttgctcca

SEQ ID NO: 230816 - DNA, 307 bp, Homo sapiens
tgagccactgcgcccagcgcagctttggttttatttgttttgtttatagtggagggttagacatgaaatcaacatagaagatgacgtaaacttatgactaagcctggtgtgggctctcggtgttctggggcatgagctagaggatggctggagccaggtagagaccgctcccttccttagaatgtcaccttgctgacaaggacagcgctgtgagcatccacaccttcctgtgaggtatctggcattgagcctggtcaggaaacaggaagacaagcaggttccattgagcctgggacctggaccttgt

SEQ ID NO: 230817 - DNA, 476 bp, Homo sapiens
gcaaatggaggaagtagacctgacccctgactaaggaagatggtgctacctgtttggggcaaatgttcaaaaagaggctgtgtctgtatggtggatgctgttaaaagggactcagaaaccaaatgagagtctgaattagctgagtttaacattctgtgagttttgtgccagacttgggactactgcagaagaccctgggagagttgggattgaattccaaaggcagtgctgatggacactgacttgaggagccaggaaagaaggcaggaacagtggtggggatcacagcctcacctgtatctgtgcacttctataaattcacagactgggaatttttaatgtgaactggatattagatgatgaccaggaattgttttaattctgttaggtgggataataccattcactgtgctgtgtaagataatgtccatattgtttagagatgcatactgaagaatataggatgaaatgaaaaa

SEQ ID NO: 230818 - DNA, 411 bp, Homo sapiens
agaggagagcaaagaaattgtaataaaaattacctgtagtgccatgacccaagtataaccattgattcagggaaaccatttaggaataactgacttcattttatcattctatgagtttatcttttcatactttcttttacgaagttacagttatgctgttatgtattgtattgtaacctgtattgttttgtaatctgttcaattataagtttttttgaaaatttataaatgatctttatcgacatataccaaaatttatttaaattatttccaatttaggatattttgattatttcctttatttttaattatttttatgctatttttaatgatgctataatgaagattgctttgtgcattaatccttctgtacatttgattgtatgcttgcaataaattcctaaaaacaat

SEQ ID NO: 230819 - DNA, 488 bp, Homo sapiens
gtcttcagtgtattaatttcctgtggttgctctaacaaattaccacaaactggttggtgtaaaacaatagaaattaattctctcacagttctggaggccagaagttcaaaatcagtattattgggccaaaatcaaggtgatggcagggctttgttccttctggagggaggctgtagaagagaatccattccttgcttctccctgatactggtgggtgctggcattcctggctatggcccatgtccttccagtctacgaaagcagcattttcagttctctctgccatgtcttcttcttcttcctcttttttggagacagagtcttgctctgttgcctaggctggatgcagcgacgtgatcttggctcattgcaacctccgcttcctgaggtgggaggatcgcttgagcccaggaggtcagggctcctgcagtgagccatgatcacatcactgcactccagcctggatgacacagagagcccttgtctca

SEQ ID NO: 230820 - DNA, 1006 bp, Homo sapiens
ccatttttagcaactgttaaagtgaagaaattctcacctctagacaatactctcctttgtaatatgcacttcaaaggaagacaaacaccactccctcactctactcaagtgtaatttaaaaccaactctcaagcataatgggatgttacagccaatatttatttttttcctttcattagataaatagtattaaattgggatccttgagaaaattgtaccaacggtatcatagttgaatgtattttgagctcaagactcactcaggcaaattttcctcatatgcaaatcaccatcattatgcaaataaggacatccgcattgccatgcaagtgtaaaatggatgtttgtttttatgatgatgaattatcttccccagtagcagcctgcagcgtgcagtttggaaacctgcgtggggattgtgtttgtttttcaggcgtttttgttggctccaacataaatctattgccaattctggcaatgtgggggtctctctttcattccaggtctggggtctaagtttctctcttgaagtgttctggggttctttattgtaagttggtgtttacctgtaatagcaagtctatggaacactttttacagctgcctttcaagtccgatttcaatctgtaactctactttggggttaaactgggaagtccccagcttacctgcaaactcttctgtgttctttcctggaaccaaatgacttattagaataaggagagaaagtgataaagagtgatggattattttactgttctgctgtatggtaaaagtaaactggataatagcattacagcaactaacgcttcttgtgaaaacaccgtgctaagtatttaactcatggtttctcattggatcctcacgtaatcttccaaggaagttattgttgtcaaccctatttcatgcctgaggaagcatgggcttagagaagtttaatagcttgctcaaggtcacaagactaatgcctggtagaatggggactcagaccccaggttcctgcttt

SEQ ID NO: 230821 - DNA, 457 bp, Homo sapiens
cgatatactcaatattttacagatttatctcctaatgttacctgactgcttcaaatagtgaatatacagtcctacttaggatataaaatgccattatagaagatatttattgagtaaactaattcttcattgcaaatgaggaaaccaaagagaaaaccaaggtatggaatcctgaagaataaacaagagttggacaagtttagaagggcattccaggaaaagggagtatgctcagaagcaaggccctgcgaaagggagtggtgagaagttggcaaaagcctagggtagtaagaagatgaatttgtaggaaatggttatttgggagccacaattgacaagataaactagggccaactgtcaagaacctgtaggccaaacactctaaaaacttttctttaaaaggtaagtggtatttaaacctacttcttaagcctccttgaataagaaaaataggaaa

SEQ ID NO: 230822 - DNA, 448 bp, Homo sapiens
atgtatcaatatggataaatctcagaaacctactgttgagatggagggtaggggagtgaactgcggaaggataccacttatgtcatatttctaactaaatgtatacgttgatactttattgtttatggctacacacacatctgggtaatagaggtataaaagcctgcacaagaatgctgtcaatatcacaatcagtcatagggagtgctcctgggagggccgcggagaggagggaactagggatgccactgcaagggtaagtaggacgctggacttcaacttcaactatacacataacatttcatttatttttttaaaatccccatcaaatgtagaatgacaggatttttcagaggtgggtgatgtgtgcacagatgtgggctatcttctccacactcctctgtatatttgatattctttgcaataaaagagaacaagccacaataca

SEQ ID NO: 230823 - DNA, 376 bp, Homo sapiens
ctgccaaggtttacaggtgcctgccaccacccctggataattatttgtatttttagtagagatgggatttcgacatgttggccaggctggtcttgaactcctgacctcaggtgatccacccaccttggcctcccaaagtgctgggattacaggcatgagtcactgcgcccagccaatttatcttgttagaatgattgtaactgtattctgtaaaaggccggtgttaatagattgcttagctacattttagagtatgcttcactagagccttaaaaatcattacatatatatcctctgaaatgtattattgctttgatattttaacaatgattaattacattcaattatgacaattaaatgtttttctaaattccca

SEQ ID NO: 230824 - DNA, 2200 bp, Homo sapiens
gagaaatgcctgaaattgctccaggctggtgctcagctgctgagctgggctagttgttaaaatattcagtggtccccaacctttttggcaccagggaccagtttcgtagaaggcaatttttccatggactggggaatgaaactgttccacctcagatcaccgggcattagattctcataagaagcatgcaacctagatccctcgcatgcacagttcacaacagggttcaagctcctatgagaatctaatgccactgctgatctgacaggaggcggagctcaggcagtaatgctggctgaactgctgctcacctcctgatgtgaagcctggttcctaacaggccacggatgggtgccggtccatgatccgggggatggggacccctgaatattggctagctattgccctgagccctccctagccaaccccagtcactctgatcttgtccccaggaccctctaaacctctccaccttccaacaactaaagggtcccaggaccctcctccatcactatgacatgcacccatcccttctgaatggtcagtgcccagctgcactagttgttaaatattttgaatctcagctccgggtgcagggagtcctggctccatgagaaagtgagtgggtaacttggggcaacttgcttaactgctctgaccttccattcccacatccctgcatggaggggttgtgatgggagtgagaggatgtgtataacgcattaagcatggaatacagactcagggcttggtccatgggaattaatattatgaaaaggcttcacaaggctggactcacactccagcagctgggactcctgggagctcctggctctgcccagactctagacacctaggagtcgaactggggtctgggacacctctggaccaatctcaggagtcctcgttgcctcctctcccagggaaaactccagtcattagaggacagggagattccttcagccaggctgagatccttggagatttccacccaggcaggatgctgcagctgtttgccttaaccatggcaaggaaattcatctcaacacatccatctctgtgtgaaaagccccatttggactgaataaggaggagagggagaggtcttgggtctcagctttcaaagtccatgatcttcctatttggttaggggaaaccaaattacagtcatttgcaataccgtcattcacatcccatcttcactattttttgccttatatgcttacattgctgtaccatgatttactaaaggtttttttttcttttagatcatctcatttttgataaagttaaattcttatcactgaaatgttcactgaggaaagcgatcatgaaataaatccaatgaaagcaaactgtggttaaattctaactagataatattgcctgcctaagggcctcagctctctcattgttaaaaagggaaggtagcaagtgatagaggctaaaggcgttaaaggcatgttagtacttagcagagacattccttcagatgtaagtagaagcactgaaagagaactgaagaggaattactttcccaccaaatgggtttaaatacaagtcacttggttagagaccttggacttgtctatctctctgagtttcagtttccccataagtaatataagagcattgtcatggacaatcaggaagatcctttggggccctgatactctgtggttcaatgatcctgcaatttgtatgatactccatcttgctgtcaagatgccaacatgtaaggtcaaagactgcaacgtaattctcactccaccctaagaggtgggtactattattgccccctttttttctgcaaagaaacaggttcaaagagtcaagatcaccagccccatgttgtgtggtcaggaagagtcagaatttgaatgcacgtcagcctgcctgcaaaacccatgctctaggccatagccaccctgtcacactgtacctggtgtgcactgggttggtgtgcacatggttaaacagtcagcccatccccagcattgggagggaggtctaaacttttgactttgtctccgcttcaaaagcttgacttggcagctttctagttccctctttttcttccaaatgggcttcccagaagcagccttgttcatctccatggttccaatctggcaaggaatctcctgggtagatacggctcatgtggctacaggttgttgtacccacaaaaaaagaaagaaag

SEQ ID NO: 230825 - DNA, 436 bp, Homo sapiens
agagagagcgcatttgtataagagattagtgtgtgtgggtttgtatgtgagagagaaacacacacatgcacccagttacactctccagcagagtacccctgttcttgcctgagtatctgcccgtccttttcaaggaagacacatttcactgtccctcttgttcctttagcctcctttcctagtgtctcactgaaggtctgtgtatttgtccctttctgttgagtgcttcctagtgtgtgttgtttgttggagccttgggtcgtttgatggtgtatcaaatgatgtatctttctgtaactgggtaagaatatgtctttctcagtgggtggtgaggggaatatatccaattgataattattttttgtactactccatccattttattcaaggaaaatggaagggtgtttaaataaaatatcacttttttttctgtgta

SEQ ID NO: 230826 - DNA, 731 bp, Homo sapiens
agctagtgtgacatcaccacagtttagtgtgacacccccagagcttgggcagtgtacgggacgacagtgcctagcagaggagcttcactgccggtgagggattacctcaggttaggctttaatgtttcgttgccgtctagagacgttctagcaatgtgacatctgtgtaccatatctggaagtctccctgtacgtcaagagccccttaggggagtctcccattgccgccgtgggaacctgtgtttacattacgaggagagagaatagctgtactctgaactcaaacgctcaaaacatgcagtgagcgaatgctagcataattttcttgcctctaccagaaggaaggctgggtatttaggaaacagaacgcgttgggcacaacattctgagaaaatggacacagaaaattaggttatcctaatagaaaagcagttgcatctcccaaagtcaagagattctgtaggacttccgatgtatctcctgctgtgtaaaatattcaggttcctgaagtgggggacatttttagggcaactgtaatttcttcattttttccatcccacaagtgctggaggcagcagtgatctgagctctagaaagtgactgtccgtcaccatcggtatttgcatatactctgtgaggagaagggcagttgtggctaagacaaaattctactatcaagttttgtttctcaaatctcactcattaacatctttgatttccttggatcccca

SEQ ID NO: 230827 - DNA, 571 bp, Homo sapiens
agctagtgtgacatcaccacagtttagtgtgacacccccagagcttgggcagtgtacgggacgacagtgcctagcagaggagcttcactgccgaaacttccttctactacttaaagtcctcacattgggctgacctgggaaacatgaagataaaaagagtgggtaaacatgcctgcttgatgagccagaaaaaaaggcagaaacctgtggtctgggtagaacagatcctgctcagaatgtataaaccaggaaaagttgttctggcccctcatctggtttcatgaaggacaatatctagcatgagagtgacaggggttagaataatggacattttggggactgggtcctagcagaaatgatggaataatggaacaggagtttggatgaatgggcatattatgggattaaagaagatttgaatacaagctttcctaataaatgaaaggggaggtgaaactagagcatgctgatggctgcacagcattgtgaatgcactaaatgcactaactgtccactttaaaatgtttagtaatatgtcgattttacctaaataaaaaaaaggaagcaacat

SEQ ID NO: 230828 - DNA, 540 bp, Homo sapiens
taaggatacatagatgcgtaatagttcttagagttacttacactcaaatagccacagtgaacttaatatatagcagtcggattcttccattaatgttgatgttagtaaatataacgtcataatgtttgaccttggacttacctattttatttttttaaacttatgtagattataaagcattgtcttttcaaagtttttttctgacattcttaaaacttattttctttcaatatatggttcaaaataaataattctgctatttctaaagttcagagttaaagaatattccacaatggtacagaagcttttgagttttatatattttggcctgaattatccaggcaacagccaaaattcttcccttatatttatggcttatgacagtgctgacttttcatatcattatgagaaactcagagatctatctcatggataaatcaggtttttcaaatttgggaaaaatgaaaaaatttttgaaagaaattggggttgatttgttaatgacaaatttgtactaacatggcaggaaaatatccatgg

SEQ ID NO: 230829 - DNA, 409 bp, Homo sapiens
cagtcaagacgtgaggctccagaagtgaacactgaaggcttccgttgttgctgctgtgctccccttcacgcccccagataactatgttaattttcaaaagtaaaataaggggtttcctccaaaagtttaacccaaaatttaagtatcatctttaattcataaaagcactacttagtaactgaaagagtaggtacaatgtgattgttctatcactagattcagaactcatgggattccctaacccatataaccaaaggatttgagaactgctggtcttcctgcatgttccatggttgaaataaagggatttttggtttttttaaatttaagaaagtgaggcaagtgctgacagagatggaaataaaaaggtgaaagctgaaaggcaatagttacaaacatcaaaagaaaa

SEQ ID NO: 230830 - DNA, 448 bp, Homo sapiens
aatgccttacttaatatttacgtagggggaacaaaagaaaaacatcatcaatccatttgccaggcaaaatagcctagccccctgctagggtggacttactgcccaagatggcacactgggttcacaggactctgcccttccctccctggggccgccaaaagcagaaagtgcttagagagagggcgaactcctaactatgctggcaacagagaaaaggggcctccctgtgggcaggacagtattgggctgggctgaggaagaggctggagtcgaataaaccttgaccagaggtgggaggaaggatgggtctccctagctgggtgcagaaaagcccaagttgggcattacaaactactcaggtcaagactggccggggcgcaggagcatttgggatggcaggtgctcgcctggttcctcgtctcttttgttaaccagagttgctggtgac

SEQ ID NO: 230831 - DNA, 361 bp, Homo sapiens
ctggagtatatgagttccaaggtatttttttctgatgaaaaatatctatcttggtttttacttattagaaatggaaatgtaagcactttgtactcactatataggccactggataatcaccaggttggtgcaggtgtgagggtgagtgtcagaaccccaaagaactggttatgttttgaggatccatattcaggaacatataaatttatactgggaaaatgtaaatcccacttgtactgaatgcttgactacactttcccatggtacacatcatcatttccttttaagacatgatcactccagttttctccaagttttaatcacttataatataatatgatataatgtaatacagtataat

SEQ ID NO: 230832 - DNA, 415 bp, Homo sapiens
ctggagtatatgagttccaaggtatttttttctgatgaaaaatatctatcttggtttttacttattagaaatggaaatgtaagcactttgtactcactatataggccactggataatcaccaggttggtgcaggtgtgagggtgagtgtcagaaccccaaagaactggttatgttttgaggatccatattcaggaacatataaatttatactgggaaaatgtaaatcccacttgtactgaatgcttgactacactttcccatggtacacatcatcatttccttttaagacatgatcactccacttaaaattgtaagccattccttcatgtagtggcattccctgcctctcttctctgttttctccaagttttaatcacttataatataatatgatataatgtaatacagtataat

SEQ ID NO: 230833 - DNA, 421 bp, Homo sapiens
tgcaaactgaagctttcaacctggcctgggaaccttaagaatattttatgaacaatcaatccaccgaactgcacctgtcagcagaccccggttaactgcacagagtacctgaaagccatcccctgtctgaattcacacagaaaacttttagagccacggcactgtgatggagggaaagaaggtgtggaccacacctcatgagatgtgcaaacaacatggctcatgacaaacccagcagaatgctcaatctttagaaacccaagatggctacagcaatacagaccatgacaatttttggtaaggacatggagaaactgaaatcctcaaacattattggtgggattataaaataatgtagccactctggaaaacaatctagcagttccccaaaatgtttaacataaaattaccatatgtctca

SEQ ID NO: 230834 - DNA, 420 bp, Homo sapiens
agaaggaatggatgtaacgaaagaggcagaaaaaaaaaaattgtttgccatgtgctcataagcaatgggagtgaatgaagagccaggcccagcaacagaggggagcctgcccacatggagcaaaaggagccggacaccagattcacccacggcgcgatcccggtgacggaggcagtgtgagcaggcaggcggcggccactctggggaagggagaaggaatgagggtgagaggggcacagagggcctccagggagacggtcctattgtgcctcttctcctgggtgtctgtcacctgcatgcaaactttgtgatcattcactgagtcacgttttcttacatgtctccttaaaaacagttcttaaaagctccaatgtgtatttcactaacaaaaaaagtaaaaactggcctcagtggcctcaa

SEQ ID NO: 230835 - DNA, 420 bp, Homo sapiens
ttaatcttcctggattagataattttaataaattaggggaacatcatccatgtgctcataagcaatgggagtgaatgaagagccaggcccagcaacagaggggagcctgcccacatggagcaaaaggagccggacaccagattcacccacggcgcgatcccggtgacggaggcagtgtgagcaggcaggcggcggccactctggggaagggagaaggaatgagggtgagaggggcacagagggcctccagggagacggtcctattgtgcctcttctcctgggtgtctgtcacctgcatgcaaactttgtgatcattcactgagtcacgttttcttacatgtctccttaaaaacagttcttaaaagctccaatgtgtatttcactaacaaaaaaagtaaaaactggcctcagtggcctcaa

SEQ ID NO: 230836 - DNA, 423 bp, Homo sapiens
  misc_feature (48)..(48): n is a, c, g, or t
ttatagattatttatacataattcaagtgaaaaaaagaaggggcctanttccatgtgctcataagcaatgggagtgaatgaagagccaggcccagcaacagaggggagcctgcccacatggagcaaaaggagccggacaccagattcacccacggcgcgatcccggtgacggaggcagtgtgagcaggcaggcggcggccactctggggaagggagaaggaatgagggtgagaggggcacagagggcctccagggagacggtcctattgtgcctcttctcctgggtgtctgtcacctgcatgcaaactttgtgatcattcactgagtcacgttttcttacatgtctccttaaaaacagttcttaaaagctccaatgtgtatttcactaacaaaaaaagtaaaaactggcctcagtggcctcaa

SEQ ID NO: 230837 - DNA, 477 bp, Homo sapiens
tgcatggcccagacggggcgcttagatacaagctaagaagagagacctggtggtccgccggtggaactgggacaatggagtggaacgtccaaccatgccaggagccatgtgctcataagcaatgggagtgaatgaagagccaggcccagcaacagaggggagcctgcccacatggagcaaaaggagccggacaccagattcacccacggcgcgatcccggtgacggaggcagtgtgagcaggcaggcggcggccactctggggaagggagaaggaatgagggtgagaggggcacagagggcctccagggagacggtcctattgtgcctcttctcctgggtgtctgtcacctgcatgcaaactttgtgatcattcactgagtcacgttttcttacatgtctccttaaaaacagttcttaaaagctccaatgtgtatttcactaacaaaaaaagtaaaaactggcctcagtggcctcaa

SEQ ID NO: 230838 - DNA, 426 bp, Homo sapiens
tagcaccgtgggttccaacatatatattatggaaggaaggaggcgcttcatggccatgtgctcataagcaatgggagtgaatgaagagccaggcccagcaacagaggggagcctgcccacatggagcaaaaggagccggacaccagattcacccacggcgcgatcccggtgacggaggcagtgtgagcaggcaggcggcggccactctggggaagggagaaggaatgagggtgagaggggcacagagggcctccagggagacggtcctattgtgcctcttctcctgggtgtctgtcacctgcatgcaaactttgtgatcattcactgagtcacgttttcttacatgtctccttaaaaacagttcttaaaagctccaatgtgtatttcactaacaaaaaaagtaaaaactggcctcagtggcctcaa

SEQ ID NO: 230839 - DNA, 431 bp, Homo sapiens
atagttacttacacaatacacgataatataatattaatattataagggatactttataccatgtgctcataagcaatgggagtgaatgaagagccaggcccagcaacagaggggagcctgcccacatggagcaaaaggagccggacaccagattcacccacggcgcgatcccggtgacggaggcagtgtgagcaggcaggcggcggccactctggggaagggagaaggaatgagggtgagaggggcacagagggcctccagggagacggtcctattgtgcctcttctcctgggtgtctgtcacctgcatgcaaactttgtgatcattcactgagtcacgttttcttacatgtctccttaaaaacagttcttaaaagctccaatgtgtatttcactaacaaaaaaagtaaaaactggcctcagtggcctcaa

SEQ ID NO: 230840 - DNA, 431 bp, Homo sapiens
gcgggcggggtgagaatgtgttaatattgttgataaagaggggaaaggaggcttcctgccatgtgctcataagcaatgggagtgaatgaagagccaggcccagcaacagaggggagcctgcccacatggagcaaaaggagccggacaccagattcacccacggcgcgatcccggtgacggaggcagtgtgagcaggcaggcggcggccactctggggaagggagaaggaatgagggtgagaggggcacagagggcctccagggagacggtcctattgtgcctcttctcctgggtgtctgtcacctgcatgcaaactttgtgatcattcactgagtcacgttttcttacatgtctccttaaaaacagttcttaaaagctccaatgtgtatttcactaacaaaaaaagtaaaaactggcctcagtggcctcaa

SEQ ID NO: 230841 - DNA, 420 bp, Homo sapiens
  misc_feature (33)..(33): n is a, c, g, or t
atatttaaggggaggttttaagaggcagaaagnaagaagccttcctaccatgtgctcataagcaatgggagtgaatgaagagccaggcccagcaacagaggggagcctgcccacatggagcaaaaggagccggacaccagattcacccacggcgcgatcccggtgacggaggcagtgtgagcaggcaggcggcggccactctggggaagggagaaggaatgagggtgagaggggcacagagggcctccagggagacggtcctattgtgcctcttctcctgggtgtctgtcacctgcatgcaaactttgtgatcattcactgagtcacgttttcttacatgtctccttaaaaacagttcttaaaagctccaatgtgtatttcactaacaaaaaaagtaaaaactggcctcagtggcctcaa

SEQ ID NO: 230842 - DNA, 343 bp, Homo sapiens
ttcttttctccttttaaaaagcatccatgtgctcataagcaatgggagtgaatgaagagccaggcccagcaacagaggggagcctgcccacatggagcaaaaggagccggacaccagattcacccacggcgcgatcccggtgacggaggcagtgtgagcaggcaggcggcggccactctggggaagggagaaggaatgagggtgagaggggcacagagggcctccagggagacggtcctattgtgcctcttctcctgggtgtctgtcacctgcatgcaaactttgtgatcattcactgagtcacgttttcttacatgtctccttaaaaacagttcttaaaagc

SEQ ID NO: 230843 - DNA, 492 bp, Homo sapiens
ttaaaggctcaatgaataattgaaatgtagttttgattatgctgaagttggtgccattttgagttgtaattgtaactaataaattaattaaataggtgagatgatgaaatcctgtctcaagggggggcactctttcaagaatttatctacatgtcattcagaggatttatgcaggaaaaaatagacgatcagaagaaaaccctgagtcttattaatcagctacctcctccctgtaagtgcgggagcccgctaataattcacagtcaccccagtgtgagaggaaggagggcagcacctgctcctccctagaactctgtctgacttctccctcaagtcagaagaactggagacgggaaggggtgtggctgtcactgtttatcccatgagggtttactggggtcccccctctggatgcctggattcagccgtggatgaaacaaccattggtcccactcgctgggaaagggcagaccctgagcgaagctgcggccg

SEQ ID NO: 230844 - DNA, 210 bp, Homo sapiens
gtcacaattgccttattttggattagactaatatttattttttcactttcagtgtgttaatttgttaaaaatcctttatttttagtagttgcattagagattggactgtgcaaacctgatataatctactttaaattttactttcactacttccccaatgatgccagaatctcacgacttcatttaccaaccccatcttctgcattattg

SEQ ID NO: 230845 - DNA, 466 bp, Homo sapiens
gtgctaagctagtggcaaaaccccgaagctatttggtctccttgcgggagctcggcgcttgctggggccacgctctgcttgcttgggcgtggcctcctgtgagagggggccctaggatgaggcgatatgctggattcctgggcttccttaacatgagccctcccctgctgtagacgtgaatggaacccgttaagttatgggaacgttcccggcactcctttcctttcctctcaagtgccagtgggatgtccgaatagggtctggcaccatgactgtctggactcaaaagtgccttcaggaggccctagcaaaatttactagtgtctgcttggagtagtagcagctcttgtgatggactccggacagccagcgttcattccctgactcccttctgttactttttaagtaaaataatgaaaatatttcaaatagagtaatacagattcctgtggaccgaccactaaat

SEQ ID NO: 230846 - DNA, 712 bp, Homo sapiens
accctaagaaaagattgatcaagtgtgaaaaaaagagataaaacacaaattaccattataagacatctcttctataatggagggtggtattaacaggatgaacacaagtattactgaaatactaccatgaccagtcagcaaaattgaaataacaaaataccatttctaacccatgagactgaccaaaacttaaaagtctgatactgtcaagtgttagtaagcactattgtgggctactgacagacctgtgaactcgtaaagtcattgtggggaacaactgatcattatccagtaaaactgaaacttgcaatcccttgcaccctgcaatgccattactggagcacagaggcatggagacggatggtcactacagcattgtttgaaatagaaaaaactagaaacaatttaagtgtccaacaaaaagggaataagtaaaatggggtatatgcctactgtgtagcagtgagactgcaacaggcccatacacatatctacaaataggatactttacactttcagagaaggaacacactacaggagtaccctacagtggcaggattgaaccagcattacacacataacaaggacaacttccccaaaggtaaagttatatgaagaggcaagctacaggtgacactgacagtatgacaccactatggaaactctaaaaagcccacacaaacaatatcatatgtcattcaagtatatctat

SEQ ID NO: 230847 - DNA, 447 bp, Homo sapiens
ggttgatgtgtgaagtctctgtctgcccatctgaataacaagagatggggcttgtgattttcctccacgcacccctacctgagggcctccaggaggaatgacatctcaaacagaaacctgcataacatcagcccaaaccaaggacccattttatcatcaaagaggtgtgccatgaatgcatgactgtgggatccactgctttgaccacatatggatgacttggaagctgccagcctacatgaacaatggaaaggccattgatggctcagcaaagttgccagctgagggccaatgctccccagggttggcctcgagggtggccacagtgctgtaacaacagccagtgtggtgctgaacctgcagcctacctatgatgctttgacaccaattgtcaggacacacgggtctggaaaccaaatcttggaagtaggattggttgctttccgt

SEQ ID NO: 230848 - DNA, 399 bp, Homo sapiens
caaattcccttgatttagaacatttataaacactgtataacagctgaaaccatgccatctggaaatgaaattaaagttgatagttcataagcagaaaatagttccacatgccagttaggtcctagtgatttcattatgctttctgacttttctccttcaagagagtaattgcttactcaaatcggtgcatcttgttttaaaattcatgtaagctataactcctgtccttagcttaggtggacttagaattttcataagaacgtttggccagatgcggtggctcacgcctgtaatcccagcactttggggggccgaggagggtggatcacgaggtcaggagatcaagaccatcctggccaacatggtgaaaccccacctctactaaaactgcaaaaactt

SEQ ID NO: 230849 - DNA, 380 bp, Homo sapiens
aactgcttcagaacatttcaaaatgttttctaatatttcatccagctttttctgtgtattaattgatactgtaagaaatgcatacttgcttcctgctcctttttttgtctcactgtcattttctgtgtgattgaaaacattgctacccatagctcttaaaatgtataattttacagttataatcattggagaaagactgatccgtgtttgaatatttaaacaagtgcctgggtgtggtggctcacacctatagtttcagctactcgacaggcttaggtgggaggattgcttgaccccaaggctgcagtgagctgtgattgtgtcactgcactgcagcctgggcgacagagcaagagcctgtctcaaaaaaaaaaaagaga

SEQ ID NO: 230850 - DNA, 448 bp, Homo sapiens
ccacctgcaaagcccattcgaggctcagagcccagggcgtgcatcctgcgctggccacgtgggcccctctgcatggcaaccacccaaatcccagactcccagcaggaaagcagctgttcagcacaaacccattgcaggaacagtccaggcccggcaaagcactcctagcagtcaggggacggagagacgctccaaaagccccgttcccagacaccaccttgaaagcaggcccctctgagaaggcaacctgagatctgctgcaccgagtctgtcccgcacagaagccgctctcatctcaccaaccacggtggtcactgcagcaggatgggaagagggaccaggtgtgttcctggctgttccttcctgaggagtggatggaatgtccctccttcttgtggaaagaccagggcggaacgagtggtgagcatcgtctgccacaaacacaaaa

SEQ ID NO: 230851 - DNA, 343 bp, Homo sapiens
gtaatgagtgaaaaattaagtgcttttcaaaaggagcccatggagaaagcattctgaaatggctatttggcaaggctgtcatcattttgttttactgtatgttcttttcttaaggatctttgaattgtagactagtttacatactttataaataatctaggttaatattggcaacacatgtaacagatattatacttttataattattcagaaaattatatatacctttaatccctccccaatactcactttaataaatattaatttattaccaaaagaaggtgtgagatctaagaactctgagtcttgtagcaggtaagacatttgtaagggctacttctta

SEQ ID NO: 230852 - DNA, 1145 bp, Homo sapiens
ggctgaagtgcagtggcgcaatctttgcttcaaggcaacttgtacttcccaagttcaggcaattcttctgtttgagcctcctgagtggtgggactgcaggcatgtgccactatgccccattatgtgtttttggtagagatgagatttcaccagcctggccaacagggtgaaaccccgtctctactaaaaacacaaaaaattagctgggcgtggtggtgcacgcccgtaattccagctacttgggaggctgaggtgggagaattgcttgaacccaggaggcagaggctgcagtgagccgagattgtgccacttcactccagcctgggcgacagagtgagactctgtctcaaaaaaaataaaaataaaaacccatctcaaatcatggcttaaaaaaaaataaaaataaaaacccacctcaaatcacggcttatagcaacaccctttatttgcttataatcctatgctctggcagtctgggcagagctctgctggcgtgatccaccactgctccatgggtgccagttgggactccacacacctttgtggttagtgagcagattggttggaggctgattgaccttgactggcctcatgtatgtgtctcaaagttggctggggctgtcggctgaaattccttagttctactccacatggcctttccccatggccagcccaggctgagatctgagattgaagagggtgagaacagaaagtacaagatcttcttttgacttgaaagctagcccagaatcgagggaaataaaccccaccttttgatggaaggagcttcaaagaatttgtagtcatttccaatccacgaagagtaggtacccactatttgttgaataaagccctattgaaagctttttagctatccagatgcaaattactggccaacctttgggtagaattataaaattctgcccaaaattctaccaaattactggtacttgtaaaattctaccaaataactggccaacttttgggtagaattgtaaaaattaagttgtaaataaagcctattgcctaacaggaacttcaaagtcagagaatcctaaaatgattgtgctacacagggccacatagagcacagctctgtctcaaaaaaaataaaaataaaaacccatctcaaatcatggcttaaa

SEQ ID NO: 230853 - DNA, 657 bp, Homo sapiens
  misc_feature (197)..(198): n is a, c, g, or t
  misc_feature (202)..(202): n is a, c, g, or t
  misc_feature (210)..(210): n is a, c, g, or t
  misc_feature (212)..(213): n is a, c, g, or t
  misc_feature (219)..(219): n is a, c, g, or t
  misc_feature (227)..(227): n is a, c, g, or t
agcccctctgcctggctgcccagtctggaaagtgaggagcatctccgcccggccgccatcccatctaggaagtgaggagcgcctcttcccagccgccatcacatctaggaagtgaggagcgtctctgcccggccgcccatcgtctgagatgtggggagcgcctctgctccgccgccccatctgggatgtgaggagcnnctcngcccggcngnnaccccntctgggantgtaaagaactggccaagtccaaggcagaagtggcctgcatcgcagtgtacgaaacagacgtgtttgtcgtcggaaccgagagaggatgcgcttttgttaatgccaggacggattttcagaaagattttgcaaaatactgtaggcgttttaattttatcctttgtattcccaatctcaaaaggatcgcaggcaagacttccacagtattttcttctaagctatcataagcattctcctagaaacgatcctaacacatcttcttggattcagcttaccaaataaacactgcttaacactgcagagtccaagacaaatggtcattttattttatactaggtcctcagcggtactctggtttattagaataaatttcaaggacatagaacaaattatctttaattcctaaaataaacaccattttacaaaata

SEQ ID NO: 230854 - DNA, 380 bp, Homo sapiens
tatattaatttttatatttttatataacacacccccgcaccactgtgtaaagaactggccaagtccaaggcagaagtggcctgcatcgcagtgtacgaaacagacgtgtttgtcgtcggaaccgagagaggatgcgcttttgttaatgccaggacggattttcagaaagattttgcaaaatactgtaggcgttttaattttatcctttgtattcccaatctcaaaaggatcgcaggcaagacttccacagtattttcttctaagctatcataagcattctcctagaaacgatcctaacacatcttcttggattcagcttaccaaataaacactgcttaacactgcaaaaaaaaaaaccatctgccctcgttggcctaaga

SEQ ID NO: 230855 - DNA, 503 bp, Homo sapiens
ccatggtagtcatagcttctactacctgttctggtgacagcatcttcctcactattgtggactgaactgtgtccctccaaattcatatcttgaagccctaacactcatacagtgagtatatgtggagatgggacttttagagagttatggttaaggttagatgacatcataagggttgggggccctaatccaatagggctggtgtctttaaaagaagaggggccgggtgcggtggctcacgcctgtaatcccagcactttggaggccaaggcgggtggatcacttgaggtcaggagttcgagaccagcctggccaacatggtgaaattcccgtctctactaaaaatacaaaaattagtccggcatggtggtggatgcctgtagtcccaggtacctgggaggctgaggcaggagaattgcttgaacctgggaggtggaggttgcagtgagctgagatcacaccattgcactccagcctctctgtttcaaaaaaaataaaaaaat

SEQ ID NO: 230856 - DNA, 733 bp, Homo sapiens
gtatatgtatgtgtagaaagccttctcacctttctgagaatgggtgaggataaatatgacaaaatactgcagaagtaacctcagtgaacactgaaactatgtggaaattgctttgactggaaaatgaagggagtttgtattgtggatcattaaaagataagatggggtagaaaaaataggatcagatcatgaagcacatgaaaggttaagtacatgattttagttaactttgatccaaagagtgtggaagtgctgctacttgtggtttctgagtgaagggagatataataaatgtgataattttggaaaattaatttagttgtagtatataaatgtgattgaaggtaaatggagcttggagatagaaaaaccaattaggagtctgttgtagtaattcataagattgaaagccttgattaaagtcaatagagagataaacttggagaatactttaaagggagattcttttttaaaaccagcccccaccgttttataattttacaagttgaagaagaattaagatgtggttgcaaaattttaggaagcgaaattaaataaatggtggtggtagtcatttaagtggcaaggttacaaaagggagctattttgtgagaaagaataatgtttatgttcttttacgttgaatgtaactggtggttggacatccagtagacagttttttgtttattggagaatttgtttacagtcatttctctgtgggggggaaatcctc

SEQ ID NO: 230857 - DNA, 358 bp, Homo sapiens
ttagtataacaaatgttttcaagttgtttgggaaataaataagctaggaagcaaggtttaaataagaatggtttggtttggtgctgaatgatgttgttagtacaccgcaattcaagtgttggctatgcatttgggccaatttagggaagtccaaaacaacgcacattcgctcagtagtgtgagagattaattgtaggcaggtcccatcttttttacagtattcaaacgttcaaccttaagaccccaccagggcgtctcattccaccgggaactagagaagcttgacttgtgtgatcacctcctgatgaatggactggggcggaacacagatccggaggtgggggcttctcttcaccaa

SEQ ID NO: 230858 - DNA, 1884 bp, Homo sapiens
gtttgttaccgtcacaccaccctactccagcctaggcaacaaagcgagaccccatctcttagaaaagaaaaaagaagattcacaagagggtgtggcaatattagacaggctaagcccccaggtgtacccaatgtaaccacaggggcccttcggtggaagggagaagcagaagaggtcagagtgaagccacacctgctgtgacaatggagggagaaagtggctggccaaggaactccatcagcttctagaagctggaaaaggcaaggaaacagtctccacccggagccttatgggaacacagccgcctcatgggaacacagctgccctgtgacactgattttagccccgtgaggcccatgctggacttctggcctccagaactaagatttgtggtgctctaagcaaatcataaatttgtggaaatttgttacagcagcaacagaaaactagcacaggcagcctacgtgctaattctcatcttacctgaggtggggagtacaatacaccctgtgttagttggaaagctgaaacaattctctaatgctaatactgaaattgtcaggtcggtgtaactgtgacagtccggaagcaatggaggcttcagtgagcaggaccagctgcctttctcaccaccacagcttgatctctctcacaacttcctctccacctccactgacctctgggttggttttctcctgcacgatctttccacgtgtcaggggcctggaggcaccctacaagagctgactttacatttccttcctagaggtaatcccagaacaaaagagagcagttttatttatttttttcaagagaattaaattgtttattgattacacatgataatggatgatacacaagcttcattcccatctataatttaatctggtaccattattcaattagatatgttacataggatgtgccaacaattacttttataaccaataattccatgattttgcttgggtaatcccttttaatggtgactgaaatcatgactgaccgagtcagtggctagaaaaggggctttgcctttgtaacttttgatgaccatgactccgtcgataagattgtcattcagaaataccatactgtgaatgaccacaactgtgaagttaggaaagccctgtcaaagcaagagatggctagtgcttcatccagccaaagaggtcgaagtggttctggaaactttggtggtggtcgtggaggtggtttcagtgggaatgacaactttggtattggaggaaacttcagtggtcttggtggctttggtggcagtcgtggtggtggtggatatggtggcagtggggatggctgtaatggatttggtaatgatggaagcaattttggaggtggtggaagctacaatgattttggcaattacaacaatgagtcttcaaattttggacccatgaagggaggaaattttggaggcagaagctctggcccctgtggcaatggaggcctatactttgcaaaaccatgaaaccaaggtggctattggcggttccagcagcagcagtagctatggcagtggcagattttaattaggaaacaaagcttagcaggagaggagagccagagaaatgacagggaatctacaggttacgacagatttgtgaactcagccaagcacagtggtggcagggcctagctgctacaaagaagacatgttttagacaaatactcatgtgtatgggcaaaaatctcgaggactgtatttgtgactaactgtataacaggttattttagtttctgttctgtgggaagtgtaaagcattccagctaagggttttaatataggttttttttttgcacccatgctgttgattgctaaatgtaatagtctgatcatgacgctgaataaatgtcttttgtttt

SEQ ID NO: 230859 - DNA, 583 bp, Homo sapiens
atattctattagataaccatttctggttctaaatggaaggcaactgaatatgtaattattaaaaatgacattaatacaaaattacagacaggtaaaagttctgtttaatatttacagaataaatggaccaataaaagactgtctatatatatgaggaggataaaatataactagagtgtgtgagtacaattttagtatagtgctcagagaggacttctagatgagcaatcctgaaggatgtgagacaacaatccgttatgcaaatgtctagaattagcaggtgcaaaggtctaggatgaaagtttgcttggcatgttaggaattactagaaggccagagtagccagagtacaaagggtaaggaagtaaggtccaaaaaatagtagagaacaatattccaagggaaatatggtggaatccctaggcagcataaagagctaccttttactgaattaaagggagaccaggcctggtacagtggctcacacctgtaatcccagcactacgggaggccaaggatgggggattgcttgaggctaggagttcaagatcagcctaggcaacatgacgagaccctgtctcta

SEQ ID NO: 230860 - DNA, 537 bp, Homo sapiens
ccccagtgaccaacctcaagctttgtacttgaatagactggataattaatcatattttctgagtctcattatttaagtttgaaaaaagccaccagcccaatgaagaagggcaaaaacattgagcagatctcaaaaagatctataaatgtaccgatatattttctatatgaacaaatagcgcaacaaatactgaacattttttgacattggtgaaatgtggatatcatgtattggcaaggatgtgcaccaactggcatttttgtagaatataaatgtatatcttgtttgggatggtgattaactagacatacacatttgtcaaaacttgtgaaactggaaattgtacatttaaattgagtgtatttaattttgtgtaaaatgcccttctataatatggatttagaaagtaataaatattttgaataacaaagtgttagactttgaattaatttaatattttctttgtaaatttgttaatcttcaatgatacatgtgccttccttttataattaaatgaataaacagttaatataaatg

SEQ ID NO: 230861 - DNA, 586 bp, Homo sapiens
tgagaaagccacgggaggggacttgctgggctcacagccagtgatccctgccctgtttccttatggggactgcggtcagaaatggggagtggggcagaaactgtcactgtcacggtcctgtttagagaggaaggtcggagaaaccagtgccgtggaaggctctggggcgttgacaggcgctgtccccagctcaccggctctatgaccctggaagaatggaaacttcgtcagagcagggacgtgagggtgaactgctcacccgggcaccgctggcgaccggaacccagctccctccgggctccgggagaggcggcctcagctgtgtgctggtgctgccctccagcggcgctgggtccccatggcacctggctttctcctgctccccaggggccttttcttctcccgcccacctgtcaccagccgccagggcaagtctctgtgtgactctagggtgaaggtggagggaccttgcctccgaggattcatcccacccggattccgatgagtgagggaccctctctggcacctggtgtttgaatggccagcctcacagttaataaagacaagtttggtatcaaaaaaaaga

SEQ ID NO: 230862 - DNA, 152 bp, Homo sapiens
actctccactgacggctgccccttcccttagtgaaaaagacatgcttccactattctgcagtggaataaccctcactgctctacaacaacctcttctgtgctgaatccttcagctgactcccacttctcttattattattgaatttctttat

SEQ ID NO: 230863 - DNA, 440 bp, Homo sapiens
ggcttcccaaagtgctaggattacaggcacatgccaccatgcccgtcctgctctacattttaaaaatccttctcaccacagtagtaataggagaagctagattctcctgtctgcttaatactgtcaatccctagtgatacgtgtttttttgtagaaatctatgtcctcatacagatacaaaattagaaaaatgaagagaatcttaatagccttttcagatagttttggctatactttaatattacattaaaacttaaaagtgggccgggcatggtatctcacgtctgtaatcccagcactttgggaggccaaggcaggcggatcacttgaggtaaggagttcgagaccagcctggccagtgtggtgaaaccccatctctactaaaaatacaaaaattagccaggtatggtggcgcatgacagagcaaaactccatttaaa

SEQ ID NO: 230864 - DNA, 301 bp, Homo sapiens
atttttttttcccttgcaaattatctgttgaagaaatcattgtttgtcacttagatcttctcatggtctagattttctacttgtatccctgagctgtattttaacatgtttctctgtcttctatacttcctataaataggtaagtagatcttaaaacttcatcagagtgaggtttgattattttggacaaaactacttttatagatgatcatatttgttatcttgctgcataatgaattacccctgaaacttacaggcttaaagccacaataaacatctctaacactgcacagtgtctgta

SEQ ID NO: 230865 - DNA, 461 bp, Homo sapiens
gtgcagctgcccatgcagaggctcccgtgctcctgtgctctggaaaaccctctcttccggacagcttctggccctctctgttgctctgtctggcatcacccttcatgccttggcactagagcctcccaaagtgctgggattataggcgtgagccactaggtggcactgctgctctgccaggcatcagggtctctagcctggcctcaccctgagtgctaaagttcttgaggtgccaaagctgactggtggctcctgcaaggtgtgggtgaaaaatagaagactcccttacagaagtccagagccgtgctgtgccacagaggagtaaaggcaagagaagccatttaggctcataaaggcaggaacacccatcccatcttcatttaaaattttgttaatcatgggtgttttttgcactaaccttgattttaaaaagtattgcaatacaatatgattaattttga

SEQ ID NO: 230866 - DNA, 624 bp, Homo sapiens
attcaaaccaatccagggactagaaaatacttccaagaggacacttacagggtgagcctactctattctttttctctcaaaaatggaagattaaaaagttttattaattaggtgtttgctttaatcaggaccatttatttgatatatattattaaggatttcaacaaaattaactcttttgtaataagaaaaaacattacttttgcatggaaaatacagatccatggaaaataattgtggcatatttcctccaagtatatggtaggattataggaggtttttcttctttatactttacatataatttgataatgtcaacatgaatttcataaataattatacaagtgaagttttaaccccttttaaattgtttagtccaactttatttaaaaatgtatatatatttttttaaattaagaccctaagctcattcaggaaagtgagataccatggtgtttttggtgcagataagtggatttttaaactagtaaaaactaaaaaatcagacatatgaaggttatcaacacatcattgtagtccatcagttttctaaaaatcaagggagtggaagacactcgggatagataagaaacccgctggtccaaatgcagtggtgtttacaac

SEQ ID NO: 230867 - DNA, 348 bp, Homo sapiens
gtgccggcacctggagctgcccaccccatggcagcagccagcatgtctgtgcaatgcccggaccccacactcgctcacacacccctctcactgctccacgtctgactcatcccttggaggcgtgggatccaggccagtaccacgagctaagcgcagcctgccaggccgagtgggtggaacgagcctagctggcccgagcaaaactcagtcaaaggcgccaccagccacaggtttccagccagaaaagcgacaccccagagatccccataacagtatctcaataaattttagagaaatagaaaaagcaactagaatgagaataaagctgtaattgattttttaaaaaac

SEQ ID NO: 230868 - DNA, 280 bp, Homo sapiens
gagggggctctcgctttttatttttatttttttgtgagaggcagtctcggccatattctcttattctatttgacttttatattacacacatgttatttaagtttaaaaacagattaaaattgggccgggcgcggtggctaacgcctgtaatcccagcactttgggaggccgaggcgggcagatcacgaggtcaggagatcaagaccatcgtggctaacaacggtgaaaccccgtctctactaaaaatacaaaaaattagccgggtgtggtggcgggcgcc

SEQ ID NO: 230869 - DNA, 485 bp, Homo sapiens
tgtcagccaaaactatagaagtctagcaagacaagctggcatctgtcatcacactgctgttttgaaactatttgagaggaatttcatgtctgctaaagctaaagaaggctacggaagctttagtaacttgtcctctacaaaagatacctaagtcccagagatcatacatgaaaatgatgattggaatatcagtatgagatcattttcaaagactcctagccaagagtgtttattgctaggataagatgaccctaacagaaaggaaatatagaaagtaacatcaggggcacattatgaaaggatatcatctcaagaagagccattctgcactaagaaaattgtagtgaaatgggaaaaacaagttttcagagaagccatgaaagggctccaaaagaaaaacactcaggtctgaatattagtaaggcctaaataatcaatttaatttaaaaattactcaaacaagaatttagatatctccttttttt

SEQ ID NO: 230870 - DNA, 599 bp, Homo sapiens
ttcagcaagagtgagcctctgtcttcagcaggctgtctcagccagttccctacattcagccttgagccacttgccttaatacctcacttagcatgtgagtttcctgttgctattgtaacaaataacacaactgtggggtctgaagacaatacaaacatattatcttgtagttgtggaggagtaatgtctaaaataggcctcactgatctaaaatcaaagtcagcagagctgtgttccttctagaggctgtagaggagaatccgtctcatcgacttttccagcttccagaggcagctggcatcccctggctcctggcctgctacctccatcttcaaggcccgcaaggttgggcccagtctttttcacacttttctcaagctctctgattctccggtttctgcctctttccacttaggacttgtgattatattgggctcaccaggttaatccaggataatttcccgtgttagcttcctccctaactttaaggacaattaattagcaacctccattccacctgcaaccttaattcccctttcccatgtaatccagcagattcacaggttccagagataatgaggatggggacatctttgggg

SEQ ID NO: 230871 - DNA, 445 bp, Homo sapiens
cacacaggaggttgaggtgggaggatctcttgagcccaggagttccaggctgcagtgatctgtcacaaccatggtcacaaccatgccactgcccctgagcttgggtgatagagcgtgaccctatctctaaaaattttgtttaaaaagaatgggagaggatcttgagctgataagacccaccgtgtcaggcactaagacatcttcttgcagtgctgctcactcctccctggactgtcttcagtgtcaagatgaggccgcttcactaacgagatgcgatgattcgtatgatgcaaagcccacggcttacagagagcacgtgaagatggtgtcggcagcagggttatcacatcctctggcaggcagcttgggaagggaagtttcaatctgtgttgatattttagcactgattaaaggtggatgtacaattagaccttttaaatttaaa

SEQ ID NO: 230872 - DNA, 325 bp, Homo sapiens
taattgggtgtggtggcacgtgcctgtagtcccagctactcgggcggctgaggcaggagaatcctttgaaccaggggagtcgaggttgtggtgagccgagatcgcgccactgcactccagcctggtgacagagcgagactctgtctctaaataaataaataaaataaaataaaataaaaatcatggttaatttatgaaggtctctatcaaatttactttgaaatgattacagtctgtcataacttgctgacttccttgtacctaaagaaatttagcaagtaccttttcttagtgtcatgcatttattaactgagtacttattata

SEQ ID NO: 230873 - DNA, 590 bp, Homo sapiens
ccttcccccatcaatcagcacaggcaaaggccagaagtgacaagtgattgtgtactagacaagctaatgtttgtgtggagaaaacacttttgttccctgaatctctggtggcaaaggacccagaactcaagaagcaaatcttccagtctcctttaagccttctcttccataagtggcctcctccctggaattggaaaccactgtcaagtatctacgtccctgttggcccagcgtgagacttctacacctttggctctttgaatgccacctgacatgaaccctctggccacttgcaaaaggaggtcagaggttgctgccactcatgctgctaataatgtctgataatgataaaaccacgtcctgtttgtcttgtattttatcataaagagcactttgatgtgcagattctctttccaaggtgttaggaaaacaaaagtagataagacacattttcaacccttaatgatcatttcaatccagttaattataactcgtttaatcccagaaatgtagaaaggaggataagagagttattattatccccattttccaaatgaggaagctgggtgttaaaaaataattttcagaaa

SEQ ID NO: 230874 - DNA, 520 bp, Homo sapiens
agcttgggggagaggcggatggggagaagagcatggaaaacagggaagcggctctgggaacaccacattaaagcccatcttctcccagaggtgcatctaaataaatcctggcttatttcatagctatttctgtcaggcttctatttttgctttgttaactgggaatttagacctttcgtctctcttcagccacatatttgtaaacagtctcttccctattctattagttaccatgccccgttatgtagttgcagtagaatttcaagaacatgagtgtacattcagtggaaaacgaggaaggactcaatggaagaaagggcaaagggttaggaatcttagagttgagagaaagtcccggcttcagagcgaagataaagaatgcaacaaaattctacttgctcaaactatacagggaccttgggaatgtcccaagtcagggaaattgggtcaggtcactgaaaaggaattcaaaaaaatagcgtttttatcaggggtaagagtgtgtgtgtgagacctgcag

SEQ ID NO: 230875 - DNA, 392 bp, Homo sapiens
ataaccccagctgggatcccctactttgaactaggggcctccaaaacagaagcaatgtccattagttttgtgaatgtgttttcagtccatgaatggatgctcttaggtaaaacattaataaactgcatcacgttgttggggaaaattaaatgtaaattagataattaaaaacgaagctgatgcccgctgcttggtgctattacctcttattaaaagttatgagaggtggccctgggtggaggctggttgcagggttccaatgagggtgggggcagcaagggcctgcctactggagcccagtgtgatctttagaagaggcagacctagaggatgctctggtatgggcgctggagagctctgggtgtgctggggccacagccctgttgtctctt

SEQ ID NO: 230876 - DNA, 427 bp, Homo sapiens
gaacttaaccatatataagtagttccagggtcacttcagtttcagagcctttgctgtgctgttttgagtctgtctgcacatgtccagctcaggggtgagccccagacatgtactggttcatacccagaattagggatttattttctctcctctgtaggctccacacccccactctcccattctcagttgccccttttcctggctcttgctgctcccttatagtatcacataactaaagctgccctctgaacaagctgcagaagaaaaaaataatggggattgtccccatactcttcagaccacagggaccctttttcccaatccctcttgcctcaaagatgacgtttctcttggaatttcagctgcttgggagccaccaccatgcagctctgcagtaaggctgccctcagagcagagcttggagata

SEQ ID NO: 230877 - DNA, 276 bp, Homo sapiens
acatagaaaatagtcaccatccagtgcacataaggtcacataagacgtttattagagtaatgagaaatcagggaaaatcaatggactgggtgtgttttagcaaacaacataatgacatttgaatatttctttgtttagaaaaagtggtttatagaaagaggaccaggtggattaaaaaccattgaaaattttgagcaaagtaaaatcaaaggcagattaagattatcaatatatttatagtgactaacccaaatgtaaattaatgaaattgttggg

SEQ ID NO: 230878 - DNA, 312 bp, Homo sapiens
acacctaggtggaaagaggggctacggatgcgctcagcatggcttccagccacctttgtatacctggagctgggccgcttccaccacggttgcaaggatggaggaaaagcagaaaggactggggagactggtggggtggaggtttcttccttggagagcttgcagagatgccacctgccaaagcctggggaccaaaggagggggttcttgttttaattgttcttataaaggtaatacacaccagagagaacattctaatagttctaaaaggtgtgtacagtgaaaagtctccaatttacagcattttgttat

SEQ ID NO: 230879 - DNA, 398 bp, Homo sapiens
tcaaggctgcatatccggtgatcttttatgattattatcccttacaactgaacttgagatctgaattgagttactgctatagtttgaggttaaattatctggttgctttactggcattgtgcgttgttgattaagggataatcctaagtaagaaaagttacattgtaagaaaatatagagtcaatataataactagaagataagatggctaaaagaaaaagtccataaaggatgtaaatacagtcatcccttgatatacccaggggattgcttccaggaccgcccacatatatgctaatctgcacacattcatgtcctgtaatagaccctgtggaacccatgtattggaaacacagcttttgcatccttgtgttactatgaataccatatttttactg

SEQ ID NO: 230880 - DNA, 164 bp, Homo sapiens
tgaccccaccccaccccaattctgctcctttgctgtaaattcccagctgtctctaccacatttggagttaagcccaatctgtctcttctcttgcaataatcttttctttaagaatacctcctgggagtaggagagagaaatatataaaaataaataacaaacca

SEQ ID NO: 230881 - DNA, 418 bp, Homo sapiens
ccagatttctccctgctgcttgtgaagttggaagcactgttgctggctcagcgggaagaggcaacagttgtcttgtgcacctgtgccctaaatctcctctactggtgatgagccctttacatctccagggatgcaatttcccctccctcaagtttctcccttccaatagaacttgtgtgtatgaaagctgaattaaccacattccgacttcaggaatgcaacggtctctttcaaaatgtttccaaaacaagggagcaatggcagctattaatccaagaacttagatccaacaattctctccaaaaatacaaaataacaattttcagcccagcaagaatgtatgacaagtaaattgatttatgaaaatgcattagcattttacacagaaaaaaataaagatttcttaaagataaactgt

SEQ ID NO: 230882 - DNA, 341 bp, Homo sapiens
atctgagaggagaagaaaatttaaaaggtgtttcaaacagtagggaaaaggccttgccttccaaaggaaatgtggtatcttctgtgctcagcataggatcctgaatacaatcgggaccagctgctggccaaattctccttcactccacccttggaaccaggccagagctgggcttcaaagtatatttcagtgaaagttcatttcagcttcatcaacaaacatgagtgcagccaagtaatgctgaattacccttatgtaaacaatgtttatctgttgtttccctttgaaaataactattgtgttatttgaataagccaataaaacattgttttcctttgtga

SEQ ID NO: 230883 - DNA, 399 bp, Homo sapiens
aaggctgtttcaggtcacgagttcagtgtcagcctgggtcacatagtgaaaccctgtctacagaaaaactaagaaatcagccgggcatggtgacatgtgcctgcactctcagacagtcaggaggttgaggaaagagaatttcttgagcccaggagtttgaggctgcactgagttataactgtgccatcgcactccaacctgggtgacagagcaagaccccatcttgaaaaaatttaaaaataaaaataaaaacaaaatttgtctcatgggatggggctacactgtggttagaagtagatttctagtcttgtatgtatatgttatctttttaaagattaaaaatacatggcaataggtatgttttttaagatattaagagaagattgtcaaattagccca

SEQ ID NO: 230884 - DNA, 892 bp, Homo sapiens
tgctgggtgtggatcggccgagggtcccacttctgaaatgcgggcaccagccttgccccatggggtggcgacaggacaggcaggagggcaggccgcctctgcaggctgagcaggtgtactcgacctaccgtgtggcttggggaacccctttccctctcgggactcctctagaagttgaggcccatgtgcgtggcgagcatcagctatctgacgagtgggcactgggagggtgaggtgggaggaggctgggtgcccggggcagggagttcgtgggccaggacacccaggtggccataaatcctggctgagcctggggatggcaagtgtgggcccaggcagggacgagagggtctgagcagtcaacgttgggtgtcgcaggccccagctcatgccctgtccgtgtgagggggccatagctcagagattcccggggccggacctccaagtcttgtagcagctaaagttcactctgcctcccactccgaggacagaggccctgcttcaggcccgtcgctcctggggtccaggcccctgctggggctctgggccgacagcctgtttgcctgtaagtgcatggggcctgctggggccgccccttctcagcccttctgcagtggctctccagccagacccactgcccagcactgcaggtttccaccaccgcgtggccccaaataattcccctgtgaagagttcctaagggcacagatgccatgtcggggcgtggaggtttctgactagaggcagagcccgagtagaaacaggtctgaacggatggaactgcaggctgggccccggggtgggatttggaacttcctcctctctttaacaccaacttacaaccaaaacgtctacatctgttttaaaaagattaaaataaccctcaaaatgg

SEQ ID NO: 230885 - DNA, 140 bp, Homo sapiens
aagccttctcagctttccttaaaagcagcagcatctgggaaaagaggttgtcagaaatccccttaagggaatttcacggtcataaagacagaaataccacttgaccctgcttaagtaagcattatcacaaacttcatctc

SEQ ID NO: 230886 - DNA, 256 bp, Homo sapiens
gctctgtgtccccacccaaatctcatcttaaattgtaatccccacatgtcaagggagggacctggtgggaggtgattgacacataggggtgttttcctctatgctgttttcatgatagtgagttcgttctcagatctgatggtttaacagtgtttggcagttccccacccatgctctctcttactcctgacaccctgtgaagaaagtgcctgcttcccctttgccttctgccacgatagaaagtttcctgaagtct

SEQ ID NO: 230887 - DNA, 663 bp, Homo sapiens
cagtatggaaacagaggaaggtcccaagtgataggacggcctgacttggcacttgagtcagatttgtctgtgttccaatcagcattgccacttcctgggttttacaccttgaaacctttttttcacttaattcaaccttagttttttattaactgtccattgcattttaaccgtagagtttccaaggtaagaaaatgtttaagaggtggatttcagaaaagaccttacatatatagtcaaatattcacttgttaaaaattctgatttacctttttcttccctagagtatagtaagtttgtcaggcctgttcctttttaggggtgattttaaacagaatccccgggcgtagctgtgggaatgctaccagggaaagtaatagggaaaatcctcttcccgtatggctataggaaatgaatacatttccacaaaaaaagtagtagattaattggtgaattacattgcttcatcaaaatattagttcctcttttttgcagggtagaggacttgtggagttgatatctctacttatctagatcgtctgagtttaatactgaattttacaagatgggacttggcatctcctagatatgttcatatgtgattgtttactgaatgatttgaattacggaaataatgtgacatgtttattgtctgaaactgat

SEQ ID NO: 230888 - DNA, 492 bp, Homo sapiens
ctagccacgcatgtcccaggcccatggaggtagggaaatggggaatgaatatgtgggcaaaggcaggtccaaagaaaagcctgcatgaaggaggagggagggatcttgtctagtattgatgcctccctctatctacttctagaaaggatggagatgggttgggtaagaccccagtctccctcatccaagaagcagcagctgactgggtaagagccaaaaggcctgggttgtgatgtgaagtgtatgaccttgagccatttactcagcctctgttttatcctctgtaaaatggagacaatagtactgcctgcttcagaggattacaagtacctgtctcatagggtgattgtgaggattgaattaacacatgttgcccaggcaccgtggctcatgcctgtagtactaggacttcgggaggctgagatgggaggatcgcttgagtccaggagttcacgaccagcctggtcaacgtaggaagaccccatctctaaa

SEQ ID NO: 230889 - DNA, 269 bp, Homo sapiens
acttgattgctcatcaccctatacctactgacctctaccgccacctcttttggcatttacttttatttgtttacaagcgtactaatatttcagcatattttataatgttttcccccagagtactacctatgtccaagtagaggctagttgtaccccattatttgttctcttttcttcctcattaactcaactttttgttgggcacttggtggttccagaacacttccaacgtcttttgcagctgggtgtggccagatggctaggttctg

SEQ ID NO: 230890 - DNA, 525 bp, Homo sapiens
aggtcaggacttagagaccagcctgaccaacatggtgaagccccatctctactaaatgcaaagattggctgggcatggtggcgggcgcctgtaatcccagctactcaggaggctgaggcaggaggattgcttgagcccgggaggcggaagttgcagtgagccgagactgcgccattgcactccagcttgggtgacagagcaagactccgtctcaaaaaaaaaaaaaaaaacttctgaggtaggggctgtaccatatttttgccccacacccattaagcgaataccaaaaacaacttgtggaaatttgataattttatcaaatttattatttgggcaggattggcatttaccatgcttttccctattgctggcagtaaaacatgggtttaaggaagagtgtttttcagaatttacactgtatatctctgatttggaagttatataattggaatttatgattatgagattaaaataccaaaaagactaagtaacatatcagtgatgtcaatgaattgttttaaatgg

SEQ ID NO: 230891 - DNA, 340 bp, Homo sapiens
agataaatggattgaaatgatgggtggtcctctcctgcaaagatttctatttcagacctatattgagatgcattttgtgttaagatctccaaactgagtctattccatacttccctactcatttcataaagtgaggctaaatcaggctaactagtgtcaggtataaagactttgctgcacataattgaagcaggaagtatcaactcgtcatttacagtgaatatagaagtttcctccattacttcaggtccataataaaagcctgttgtagggactcagaaatttgggtaatatttttattattattttgctctggctggagtgcagtggcatgatcata

SEQ ID NO: 230892 - DNA, 570 bp, Homo sapiens
agaaggagcattttgacatcactggacttagcatacaggcaatattaatacaggagttaaatcaaaattattttagggagttagtaagagtaagggttctcaatggaatttttctttaataaaacagggccccagagctatttgttttcctaaaagaaagcagcctaaaacgtgaagctgtaagcatagatcagcaagctggaagcttgcatatgcaaatgccaggagctatactaaaagccaggtacaccacacatgacaattttccctcctttttctgtcatcacgtgtgcaggtgtcatggcatcggccaggtagagattacatttacataataaaagattagggtagaagggacattttctttgtgggctatgtaaatggcacacctggtcaaaccaatctcctgggccctgtgtaaatcaatcactgcctcctcaatccaatcctctataaaattgaatctattctgccccaaactcagaaacccccttgggtgacccactttttctgaaagaggaagctctgtctctccctttcttctattaaactttctgcttcttaaactca

SEQ ID NO: 230893 - DNA, 618 bp, Homo sapiens
aaaaacatcagctctcaaatgtggagtctttgtatgaaagggctggcagtaagcactgaattcattcagacacagaattaagtctaaataactctagtaattacctacagctatccactttaagttgcctgtcatttttggtaaaagctgccaaatccatctgattatctcctctaactatgccaaaatggaaacacacaaaagaaaccctctcctgaacggaattaacttgctctacagataatttggggtttagagcttaccctttgaggaatagtatactgaagaaattcctcaaaagagataatacaaatcacctggcgtactgttccaagcacccaagtgcttgctttggcccttccattgacttaccatgccaccttggcaaactccttaattgctttgggattcatacaaaaaaccgatatacctgtgtagtccagctcatggcattgtaaggatcaaatggcatgctgtatgcaaaaggtctttggaatctatacacaaggctgtaaaactatgtcacactgtttggatggaaagaattctgtattcaggagccaaaatcagatattcagagacaaaaaaaggaagagatggctcctgcggatctatccc

SEQ ID NO: 230894 - DNA, 460 bp, Homo sapiens
gagaaatcagcctaatccaaagtctgttggggtacctcattcttgaaatacttaagtgcttgtcttacctggtggggacagagggtgggggtgagggacaaaagacaatactaaatctaacctgatttataccactttctcagcttatatagtggggtgattcaaggggactgatttcatgagatatatccatatactttttatcaagtaatatttcaatattaaaagtatacagataacattttaatcccatcacttgtgatgcactactaatttaagttagaattacaaaactaggaaactccttcccagtcaagtaaattacaaatccttagccaggcacagtggcccatgcctgtaatcccagcactctgggaggctaaggcgggcagatcacatgaggccaggagttcgagaccagcctggccaacatggcaaaaactcatctctacaaaaatac

SEQ ID NO: 230895 - DNA, 1224 bp, Homo sapiens
  misc_feature (491)..(491): n is a, c, g, or t
cttttctctaactgatgctaaatataacttgtctttaatgcttcttggatcccttagaaggtacttcctttttaaccttaacccttttagtagttaaataattatttccataggttgctattgccaagaagacctcttccaaacagcacatgattattcgtcaaacagtttcgtattccagatactggaatgtggataagaaagtatacatttcaaggggtaggttttattattaagaaagccaaatgaggattttgaaatattctttcctgcatattatccattctagctacatgctggccagtgggccacctttcttttctgcaatttaatgctagtaatatattctatttaacccatgagtcccaaagtattagcatttcaacatgtaagcatgtcggtaagatagttgtgctttgcttagggttccctcctgtgttatggtctggaaagtgtctttaggcagaaagtctgagtgatcacagggttcnctcattaatttctcttttctgagccatcatagtctgtgctgtctgctctccagttttctatttctagacagaagtagggcaagttaggtactagttattcttcatggccagaagtgcaagttctactttgcaagacaagattaagttagagaacaccctattccactttggtgaactcagagcaagaactttgagttcctttgggaggaagacagtggagaagtctttgtacttggtgatgtggtttttttcctcatggcttcacctagtggccccaagcatgacttctcccatgtcaatgagcacagccacattcccgagttgaggtgaccccacggtccagaatcatcctcattctggtgaacctggttctctttgtggtgggcatactgggtaggagaatcacccaaaggtcacccatgagctgcagaaaaaaaggctatttgcagaaggagctcacagatcacattgaaagcattgcatattcaaacatcttggtcttctttattggcatgcccacagggtcttctgacctctgattagatcagacactttttagatattgaatcatcagtttctgtacaactatctgaataaggtatataatcaatgaaatttagaatttttttctatgcttactcctgattggtaatttgtttgggtttagaattctatacaaggccatttgtaattttcctcagcactttaaaaatattaaaccatgttttcttaa

SEQ ID NO: 230896 - DNA, 387 bp, Homo sapiens
actatttggctctttataaagtttgccaaccctgaatcaagtctagaaggaatataaaggaaaagaaacatagtttgttataaattgatagggatttgtacatatatgtgcttgggcctgaccgaatgtcatgaagttgtcagatgtttgcatctatgcttagaatcattgtgaatgggacagccagaaattcagactgataaagctcaagtactacgaacagtgttgctcctcgtcatgtgattttcctggcatacgactctaggttctgaacaataagcagtgtagtctttgcttttcacattagtgcattcctagtgaccaacaaggtggggttcttgacaggttctttttactcacatgaatgtttgagtgggacattccaca

SEQ ID NO: 230897 - DNA, 353 bp, Homo sapiens
taaaagagaacaaaatttaaatattaattctaagctgttctcttagctcagtggagctggaggaggaaggaaatggggccagatatcttcaaagtagacatatacaatggctgaacacaaacagaatcacattttgcaggtaggagattaagcgtcagaattcgtgtgacattaactggtcccctgcctgcctccagcctggctccagtcaattcaactctgagcttctggactctagccaagctgtgctcctgttcaaataccttcaacggtccccaccaacagcagtggactactaatttctttggccaagaaatcctctctccaaaagatatgtcactgaaacctaagca

SEQ ID NO: 230898 - DNA, 480 bp, Homo sapiens
ccataatttagcaaaacaaatcctgctcattgcgggcatctaaatggtatcctgttaaatttccatacatgcttttcttttctaaagttatggcctacaactagaagaagggatgaaacatcacccctacctccacatcttatttcctgtatcaaatttcgaagcccttggagatgcaaggcgggtttccctaatgagttgagaatcaatgcgaatcatctgaaatgagaggtggcccgtgggtgtaatccatccctgctggtgctccaacttggttacacatttccagaaaccagcacctccctgttgtccatgtctggtcatcagaggcctctctcctcaggtgggataaccagagaccaagaaagaaacatgtttctctcccttggaatttctcttccttagtcattttcagaaagttaggagtcggcaaccttaaggaggagtttcctatcatctctcctccacttcctcccctcg

SEQ ID NO: 230899 - DNA, 326 bp, Homo sapiens
acattcatgtcaaggggtgagaacgttcagtgacaagtgcatgaaaactgtacttatggtcaatgaagatacttctttaggagaagccaggcgacgattctggttgggaagcaatagataaggaacagttcaaaatgaccagtgaaaatctttaggcattaaggatccagtcactgatctaaagtaaggcttctctaaggcttaaggattagagtatctttaggaaaagcaacttatgtaaaagatgtctcaaagaacagaataatggtccataaatattagaagatagaagtcctaaaacaactaagagtaccataataaaaaga

SEQ ID NO: 230900 - DNA, 722 bp, Homo sapiens
actcctgacctcaaatgatctgcctgccttggccacccaaagtgctgggattacaggcgtgagccactgcgctcaacctaggtgtccaccactatgctcggctaatttttgtatttttggtagaggcgggatttcaccatgttggtcaggctggtcttgaactcctggctccggttatccaccctccttgacctcctaaagtgctgggattacaggcggtgagccaccacacgtggccttgatcatgcagttttaatggaggggagtggaagtgacagtagaggccttttgacaagattttgctgaacaaatcaacaagtagctagaggcaaagttggcacaggggaggtatgacatgattgggtagaactgagcatgtttaattaccaagtagacagggctcagtggagaaaggggaaaaggaaaaaaagaagaaagcatggctccggggtatgtgaggttggacccagagcagagctgttgttcacgatgtccgctgtaaggggcccactacgtgcttacaaactcctggactctgacttgacttcacaaagtccacttccaagagtaatgtcaaccagctggagaggaggtgagagtctgtaaggctgccccagacatctgaagggctttggacaagcagggtgctggggtaggacagtgggcgatattgagggcccgcttactctatggctgttcactctgattttcttttttttttc

SEQ ID NO: 230901 - DNA, 408 bp, Homo sapiens
gctgtgtaaaattttttatgccagacctaaattttattcatgctttcaatgcctgtactttgtgtatttttaaaagctatttgcattgtaagtttgaaagtgagttatgttctctggtgtactcttagtatcttagtatcttgagtgtgttgaacttaattgtaatttatactaatttcctctctattcctttcatctcatctttaaagtgctgagggaaaggaagaggacttggtggcaagagccaagacaaaagaacaatgtgtgtgtaatttgttcagaaggtacaaagttagatttgtgatttgttgatgcattatctcatttctcaagtaattccactaagtaggcactattattcccattttatagaaaacaaaatgtagtgacagagcgagactctgctta

SEQ ID NO: 230902 - DNA, 499 bp, Homo sapiens
tgcctttaaatacttgttatgaagaagttatatttgcaaagttctaagaaagctgcaatcacttgctgttgccggaaactgccttgtggcctggcgtcctgggaatttgcttggctttttgtggccgccatccaaaactgggaaccacaagtcaaagatgctgggaaatgccatcaatccagaagagaaatgcagccgcgtgatgcctcactcaccagaagggattgcagggtgaccctgtctgattaccagcctcgacttaggaaatacagccaatgatgaaattcatggcaggcaaattccctgttcaaggtggagcaacagcatgatggatgggccagcagtgatggatagcccctctgaattttggttcatgggtttcctccggcaaggactgagttgtcccagagataacactctaccagcggctgggctctgggctgaatgcttgcttagggataacaccctcattacccagtaaagcaaattattattgaca

SEQ ID NO: 230903 - DNA, 162 bp, Homo sapiens
tatattcactcaaaaacacataatgattcaccaaatcatttatgaatacaaatcagcaattttgtgatctcgtaagcaaatatgtctttggcacgtgaatatttttccatctgtgttcattgatgttaacaataaaaatcttgtttatgtgtataagcctaa

SEQ ID NO: 230904 - DNA, 267 bp, Homo sapiens
atatttatagtggctttattcatggtggcccagaactgggaacaactcaaatgtccttctattactgaatgaataaactgttacacatctatgtactgtaacactacttatcaatggaaacgaacttcttctttttatctgagacagagtctcactctgtcgcccaggctgcagtgcagtggcactccgtctcaaaacaacaatgacaacaacaacaacaaaccatgtgccatggtggtttgctgcacagatcatcccatcacctag

SEQ ID NO: 230905 - DNA, 466 bp, Homo sapiens
ctgtgaaattatattaaaaatttatgttaagattcacaagtatttgcagtctgaatctattgtatttatatcctgagtttgggtgataagagtctggatagtgagggatagcaggccattcacatctgttcaattcctgagttttggatagcaagagtgagagttcagagagtgggaccgggcaccgtggctcatgcctgtaatcccagcactttgggaggccaaggtgggcggatcacgaggtcaggagttcgagaccagcctggccaatgtggtgaaaccccgtctcgactaaaaatataaaaaattagccaggtgtggtggcactcgcctgtagtcccagctactcgggaggctgaggcaggagaatcgcctgaacctgggaggtggaggttgcagtgagctgagattgtgccactgcactccagcctgggtgacagagtgagactgtctccaaaaaaaaaaa

SEQ ID NO: 230906 - DNA, 553 bp, Homo sapiens
gataacgaaataagttgcccaggacaaaacaaagttttggaaaggtttgaacagactccgtctgcacagtttccttgagacatgcgaaatgtgtagggaacgaacttcctttcaatatgagcacacatttgccttccatgggataagacatgcttagtgcagctgctgtcggagagctctgtcagggcaagactcacagttgaaactccctgcctcaagttcttgtatttgcttaaacctggctgagtttttgcagctggtacttctatttgatttgcagtgtgacactgcccttctcattttctgtctttgtggttgccgatttttcatttttattgatagcagcaggtggcagaaagcataagaccattataaggaatggatgtatttgtggagcatttatttatgggtcctagtagatattaaaacgttttggaggctgggcgcagcagctcatgcctgtaatcccagcagtttgggaggccgaggcgggcagatcacaaggtcaggagatcgagaccatcctggctaacatggtgaaaccctgactcta

SEQ ID NO: 230907 - DNA, 446 bp, Homo sapiens
ccactcttcaggaaagggacattcctggaggcagaaatgtagcgcagctctgaatgaggccccaaaagatgggagatgcagaagcccctttgggaggagaggacacctgggcaacccttgaccccctttcccacccccacctccaggttgggagcacgttcctgcacgtggctatgctgtggggcctctctcatgagtcagagcggagggagacagctgtgcctctggagtctgcttttaattgtctggaaatgcagagatgtctggtttttgcctgagcaaaataggagtttatttttgtactatcccgagctggctaaggagagtcacgtagctgtgggcggggtcttggggatgaggaggggtacagcaggcagggactatgctgaagtggagctgggattacaggtgtccgccaccacgccgagctctatgcagtctcaaaa

SEQ ID NO: 230908 - DNA, 460 bp, Homo sapiens
tgaggttgaggcaagagaattgcttgaacccaggaggcagaggttgcagtgagcggagatcacaccactactagcttggcaacagagtgagactccgtctcaaaaaataaaagaagacctgtctgatagggaaggttcttttaagtgagagaaagatctttaatttttatgtatttatttatttggagacagggtctctgttgctgggtttggagcagtggtgcgatcacacctcactgcagcctcaaactcccaaattcaagtgatcctcccacctcagctggtgtgtgccgccacacttggctattattatttatttatttatttatttatgtagaggcgaggtcttgctctgttgcccaggctggtctcgaactcatggactcaagcagtccttgcctcagcctcccaaagtgctggaattataagcatgagccaccgcacctagccaagttaaaaa

SEQ ID NO: 230909 - DNA, 352 bp, Homo sapiens
gcgttgggtttgaggttctgggagagcaagaacccagaagaatgcttacttgagccctgtgagaagctgggaaaatggaactgaaactctggagatagggtttggggctttggctttgtattggctattggatttgtactggtgattggtgagaggatgagaatgtcctgggggagagcttccttttggaaatgggaagaagtgggttgaggtctgaatgataaaatgaaccagctacaaacagttcaaagtctgttattgactttttggggtcaagtgccatatcttgcaaataaatcaaatgtttatccgaatagaggagtaaaataacagtctccaacttttgaacatg

SEQ ID NO: 230910 - DNA, 516 bp, Homo sapiens
tttatgattatcctctgcttgtcaaactcattattgtgactcagcaaatttgatttgagctttgtaaacaatgtttaatgaaataaaaaaaaattaggtaactcaaatatcatctaggtattgccaccctttaatataaaatatgttgagattgaagacttattctatgctcaaaaatccaatgccaccaatttctgcaaatcccatgtggtagagggaggattaagttctcacgctcacttttcttcccagctccctgcatctgtcaaatctcatatttctttggattcttatgacttttttttaaattcacattagcaacaaccaaaatgtagttccccttccttcatggatgacaaaaaaaatacagttaattaaaatcttggtaggtgatgggaggtttatatcacagtaatgcaaagggtgagttttagatatttttgttcttaaaagtcctttggatgcttcattttttcttgaccttttttctcttctcttacccatactcttggggca

SEQ ID NO: 230911 - DNA, 539 bp, Homo sapiens
caaaagtccctatcttaatggggcttacattccagcaaggaaatacagacagtaaataatgagttatatgtgtatcagatggcgatagctgaaacaaagcaggcaggccagggtagcgaaagttttcaggaagcggggggtttcaatttgaatgagttggttagggaagccctctctactaaaatgacattaggcagaaacctgaataaggtgagggagtgagtcttgcaaatatatattgaattcttgctatgtgcgagacactagtctaggcactggagttatacctgtgaagaacacaggcatggtttttattctccaagaacttaagaaaatttgggatatgggaaggtgggataaataaagttatcttgcttcaaagtcacttgatacttttctatatacaaaaatgactttagggccaggcatggtggctcacgcctgtaatctcagcactttgggaggctgaggtcaggagttcaagaccagcctggccaacatggtgaaaccccatctctactaaaaatacaaaaattagc

SEQ ID NO: 230912 - DNA, 605 bp, Homo sapiens
tctgcagatactttttattgcactttttcgcaggtatgccatatttcacaattaaaagtgttaaaaactattcatgtctgtacatggttagtgatttctatccgttaaggaaagatacataatgaaaagccaattccagcctcccacctctgccgcctctcagctcaaagaaccactgcccaccagattcctctgtgcttatgaagtccaagtgacacctaatgtattttacgtttttaatgtatagaaaaggcattgttccaccactcaggtcttcaccttgctcttttcacgtagctgtagtattttgaagatctctcatattggcacctgtcactctttataacagctgcagagcgttgtgttactttaaaagggtcctgttgatatttggacagtggttatttaatagctttttatcatgataaataatgctgtaatggagtcctgtataatcctgttaaatgctgtttagaatttctatagggtaaattcctacggggtgtgtgtgtgtagtgtgtacatgtggtttccttaagtggatcttgccagttcgccctccagaaagatttgctaattatacacttggtctgtttgtgctgctg

SEQ ID NO: 230913 - DNA, 598 bp, Homo sapiens
tttcactatgttgaccaggctggtctggaactcttgacctcatgaaccacctgccttggccaaagattcaagtcagtgcaataaaaaaagtacatttctgatcacatctccatttcttcaacatttacatatttatatttccaagatactccatacagcatgaatccacgaagaattaggcttcgactaagattctttctacattgatctcgagtttagcaaagggagcctatgaatgagctgccttccctgatgtcagcactgaaactcgagaaacaagtttctctgaaatctctggatcatcttacattctggcgagttctaccttctgttaatgaaggtagtcgtctctttccaactagatggtaaatttgttttcctgatttgtcattctctaaactaataacctgaagagaaaatcagtctctctccagaattttcttaaaaaaaaaaacaaaaaaaaccttctgtgacacttttccgagctaacccattcattcattgtaatcactgacaagttttttgacctattcagctattcatccttttatccatttgggtagtaacttaaattccaaacttttcccagcacaccgtt

SEQ ID NO: 230914 - DNA, 509 bp, Homo sapiens
tatgattctcactttcaagcctactgcaaaggtagctcagagtcaagtcagaagggctagtactacaatatgaagccagacaagcgcagcatgctggttcttccacaatgatatctgcaacttctgaccactcaggccactcatcttcgttatcactctgtctcttagggatttcctaacaaacctaatgtgccatgtatttccagaaactttagctgtccttttaaacaataacaatgatgccagtttaaatcatttttaaactttgttttcttttttacatttttattaataggtaatatatatttgttatagaaaatatgaacaagaaaaatatatgaaaatctctcagggaggtaaccacggtttatgttctgggatataatctactagagttaaatgtaagcatttaggcaattatgcacttaaaaataagcatgagatggtactacaaaaattgcttctgtaacctgtttttccattatatttatatatatttattcatacac

SEQ ID NO: 230915 - DNA, 204 bp, Homo sapiens
accccccccacccacaccatgagaggatttccagggcccacccgcctccagtccccgttctctctgctgctttcgaggtcaccctgggctggaaggggtgcctgggatgctgctcagacgtcttggccgccctcccaccccccaacaccccgctcctggttttcaggatgaaattgtcctcaaataaagcaagcttttgagtca

SEQ ID NO: 230916 - DNA, 449 bp, Homo sapiens
acacatggattacttttctaagtagtcattaagaagtttctctcctgggcacagtggtttgtgtctatggtccctcgtactatggaagctgagacaggagtatcgcttgagcccagaagttcaaggctgcaggtgagctaccactgtgtcgttgcactccagcctggaggacacagcaaggtgggtctatccttaaaaacaaaacagtttcccccaaaataacctctgaagtactttaaagtacagcaattaaggaatggcaagcctggtataacactgccaatgtaacaaatactggaccggctcttatccatggaggttcaattccaagccctccaaaatgtccaaaatgtcaatctctgttcttccttttctagtctagtatttctttggatgataaaaaacacactgagtcatctgattctcagaaaattcatactaaactgcac

SEQ ID NO: 230917 - DNA, 482 bp, Homo sapiens
tctgcagtttctgcatttctaatattagtccaatttttaaaaatcctgatgtaagtcagtatccatatcttgttcctaactcctcctaatattctaccattaagaagcacactggctttacggttaaaatcctatggttttctttttttatcatgttaaggtagcaaacaaatttgctatttttataaaatctaaaatatattttaaaattaattttttcatgtaattgaagtgattttattttccccttaacttactgcgatggtaatattagtagattttctgatcaactttgtgtttctagaatagaatccatttgcttatagtatattttagcaatgcactgccagcttctctctgttaataacttctcaatattgatgcttgcataatcttaagtttgaggtttcttttcaaatcatacattcatcaattttggtatctttatgctatttaataaatagaaaattttcctcctttta

SEQ ID NO: 230918 - DNA, 458 bp, Homo sapiens
ttaaatttttttaagaggcaaaagtatatacagtcgtgtgctgcataatgacattttggtcaatgtcagactgtatatacaatgatggcccataagagtataatgccatatttttactgtaccttttctatgtttatatatatttagatacacaaatacttaccatcatgttataagtgcctacagtattcagtatggtaacatgctgtgtgcaggtttgtagcttaggagcaataggctcttccacgtagcctaggtgtgtagtagactataccatctaggtttgtgtaaattcaatctatgatgttcagatgatgacagtgtcacctagggatgcatgtcacagaactgtacagtacaagctcagccaggttaggaagaaagtacacagaatagaagaggcatccaacaaagtggcctctgggtgctgtatcaaaataaataaataaataaataaa

SEQ ID NO: 230919 - DNA, 379 bp, Homo sapiens
agatgacccacaggtagcactgccaagcccaaacctaaattcaccatctttctcagcatggatttcttatttcacatgaagacaccagtatccactcagcatcttaagccaaaaacatcagcattgtttctgactgtcccctcttcctcactcatcacagtgaatttgtaaaaggcctgtcatttctaccttcaaaatgtcttcaaacatcctcaaccatctcatcatgtctgacctgttccagtcaattaactggtcctgactgtcctagttccaagctatactccacacgactgtgtgaagggcgtagcatgcaatgcacccatgctgccaccctatttatcacccctcaatggctctcccctggtgctggagatgg

SEQ ID NO: 230920 - DNA, 389 bp, Homo sapiens
gaagtggcactgaattataacccaaaatatgaaatcaatattcataagttcatactgatataaataagttattgaatacataaataaataaggacaatagagaaatctttcataggtcagttttccaaataatgtatataaatactctctagaaggtggagcataactccttgcatagtaaatgtagtttgaattatactttaagttatagggtacatgtgcacaatgtgcaggtttgttacatatgtatacatgtgccatgctggtgtgctgcacccattaactcctcatttagcattaagaatatctcctaatgctatccctctcccctccccccaccccacaacagtcgccggtgtgtgatgttccccttcctgtgtccatgtgtt

SEQ ID NO: 230921 - DNA, 724 bp, Homo sapiens
ggaaaaccaaactggaaaaatgtatggagatgttggtgaaatgacaggaacgaaagcagcttgtctgagcttgatctcttcacttcctcagtggtggttctgagcgctggtttggctgaactccacttaccagggaaaagggcataaagtaaacagggtttgtgtggaagaagtggagtagaacaaagtggagaggatctctgttcatttagtgtatctgacagtgtgcttgtcaagtcataaaacacttgaggatggaaatctggaagtcattgtatacattttcttctttccctaacatctagtcagttacagtttctgccagttcttttgctttttccatgtttttggaggctgttcctcttcgctccacatgtagtaaatgctctagttcatgacccatgtcttatctggactgccatgtcagcttcctaactcatccattcacagcaccagtgactgtaaaacagcattagtgaggataaaacagtggctgtcaaacttttttgactgtggcccccagtaaaaatacactttgtattgcaacttatgtatactttatatatgtatgaataattaaaacaaaaggttgattcaagaaaaatctttacatttaccctgtgccatgcaatcttatatcttgtattcttttctgtttcatttttttaaatgtgtgcttgccatccactaaattgattccggagttggaaaaacactgacctga

SEQ ID NO: 230922 - DNA, 529 bp, Homo sapiens
tctgggttatggactggttaatgtccagccggcctgaaatctgtggattatctgtctccctggacagagatcactgcatctgccttcggctaaaatccagataatgggacacgtctctgagtctggaacctttgaacagcaaactgggaggtgaactaagtcccccgcagcccaggtcttgggaaccagcccaggtctcgggaaccttccccccagccctgcccactttagggacttagttccaggtttcagataactttttctgacaataattaacttttaatgtatactaagagaaatgatcacgagacatcaaatctgtgacagaaagtctcccatgtaaatacatttatctaagtacaacattggttattttaaaggaaggtatgtttttaagtaaataattgtgtaggcacctgcccgtcccaaggtgccacaaggctgtgagtgacattgttttaagctgctgggcaaaccaaatctcagctccataataaatgacgtctttaattcagtgatgctatctttt

SEQ ID NO: 230923 - DNA, 389 bp, Homo sapiens
cagtaagctctcactaacttcaaagccatgtgtatatataggtattaggttggtacaaaagtaattggggtttttgcctttgaaagtaatggcaaaacagtcccggtgcggtgcttcacgcctataatcccagcactttgggaggccaaggcgggcagatcacctgaggtcgggagtttgagaccagcctgaccaatatgttgaaaccctgtgtctactaaaaatacaaaaattagtcaggcatggtggcaggagcctgtaatcccagctactcaggaggctgagacaggagaatggcttgaacccaggaggcggaagttgcagtgagctgagattgcaccactgtattccagcctgggcgacagagtgagactctgtctcaaaaaaaa

SEQ ID NO: 230924 - DNA, 486 bp, Homo sapiens
aagtccaggagatggacacatctcagctgaatcctgaagaataactaaaagttaaccaaaccaaagtggacaggaggagggatgggaggacaatctaaacagaggaaaggacctgcctcaagatgccaaggagacagcatgggcctttccaagcagatgcaagggttgaggaggttaggagactgagcaacaaagacatggatgttgaagggtacactggttccattctttcgtgccacccaagcatcctctcaataagctcgcctcccactgcacctactcttaaatgaatttgtttgacctgtggtatttcatctgcaatcacaagagactggactaacacaatgtgttcagtcaatatttacaactcgaactaaatggacctggaacttccgggaaggtagaagaaggcacagaagtagtcatcagcttactgcgaggtaagaggaggaagctacagttgagttgaggaggctttgcctggcc

SEQ ID NO: 230925 - DNA, 113 bp, Homo sapiens
gcaaactgacacctcagggacaaagagatctggacagaatcgccggacaggtggcagctgccaacaagaagcattggaacaaaccatgctgggttaataaattgcctcattca

SEQ ID NO: 230926 - DNA, 890 bp, Homo sapiens
ttagaggctacttccttctagtaacaggaagggaagttccagcatgaggtagttatccagggtagaaggtcctttgaggggcttggttgaattgagagcatcatctctagatgatgctgttcctgctgcagatctctaggatggagagaattctctctttagtcagagaagtttatgtagggaggggtattggttttgcctttgtgtgtctttaaacaaatgaacatttatttagctcagattaattaggtattttgcccacataaagacttctggaaaatacttaaacttgaaaaatcaacatcacatgttttaaagctagggagaaagaaggggggtattaaaatgatgttgattattttgtattttgccaaggtgtgtgtgtgttatttccctcccactctcatgagcagtgagtatagatctccttctctgattagtatgaatatgatggcaggactcggggatagtccctgcccttgacatagccccctaaaacggaaaaagaaaaagccagtttttgcttgtactttgaatgaagatgttttaggcattgtaccatttagcggggatgataccaggtggttgttagaattgtgcagtgtgatcattctaaacagctgctggtgctccctgtcacctcaggtgaactctgtggtctcttggagaggtagcactctgaaaatacctcaggtttgccaccgcaactctgaatacacacaaaaggaaagctgctcagcatggccattttgcatttgtataggtagtgactagatgtacacaacttaatttgctgggaatgaggggcttaatattatctgagatcattgagaacccagatcagacagaatagcttgaataagttacattttccaattaccctttttcca

SEQ ID NO: 230927 - DNA, 862 bp, Homo sapiens
cttctttaagtctcttttctcttttttcgcgcaaaaatgccggatccagcgaaatccgctcctgctcccaagaagggctccaaaaaggctgttacgaaagtgcagaagaaggacggcaagaagcgcaagcgcagccgcaaggagagctactccgtttacgtgtacaaggtgctgaagcaggtccaccccgacaccggcatctcgtccaaggccatgggcatcatgaactccttcgtcaacgacatcttcgagcgcatcgcgggagaggcgtcccgcctggcgcactacaacaagcgctccaccatcacatcccgcgagatccagacggccgtgcgcctgctgctgcccggcgagctggccaagcacgccgtgtccgagggcaccaaggcggtcaccaagtacaccagctcgaagtaagagtgtgcaagggacgcaatagatcaaccacctaaccccaaaggctcttttcagagccacttcagtaatcgagaaagcagctgtaaacacttgtcagagcgtttgatagcttttggtcaggtagggagtgttaccatggtcacggatgcattcgggtttaggactaaggagtttcctgtagtcctgtaatgagttggccctcagtcatccccgtccagtcttactgagttgcttgttatctgtgctacgagattcgaaaggtttgactcgttctgggatatttgggagggatggagggaaggaggcggggggtggttctacaccccttcggcctttaacctgtatctttaaagtcgttttcctttttgtttctgaaagtaatgaacgagatgagatttcccatacagatgagaaaccctcggtccgacctcttactatttcttag

SEQ ID NO: 230928 - DNA, 525 bp, Homo sapiens
ttttttttttagagacagagtgttgctgtatcaccccagactggagtgcagtggaacaatcacagctcactgcagcctcaaacccctgggctcaggcgatcctccccacttcagcctcctgagaagctgagactataggcacatgccatcacaccgctccaattattctaaacctagctttaattctggagtgactaagcaactcagctatttgttggagaaatgagaattcaatactcactaagtaactgatattgcttaaattaagcccctgggatacaatgatgagtaagacggtccctaacttcaaagaactgaaggtggcctagcagttacatcctgtagtcctggcgtacatataaacagcctcagaagaccaaagagaaaactaactctatctgaaggaaagaaagcttcaaaggggtgatttgggttttgaagagcaaggaagtttactaggaggataagaaggaaagcatgcctgattcaatgtcactcgccataggaagccacaccaatctgaac

SEQ ID NO: 230929 - DNA, 604 bp, Homo sapiens
ctgtgccaggctcaggattggacatttatggaataggtcaacaattatttattaggtgcttactatgggccaggctgtgtcctaggcacttagggtacagtatagagcaaaaagaaaaacacttgccctcatggagcttttattctagtggtatgttagtttgctagggctgccatagctgggtggcttaaacaacagatgtttattttcctgcagttctgtaggttggaagttcatgatcaaggtggtgttggcagggctggtttcttcaggggagctgtgcgggaaggatctgctccagacttcttcttgttgacttgtagatggccctcttctccctttgtcttcacattgtcttccctctgtctgcatccagattttctcttaaagaacatcggtcatattacattaggtcctactctaatgacctcatttgaacttaattacttctgtaaagaccctatctccaaatacagtcacattgggctgggcatggtgtctcacacctgtaatcccagcactttgggaggcttagatgggcggatcacttgagcctgggagtttgagaccagcctgggcaacacagcaagaccttgtctctaca

SEQ ID NO: 230930 - DNA, 1213 bp, Homo sapiens
cggacgcgtgggggaatactttgagagttggggagaaagtggagaaaaaaatgtgtttgaagctctttctgagctcataattttaacagctagccattgtttgcatggaaaggaaatcagaagtcaactcaatgaaaaggtagcacagctgtatgcagatttggatggaggtttcagccatgcagcctggctcttaccaggttggctgcctttgcctagtttcagacgcagggacagagctcatcgggaaatcaaggatattttctataaggcaatccagaaacgcagacagtctcaagaaaaaattgatgacattctccaaactttactagatgctacatacaaggatgggcgtcctttgactgatgatgaagtagcagggatgcttattggattactcttggcagggcagcatacatcctcaactactagtgcttggatgggcttctttttggccagagacaaaacacttcaaaaaaaatgttatttagaacagaaaacagtctgtggagagaatctgcctcctttaacttatgaccagctcaaggatctaaatttacttgatcgctgtataaaagaaacattaagacttagacctcctataatgatcatgatgagaatggccagaactcctcagactgtggcagggtataccattcctccaggacatcaggtgtgtgtttctcccactgtcaatcaaagacttaaagactcatgggtagaacgcctggactttaatcctgatcgctacttacaggataacccagcatcaggggaaaagtttgcctatgtgccatttggagctgggcgtcatcgttgtattggggaaaattttgcctatgttcaaattaagacaatttggtccactatgcttcgtttatatgaatttgatctcattgatggatactttcccactgtgaattatacaactatgattcacacccctgaaaacccagttatccgttacaaacgaagatcaaaatgaaaaaggttgcaaggaacgaatatatgtgattatcactgtaagccacaaaggcattcgaagagaatgaagtgtacaaaacaactcttgtagtttactgtttttttaagtgtgtaattctaaaagccagtttatgatttaggattttgttaactgaatggttctatcaaatataatagcatttgaaacattttctaatagttatgatacttatacatgtgctttcaggaa

SEQ ID NO: 230931 - DNA, 529 bp, Homo sapiens
gggggggtctagaggatcccgcccggtatccccacccccaggttggctgcctttgcctagtttcagacgcagggacagagctcatcgggaaatcaaggatattttctataaggcaatccagaaacgcagacagtctcaagaaaaaattgatgacattctccaaactttactagatgctacatacaaggatgggcgtcctttgactgatgatgaagtagcagggatgcttattggattactcttggcagggcagcatacatcctcaactactagtgcttggatgggcttctttttggccagagacaaaacacttcaaaaaaaatgttatttagaacagaaaacagtctgtggagagaatctgcctcctttaacttatgaccagctcaagcccctggtatccccacccagcattacagttctggaacatgttatttctccacttactggtttaagtgggttcaagtcactggataagtatcataatagagctacttagctgtggtttcaatacccttctgttaacaatttg

SEQ ID NO: 230932 - DNA, 331 bp, Homo sapiens
ccaccccgggatgctgtcggggggaagtttttattatgattatttatttaattaaaaaaaatttttttttggaaaaccatcttgtttgttgactgagggatctggtttaaaaaaaaaaaagctgcggctgctgacgctgccgggccccagtgtgtgtgtttgtgtgtgtgtgagtgtgagtgtgttggtgcatttgtcttgggtggccggagcagcgttggggaaattccgcttattcttcttcttctgcaacttgttattccggagagtctgcctgcacccctcaccccggggccggccctcccgcattcgcccccgccgccggcggccg

SEQ ID NO: 230933 - DNA, 360 bp, Homo sapiens
atggagtactcagccagctgtctcctctaccacatctctattctgtttcatattatcagttgtccgaggaactagcaagggcgtatcctgagctaactctcgccatattctcaggtatgatcaatgaactggttagtagtttctatttgtcaatcatttcttcagaaacaatttttagaaaattataaatttattaaattacaggttaaatcaaaaccagacatgtctttacataggaaatatttttttcttcaataagaactcttaattctgatcagtcacaatatttaggtttttctatcaacggcgtccttatagggttttatacctgaccttcccttcgctccctactccatcaaa

SEQ ID NO: 230934 - DNA, 623 bp, Homo sapiens
gacgtagaacccagtgtggcaccaaggcttttggcctaagcaaccagaaaaaggagctgtcctggaatggtcaagagttcagttttggacatattcagtctcaaatgcttattagacttgcaaatggaaatgtcaaataagcactgagacaaattagtctggagttgatgggagagtcccagagcaagagtcatcagagcacagccagtatttaaagtcgagagaagagatgagaccccaaaggagtgagggaaatggaggcgcaaccaaccacgctgaagagaacgaaaacacagagcataggcagtacattcagaagagtgtgtgggaactactagcccttagaggaaagacaaaacaagaggacagaagtgtacaacgtttatattctcccatccccaaaactgaaataaaggaagaacacaactggagtgtgaccaagtggctctgcacataccccacccctagctgtcctggcaacaggcccctttcataagacaacaataaaatattgcatgcaaatgaagaaaacagaaatcagaagcagggccaagacaacagcactggctcctcctttgggaaagttctgggaggagacaatgaagcagactcacatggctgca

SEQ ID NO: 230935 - DNA, 588 bp, Homo sapiens
aagacagagtctcactcacgttgtcacctaggctggagtgcagtagtgcaatctcagttcactgcagccttcacctcccgggttcaggacacgccaccacacccagctaattttcttgtatttttagtagagacacagtttcatcatggggctggtctcaaactcctgacctcaagtgatctgcccaccttggccttctaaagtgctgtattataggtgtgacccaccgcacctggcctaggaagaattttagaaagaaagctccatatcaggaattgagaagccggtgttttaattgagaatatatttgcacagaaaaatcttggcataaatattggtttacaaaacaaacaaacaaagtaatgtcctttaatcttggatcaggagctgcccaacaactccaaaaagtcagctcatgcaaaaccatccaaggacagatgaatcagccaaacaagagagaaaggggaagggaaagtgtcttttcacaggcagcttttgaggcagtgcataaaccatgcctctgcaccatccagaccagacagttgtgacacagggttgacaaagcaggacaacgaagggtagctgctc

SEQ ID NO: 230936 - DNA, 421 bp, Homo sapiens
cacatgtatgaatgaagtgaatgatgaactaagactacatgtgtaacttggataaatctcaaaaaacaacgttgaatttaaaaaattacaaaaggacggaaacatagtaccatatatatacactttaaatacacaaaataatagtaaatattgtttatgaatacaaatatatgcatggaaatgataaggattatcctcagaatagtggtgtgattgcatctgaagatgaaaggagaagggatgaggagtggaatgttagctgtttctgcaatgctttcttgtcaggaaaaaaattctgaagaaaatgtggcaagatgttaacatctgttaaatcttggtattggctgtcgtattttctcctgtacttttctctgaaatactgtacaactacacataaaaataaatatttttaaaagagtga

SEQ ID NO: 230937 - DNA, 625 bp, Homo sapiens
caaaaaacacatgaaaaaatgctcatcatcactggccatcagagaaatgcaaatcaaaaccactatgagataccatctcacaccagttagaatggcaatcattaaaaagtcaggaaacaacaggtgctggagaggacgtggagaaacaggaacacttttacactgttggtgggactgtaaactagttcaaccattgtggaagtcagtgtggcgattcctcagggatctagaactagaaataccatttgacccatccatcccattactgggtatatacgttaagattcttatacaaagcaatgtattgccttatatggtatctctataaatgtacataaagcaagtaattataattttgacatctaaccatgatatataaatctatatctcattctttgactaattttaatatcgaacaatttatatattggttggaagtttgaaagactttttttttttttagacgaagtcttcctctatcccccaagctggtgtgcaaggcgagatcttggctccttgcaacctcaacctgccaggttcaattctctggcccaaccttccgcgtaactgggattacaggtgcccaccaacccgaccggcttatttttgtatttttagtagagat

SEQ ID NO: 230938 - DNA, 554 bp, Homo sapiens
cgctgggccatgagccctcttcacttgttagctagaatcttccaggaagcgcatcggtgcctccttccctgtgcctggttcctgcgggacggcgggagggtcactggccacgctccttgattcaccgagtgcagggtgaagagctgcctcctctaacagtgacagtcatgttgtaagcatcattttgcgtggctctaaacacatttggtggccttactttccctaatgcagccacagcatcctgtctgtgaccagaggcacctccgcatctgctctgtctttatgaccagccctcgttgtccttgcagcttcgtggctcttgggtgggacaaggggtccttgtcttgtcccctcctgccctggccctggggagccctgatttctttggggaggagaggcatccacagcctggacttgacaggtgctcgccgtgagccagccctgcctctcaggcctgcctggtctgtctcctcgaaaggtcaaacagcccgtgggctcccatggatgcttcctgtggcccagggctaaggtgccatcctcccaccctcgcctgg

SEQ ID NO: 230939 - DNA, 515 bp, Homo sapiens
cagcacagagctaaagcacagtggtgacaatggccgggaatcaagtaaggtgaggtaccctatatcccatcttgctgactacccagtgtagtgcctggaacatacaaactgcacattcatactttttgggtaaattattgacaagtaaaaatgaatgaaagctaaacagtaacagaacattttctaccctttgtcttcttgagatgttttaggagactaatccttgttgttcttttccaatgtaaatttttatgaaccatcaagatgtaatgcaggcattaagattatttctgtagagattaagaacatgaaaatactgatgcttaatatttagcagaaccaaaaaaattgtggtataattacaactctgtaaaaacaaagtaggccgggcgcggtggcacacgcctgtaatcccagcactttgggaggccgaggtgggtggattgcttgagctcaggagttcaacaccaccctgggcaacatggtgaaaacttgtctctactaaaatacaaaaa

SEQ ID NO: 230940 - DNA, 413 bp, Homo sapiens
cccccgctaaaaaaaataggaagaatgaaataagacctagtatttgctagcagcacaacagcgtgactatagtcaattatttaattgtacattttaaaataactgtaaggataattgaactgtttgtaacacaaaggataaatgcttgaggggacggatacccaattttccatgatgttattactcactgcatgcctgtattgtatttcactgcagaaattccatttgattagaatgctcaaaatctactaaaggttttatgtagtatgtaaaatatgcaacatcaaaattctgaagtctgaaatatttgaccacaagaaatttagaaaaaggagttgtggattctttctgttctccattacatatatccccaaagcacacatactttaacctgtgctgaaaatcataatcta

SEQ ID NO: 230941 - DNA, 369 bp, Homo sapiens
ggcatgttggcaacatggcccccaaggaaaaaaaaaaaaaggagagatccagcacagttgctggtaagggactcttctgctgggctcccaccagcagctctaggatcagacctggatatgagatatctcttacctgttgcgcttttgaaatgtttctgtgggaacatttgtatgagcatcctatgagtgggagagtgggctgggatgtgcatcctgctccctgaacccttccatccgagactgtgcccacatccgaagcacaaggacatcaaatcatcagcacaagaacatcaacaggaatgccaccctccccagtgtctgaactccctgtccctgtcaaataaaccagaacaaatgcccatggaaaaa

SEQ ID NO: 230942 - DNA, 379 bp, Homo sapiens
actttctgagtctccatctcctcctctgtgaaataaaaatgatcataatacctccctatggggattgctgagaggagtaagtataataatcactgtgctgttcctgggcatatcaaaggtgctaaggagttgcctttgagtctgaatgtgaacaaggaagctcccggaaggctgaggtgcatctccttcatctctatatgcagagcgtaacgccatcatttgacgcctaaagacagcccagtgtttttgtagttgaattcatttgcagctctcaaccctttactcattccaggtttctgtccagtggaaaaacaaattgactgtgaccttttagaaatctaaataaatcaatgaagaaaaaagatgttaaaccacctca

SEQ ID NO: 230943 - DNA, 2138 bp, Homo sapiens
  misc_feature (1)..(1): n is a, c, g, or t
nagaaaatttgaaagaatagtacagtgatcacctgaaaatacgtgttctttaaagtccaagaatgcaaaatagcaaggagtgattaggaagttgtcttattaacctttcttttttcagaaaaaaagttctaaagaagtgataaaaataaatattttaaagttttaattacattgacaatatgtgccttttttttttttaaaaaagggactttattattcttacttcaagaccattattgaagcaccttcatttttgggaggactgtggatgattatgaatgacaggcttactgaatatcctcttgtaattaatgcagtaaaacgcttccatatttatccagaggtgagtcataatttgagacaaataatatttgtagagtgatcctctttgtcagataaaaatagtaagcacaatcttgttaagaaagggaggggacgtttcaggtttattaattgtatgtatccttatagttgagtagaatatcataagttcctcttaaaatttaaagaccccagaaacagttctctcatgaactcgaagaatgaaccttagtgtgtaaataatggccagggtaatagacaagccaaatggaaaagagggtcatgggagccaaaaagttctaaatagggatgggcttttggccttggacacctcgtgggtgagcacgatgaccacgtgaagggacagtggagtgatgagcttgaatagtgatcttggagttatgttagtaaagtaagatttatttagtcacacagccagaaatctattactattttccaacacttagcctaaaagagtatggttgttatagtagtctataaatgctagaaatttgaaaaacggagacaaaattagtgaactcagtttgtgaactcaagataaatgcttaatttgacaccatggtaaatactactgttgagtttaaagttgtctcagaatccagcatattaatgaaaagttactgctttctagtcctttattcatatttttatagcttttaaaaattattattctttagattttgaaatgcttaaaactacagacttagaaaataatattcaaatatgtgtgatcaaccatctaaaataaataaatgctaacctttgtcatttttgcatcagctattttaaaataattaaaatattataaatacagttaaaatcacctttgttctgctcctagtccaacttatacctttattaaaatttggtgtgcgtatccatccaatctctgttttcagagattgttttattatatgctttaagtccacataaatgatctcatactgaatgtgtcactgtaggattttttcttcaaaattgtatttttgaactttctgtatatatatatttctttaattttaaccattttatgaattgtaaagtttatgtatttccccatcttaatatattatttccagttttttgattacaagcaatgtaatctaaaatgtacatttttgtatggttttcttctgtatatgtgcaatattttgtctaggatatatacctagaagtggaattgttgttatagagtgtgtgctttttcagctttaccagatattggtaaattgctgtctgaagcaaatgtagcagttcacactgctgtctagaattttctcatatccttattagattttgaattgtcagaccctgcgatttttactcttatgatggctgtgatatgctttttgttttaatttgtacttcctttattatttatggggataaatatatttccatgtttaataagcatttggatttgttcttctgtcaacaacatatataaatctttgtcaccaaatcagcttttttgaggtatgacttacatgtaataaaatgtgccaattttgattgtaccattctctgagttttgacaaatgtatgaaactatatatccatcaccacaattgagttacaaaacattttcagaatgccaaaaaatgctccattgtggtaactgtcttttcccccattgaattaattgtcttggtacaatcgttgaaaattggttgaccacattatatgtgaatgtgtttctggattctattattctcttgatctataattatgccaataccacactgtcttgattactgtaactttagaataaatcttgaaagtagatagttctccaa

SEQ ID NO: 230944 - DNA, 1110 bp, Homo sapiens
  misc_feature (1)..(1): n is a, c, g, or t
nagaaaatttgaaagaatagtacagtgatcacctgaaaatacgtgttctttaaagtccaagaatgcaaaatagcaaggagtgattaggaagttgtcttattaacctttcttttttcagaaaaaaagttctaaagaagtgataaaaataaatattttaaagttttaattacattgacaatatgtgccttttttttttttaaaaaagggactttattattcttacttcaagaccattattgaagcaccttcatttttgggaggactgtggatgattatgaatgacaggcttactgaatatcctcttgtaattaatgcagtaaaacgcttccatatttatccagaggtaatcatagcctcctggtatcgcacattcatgggaatagtgaatttatttggactagaaactaagacctgctggaatgtcaccagaatagaacctcttaatgaagttcaaagctgtgaaggcatgtttcctccaaaaatgctgtcatttgtaaacattcataaacatttaataatattatgattcacttttaagaattattgtaaaattctgttgttgatttaaaaaacattagaactgactcacctcaatgagtattttacattttgaagtagttttctgagaaggctgtgtacttaaaaatttgagtataaattttggaatttgagtattaacatatcccattgtaaggcaaccttgactataagttagtcttctatttcagaatgagaagatacagaaagatgttttttggggtagcttcaatatataaattttgaggatacattaaatagtcaaatagctatttgtaatagctaatgtataaatttaattatgcatacatatttaaaaattggatatgccataatagattgatttagaaatattacatttttatatatgctcatagtccatgagaggactactaacccctcgactaactccacctggggccttggcaagaaccgctcggcactccaaccgttcggaaacgcggccccccctaagattgacgcagccttacacgatggggcccgaaactctacccgtttctaccacagaggtgcgctcaacgcccatattataggcgccccaaaggggcgcta

SEQ ID NO: 230945 - DNA, 731 bp, Homo sapiens
  misc_feature (1)..(1): n is a, c, g, or t
nagaaaatttgaaagaatagtacagtgatcacctgaaaatacgtgttctttaaagtccaagaatgcaaaatagcaaggagtgattaggaagttgtcttattaacctttcttttttcagaaaaaaagttctaaagaagtgataaaaataaatattttaaagttttaattacattgacaatatgtgccttttttttttttaaaaaagggactttattattcttacttcaagaccattattgaagcaccttcatttttgggaggactgtggatgattatgaatgacaggcttactgaatatcctcttgtaattaatgcagtaaaacgcttccatatttatccagaggtaatcatagcctcctggtatcgcacattcatgggaatagtgaatttatttggactagaaactaagacctgctggaatgtcaccagaatagaacctcttaatgaagttcaaagctgtgaaggattgcgagatcctgcttgcttttatgttggtgtaatctttattttaaatggactaatgatgggattgttcttcatatatggaacatacctaaggatgtcatgcccagagctgtagcagtcatcttgtgaccataagggaaaggtcataaaaatagcggatatatctggcctaccatccttctgctgctgaaccaatgccaacagatacttacctttcattttcttgttgaatgatataataaacaacatccatattgtgtaagcca

SEQ ID NO: 230946 - DNA, 499 bp, Homo sapiens
gcgaggcttttccaaaacatgtcaagccagagaaaggttcctgggataaagagagaggctcatgaggagacaacacttcataaatcttcagggacgcatggagtcttcaggggtttgagagagtctcaggtgacagcgggattttcctagcgtagtaaaggattcacttcaataaaaggaaaactttctaataatcagaggcttttgtgaaatcattccttgctagggctgtgcgtgaggacctcttcgggagtttttcccctgcaaaatacaaataactttggctctgcctttacaagtttagctctgtattttgcagtgggacctgaatacacatattgtgagaacgctccccagcagattttggtgcctatcgtgattaagaacaattttttattaacccatgtatgcctagtgttccattattggaacgctaagcatgtgggagttatttacatcctactgctcaaggtcattgccaaggtctgattgcaaaaat

SEQ ID NO: 230947 - DNA, 125 bp, Homo sapiens
tctctcatggttcttgacctagaaccaaggcatgaagaactcacagacactggagggtggagggtgggagagaccagagctacctgtgcacaggtacccacctgtccttcctccgtgccaacagt

SEQ ID NO: 230948 - DNA, 580 bp, Homo sapiens
atgaaagataattataactccagggaaaacaaataattcaactggtttgtttttagcccataccttccctaaaaacatcctattttagtttccttaataattatcatccttacaatggctgtggaacaaagacaatattttaagacaacatttgtctagacacacctttgaaggatgcctgaagatagtggtggtagggagggatgcagggaggagggtatagtgtatgggggaagagtaatgagggtagagcccacttgtaatttggtaattgttaatatcagttctggggaattctgaactctcaaaacaaaacaaacaaaaaatccagctgacctaaccaacctacttacctacagacaaacaaaaaccttcaaagaccctagaattgatcataattatttgaaagtgaaattatggatattttaacaattctgattgatatggctttggtttgaaagtcttccaaaatgaattaatctcttttcctgattaatcaaaagaatgtactgaatatataatcaagatgtccttcatgctttagaattctctttctgagctttttcattgtatagatctg

SEQ ID NO: 230949 - DNA, 796 bp, Homo sapiens
aatccattgcagctcgtcttatcaatgctacctttttatttttttcttttttgagttagggtctcactctgttacttaggctggaatacagtggcatgatcacggctcactgcagccttaacctcctggggtcaagccatcctcccacctcagcctcccaagtagctgggactacaggcacatgccaccacgcctggctaatttttgtattttttgtagggacggagtttcgccatgttagccaggctgcttttgaactcctgagctcaagcaatctgcctgcctctgcctcccaaagtgttgggattacagaggtgggccactgtgcctggccttctaatcaatgatacctaattctgtcttcggtcagtggaactcaactcaatttgtctcctgagtccttttgaaactattctaatcttgtcagtttcctcgctttctggtatggtaagatttccagcatcatgttgtacattttcagtccagatctgaaatcagtcatttctccaaggagccctggttttgttggaaatggtatttagcaaccagtctgggcaataagcaaattcattgccacttgtttggtcataggccttttcggtggacagagctaggaaaatattacctgattctccctctagccacacaaatcatgttaccttctggtcatctgaaggtcctctcttctccaagcggaaaccctctcaaccctgcctcagtcagtgccacagttttgaatctcctaactatatgttgtctttctgcactcttaatttgtgagtgccactcttttttt

SEQ ID NO: 230950 - DNA, 474 bp, Homo sapiens
gactttaagatagtctatttaaaaggagcatgccagacagcagctggttttggctatgaggagagactggagttgaacctgcgtttaaaatagagtatgttagttcagagactgaaagctagacaagaatggccaactatttggattctgtaacattttagatagattttagaaacccaagtgcagcattttttttcttggactcttatttgcacagaaaaagtttgttaatatcagttcaaggagattaatgctaatttgcattcatttatgcaaacagtagctctttaggaaatctagaatgttgaagctggaagagaaggtttactcattcctcatcatttggcatatcaggaaatgaagatggaagcttccgactgcttgccaaaggtcataatggagactgaatgagaatcaaggttgtctgaatcccaaatggttctcttttccccgcatgtgctgcctcctgtttgg

SEQ ID NO: 230951 - DNA, 1112 bp, Homo sapiens
ggggggcgcagggacgggcgcggtcagtgcctgagatccctgcgatcgctgggagatgacggtgaagacctgagatttaggcctgcgcggcgggtgacgacgccggtccgggtcttcactggaggacgctggccggggccttcaggtgttctcgtggcctgaggacgcgcgtccctgagaatgtgcgtgcccgcgccgcgcgggtcccacaggagcctgggcagccccgccgccgcatttccaccctgcggccgtatttccacccgctgggcgccaagcccgggatgactgcactctagggcatcactgcgcgctcacactcagcattcaggcacaagcacgttctctttataaacagtttcgaatcttgtcgagtctttctagaaggttgaaatgccctggaggagcagcgtgaatagttttttccaattaggaaaaaagaatgtggggcggctggagggagagaggcaggccgagaaggccaggtgcgtccaggagccgcagcccccgtgcctcagtttcctcctagaaacatggaggtggcggtgcacgctacaggatttctgtaagaacagatgagttaacgtgtgcaaaacatttaaaacagtgtctggtgtgtagcaagcaaatatgagtattagtcttttccttgttaaaatgtgtgcatctacatttggtgcacattacaggaagtgtatagtatggattcatattttggaaaagtaattttagaagttatttctgatgtgcttattgtaatagtgtttcttgaccacatgcttttagataatgtgaaggcaatgaagcaggcaatattgcttgcacatccccaatttaaacacctgtctgtccctccttccctctctcctttcttttcttccttaccctctctctttattccttccttcattcccttcaaggttgcggattattccattatataaatgtatcaatttattagaatagtttctatgatgtctatgatgggctttagattgtttgcaatagtttgccattataaataatgcccagtagtgctgtggtttgatttaacttgtgaaggtatatttccaaataaatcgctatgattggattgttgtgtaaaccaaaaa

SEQ ID NO: 230952 - DNA, 411 bp, Homo sapiens
agctgagctaaatgaaatgacctgtaggcccttccagatgtagaattcttggatcctaattgcatgcacaagatgaaggtgtgcaagaggaaaatgataataataacagcattaatacttaatagttgtatggctgggcatggtggttcaggcctgtaatcctagcactttcagaggctggggtggatggattgcttgaggccagagtccaagaccagcctgggcaacatggcaaaaccccatctctattaaaaatacaaaaattagccaggcatggtggtgcacacttgtaatcccagctactcaggaggctgaggcaggagaatcactggaaccccagaggcagaggttgccatgagccaagattgcaccactgcactccagcctgggcaacagagctagactctgtca

SEQ ID NO: 230953 - DNA, 438 bp, Homo sapiens
atcaaaattcaggacttggggagaattctaaaggatggagttaaatttgtaatacaatggtcctcaggtcaaagatgactagaaggaacaggtttgttgttcttttttgccaataacagagacattaaattctaatgtatgaccctagttaagtcactttacttttttggatctctgttttcctatctaatgtggaatatttttgtatttcctttgctattccaaaagtctctttggaaaatgaaaatggaaatcctttttaaatatgaatactctgaaagcacttcggttgaagtcccacatttcaccttctaaaatattgtatttcaagtgtttgtcttaatctttcagattatttcttctagtacagttatttgcccaacagattgtgtatgtttttagaaatgtaataaagacaactacctttgtggcttcttt

SEQ ID NO: 230954 - DNA, 446 bp, Homo sapiens
cttgcctgcctccatgtgaaacatgcctttcactttctgagatgattatgagccctccccagccacgtggaactgtgagtccattaaacttctttttctttataaattacccagtcttgggtatgtctttatcagcagtgtgaaaacagactaatacaggacatttctctagaaaataaattaactatgagtccatagccatcaacactcacagcagctggtatgggcaggccagcttagtaaagggatctgggtggggcaccaaaatcatccactacaatgacattgacacctttctgataagaagaatcagctgggcatggtggctcatgcctgtaatcctagcactttgggaggccgaggctggcagatcacccgaagttaggagttcgagaccagcctggccaacatggtgaaaccccgtttctagtaaaaatacaaaaaaa

SEQ ID NO: 230955 - DNA, 755 bp, Homo sapiens
tgccaggacagatgaggagttagctctccacttcccaccatgcctgcccctccttcacaatctttgttaattatattcttactctgtttccatattgaataactcacttaaattcttaccataaaagatgacaaagatacacaaaagtacagagaacctaaatacctgatataatgcataattgtaagacgcacaattatgtttcttcgtcaagaaacagaaaatacccagcccctgactcggcttctagaagtaaccgggccctccccgaggtgtagcctgggtctgaacacacctgccccgggggcagagctgctttctctccatcccctctaaccgcccttcacagcatcctgaagattaaggctccctccagaggtgggaggtggtctgggcgtccctccccaggcagcaccaggggctaaacctctcttggagttcaccctgtcttccccatgggcacctagcggggttcctggaggcggagtctgcaaaaagatggaacttccctctgtctgcggctcccagggactccacacttccctgaagctcacagccttcagcagtttgttataaaatttccaattcaaccatcttgccctccgttgtggccttcaggtaagaaaatgccaggaccctgcaggtgcctgtctctgggtttcaggtaagaaaatgccaggaccctgcagctgtctgtctctggatttcgggctagagatttgtcctgtgacctcggttctctgatgggctcaaga

SEQ ID NO: 230956 - DNA, 467 bp, Homo sapiens
ccagttgaataagctatattataaatatttctggtggctgaaaataattttgtaaaacagaaaactataaatattgtcccaaatcaagagcaagatattaaaggctgaaagtgttctcaatttcatgtataaattcaaactagaacaaacggcaaaaggcaaacagaagagttgaagagcaggaacagctgaagcctgcacaggaatgctgaaatccctcacatgagccatcttattttaggagagatctcctttgctcttgtatctcttccactcttcaatacacatatttcctttattcccatactatactttctctcaggaggaaccatctgaagggggcaaaggagcaaagtgtacccatagagtggttagaagccactcacagttttctcctggctattcaccagcctttactaagtagccaggcctattttaccaggtcagggaaaagggcaaaaaaaaaa

SEQ ID NO: 230957 - DNA, 723 bp, Homo sapiens
agcaaactaagacaaggcataactctccaacatttgtaaaggagtgtcaaatacgtcactgttgatcttcacattaaccctgcaaggtatatattattatgcgcatttaaggaaactgaggctcatcagataagtaacttgcccaaaatcacacatctacaagtagcagaaagatacatagagaactgggagcatactgcacatatttttatctgccatttttaactcagttgttttatcatggacatttcccatatcactgaaaatcaaagtatgtcagtttaggtttgcttatctcaactttgaataagctgcctaggaaatctatgtaacagaggaacatcttgaaaactaacattggaaaaaataaaaatgaaacataacttgttaaaaccagcaaggaatttagtgatcacccaagaaggccaaacactatgacaggtgacaacaaggctatggcacatcctgggtcctagaaaggctgtcctagttcatgtgaatattctgggaaggactttctcatcctccttgaccccaagaactatggagggctgaacaggcaggttgatccctctctagctctgggtctcatagagcaaagaggatgatgctattagggttcacctcacagtgtattaaaggagggaaagacttaaaatggtttacagtgaggtttgggaaacattagcaatgatttctgtgatttagaagataaaaataaaa

SEQ ID NO: 230958 - DNA, 454 bp, Homo sapiens
caattttaaaataaaaccaagtcacaaagttaatgtggaaaaggagccagctttggtccttaaaaatggagaaacctattcttgattaaagtgacagctctatttagtaggcatggatttaagattcttaaccttgtaaaagtaattcgcatttccttcctcttccatatgttatacattatgcttcaaattaaccctattttccattttagatttcattattcaaaaatgccaataatatcagtgggtgaagaaacacttaaaacatttttatccaaatattgaccttgctttggacaacatccatgtaataagtagtgagattttttccttttaatgtcaccaatatgtttatgattaaaggtcagtctgtggcaacagtttgcatctctgcgctataattacttgttctgctaaaaaataaaaaaataaaataaaataaaatcctgactta

SEQ ID NO: 230959 - DNA, 125 bp, Homo sapiens
gaatgtttcaatctttgttggcctctctgttgctttgtttgtgctgtggggctccgtgttctttatttttctgtggatcatgaatctgcagtgaatcgggaggtgggccaagacatgcaggtgtc

SEQ ID NO: 230960 - DNA, 330 bp, Homo sapiens
  misc_feature (72)..(72): n is a, c, g, or t
gctgaggcaggaggatggcttgagcccaggggttagaggttcagcaaccaatgattgccactcactccaganctgggtgacagtctcaaaaaaaacctgattatgtcactaccccctctccaactataatcatttttgttctttgcaataactcattgaagcgggtactcttatacctccattttataaaagaggaaactaaaaaaattagctgggcatggtggcacacactacttgggaggctgaggcaggaggatggcttgagcccaggggttagaggttacagcaagcaatgattgccactgcactccagactgggtgacagtctca

SEQ ID NO: 230961 - DNA, 454 bp, Homo sapiens
attcgtgtcttgagtttgaaacatttttctcatggtaactctatgctataggtagcatcagcaagtacagagctaggacataacagaagtgagcagaattggggtgaatgtcaacagagcatgtcagaggatatctgcagcaaaactaaaatccaacaatgcgtctttaggagctaagaaacatatgaatgcaaattcataattttctaaccaccctcactcaaaaaaaatccctcagcacgcaaagaaaaattttattggttggcaaaactttggccaagtatttgagttcaattatgggtgctaataagactttggtctttcttccttggaatgtgatgtcacagagcagcttatattacatatattcctattttgccttcggatacccaaaagataaaaaagtgaatattgattctcagttgcaataaaactcagtcttgatttctgtatg

SEQ ID NO: 230962 - DNA, 322 bp, Homo sapiens
accagggcaggatgagatcacagggcctcagaacctccacctgcacttcatctcccaaacccacttggtgattctctgggtatctgtcggtcactgtgatttctcccatcacttccgtggagtcaaaggctgagtaaatgtgtgcagaactgacactgcagggcgcagtgggtttggggagaatggccacctggctttgtaatctctgcctccgttctctgccacatgggagccaatctgcagtgctgacctagtcagggccccacctgacaggctggagggtgacctgaacacccaggggcgtggtaactgagatgggcag

SEQ ID NO: 230963 - DNA, 561 bp, Homo sapiens
ccctaatttcccactaaaaggtccagaaaaattgatgccacctgtagtttggcaacgtgcactaaaaagttcaaggtaccgtctttggcatagcaatttaattgctagaaatcctaacaataaatatcttaagctctaagaatcttcatatatataaaatatatggataatcattctttgtcctacatatttaagctctatcatctattttaagtaatttttttttggtatggtatgaggtaaggatcaggttctatttttctcctatatagaaatccagtgccttcatttgttcaaaggacttttcctactgtcttgttacctttgtggaaatcaattgaccatatatgtgtggctctatgtctggaatttctgttatgttctgttgatttatatgtctattgttacatcagtattacactgtcttgactactatagctttatagtaagtcttgaaattaagaaacgtaagtccttgcttgatgacttgggatacagaaaaaaaaatctcctctgagctgttctaacactcaataaagtttgtcttcatcttgctcacca

SEQ ID NO: 230964 - DNA, 743 bp, Homo sapiens
aggcttttttaaaatatatatacttcccaaaataacattgcttcagagtagtttcctaactgccctgggacaggcctgagatcctgtcccagggtacttggggggcacatcctgtcttagggagaggtattcacctccccattcccatccccagtcctggctgcttttcctaaatgcatcatttatccacccacattgccccattctaaccacatatcacctctttagagataccttccccttcattgagggagcatccctctaataaccattagctccatattctgctgggtttctttagagcacttgtgaaaatttggaagtatttaatttgttaaatcttcattgtctctttcctccattagaatgtgagctccctgagaacagggaccgtgtgtatctatattattcactctgtatccctagcccctagcatagtgaccaccacagcacaagcactctgatatcggataactgagtgagtaatagtagaagctgacatgcacctagacactaggaattcaaagatggtataagacacggcccttgtcctcaaagctttcatagtctggtagagcatatagatgtgtaaatgagtaaatatggtaatattaaccaacatatgttcattgaacagttactacggggtcttctagtaggtgatatgggaagacaaaagaatgcaaatgacaatattccagtcctcaaggagcttataatttaaaaaacttaaaatagcaaaa

SEQ ID NO: 230965 - DNA, 380 bp, Homo sapiens
gcagaactatacatgtttttgatttgacatgttatttgcaccggagaggaacaaattcatagtctaaaataatgtgtggccaggggcgggagctcacgcctgcaattccaatactacgtggaggcccaggtgagaagatctcttgaggccaggagtttgagaccagcctgagcaatacagggagaccccgtctctacaaaaaaaaaaaaaaaaaaaaaacctaaaacaaaaataagccacacatggtaagtgtgtgcctgtggtcccagctacccaggaggctgacatggtaggattgcttgagcccaaagtcgaggcttcagtgagccaagaccacactactgcactccagcctggaccacaaagtgacaccgtgtctc

SEQ ID NO: 230966 - DNA, 632 bp, Homo sapiens
gtgagccaccgcacctggctcagagggactttataaaaatgtattttaattactttttgagacagggactcactctgttgcccaggctggagtaccatcatagctcacagcagcctcgaacccctgggctcaagtgatcctcttgtatcagcctcctgagcagctgggaccacaggggtgcaccactatgactgactaatttttaacttttttgtagagacagggtctttctatgctgctcaggctggtctcgaactccttgcctcaagctgggattacaggcatgagctactgcacccatccaataattaccttttgaggctacttggtttctggactctagacgacctgataccaagtagctctagagtgtcacacactctatagttcaaacatgtatagccaatcactaatcaatgtgatgtctgtaaaccaatgacaattcctgatgaacaacttttgtaatcaccgcctctcttgattcgtccttttttctttaaaaagttgagcctttggccgggcgcggcacctcatgcctgtaatcccagcactttgggaggccgaggccggcggatcacgaggtcaggagatcgagaccatcttggctaacgcggtgaaaccccgtctctact

SEQ ID NO: 230967 - DNA, 279 bp, Homo sapiens
gaagttttagtaataaaaatattactaatggaggcaggatagggagagccatttcaagttcagaagacaagtggaaataaagacgagtgtgggaggcggagcttgcagtgagctgagatcgcgccactgtactccagcctgggcaacagagcgagactctgtctcaaaaaaaaaaaaaaaaaaaacgagcgtggaacttaaaagctccattacttagcagagaatactttgaaaacacacataaatttctaaaaaggaaagcacagaaatacagttctt

SEQ ID NO: 230968 - DNA, 399 bp, Homo sapiens
gtctatctacagatgaatagataaaatatggtatatacatacaatggactattattcaacctttaaaaagaaggaaatagctgtcatatgcaataatagagatgaaccttgaagagattatgctaagtgaaataagctagtcaccgaaggacaaatactgcatgattttacttatataaagtatctaaaatagttaaaactcatagaaacagaatagaatggtggttcctaggggctgttagaagagagagatggcgttgctattcagcgagtataaagttacatttatgtgagatgaagaaattcttgagatctgctgaacaatatcatgtctatagttaatactacattttgttgagaaggtagatctcattttaaatacccttgtggcaattatta

SEQ ID NO: 230969 - DNA, 505 bp, Homo sapiens
tgggcgttagatgaatgaatcgactcaacccgggccgccacgttgtgttcagaacaccgacagtcgctcccaggcaaccagcacctgctgcgccccgtttccagcgacctccccaaccgcgtggactcgcatccacgtgcccggcggggccgcagcagaaaggctcggaccccccaggacgatcggccggtgggggccggtggggccgcagactcggggggcggggggcgccaggcttccgggtcctgcccccgccccgtggggaacagcaggacggcgccgaggccgtttcgctttcctccgcgcccatttgccgggaggggaccccgtgctccgacctgaaggtgacggcagagcctgcgggaggcctaggccggtcccgccctacgggtcccgggggcgaccctcgcgctgacattggcgtccaggccgcggcccctgcctccgcgcccacccacgccgggcctggccctcgctcccccgggaaaagccccgccggcggccg

SEQ ID NO: 230970 - DNA, 636 bp, Homo sapiens
ggggatggtttacatttttttggaagatctacctcaatcctttcacttcattttctgtaaaatcacaggttcatgaaatatttggaagacagcatgagatctaacaacttgtgaagtgggaagaactgaccatacaatatgaccttaaatatattctcattaccttggaggcattttgacccacgaagtagcatagatatgtgctggcttccagacatgcagtattcttgtgcggacatttgcagccagtcagtggaactgactttggtggtgccatcagttagttaagccatagatgagatataagaaatatttcgcattctctactgtactggattataagttattggtaaaataatttttatgctttccttatttaaacatatttctagaacatgggttaaatagatatctataatttgattcttacgcattttactactttcaaatcacatcctctttttgatgttgcccagtgttattcactttcaggagatttatgtttaagtatatcttccatgtaaatattattttcatcttgtctttttttaaggttaaatttcaacatgttattttctataaagaatcactgacctagtgataaaaataaaacctactaaatttaaaaaaaaaagc

SEQ ID NO: 230971 - DNA, 459 bp, Homo sapiens
gttttcgtgtacatttcctgccatcccttaaaaaaagaatattagatcatataaatggaattgtataaagattcaggaaaatgttcggccaggcgcagtggctcacgcctataatcccagcactttgggaggccaaggcgggcagatcacctgaggtcaggagttcgagaccaacctggccaacatggtgaaaccttgtctctactaaaaatacaaaaactaaccaggcatggtggtgggtgcctataatcccagctactcgggaggctgggacaggagaatcacttgaacctggaaggtggaggttgcagtgagccaagatcaccccgttgcactccagcctgggcaacaagagccaaactccgtctcaaaagtaaatacataggctgagtatggtggctcacgcctgtaatcccagcactttgggaggctgaggcaggtggatcacgaggtcaggag

SEQ ID NO: 230972 - DNA, 428 bp, Homo sapiens
gagaatctcagtgacatctaagtgagctaagttgttagtctcattttaccaaggatattacctgaggagactgtaactgcttttatattctgttactacctccatgcaaagacccacagcagctctgtgaagcatttcatttatataaaataacttctttaagtttatgtagtttagtttaaaagattcattgaagcccctcctctgagcctttgagttaggttccaagagcatatatgggaataacattacttcctgctcttaagaaaactcacataaacagatcattttatggttaattctgagaggcacgcatagaatatcttagaacacagaggaaagttactcagactaacttagagcttaagtgactacttcttggaaatgacattctgagctcaaaagatggttaagagtcaagcaaaaaa

SEQ ID NO: 230973 - DNA, 1015 bp, Homo sapiens
catgtatacaaggcatttaagcttagctgggttgcatctccacatggtaaccaagtctagggcaccagaggactttgctgaccatctcctgctcattggcttaatagagtttcaacatgatgttatcttttgacctgaacattattcctattattgtgcagacttctgctagacttgtgagtcattcacacaattataatgcaatcagttgttacaatgatctctgccatgctgcaagctaggccccagtagggactctaaggctctgagttttcctctttgttatttatattcttggataccatgaagcatatttgaaatgcacacttaactagataagaaaggaccttcaccctgaaatgttagggagaatgcttattacatccttcctagaagatagagaagaatgccataaatttactttaaccatctaaatatatgagagatgtcaaggcttgtacagaggctatgccaaaattctttcttgctttccattaaaaaaaaaaaaatcactactttgaagcctggctttttttttttttaaccagaaatgtaacagtgtctcctttgttcaattgtattagcttatttttctaaagtagattcattttcaaaaacatagttacgtctgggcactgaaataaatgtaaatgctaatttcaaataaccaaagaaatcaatactattgacaggaagactgactggtctgccatctgcttgcttctgctgaaatttccagagatatcatcaggactttatgatcagatgacagaaatgtttgcctttcagctgacagttgctctggggatttgagaaaagtaaactgagcaggcctaatgaaaaacgtgaagcttcctagggtcaagatattgtccaaaatatatattggtctagtaatatagtattctggaaacttcctctagagaatgtctgtgatatttttagctggcatctcatgaaatgttagatactattctgaaaacaaaaataaatttctcatgtttagagctatgta

SEQ ID NO: 230974 - DNA, 432 bp, Homo sapiens
ttcgggcccagaattcattttcatccaacccatatttaccagtctgcccatcttgtgccaggcactgtgctaggtgctaatggtcacagtggtgaacaagccagacatggtttcctggaatctacattctggtgcaatgttcctctgcctttctcccttcttatcagtctcatttcttcttcaagagcccccctgagttcttcccacctctactcaaatcatcccagcccagagtcacatggtacctgcagaacttccctagctctcattgtttgtattgctcttttggtacttacaattctttatgttacattttgtgtttatgtattacctatgcagcttgacttttaaatgtttgaggatagaagcagccttttatatttttgtgtggtaaagcaaattggcatgcaataaaaatgatatttatcatgt

SEQ ID NO: 230975 - DNA, 274 bp, Homo sapiens
gaggtgtcctaagtgaggaacaggcccttctcagaggccctggaaggattgctacagaggggaaggacaagggtatggaaggatgacagttaatattttgtcagttacccagcgttgtcctggtaaatttaaacactcaccttccttctctgctcccacctccaccagagctcctagtccagttgctcagaacactgacagacgacccggtggcactgctcctctgacactgcagacccagtgtgtgcaggcacatgtccacaacaactctttg

SEQ ID NO: 230976 - DNA, 1252 bp, Homo sapiens
tgagccaccgcgcccagccagagagagaatttttaatggaagataaggagaagatttggcaggttttagtatgtattagggcaggaaaataaaggaatagaattacagagaatctttacttctgggttctgtgtcaaaagtaattggtagatagagattccttatgtttttctcccaagttggcattatagctctagggctgtttttaattacatgtttgtttgtttgttgagacagagtctcacactgtcatgcaggcccgagtacagtggtacgatctcactgcaacctccgcctccctggttcaagcgattcttatgcttcagcctcctgagaagctgggattacaggcatgggccaacaccccggctaatttttgtatttttagtagagacggggtttcaccatggtggccaggctgatcttgaactcctgacctcaagtgatctgcccacttcagcctcccaaggtgctgggattacaggcatgagccactgcgtccagcctagttacatgtttaaaagtgagctggtagacactttaaattttttgaataagttccctaaaattgatgttttgggtacagatttgatgcctttcctttctttaaaactgtaactataaaatgaatcaaatggaggcgtgcgtggtttgtagggttattaaagtcacagttaatcacacatggattatcttctttggatattgtctaaatggaaattcaaatatcagattaccttcctgactttctggtgcttgccactctgtttaagaggcatccagctcctgccagttattggtgcgtgctcagagaatgagacacagttttgctttcatgttagttgtgacatctaacgttgcttacaagaaacaatcactgttaaaagttgaatggaactaaacaaaattaaagatggaattgtaatatttttagaaattataataattaataccttgctgcactaattagtaattctgtacaaagcatctctgttggccacattgattgttctgtccgtgagtaaatccctactcctgctgctcttcaccctggagcatacattatggtggtacccatgtgaagagagcagctcaactgcaaagcaacgcctgcagtccagagactctgcccttgtgacttatctaatctaatgcagtagacgcccacttgaagctgcacatgtttgaatgaagcaagagaggttgggtaatttaaaggaatctgtggtatttagaaaataaatagataatt

SEQ ID NO: 230977 - DNA, 512 bp, Homo sapiens
gatttttcaattctaaaactcaatggtagtattattgatatttctgttcaccatacacaaagccagacaaagtcaagtatgcaatattattcctagttctccaagtaaacattatcctagaaacagtgcagaactttctgtccatggagtctgtggccagtcatctatacttcttctcgcatttatttaaagctttgtctcaatgtgactcttatcctttcttggggcgtgaactctcaatttccagttcatcatccctattctggttccacaaacctggtttctatggtaccatttaactatttcacttattattctttttctgttaagaatctctattaaacaccttccaacataaggaataattcatcatgtgaatgaagactgtcctcaggtttgcagactagcaaaaaagaattcctcacccaccttgattctctactgccgtgcacttcgtgtcactccccagttttagatacttcccagggtctcctttcttcagtgtcaaaaaa

SEQ ID NO: 230978 - DNA, 510 bp, Homo sapiens
taagcacctttatatgttattagttaatgcttttaagtcagagtagtttatcaaaggaaaatttgaatgattggaataaggactccacagcatctaattgtagatgtccaattcttctcatactacaaatcatttccaggaaggaaaagataggacctttgaaaaatctgatggatcggccatgtgtttttatccaccatcactaaatgatgcatcttttcctttgactggattcaataaatgtgttgttttgaatcagtttctttgaattgaaagaagccaagaaagacaaaaacatagatgctttcattaaaagcataagtacaatgtattggctggatggtgttcattccggaggaaggaatactggagttacttatccacaagtcttgaaagaatttgcacaaacaagaattattgttcacacccatggaacactttaccaagtatgtgatctaatgagatcttgcattggaaaggagcaaaataaattttttagatacttgggga

SEQ ID NO: 230979 - DNA, 425 bp, Homo sapiens
aaatacttaaaaatcaaaattattaatttgggcattgtttcattagctcttattagtctcttgtgtaacataaattacttgctgtcccatctagttatataaacttgtaaagggaccaaattcctatgtatgaagagttccttacaaaggaagaatgagtccaaattatttttaaatgccaataaaaatgattagcacattcacgggaaaagtagtggactgtgaagctaagggtaagcaattgggagatgggagtttaaatgacagggcattttaatcttttatgaattattaatggattgaagtagacatggtcctgaggtctttttggtgctgtttacaaatcagctgacagtaaaaggaaaagcaaccagttacaagttaaagaaatgtgtagtgctaaatgtgaactgctaatttttttt

SEQ ID NO: 230980 - DNA, 709 bp, Homo sapiens
aattttactacatggcagatactgttttatgaggtttccatgattaagtaatttatcctcacaggaactattacagataatcatataaagtaggtataattccatattatacccattttacagatgaagatgttgaagaactaaataatgaaataacttttccatcacacagctagtaaatggcagagccaggattcagtataaggaaatctacgccagggaaaatgcacttgtgaacttgccatggtttggaggtttcctaagtttttacataggcccctcccaggaaatggcaattcatgttctaaaacagttttttaaaactaaaacctaatcctctttgaaaagatagtaaatttgaaatacatttataggtacatttttgatagtgtgcaattcaggactcagagttggaaaacaattaacctcaggtttatttgggtagctggaaaaattaaaggactaaatgtaattttggctggagagtaaatgatcatgtaaagcaaagacctgtccaaaaaatttcatattggattcattccaccttcattatgattagccatgtttgaggtttgcattatttcttgttctttatgtggacattagttatctactttataaagaatattttactgtaatttttaaaagaaataccacaaatactttgtactattggatgtaaataaaacacttatatgcagtgaaatga

SEQ ID NO: 230981 - DNA, 339 bp, Homo sapiens
agaaattgacgttgatacaatagcatcactaactaacctaaataacttatttcagtttgccgattgtcctactagtgtcctttttaaagtccaggatccaatctagaatcccatacaacacttacttgtcacgtcttgttagtctcatctagtccggaggagtctttctataattttcacgacttaatacttttgaagagtcccgaccagtgattttgtacaatgtccccagtttgggtttgtctgatgttttcttaggataagaattagcttatgcatttttgacaacaataccactgaagtgatgttgtgcccttcccaatgttttttgttgttgtt

SEQ ID NO: 230982 - DNA, 453 bp, Homo sapiens
agctaaaatttaggggttctgttactaaaggtggaaaaattgaagaagaatgtgtaggtatggacaattagcagtatcttatatagtccacacttcttgtatatatttgcagtttttttcataggtagaaccactcactcctccctaaaagagtcaaaattctatgtagttgtgaccttcagctcaacacccaaggtctttggcttgtatgaagtacttttctttagttctccgtgtgttccttcattatcttgcaacccataaactaaaatgtaagtgtttttgcttctctctcaaccctcatcacactccatatacaatggtggagagaagagtgtgtgcacagaatatctgcaataaaaactgctttttggagaaggtaggaatgggaaatacacagttgttacgcttcttaacaacttattaaatcttgctgtgaaaatattgtgaaca

SEQ ID NO: 230983 - DNA, 385 bp, Homo sapiens
ctttgaatacatgaatcattgctatatatcatgctaagtgctatgtaatgttttaaaaatcttcagatagtacaattttgctggggtgatattgttaagttttaatattttaaatgtgcacatgtggattgtgtaaatgataatgtgtattattaggatttaaagttagaagattttttaaagtaaagccctaaaagcaactgaacaaagaaagcaaaacagatacataacctactagaaatgagagctcagatttcctgacatctcagtttgatgtttgtgtattgtatcccattgtttctctaaaatgggaaatcatgcaatgaaaatgcagaagaaagcaaaatggtgagagtttgaggtgggccttatccagtctggtttt

SEQ ID NO: 230984 - DNA, 498 bp, Homo sapiens
gtgaaactgctcaggccatcaagggtatgcatatacgaaaagccacgaagtatcttaaagatgtcactttacagaaacagtgcgtaccattccgacgttacaatgctggagttggcaggtgtgcgcaggccaagcagcggggctggacacaaggtcggtggcccagaaagagtactgaatttttgctgcatatgcttaaaaacgcagagagtaatgctgaacttaagggtttagatgtagattctctggtcattgagcatatccaagtgaacaaggcacctaagatgcgccgctggacctacagagctcatggtcggattaacccatacatgagctctccctgccgcattgagatgattcttactgaaaaggaacagattgttcctaaaccagaagaggaggttgcccagaagaaaaagatatcccagaagaaactgcagaagcaaaaacttatggcatgggagtaaattcagcattaaaataaatgtaattaaaagg

SEQ ID NO: 230985 - DNA, 274 bp, Homo sapiens
ctagtcatgcaccccatgcttgctcaatctatcacgaccctgtcacgtggaccccttagagctgtaagcccttaaaagggccaggaactctttcttcggggagcttggttcttgagatgcaagtctgctgatgctcctgtctgaataaagcctcttccttctttaacccattgtctgaggggttttgcctgcagcttgtcctgctacaagacaattcaatgtgcaaggtaaaaagtgctgataatgacgagtaaagtgatacaggttacagaag

SEQ ID NO: 230986 - DNA, 259 bp, Homo sapiens
cagagtcaggagtaactgataagccaggttgtctttatttagaagcctgtgactccagaaagcacagaacagcaaactgctcccccagctctctttgtctctggaaatcaaacatctcacttaggaagatttctacttttccattaagagaaaaaaatgggcaggactctggggaccagaaatccatgagaaaagacatctcagtgattttattattgaaatcttaacatatggtgcccaactttaaggcctctttcca

SEQ ID NO: 230987 - DNA, 429 bp, Homo sapiens
gagaaatctagatcaaggcaagtcctgggacctgtgttcattggcaggaccccatgctctggcctcccaagcactggtccagccctgggctccgtaagtccccaggcaccgtccaggtgcttcagagagcaccaggccctgagtgtttcaacatcgtgcaaggacctggggtttctgcttttgcaatcgcccctgggttcatccacacctcactgcctcatgtctcgacccctctggtggtgtcctgtcctctcattctggtcagttctgcctgcccctccaggttcgtcgtctccaaagagtgacttttgagtgttgcttctctggtaaataatttctaacggcttcccagagtcaacctgcaaaagccactcctctgccggacttctgagaaccttgtttttccccttcccctccattttctcactt

SEQ ID NO: 230988 - DNA, 986 bp, Homo sapiens
gcagctggaacatcggagcgtccatcgcacgtggcagacgccgtgtgagggagccggggtgcacaggctggagcaggagccccccggttaacagaacctgtctgtgcttctccgatcacgtgccgtgccatcagctacatctcaaagcagttttcaaaggtagcgccgcgctgcgtcaccttaaatgtgttttgacgcagcttccggaagattaaagagacatccgtgggatacatttttacatggttcgcctgcctcagtcaaaacacgtggttgttaacgtcaggtcaggagctgccatcaggagcaaagctacagtcagaacatgccgccaccaccgccgcctccaagcctggagagcagacagggcatctctctgtccccagattccagccacctggcctgcatcctgggctgaggcaaggactgagcatgtgaagaccccagggacagggatggcccctgaggagctctgggggctcggcagagcacctccgttcatgctgaagccagaggtcatcgggtcctccaaggagacctcctgccgggccaggagggagcttccatcaaagctcatctggagcggccgcgcctgcttttctcacagacacttccaaaagcagcagttcttccacgcgatcatgcgtctgggctcagggcttccagcaccctggggctctgctgggcagggccagcaaaactcagggaggcaaggaaaggttttgccctaagaagtcccagatgggggcaagatgtggtgggcggatcccagccctcaggggccagtgcagagcccagcacccgcagaacccctccctggctccccagtgggagtgagtccccggtgcgtggctgtgacctccgtggctgtgagtttccacgtgaatgccacaccccgctgtgtgcgtgtgtgcaggtgtgggtgtggccgtgtgctctgccgtgtctgttgaggtgccgtgcgcagtggctgtgtgcgtgtgtgc

SEQ ID NO: 230989 - DNA, 545 bp, Homo sapiens
tctttgtggaaatgtcacattggaagtccagaccttttcaaacagccagcgctcctttaggtgtctgtgttccaagacatttgtgaaatagaaaaatggttttaagctacacttcaaatgggctcttttttcaaagaggagactgtctgagcacataaaccctctgtaacaacggctctgtacagagttcctcattcagcagtccttgtacagtgtcttcgtgcatgtaatgctgctctaacagaatctcacagaccaggcaattataatgaacagatatttatttggctcatggatctaaaggctgggaagttcaagatcaaggagttgcatctggttagttggttggttgtttgattgatttggggacatggtttcattctgtcgccaaggctggggtgcagtggcacactcatggctgctgaggccttcacctcccaggctgaggcaggagaattgcttgaacctgggaggtggaggttgcagtgagcccagatcgcgccactagcctgggcgacagggcaagagtctgtctcaaaaaaaaa

SEQ ID NO: 230990 - DNA, 380 bp, Homo sapiens
tgagaaggttaacgtagttcattaaggtttgcataacttcttatgtttgatgactcattcacaaaaatgaaaagcaggacttaggatttgttaaccagaattatgtaaaccgtatatctagcatatctgggttaaaatcccaactctttaacattttactagctctacattcttgtggaagtctttgagttatagttccctcttttgtagaaccgaaagaatactacccatcccataaagctttgtgaagccatagtacctggtacataactctcaataattggtagttgtttttataacagtgctggtagtagttattattctaactacaaattataagttttacttaataatacaaaataaaagccactaccataaat

SEQ ID NO: 230991 - DNA, 450 bp, Homo sapiens
caggctggtcttgaactcttgacctcaagtgatccacccaccttggcttcccaaagtgctgggattacaggcgtgagccaccacacctggcctgtatttgtattttttaaccaactaattctctctactctgttcttatcctctactttcctatcacttacctcttatccataagataagtgaaaaagaggtaagtttacgtgtttcttattggaaggcaatgccatctgaaacatttgtcttgccttctgtgtgaacatcctaaaccaacagagctaacagttaagtggaaaacagacttttttttttttttttgagatggagtcttgctctgttgcccaggctgcagtgagccatgactgcaccactgtactccagcctgggtgatggtgcaagaccccaactctaaaaaaataaaaataaacagtctgatgaagagtcttttgatat

SEQ ID NO: 230992 - DNA, 466 bp, Homo sapiens
atcactgagaaatgaccttttgttatatttatttgtttcttctatttctactgtgccaagcaatataagaactcataccttctctatcatgataaaaatcaaatgtctacagatgtagcataaggaaagaagtaattttctgcatgcagttcttattttcttttgcctgtgataattgcaaatccgtcaatagaaatgaactttttgttacaaatatattttttaaaagttgattataagaaatgttggctaggttatggaacaactagagctctcatacactgttagtgggattgtaaattgtccaacattttgaggaaaagtttgacattactaaaatgttaaatgtacactgatatagattcagccattccactcttagatttatttatgtattatttttttcttagagatggattcttgctctgtcgtccagtctggagtgcagtggtgtgatctcggctca

SEQ ID NO: 230993 - DNA, 184 bp, Homo sapiens
ataggtgttcaaaaaatactaatagggtaaataaatgaattaattttatgcttttattttaatattttcatggtattaatatttctctctatgtgatattttgtatgtacctattttcttttaatttgaagatttatagtttagttatgtgctgtataaattatatttagttctttaatttttg

SEQ ID NO: 230994 - DNA, 401 bp, Homo sapiens
cagaacaaaactgaatgaaattgagaatgcatacaaagaattaacaaaaccaaagcttggttatttgaaaggataaacaagattgatagactaacaactagattaagaaagaaacagagaagatccaaatgagcacaataaaaaatgacaaaggtgacattacaactaatcctccagaaatacaaaagatcctcagagactattataaatacccctatacacacaaactagaagacagaggaaatggataaattcttctagaatttcctctggaagaacacagtctcccaagacaggaagtaattaaaagtctcctaaatcaggaagtaattaaagctctgaacagaccaatatactgttgtgaaattgaatcaattatttaaaaaacctacaaatcaacc

SEQ ID NO: 230995 - DNA, 424 bp, Homo sapiens
ttttaattttgtaagaaacaatcacatgtgggcaaattaattacaaaacaataaattatctcatcttctgtatggacactaaatacatggtaaaatatagattgaaaactaattgtattataggcaaaagctgctgtcattaacttaatttctgactttttagttttgctttaaagagcaactgattgccaggtgcagtggctcaagcctataatcccagcattctgggaggccgaggcaggtggatcacctgaggtcgggagtttgagaccatcctgaccaacatggagaaaccccatctctactaaaaatacaaaattagctgggcatggtggcgcattcctgtaatcccagctattcaagaggctgaggcaggagaatcccttgaacccgggaggcagaggttgcggtgagccaagatcgc

SEQ ID NO: 230996 - DNA, 439 bp, Homo sapiens
aattgcttttcaagttacccacttttagggaagacattatttgggttttgtttagtgtatcaggctttttttagttagttgtatcaagaagtgtagacttttctatacataatatcctttttcccacagtagtttttttttttttaaagtctagccgggtgcagtggctcacgcctgtaatcccagactttgggaggccgaggtgggcagatcacgaagtcaagagaccgagaacatcctggctaacacagtgaaaccccgtctctactaaaaatacaaaaaattagccggacatggtaacgggtgcctgtagtcccagctaatcaggaggctgaggcaggagaatgacatgaactcaggaggcagaggttgcagtgagccgagatcgtgccactgcactccagcctgggtgacagagcaagactccatctcaaaaaaa

SEQ ID NO: 230997 - DNA, 422 bp, Homo sapiens
cctcttaccagggcttgaggggggaagtgtagagtcccacaaggacttctctgaggccattcgggcatctgttctcagttctaaacaacagaacccatgacgcggggtgatggggtcaaagcgaccctccctggagccgcagccaggtgctgagtaagcagctggggtcaaagcgaccctccctggagccgcagccaggtgctgagtaagcagctggccctgcacttcagcacattcctcgcttttcttgggattgtttttccccctttttcagtgacacaacttatacaccaaatcctcctggctgatttctgttcaattcaatatataggtgatttttggtttaattttgttattaggttacaggtaattctcatataagtgttgattaaagttaacaaagattagcttcccatctcata

SEQ ID NO: 230998 - DNA, 254 bp, Homo sapiens
tgtgtttcacctgagtatggtggctcatgccataatcccagagctttgtgaggccaaggcaggaggattacgtaaggccaggaatttgagcccagcatgggcaatacagtgagatcccctgctctaccaaaaaatatttagctgagcttggtggtgtgtgtagacccagcttcttgggaggctgaagccggaggatcctggaggccaggagctatgattatgggacggaactccagcctgagagttagagtgag

SEQ ID NO: 230999 - DNA, 305 bp, Homo sapiens
taataaattttgatgactccctgataaactatatattatgaggtctttttgtggctggtaggaattcacactattcacaaccttgtgtgactgctgggaattgtttgggttgctgctgctaggtctttgcctagcctttggtagtctgtttgtacctaatgcagataagaatttaggcaaacactgcataagactttcttgcagattgcacaaatctatttgctgctctcttctgtctccagttctgcctcccaaattctaaccatcttggctttcctagactaaaatcgtttgccctaacttag

SEQ ID NO: 231000 - DNA, 493 bp, Homo sapiens
acacgtcaactggacccagacaagtttctcatctgagtcaaaatgctgtgacccagaacagggaaagggctttcacatagacacatttcatatgagcattgcttaaagacacaaaggaaggaagcctggggttcaactgtgctctcaccaccccagaacctgatttggtctcctgctgcaggtccatgctttttaccaggccagacccctctccaggggcatctcagccagttcacctggctccaggaggcctgttcccatcaggaaaagcccctgcatccattgctgggatggtcatttcttttttctttttctttttcttttttttttttttttttttgagatgaagtctcactcccatcgcccaggctggagtgccatgctgcgatttcggctcactgcaacttccgcctccggagttcaaacgattccactgtctcagcctcccaaatagctgggattacaggcgcctgccaccatgcccagctaattt

SEQ ID NO: 231001 - DNA, 595 bp, Homo sapiens
taccctagtaaccaccattctactctctacttctatgacttaaactttttaagattccccatacaggagagaaaatgcagtaattttctttctgtgtctggtttatttcacttagcataaaatcctaagggtttatttatgttgtcacataatgacaagatcttatttttataaaacagagaaatattctgctttatatatacatatatatatacacacacacacacaaaggcatacctattttttgtgctttgctttcttgcactttgcagatattgtttctacaaaccgaagttttgtggcaactttgtgtttaatatctatgagcattggtgatctgtgatcagtgatcattgacatcgctattgtaaaccacaaccatatacgacagcaaacttaaacgtgtgtgttgtgactgcttcaccaatgacaatttctccatttctcttcctgttgtcaggcctccctattccccaagacacaacaatgttaaaattaggtcaattcatatctctacaatagcctctaattattaaaattaaagaaagaattgcatatctttcaaaatcaaaagctaaaataattgagcttactg

SEQ ID NO: 231002 - DNA, 575 bp, Homo sapiens
ttctagccatagcataactggtcgtggaagttatggaataactggaagaagaatccagattttcttaaaattaaaataagtgtaatttatacaactaaaatctgctttaaaatgtgtcatcctttgtcagtattttctgtggagaaaactgttttccttttactgtgagatatttaacctgtgtaatctcctgtaatcttttcttgataattttattttagcaattattactcgttttaatgctttgaaggctcaattcatatttttttgcgtgtgaattacttgcaatcagttcacattttcaaggtatataattttaaatctgatctattgcataaggaaaaaggaaaacgaaacatgtaaactgcagctattctaaagaagtgtttataatcagttccttatgcgtgaattcataaattttcaatgatatgttaaaattgagagagagcctggatagctccttcggtagagcatcatcagacttttaatgtgagggtccagggttcaagttcctgtttgggcgtgtcctgtggcttttagcacctaattctgactctatctttgaaaaagcc

SEQ ID NO: 231003 - DNA, 612 bp, Homo sapiens
attctggaagctactcgttttccaaagataaagctcttaaaaaacatggttttgagtaacctagggttgaatcttggcttagccatctactagtcttaagaacttgagtaagctggagagctttctgaaccttagattttttaatttaatgtgaaataaggagaacagtaagagtagcataggattattctgaagattaaatgaaatcacatgtttggcacaaaattgttagcttccctttttattttcctcttactcagatttcaactacagattgctcaaattctggatttaagtttttaatactatttgatccaaatatctttgcccagaattctctgtcttttttttttttttcttatctctatacttttgcagttttgggttgtcaagatgtataacagctgcctgctcctccctgcttttgatgcattcttaggactgtactctgatctaactaccagaccccttgctgtctggtttaatttacaggttcctatttttgtttcttcctcttcctcccacttcctttttttttttaggtttgacaatctagagaaatttttccacactataaagattttaaatatctctatggaacattagtaattg

SEQ ID NO: 231004 - DNA, 411 bp, Homo sapiens
  misc_feature (63)..(64): n is a, c, g, or t
tggttttgcccattttgcagatgcagagaaatggcagtcagtgttccactagaagaaacagannccagtagaggtaggaaggtagacagatggccaacatacctaggaaaattgacttatgtgatggtgaggctggctaagcagctgaaactcagataggagcagactccagcctgggcaacacagatagaccccacctcaaaaaagaaaagaaagaaagaaaagaaacttacaaggacctggcagactactgtgtcatcagtgggtgggatccttatgagcttctgcctggggacagtcggcctcgggccttttgttgctgctgctggctgggtggcctttcccttttttttgagatgcagtcttgctctgtcgccaggctggagtgcagtggcgggatctcggctcact

SEQ ID NO: 231005 - DNA, 399 bp, Homo sapiens
gagaaaaccacattaccacagccagaggactgcagaggaagggcccccagtgggagcttctgtagtgtggaggcatgccaccgcctccagacagcatggaagcaaggggaagtagaaaagaattctaccaacctctctctccttccacttccagtctcctgtcagtccctcccattgaccaaacccaactggagccctgccagcaaaggagccatcagcttcccctggcacagggaagagcagagaaccacagtagagaatgcatctgggtggggtgtgagcaaaatagtcgacacatagaatcatcaatagcaagagtattccagagctacagattaaaaggaagcccggggaactgctccacacctagacaggtactgcaaaatttcaaaacaccaa

SEQ ID NO: 231006 - DNA, 291 bp, Homo sapiens
cactgcgaagggaaaagccccaggagagtccagtcttttcgccttcagttcaatgaaaagtatccccaaaccacgaacacacttcccaccaggctaggaagtcccagcagccaccggcgtactcctgccagagcggggcattttcccggccggcgcctgcaaaaggagcctgtagcagggggtctccaagctggctgcagagaccctccctcagagaagagactgagaacgcgggctgctacagaatcccagccgggcttctaccatccaaaccccttttggcgaattctc

SEQ ID NO: 231007 - DNA, 98 bp, Homo sapiens
gggtttttggattctcacacctctgcctccctgagaagttcgcgattcctgctccacggaaacaacccactgaactattacagtgaaaaagctcattt

SEQ ID NO: 231008 - DNA, 178 bp, Homo sapiens
gatgtttggaaccagcagagctaataaataacaagcttacgtggcaagaatgaagagttaatgtctataacgcatctataaagcaagtatatactttcctttcaatatgttgaataaaaatcaagaatgtttttttttaaatgcatgattagtccagagtaatatttttactaactac

SEQ ID NO: 231009 - DNA, 470 bp, Homo sapiens
ctagaggatgaacattagagtagaatttctgattttacttatgtgcgcctttacatttggtagatattgtcaaaatgttctctaaagtgattgttgcagttaatgctcccatcaacaatgtgtggaattctaatgcattctcaccagcagttagtattagcagactaattaatatttttaaatctgggccaggcgtggtggctcacacctgtaatcccagcactttgggaggccgaggtgggcggattgcgaggtcaggaaatcgagaccatcctggctaacacggtgaaaccccgtctctactaaaaatacaaaaaattagccaggcgtggtggcggacgcctgtagtcctggctactcaggacgctgaggcaggagaatggcatgaacccagtaggcggagcttgcagtgagccgagatcacgtcactgcactccagcctgggcgacagagcgagactccacatctca

SEQ ID NO: 231010 - DNA, 379 bp, Homo sapiens
aattcttttaatcctcaccttaaagtaaactcaattgattctggttaaatcttcctttttttcatctgaattacaagaaacccaatggtaatgtttcttgcaatatgttttataaaaattttatttggaaagtttgaaaaatttctacacataattgaaaaggataagttgggcacagtggtgcctgcgtgtagtcccagctactcaggaagctgaggcaaggaggattgctggaggcaaggaagttgaggacagagtgtgctatgatcatgcctgtgaatagccactgcactcctgcctggacaatttagcaagactctatcttttttgaaaagaaagaaagaaagaaagagaaagaaagaaaagaaagaaagaaaga

SEQ ID NO: 231011 - DNA, 386 bp, Homo sapiens
ttcatattccaagaaaaatttattgagtcatctacattaatatttaatgttccccttcctccaaagagcaaaacaggaaccaaaaaattcatacccgaggccaggtgcggtggctcatgcttgtaatcctagtactttgggaggccaaggcaggcagatcacttgagctcaggagtttgaggctagcctgggcaacatggtgagaccccatctctaccaaaaaagcaaaaaattagctgggctttgtgacgcatgcctttcgtcccagctactcgagaggctgaggtgggaggattgcatgagcccaggaggcagatgttgtggggaaccaagattgcaccactgcactccagcctgggtgacagagtaagaccctgtctccaaaa

SEQ ID NO: 231012 - DNA, 505 bp, Homo sapiens
cagagtgggcacaggctccctcactgggtgaaggaggcgcaaagaacgggaagagccatcccgggagcccaccggcctttcagtttcccttgggcccccaggcggttcagcatataaactgttaacatgaggtaagcgccaaggtctagagaaggcagtggaagagatggcaaactccggcaccatgtctgcgtgtccagtgtgctctgctggagcagcacatttttgtacattgctgtatttgaaaaaaccctgcaagaatcatgaaactggacgaccatctttataacactcccagtgataaaacaagtaagaatggctggtttgtagtcatctgagcagcctctctagtttcgtagatatggtttctctctgatatcgaacgacttccaatgtcaagcggaatgctacatcacaaggataaccgtatgtgaaaagaaccagttttctttgtaatcctgaactttctagtttgcgcattaaaagacattatttgaagaagagc

SEQ ID NO: 231013 - DNA, 354 bp, Homo sapiens
aggctccagacaactcgtaatgaatgatcataggctcttcatgttatcaaataccacagataaggaagtgaggtccccaaacaaataagccatgcatccagatctgaagttttttcaaggctctggggacactgtcatgcagggtgggtatatccctaagtccctggggtgcctacactggggcaggagcagacacatgtataaataaagaaccaaggtagttaaaagttatgacagatgaaggaaatatcataaaacagagagatgtaacaaagagtaactgggagctgaggtgaggggcatattttagctggggcagtcagggaggtcctctctgaggaggtgacatttgag

SEQ ID NO: 231014 - DNA, 419 bp, Homo sapiens
aaatgtgtcatattcgtgtaataacttagtgaaatgaaacacattaagaagcattaaggtggggatgaagtatatcagagattatctctagaattacttgattcgaaacgacatacgtacttctttgtgcctttcgatattatccaaaatgtccatatgatcatatattagtaaggtgatgtttttattctctacatcctttgtgtagttatatattcatttaaattaatgatggttgtaattcaaagatagttttgagtagaggctattaggaatgtgaagatcatactattgctgattcctgccttcgcatgttgcaaatggaattaaatgtattaaatgtattattagtatgtgttgtttgaaccctacatctgacttcagcatccctttggtgagtacctttttcctttatttat

SEQ ID NO: 231015 - DNA, 711 bp, Homo sapiens
ttagggggaagtggtgactcatgcccgaggggcaggatgagaatataggtctcataggcatcttcaaaccaggttcgcctctgctccacatttgtgccatgaaagagcttcgtttcataacaagccagagaccaattctaaatcagtatctgcacaggcctgaagaattgaaggcttatgcaatagcagtcattgccagggtgggtgtggatcaaaacgcaacgtagaaatccttacgccattgcaagcagcttgtctcctctgccccagttgttcttgtaattttaacaaccatatgcttatcttctgttttctggcagcctagaactgttcttcatttcttttttagactcaatagaaattaagtggtttggccatcaacattcctgtctgtcgtctctcagtcttctgtgaacaggaccagatggaataagctctttgatagttacacattcattggaattgaaaaaatgggcagctgattttctattttataggcaaagtcccaggcctgcccctgtgagagtgtggcctgctgggctactgtcttattctgcaacaaggggtgaagccacaaagattatgtctaaaagagtaatcacagagacaggacagggtttaggcagaagcaagaatttcagagcatgtgagtgaggaattatctgcactggagtggacttattttataatgggaaaattctcagaatctca

SEQ ID NO: 231016 - DNA, 587 bp, Homo sapiens
tggtgtaccctgggggatgggaaggccagggctcagggctgtggtctcaggcccgggtgaagcagtgtccttgtcccaggggctgctgctgttgctgctgctgagcatgggcgggacatgggcatccagggagatgcttcggccacggtgccgccccatcaatgccaccctggctgtggagaaggagggctgccccgtgtgcatcaccgtcaacaccaccatctgtgccggctactgccccaccatgacccgcgtgctgcagggggtcctgccggccctgcctcaggtggtgtgcaactaccgcgatgtgcgcttcgagtccatccggctccctggctgcccgcgcggcgtgaaccccgtggtctcctacgccgtggctctcagctgtcaatgtgcactctgccgccgcagcaccactgactgcgggggtcccaaggaccaccccttgacctgtgatgacccccgcttccaggcctcctcttcctcaaaggcccctccccccagccttccaagtccatcccgactcccggggccctcagacaccccgatcctcccacaataaaggcttctcaatccgcactctggcg

SEQ ID NO: 231017 - DNA, 888 bp, Homo sapiens
tccagcacctttctcgggtcacggcctcctcctggttcccaagaccccaccataggcagaggcaggccttcctacaccctactctctgtgcctccagcctcgactagtccctagcactcgacgactgagtctcagaggtcacttcaccgtggtctccgcctcatccttggcgctagaccactgaggggagaggactggggtgctccgctgagccactcctgtgcctccctggccttgtctacttctcgccccccgaagggttagtgtccagctcactccagcatcctacaacctcctggtggccttgacgcccccacaaacccgaggtataaagccaggtacaccaggcaggggacgcaccaaggatggagatgttccaggggctgctgctgttgctgctgctgagcatgggcgggacatgggcatccagggagatgcttcggccacggtgccgccccatcaatgccaccctggctgtggagaaggagggctgccccgtgtgcatcaccgtcaacaccaccatctgtgccggctactgccccaccatgacccgcgtgctgcagggggtcctgccggccctgcctcaggtggtgtgcaactaccgcgatgtgcgcttcgagtccatccggctccctggctgcccgcgcggcgtgaaccccgtggtctcctacgccgtggctctcagctgtcaatgtgcactctgccgccgcagcaccactgactgcgggggtcccaaggaccaccccttgacctgtgatgacccccgcttccaggcctcctcttcctcaaaggcccctccccccagccttccaagtccatcccgactcccggggccctcagacaccccgatcctcccacaataaaggcttctcaatccgcactctggcg

SEQ ID NO: 231018 - DNA, 565 bp, Homo sapiens
acaattctctcccaggtctcattctctgtacagtttcaaggcaagaacttgagaaacaactctgttgaaagttgctgtttacttttctacttagagataatttgaagtttgaggctttgtagctttatttgttcttgttgaactattttgctggagggcgtttcttgagatttgaatttatgtggtcatgattattcttgagcacttgggagattaacaattgaaaattaaaacataaaagatgatttaaaaaacatattcaacttagctgaagtgaatactagtaaactagaagatagctatcaagaagtagattacctcagaaagagagagcgataaagatataaaagatttgaaagagtgactaaatatatggagaataaaggtaatgagtataggggaataatgtgcagtctttgacgtaataggtgacatatggttaggatatagttaaatttatttttccatagctgttagtacataaatcctcaatttttctattaagccatttctgttttattattaatatgtagaaatgttatgtgtagtaaagaaattaatcctt

SEQ ID NO: 231019 - DNA, 334 bp, Homo sapiens
aaactccgattctttcaactcattccagtttggcttttatgcccactacaataaacctgtgcctgtcaaggtcaccaaaacttgcatttggctaaatctaaaggacaattctcacacttcaacttactgaactagcagctcttgacccagttatcacccacgccttcctgaaaacactttcttcaaaatttgacattctgaacaatacattatcttgagtttccttcctacttcagtttttctttttcagtacccttctgtttggcataaatacatttatttcttccatcttaaaacataaacagaaatgtaccttgattctatttccctcacc

SEQ ID NO: 231020 - DNA, 417 bp, Homo sapiens
gctgtggtctgaagggctgtgtgtgaacgggggagccagagagacttggatctatcagtcagggttttctagagaagcagaaccaataagaaggaaagaacaagagttatgatgaggaattggctcacatgattatggaggctgatgagtcccaagatccgtgggatgagttggggagctgggggcccgtgagagccaatggtgcagtgcagcaaggtgctacggaccccggcagacaggtgtggatgatattctttgccaactgcctttggacaacctcagatttcaccacggtcaacaaatagagttacctctgacttcagtttggaaatttttttttttttgcagggaattctttgtagattttcaaactgctgttgattagtttgtcaataaaatttattgagtgccttccca

SEQ ID NO: 231021 - DNA, 718 bp, Homo sapiens
aaaaaaaaaacaccattatgggactattacacaacttcaagagggaaagggatttcagaattggaatctttcctgtatctgtattatgtctttacttgaaagagagagatacatcccaaatatgtcaggaaggtaataactttttaatcctggtggtaggtaatagaatttcggtgtcattattggttgtaccattctatatgtttgaaatatttcatggtttttattctttaattaaaagaaaaaatgtatctaataccagtacagtctttttttataaatacttctcagaattcttttaggtcagtgattcctagcttttcttttggtcataagtctatgagtaaagacattaaccctctccctagaagtatgcatgtatgtttgcactcatactcatagacatgaatttttttttttttttttgagacagagtttggctctgtcacccaggccggagtgcaatggtgcagcctcagctcactgcaacctctgcctcctgggttcaagcgattctcctgcctcagcctcccaagtagctgggactacaggcgcccgccaccatacctggctaatttttgtatttttagtagagatggggtttcactatgttggccaggcttgtcttgaacggctgacttcgtggtccgcctgccttggcctcccaaagtgctgggattacagcgtgagccactgtgcctggccgacatgaattttt

SEQ ID NO: 231022 - DNA, 462 bp, Homo sapiens
agcacagaaagcgatggtctgtagacattagaaaccctggacctgagggcaggactgaagttgtaatgccattgctgggacaggaaagaaagcttcaggcatggataaggtaaggagctagaactggaccctgcatcctcaaaaacacagggtgtaggaaagaccgatcattggccggggaggtgtcaaagatgtgcgccttatgctaggggccacaattgggaaaataatcactcataaattatcaaactcaaacctgcactctttgtagttgtgggatccaaattcatactatctatatggcacagaagctaataaatgaacgtagaaatggttatgaaatgggtaacacttctatgggcttggcagggacaaatgcaaaaccactttgcagggatgttttcataagcctgagcaagagagtctctcaggtaaaaagctactgaatgtcagtttactatc

SEQ ID NO: 231023 - DNA, 363 bp, Homo sapiens
agtgattgatgctggctttctgtattagtctatttgcatgctgctgataaagacatatccaagactgggaagaaaaagaagtttgaggctgggtgcggtgactcacgcctgtaatcccagcactttgggaggctgaagcgggtgtatcacaaggtcgggagttcaagaccagcctggccaacatggtgaaaccctgtctctactaaaaatacaaaaattagcccagcatggtggcaggcgcctgtaatcccagctactcgggaggtggaggcagagaattgcttgaattcgggaggtggaggttgcagtgagacgagatcacgcactccagcctaggcgacacagcaagactcagtctcaaaa

SEQ ID NO: 231024 - DNA, 259 bp, Homo sapiens
tccctattttgctccttcttggaaaaaagttagcagtctcgagacttttacgctgaagtggattttaagttgtcagaagtgtcaagctgatttgcctttttttctctcttttattaaaagaaaagagatacatactacattcagacagaaagcatgtaaggggtcttataagtgtgagcatgtgttagtggattaatgggacaatgtgtgtggatggtgatagaaaatatgagagaactattgcttggctgataaatga

SEQ ID NO: 231025 - DNA, 513 bp, Homo sapiens
aggagcagtctcagagcagcacccatcactgtcagagtcctatatcccagacagaagcgaatatgacccaggcagtagctgcacattaaacattggtttaaagggccctcagcgaacaggactgggtgcctgctgtgggctaggctctgggctgggtaccaggagttccgggacaaagaaggccaagccctgccctcactgagcccagtcaccaaggagaaacagacatgtgactagtcaagtaaatagagctctgataggcctcctggagggggcagcagttgtctctgcatggattgggagagtccaacaggcagagcaggagaaggtggggcaggggaccacaagatgtgttcagggaggcagtgaagagtgtggtgtgagcccaggagaggggcttggatgtagtgacaagatgttcaggaagcccgtggcctttctggggaagagaatcctgaaagcaatgcagcggttaatcgtattgttacaaaaatactatacacttgttaaaaa

SEQ ID NO: 231026 - DNA, 376 bp, Homo sapiens
ccttggtgactgggctcagtgagggcagggcttagccttctttgtcccggaactcctggtacccagcccagtcaccaaggagaaacagacatgtgactagtcaagtaaatagagctctgataggcctcctggagggggcagcagttgtctctgcatggattgggagagtccaacaggcagagcaggagaaggtggggcaggggaccacaagatgtgttcagggaggcagtgaagagtgtggtgtgagcccaggagaggggcttggatgtagtgacaagatgttcaggaagcccgtggcctttctggggaagagaatcctgaaagcaatgcagcggttaatcgtattgttacaaaaatactatacacttgttaaaaa

SEQ ID NO: 231027 - DNA, 507 bp, Homo sapiens
aaaaaaaaaaattataaagaaatacacagaggtgattactataagtcaaagagttacttgttcagggggaaggagggagctacgattgagtcagggcatgtggtggggtttctgaggtggccggcacagttctatttcttgatttgggtggtggttataagggtatttgccttatcataactcctcaaactctagaggaagaagtctgctgtgaagaaaagattaaggccgcggtggctcaaacctgtaatcccagcactttgggaggccgaggcgggcagattgctcgagctcaggagtttgagaccaggctgggcaagatggcaaaacctcgttcctacaaaaagcacaaaaattagccaggtgtaatggcgcatgcttatagtcccagctattttgggggttgagggaggagaattgcttgagcccaggaggttgaggctacagtgagccatgtttacaccactgtacaccagcctgggtgacagagttgagaccctgtctaaa

SEQ ID NO: 231028 - DNA, 1009 bp, Homo sapiens
gaatgtaatcaatgtggaaaagctttcagtcaaaaaacatcccttaaggctcacatgagaactcacactggagagaaaccttatgaatgtaatcagtgtggaaaatcctttggcacaagctcttaccttatagtgcacaagagaatacacactggagaaaaactctatgaatgcagtgagtgtggaaaagccttcaacacgagctctcaccttaaagttcataagaaaattcataccggagagaatgtttatgaatgcagtgactgtgggaaagttttcagtggggtctcatcccttagaatgcatataagaactcacactggagagaaaccctatgaatgtaaggaatgtaggaaagccttcagtgtttcctcttcccttaggaggcatgtgagaattcacactggagagaaaccctatgaatgtattcaatgtggaaaagccttcagtcagagctcttcacttattatacacaagagaattcatactgagagagaaaccctgtaagtgttatgaatgtggaattgctgttttcattgtcttaaggtggattccaagctccttgtctcagtctttgttctctaaaagaacgatttaaggttacaaatggctctttttttaatataacattttctgtaaatactaattatgactttttttgatccatggctgtttagaattaggtatttttaatatgtgaggtaggtatattttcagttatctttttattgttggtttctaggttaattccattgtgttcagagaatctggactatattttactgctttgttggtgtttttataaaagttgttttctggcccagtgagactggtattgctagcagccaaccaaacatttgagctcatctttccttactaatgaattccatcttagccaagaacaataaggtctctggttatagaacgcttctttgacttcttgtagctaagggtagccatatcattcattcttgctgattcaaaaatagacatatcactgggatcagaa

SEQ ID NO: 231029 - DNA, 331 bp, Homo sapiens
gaatttcactggtgtttactagtgagtcttgaccttccttaaagaggtaaggagatgacaatgccacctcatttcaatagctcacataaactaaaggaaaaaaacttatgacttgcctatgcctgaggtttggaattccttagtttgagccaccaccttcatgtccaaatgaactgggagtggaatttttacagtagtccccccttatcaacagttccactttctgcagtttcagttacctgtggccacctaaggtccaaaaatattaaatggaatattccagaaataaacaattcataacttttcaattgcatgtcattctcagtagtgt

SEQ ID NO: 231030 - DNA, 354 bp, Homo sapiens
tgagggggtccgtttaaggctactcaagttcttctgactctccagtcagaattactcaatcatttagggtagggccatacatacacatgggggaaatgtcagggtttggcgttaagaaagctaggaaagaaataggtatgggaaagtatttcatgggtgcaatggttgatgatccagcatctactttcctagtgctctacagctggggcagaggcaatggctttaattttatttgcaaagctagttaagagtcgatggaagaactgacactatttgataaactgtgcccaaactctagatgaacactatttcgagcattaagcacagatatgagcagactctccagacacctgg

SEQ ID NO: 231031 - DNA, 130 bp, Homo sapiens
aaagaaatagaagttatcccataggctttatttcatgagaattaaatgagttaacatacaaaacctaagcgcagttcctaacacatagttaatgttcaataagtattaactagtattaatgttgctatat

SEQ ID NO: 231032 - DNA, 514 bp, Homo sapiens
ccccttcctccatgattataagtttcctggggcctcctcagccctgcagaactgagtcagttaaatctctttcctttataaattacccggtctcagactgttccttacaacagcattgagaatggactaatacaagactacagaggaaaaaaaaattttttatatagttttagcatgactgctagggcatccaggtcattttgatcatagaacccttctaaccagtttccaggttaagggttccacttgtgaaactcttaatgggaacctcatttttcactgtttttctctatagctaccacatcaggttatttagcggtaaagttattagagtaattagaattcactatagtaaaggaaaatgatttttgaaaagtattatcccatgagagttggtttagttcaacagtcattctgtcatttcttattttggtagacatttaatttgtattttttcctccaaaagtgatctgtagagtgagtcataaataaatttctattattctattgccca

SEQ ID NO: 231033 - DNA, 202 bp, Homo sapiens
cattttattagtgatataggaatgacagcagaatgtcaattattctataattgataatattagttttattaatctgtgtggacacagattaaatcattcattttctactacttattttctcatcttatgaaatgagattatgtttacattataagattgtcggctgggcatgatggctcacgcctgtaatcccagcactctg

SEQ ID NO: 231034 - DNA, 169 bp, Homo sapiens
agtcaagtttgttacttcttgttttatattctctgcctagagtttattttcatttcttttgccagcttcatcagtttagggccacatatcttttgtacatctaaaatggtgcccgtttccagtgtgtccttcaatccatcctacacgatactgccagactcacctttct

SEQ ID NO: 231035 - DNA, 419 bp, Homo sapiens
actgaggcccagagaagcaaagtgtatttcctagggtcacacagcctaggtctccagactggatgtccttctttctgcaggtctgggtcagtatctgtagctgggagaggcggtgggggaagggagagggcaggcaggaattggagccttccacatgcctaacttgttagggcgttcatgatgtcacaattaggaaggaaatggagaggggaggcctcggaaaccccccaaaggccctctgattgcgccctgcggaatccctccaggaattactccctggtcctctcacagtggctgtggtctcagcctgagataaaaggccagaagcaggaaggtaaatctgatggagcttcctccaccatccccaccccttccccaaatgtgccctccttctcttggatatacaacacagttaaaaa

SEQ ID NO: 231036 - DNA, 169 bp, Homo sapiens
ttcctgcctcgcctccaccgcctgctcctccgcctccgggctcctccggccccgcgggcgaggccgccggctcgggggcgcaggggcgggacggcgccggggccccggtggcctcggccgggggcgcgggttccgggggcgcgcgggcaggctccgggctcgcggccgc

SEQ ID NO: 231037 - DNA, 411 bp, Homo sapiens
catttggatagttgggagaagctataatggtatatcatttattttataatagtatgtaagattgataatgggacaagtcaatagcttccacattgtgtttaggctttccagcaaaattggatttaaatatcatatttaaatatttatatttataaacttaaaaaatcaattttatgtaaaaaagttatattggagtttatcaaactaatatacatatatattttctttttgaggcagggtctggctctgttgctcaggctggagtgcaatgatgcattcttggctcactgaaatctctgcctcccaggctcaagtgatcctcccacctcagcctcccaagtacctgggactatacctggccaatttttttttctttttttttttttttttggtaaagacagggtttttcca

SEQ ID NO: 231038 - DNA, 389 bp, Homo sapiens
tgagacagggtctcgctctgttacccaggctagagtacagtggcaggatctcagctcactacagcctcaacataccagactcaagtgatcctcccacctcagcctcccaactagcagggactacaaggtatgtaccaccatgcccagctagtttttaaaaaaaatttttagagacaggatctcactatgttgcctaggctggtctccaagtcctgggcccaagccatcctcccacctcaacctctcaaaatgctgggattatatacgtgaaccaccatacccggcctcaaaatattttcctttggattttgcctcagcgattcacaaatgtaaaaactattgttggctcactggttgtacaaaaacagcttttagccatatttggactg

SEQ ID NO: 231039 - DNA, 510 bp, Homo sapiens
cctgtatttgcagaagcaatgagctatatttggagaaagatgaagtttgtgtacatgcaacagtgtatcaccatcagacatgtatcagtcacatttgccaagagcttaataaccgtgctgcctgtggcagggtgcttctcagaatggatttcaccatgttatgctttctcaaatatataagaatgttacagctatctattgaaaatgagaaaagaaagctaaaatgaactttagtcaactaaattgactaaagcaaaaacttgttctggcaatatatggtcaaaaattgttatttttctcaaattttatgttcactctcaaaacccaccacctcatctgataaggaggattaacacttacctagaaactcaaacattatttgaagtgagctcaaaaaacaaatgcaacttgtaaattatcagtagctaagaaatgactagccaattagaaggacagcttctaaactgctcaaatgtcaacagtgagactacttaaggcagaagtaaacaa

SEQ ID NO: 231040 - DNA, 395 bp, Homo sapiens
gtcatgaggggatttcaaattaaaacagcaataaaatatcactatacagtattagaatggccaaaatctaaaacactagcaacaccaaatgctgaccagcaatggggaacaacagaaacattcactcatcactggtgagaatgcaaaatggtaccaccactttggaaggcagtttagcagtttcctataaaaacaaacatatctttatctgacaatttagcaactgtactccttagtatttacccaaatgaattgaaaactgctatccacacaacccacacacgtttatagcaactttatgaggaaacaagcaagacgtccttcagtacaagtggataaactgtggtaccagacaatggaatattactcagtgccaagaagatgcattatgcctg

SEQ ID NO: 231041 - DNA, 192 bp, Homo sapiens
ggtagctgaagtaaatactctaaggcagattttgcaaatgtgcatctttaagccgtgaccccgatggccctggagtgggggtcaaggggactgagtggaaccccagtgagtcatgatttaggacagaaaggcaaaactgtgaccaaggcccttaatgtgtctggtatcctgggcccttctggattcagtctt

SEQ ID NO: 231042 - DNA, 313 bp, Homo sapiens
ctgggctgggttgggttgggctgggcaggcctcaggagaggagggggcagaaagagcacccccctccctggccccggcagaacgatggtgacctttgaacctgggggcagggaagaagtggcctagcaggcagattgtgggtttggcctgtggcttgggctggagggagaaggggtggtgagaggggacaagggagggcaccccccacccactgggctcactcctcatggtccagctcaaccacactgcccggacggtccccactcattcccatccatccgtttctccccaacctgcctctcctctcagacac

SEQ ID NO: 231043 - DNA, 386 bp, Homo sapiens
ataccttcccaacatggtgtattatcagtctttaatgttttccaccatgttaagcaaaaaacgtgctatttgtcattgaaactgagcaacttaccttattgattagtgttatatgtttagtctatgagttgcctgtttttttctatttttctacatagaaattagtggtagtggaaacactttgtgtaaatacctataatacttggccaaagtagtactcagaggaaagtttatattcttaaattcatttgttaaacaacaagaaagattaaaatttaaccaaaagacagtagcagagagtaactaatagattgttagggaattattgagataaaagcagatagtatattgctgatattttatgttatgtgtgctacaccttagtg

SEQ ID NO: 231044 - DNA, 602 bp, Homo sapiens
aggtgcggtatctgaatcatccatgattacatcattaataataaaaacagcaccgtccactcagcctccaacgttctctgaaaaacaattcatgtccaaggtatcaatttattcctttgtttttcatgtattcattcaataattatttcctgagcacccacccaatactaggtcctatgctatatattagagagacagcagaataaagatagaaaagagatcttatcccctaagtactatctaataagggagattaacagtaaacaggtaaccaaccaaatatataactgcaaattgagatgaatgctatgaagatcaacaggatttttttttcatttaaaagatctgagagggattttggaaatatccagatgaattcatatcaatatgaatatatgctcagttgcaagtaatggaatcatgattaacattgatcttaaaaaacaaagacatttcattacctctcataagaaaaatctggaagtagatggttccaaaatcacgaaagtggctaaactacatcataaataacccagtttcctcctcctgtctttcgcctctattatcctcctcagcatgttggctttttgttcttgtgcttc

SEQ ID NO: 231045 - DNA, 505 bp, Homo sapiens
gtgtgtgtgcatttgtttgtgaagctacgtaagatttggttttgacaacaatttatgagaacatatgggaaatgctttatcttttaaatgtgctatttactgtttgtcttaatttactccttcctctctgggataggtttactgaccgtaagtcttggattttcctgaattgggttttagttcaaatttctaaaagtttatcttagtatcagaccatgtgccttgactatttatttgaataatgcgttcagtttgggtttagaaaatttaaaggttacagagcatagataagcattaaaaacaaagcacaatcctgtaagtctccaaataaaaatgttactgaaaacatctttgaggtttctttaatatgtaatcaacatgcaactttatgcaaaattctattgccattgttaagtactttatttcacagaattattgagaaaattcttttggaaaccaatgacttgatgtatttaataaaaatatttttgtatttgtaaatctc

SEQ ID NO: 231046 - DNA, 677 bp, Homo sapiens
atgctcagagagtcatttgcccttggtcacaggctaagaagaggcagagctaggacgtaaacccaactctggctctatggcatctcatatagcatcatttttcctccagtcctctgactagaaagggtggccccttcaacctggtgctgagaacagacactggcggccccacacctctgaaggcatggttccagcaaatagaaattggactggcaaggattaaaccgctggtttgggcttcattagctatgtgatctcaccaaccacagagaattaaccagagtggagccatctctttacagacttaacacaatgtaccgaggcaatgtggagaacagtcactgaatttattgagcacctactacctgctccagacatgccattaacacgtgggctatccttcccttccacagtcactctagaacttgaggccactgtcctctgatgcagagagaagaaacattttataatcactgtagacaataaaggctttatctgttagcaagcacttttgcttaatgacttggtcatggggaaggagagacaggttgtacttggtcctcattttgcacttggttagagagtaagaggcctttccatctccactgctgctcaggtacttcctcccagtgtactctagcactcccccagcaggttctgtagaaacacagacccca

SEQ ID NO: 231047 - DNA, 320 bp, Homo sapiens
aaacataatgtagtgggcatcatgctgtaacatccagttggccaaatgctttactctaaaaatgtgccacagtggggaaagcacgatgtttgatgtttaaaatgtttttgttatgttacagacttttaaggttatgccctcaactgtgcatagcagtgaagagacttgaaaaggaagacagtaaagccttacagacttcccttaagtttgctgctctataagtatgcagcctgctgcaggtgtttcctgttggttagtaaataacctccacacattggctgtttaaaattcagctattaataaaaatgtgtacttttgtc

SEQ ID NO: 231048 - DNA, 816 bp, Homo sapiens
atactgagctgaggcttgaagatatattttaaccttaaaaatgaattcctcagggggaagaatggatgccttgaaacttgctctcaagtttttcatgtgtttctttttgtaacttaatgtctctactttgcatatgtccctttggcctttgcagtctctatgtctgtcattctttgcataataattcatatcaaaggggagaaacagctattttttgtccctagaagttctgctcttaaggttgaaaagaaagtttgaaaaatcatatcatttaggttagaagtactttgtgttgttggtatccaaaattaggactctgagattcttgtgtattcagagaatttttagtaggaaacaaggacaaatttgcatatgaaatgaaaatagttattacatgacaaaatatgtagatctgatttctagaaactgaattagtccaaaacaagtaagagtgggaaaagcagtaaaaagttcttcttgaatattgctgttgtcatccaaagtattcttatttcttttaggtgaaaaatttccattactcttttgtgatattctcaaaagaaagtttaggattttacagtgttctgaaatactgaatcttaattcagtatttcaatagagtattattgatttgcttccttatcagtagatttttaaattatttatttctaggctatagatcttcctaaaatataatccaaagtaggtttaaatgcagatttctagacccaagtataaagatctcttttctggagcatgctatatttaacagttttttcctaagtttgtttttgtttttggaatcatgatatattt

SEQ ID NO: 231049 - DNA, 724 bp, Homo sapiens
gccgctttgatatgaattattatgcaaagaatgacagacatagagactgcaaaggccaaagggacatatgtctgtcattctttgcataataattcatatcaaaggggagaaacagctattttttgtccctagaagttctgctcttaaggttgaaaagaaagtttgaaaaatcatatcatttaggttagaagtactttgtgttgttggtatccaaaattaggactctgagattcttgtgtattcagagaatttttagtaggaaacaaggacaaatttgcatatgaaatgaaaatagttattacatgacaaaatatgtagatctgatttctagaaactgaattagtccaaaacaagtaagagtgggaaaagcagtaaaaagttcttcttgaatattgctgttgtcatccaaagtattcttatttcttttaggtgaaaaatttccattactcttttgtgatattctcaaaagaaagtttaggattttacagtgttctgaaatactgaatcttaattcagtatttcaatagagtattattgatttgcttccttatcagtagatttttaaattatttatttctaggctatagatcttcctaaaatataatccaaagtaggtttaaatgcagatttctagacccaagtataaagatctcttttctggagcatgctatatttaacagttttttcctaagtttgtttttgtttttggaatcatgatatattt

SEQ ID NO: 231050 - DNA, 143 bp, Homo sapiens
tcagttgttcatgtcattgagaaatgtcaacagaaactacattttgatatccatcagccagaattaatagttgaagtattagccttgttttggtacaggtaatgggtacattatttaaagctgagagaaaagccttaattttg

SEQ ID NO: 231051 - DNA, 326 bp, Homo sapiens
atctttgaaaaaaatactaatgtatagtagggcattaggcaatacaggaatgtgctgatttcttatgcttttgccagtactgtgttgggtattttcctgttttatatttcctgattcacaagtcaataaatggtatctccttgtttttagatttctttgattattaaaggagttgaacatcttttcacgtttactgaccatttgtatttgttttgccttttcaggtccttttcccatttttttttctgctgtatttatcttgttcttaataatttccaagaactccttatgtatcaagtataataaacctgttttgtcatccaagt

SEQ ID NO: 231052 - DNA, 399 bp, Homo sapiens
gatagaaatcttaaaagaatgtatgggacataaagataagccaaaaatggggattgtggcaatcttgtgtgtaacatttctcatttcataactgtgccagtcgcaatgtaactcaaaggaaaaaagaaagcaccacaaccctttgctttctgggtagcacagacacctgtaatattttctatggtcgccaaggacgaattcctgacagagtgcaattagcacaggttcagaggcctcaagtccaaaggaaaggattctgtgagaagttaaaactgcaagatgaaaaattttcagtagaaatggcgctgatattgagtttcttcagatgtttttctttttgtatttataaaatatttccattgtaaagcattcaattaatgaagaatggtgtaaagtaaa

SEQ ID NO: 231053 - DNA, 428 bp, Homo sapiens
attaataacaaatggaaaaaatgattatcttgtatactggaaagtagtaagtgctgttgtgaagaagtatagcaaagtgagagggatcaggaatgtgggagatggaggtgggggggaagttgcaatgttaagtagagtggtaagaagagaattccattagagtttgggaagagccaggcgccgtggctcacgcctgtaatcccaacactttgggaggccgaggcgggtggatcacgaggtcaggagttcaagaccagcctggccaagatggtgaaaccccgtcttgactaaaaatacaaaaaactagccgggcgtggtggcgggtgcctgtaatcccagctacttgggaggctgaggcagagaatttcttgaacccagaaggcggaggttgcagtgagctgagaccgcgccactgaactccagcctgg

SEQ ID NO: 231054 - DNA, 410 bp, Homo sapiens
cagcaggattcctgaccccagaatcactatctcaagacctggggttctaatttgagaggcagaaagttacagcaactcaaatttatatgcatcttacaaaatagcttcaaaatacataaattgacaattgacttcaaaaaggctttctcaattatccataggtcaggcagataaaaatcagtaaagatagaaattttaaaaacaatgatcagcctaggcaacaaagtgagacctcatgtctacaaaaaaaagaaaaaattagccaggtgtagtggcacacatctgtcatcttagctattcaggaggctcaggcaggaggattgcttgagccccgaagttccaggctgcagtgagctatgattgcactgatgcagggcaagtaagctcccaaattgggacttagccctgga

SEQ ID NO: 231055 - DNA, 301 bp, Homo sapiens
tgagcccctcttccacaccatccccaggggaaagctcccttcatctatcagggacgtcatgggccagtccaaggcccccaggtttttggttctgatgtgaaggaactacttccaagctaagcaaaacccctacttcaagcaatcaaaccagatgccccctttggccccaaggcaaaatgtaattaagtaactacgtggtttgtttgctgttctttctgtgtgaaacacacttcccctaaatcttcccacggctggctcaacctccagcccttagtaacctaaaataatcgctgctgtttct

SEQ ID NO: 231056 - DNA, 356 bp, Homo sapiens
agtaaggttgttgttaatgttttggacatcatcagttatgagtagggattggggagtgaaaataattctgtcaagccaatgataataagagaaacatttaattgtttggaaaatagttttattcctcaggatcatgattcttattttactcatacatgaagacaaaatcagaaaatatacataaacttattttttgattgattgtaaatgcatttatatgtcttcaatcaagaaaataatcatattttaaacttattatacctataatcaattgttgacaatatgcttggtgaaattagttttgctgtatcttttagcagttctctgagtttctttcgctgggttctcctctggta

SEQ ID NO: 231057 - DNA, 420 bp, Homo sapiens
atataagcttggggtccatgggggtccctagaatagtggccttataatggctccaagagggtacactgggatttggcccagataatggagggacaccctggcgaaggggcagagtcctggcagttcagccagccccagctctgtctttttcttgaagctcaacagagtatggaaatcattggtctcacccagccccctcattcttctgagggggaaacaggctcagaacagggcagggactaaactcaggtcagcagtagagcccagaccagaacccaggctcagtccaagcatcttagttgtctccaatgatgataaataacagtaaaaacctttctgcagagcttcccaggggctggcctgggcttaggcaccctctggatggtcttgggcagacgtttttcacatctcgagccttag

SEQ ID NO: 231058 - DNA, 611 bp, Homo sapiens
aaaaaaataggggttatctgttactcgacatttttgtagaggatgcctataaaatcatctaggtctagtagaccttctcatatttatatagacattcagatggttttccagctcctactaaagtgtatatctaagaaatttcctgttttcaagtgtagtggaataaaaggatgtataatattcatatactcaaaaacaacttaaagagatatctctatgtgtggaataagaatctctataatatccatctgtgcctttcacaagatgtatgttgtcagaaattattgccttattagtctttcaaagaagtaggctttcattcaataaatatttattctgtacctatggtgaactaggcaccgttcaagggtctgcagattcatcagtaaacaaaatcggtaaaaatccctgatgttaagtagcttacattttagtagaacttaatgctaaattctttactttctttatttttatcatgaatttttgttcttatcattttctttcttctaccttgtctggttgtatgtctggttgttgattcccttggggtttcagcatagaagcaagaaagtagagagtaagttagaaaaccaaaaaacaaacaaacaaaa

SEQ ID NO: 231059 - DNA, 520 bp, Homo sapiens
gatgtttcagttccattttttaagttatctatcctctttcactctgggctagttgctttctaggcacattgtagctgatgctctgtgacttccttttgtggtcatctttggaattcccattactttccggttggaatctctgttttctggctttcgtgtcctcctcatgcttggctcactcccctcattagagcacatcttccaggacacacatctgtccatatcaaaatccattcatggctgggcacagtggctcacgcctctaatcccaggactttgggaggccgaggcgggtggatcacctgaggttaggagtttgagaccagcctggccaacatggcaaaatcccatctctactaaaaatgcaaaaattagccgggcatggcggcgggtgcctgtaatcccagctactcgtgaggctgaggcaagagaattgcttgaacccacaaggcagaggttgtggtgagccgagaatgcgccactgcactccagcctgggctagagagcaagggtccatctc

SEQ ID NO: 231060 - DNA, 337 bp, Homo sapiens
aagaaaacactgacacatggaaccaggtgtctttgttttggcaaggacagcaactgtattctgatactaaggtgggggatgggagttccgggcaaagacattaatagcactcatattgttcttttcgacacagatttgagagagctcttcaaatggcaaacacctagcatgtggggatctgaagcacctctttgtgggtttcactctcaacactcttggaaaatcaccgagtgtcatgagaggtgttattgatgcaggcctgtcatgcaggggactgacagagaggcctcctcagaaagactgagatggcccacagcagagggcagaaaaaaagaaa

SEQ ID NO: 231061 - DNA, 653 bp, Homo sapiens
aaaaaaaaaactgttctttacactctatttattaagaaagaaatagaggctcacattgtagaaagattgctacgtggtcaaactataaaaggggtttacctagttaacctgaaaagttcttgcccagaacatcctattcctaagcattctgactgtctgcatgctccatcaactctgtaagtaatgtataatatgaatagattccctgacaaaggaagctgctttgactccagcaaaaattagtaggtccaaggttatatatcatatgattccattcatatgaccttctggaaaaaaaacaaaactatagtgacagaacagggcaatgattgccaggggctaggaggtaggggagagtatgactacaaaggggcagcagagggagttttttggggtggtggaactattctgtatcctcattgtggtagtagttacaggaatcctcatcatgctaaaattcatcagctgtacaaagattaagcagttttactatatgttaacttaaattaattaattgattggctcaactcaagtgactgctttccttacctggataaagcaacccaaaggattagagtttggggagacagaaaagaagaatcagaaatatgaggagggtaggcaggaagagagaatgagaaacgtgcacactg

SEQ ID NO: 231062 - DNA, 600 bp, Homo sapiens
aaaaaaaaaactgttctttacactctatttattaagaaagaaatagaggctcacattgtagaaagattgctacgtggtcaaactataaaaggggtttacctagttaacctgaaaagttcttgcccagaacatcctattcctaagcattctgactgtctgcatgctccatcaactctgtaagtaatgtataatatgaatagattccctgacaaaggaagctgctttgactccagcaaaaattagtaggtccaaggttatatatcatatgattccattcatatgaccttctggaaaaaaaacaaaactatagtgacagaacagggcaatgattgccaggggctaggaggtaggggagagtatgactacaaaggggcagcagagggagttttttggggtggtggaactattctgtatcctcattgtggtagtagttacaggaatcctcatcatgctaaaattcatcagctgtacaaagattaagcagttttactatatgttaacttaaattaattaattgattggctcaactcaagtgactgctttccttacctggatatgaggagggtaggcaggaagagagaatgagaaacgtgcacactg

SEQ ID NO: 231063 - DNA, 595 bp, Homo sapiens
aaaaaaaaaactgttctttacactctatttattaagaaagaaatagaggctcacattgtagaaagattgctacgtggtcaaactataaaaggggtttacctagttaacctgaaaagttcttgcccagaacatcctattcctaagcattctgactgtctgcatgctccatcaactctgtaagtaatgtataatatgaatagattccctgacaaaggaagctgctttgactccagcaaaaattagtaggtccaaggttatatatcatatgattccattcatatgaccttctggaaaaaaagtatgactacaaaggggcagcagagggagttttttggggtggtggaactattctgtatcctcattgtggtagtagttacaggaatcctcatcatgctaaaattcatcagctgtacaaagattaagcagttttactatatgttaacttaaattaattaattgattggctcaactcaagtgactgctttccttacctggataaagcaacccaaaggattagagtttggggagacagaaaagaagaatcagaaatatgaggagggtaggcaggaagagagaatgagaaacgtgcacactg

SEQ ID NO: 231064 - DNA, 521 bp, Homo sapiens
cctagatgggccagggagatggctgcctgggaagccgtcaggcgaggggagagaaagacgcacacgcagaaacgtggacggcagtcacaagaccgctagcagatgaggcaggatctcagcatctggtgagaggtaggcagggaacggcacaggcggccacacttcctctgagccaggcactttgcatgtatggccacatgctcattccagtgagacagcggttgctcaagccatatttgtcacttgatatgtggcattgggcaagttacttaatttttctgagcaccgatttcctcactgttgaaatggcgatgagaacgcaaaggatgtggcgtctgaggtggacggagcttagggctgcttgggccacagtgggcacagagctgggtgccaggaggccttcaggacatatttcctggccaagtgcattcccaaatggcattccttatcctcttccatgttctctcccagaggtggtgctgaatgacctgaggctgttccagaataaaggtatacacaca

SEQ ID NO: 231065 - DNA, 667 bp, Homo sapiens
  misc_feature (361)..(361): n is a, c, g, or t
aatgagctctctgggaaaagctcttagcatctacccactatccaaatacctgctcaggtgttctcctttcacaaggtcaatgtgaagtgatgcctataagttacatcaggagcatttaatgaagaagctatttgtaaagctggaacttttgagacccagctgagcctatcgtagagtatgcctgcagaggattacatagaaccaagagacaagagtgtttaaattggagcttggatacgaaagaactcactggtccggtcaaagctaaaagctgtatggttgctggtcattctctactggaattcaacaagccagggacagtatggaaacaaggactttacacaacagctcacggcttcantaagaaggaatctgaccctcaccctaaaaagctattgggagattactgatacctccaactcactgattcattgaggccatgccattcaatgctatgttctcaagaaatgtctatgagtcctctcaaccattgctgttgataaaataggtgaatgtcaagtgggggttagcatttgataaggtgtatgtttgaaataatattttatcgtctcttgttcacaaatacaacatataattccaagaagaaaaaagaagtagaaattcagcatccttaagatgccagcaagaatgaggggaaaaggaaaaa

SEQ ID NO: 231066 - DNA, 508 bp, Homo sapiens
agaggtgctgtaatttatctaccttaatagctgatggagaatgagattttagtctcaggcagtctcatttttcccaacccactctttgttttagttaattgatctttgacatttatttacttggtgtatactatctttatacctttgcattatggcatataccagtgatttctggaactaggtcattattagaatcaccttggaaactttggtaaactataaatttctggctcaacccttaaaatatactaattcactagctctgggatgtagcttgtattttaaacattaatgtaaaagctccaagtgattttgatgaagctagaattgagtatgacatctaaacacattataaaaaatgcttttctttccaccaacgataaaaatgggctgggcactgtggctcatgcttgtaatcccagcactttgggagaacaaggtaggaggatcgcttgagcccaggagctcgaaaccagccctagcagcatagtgagactttgtttctaaa

SEQ ID NO: 231067 - DNA, 172 bp, Homo sapiens
ccaaccccaggtggcatttctactgtgggctatagttgacagtaaatatctaagctgaccacagcccagtctgagaaatcatctacaggggagggcaggggactccatgggcacagatgaaatagccttgattctctttctctgggtgcatcaccagcctcctttcttactc

SEQ ID NO: 231068 - DNA, 454 bp, Homo sapiens
tgcattccagcccggtcgacaaagctagactctgtctcaaaaagaaaaaaaaagaacatgcatttgcttttgtctttcagcattagttttctaaggataatgggtcatagtttcatccatgttgctgcaaaaaacatgatcttgttcttttttatggccacacagtattccatgatatttatatactatatttttctttttatataaatattctactttattttcttcttattttattattattattttttgagatggagtttcactcttgttgcccaagctggagtgcaatggcatgatctctgctcaccgcaacctctgcctcctgggttcaagtgattctcttgcctcagcctcctgagtagctgggcttacaggcatgcgccactatgcctggctaattttgtatttttagtagagacagggtttctccatgttggccaggctggtctcg

SEQ ID NO: 231069 - DNA, 176 bp, Homo sapiens
ggagcctggcacagtggcctcatttattatgctgctctgctgctcacaggggaagcccgtcccccaaagtcctcttcctcatcctggtgagtatcttgtccctggattgcttgtcagccttgtctgcctggagcactcagtagccagcaggttccccgcctttcctggagtccgag

SEQ ID NO: 231070 - DNA, 419 bp, Homo sapiens
gaacccaggcacgctcattggttcacgtgtgacctctggcatccgctacaacagcagagctacataattgagacggatggtacagcctgcaaagttgaaatatttactctctgactctttgtaaaagaagtttgccaggccaggtgcggtggctctcatctgtaatcccagcactctgggaggccgaggtgggtggatcacctgaggtaaggagttcaagaccaccagggccaacatggtgaaaccatgtctctactgaaaatacaaaaattagccaggcgtggtggtgtgcttttggttctagctacttgggaggctgaggcaggagaatcgcttgaacccaggaggtggaggttgcagtgagccgagattgtgccactgcactccagactgggcgacagagtgaaactccatctcaa

SEQ ID NO: 231071 - DNA, 440 bp, Homo sapiens
tgagatggtgttttgctcttgttgaccaggctggagtgcaatggcgtgatactttattttattttattttattttttgagacggagttttgctcgttgaccaggttggagtgcaatggtgcgatctcggctcactccaacctccgcctcctgggttcaagagattctcctgcctcagcctcctgagtagctgggattacaggcacctgccaccacacccggataattttttgtatttttagtagcagtgggatttcaccatgttggccaggctggtttcaaactcctggcatcaggtagtccacccgcctcggcctcccaaagtgctggaattacaggagtgagccactgcgtccagccatatgtaatactttagtaaataaaaagtaaaagggattgattggcattttcagtctttttttttatggctagagatgagtt

SEQ ID NO: 231072 - DNA, 191 bp, Homo sapiens
gaactgtcatatgcccacacatacattttgctgatatacttacaaactggtaaacaatgctctttaatcaacaattcataatctgggtcagcgatttttatctccatatttgctcatactgtatgacatcaatattttatattggcttgcccataacttaatattttataaaagcctacctatgaaattca

SEQ ID NO: 231073 - DNA, 376 bp, Homo sapiens
ggtagggggaaaggggagggagagccttaggacaaatacctaatgcatgtagagcttaaaacctagatgacggggtgacaggtgcagcaaaccaccacagcacatgtatacctatgtaacaaacctgcactttcagcacatgtatcctagaacttaaagtaaaataaaataaaaataaaatgaaaaaaatgatatgatgtctaggatttgcttcaaaataatgtgggagagaaaagcaggtgggcatttggatgaagcaaaactggctgtgaggtggtactgttgaagctgataatgggcacatgagggttcattatattatcctttctactttctattaatttgaaatcgaccatagtaaaaagttaaaaaatac

SEQ ID NO: 231074 - DNA, 774 bp, Homo sapiens
gctccaaaagtatcctgagactcttagctctagaagaaaagttttgaacttgctgggtcccttttcatttatatagtgctttcacacaatgcactatcaggactcttagttgcaaatgaaaaaaacccagtctgactggttttaagccaaaagagggtttattgagtcaagtctagtggcaaatggcttcaggcaaggctggatccaggagctcaggtgatgtctgtgtctgtgtgtggatgtctctctctctctcctctgtgtcagcattattctcaggcagtccctcccatgttgtggcaaagatggccaggtggccctcagctgacatctgtcagcttagcagctctggcagaaacagagcatcctttccccctgtggtttcagcaagcgtcccagggctgactctcattggcccagcttgggtcatgtgactatgccttacttaaccagtcactgtggcactgattggccaggtcacggtcacatatctgctcctgaagcctaaaagtgggatcagtgccaccacactacatgaaacgagttggggagggatggtcccatgaaggaaaatcaaaaagctggtagtttaaaaaaaaaacagagagagggatgctggacaggcaccttttggggggctaatagaaattgttggctgggtgtagtggcctatgcctgtaatcccagctactcacgagtttgaggtggaagaatcagttgaactcaagaggttgaggctacagtgagacttgattgaaccactgcactgcaagc

SEQ ID NO: 231075 - DNA, 650 bp, Homo sapiens
agacatggaatcaacctaaatgtccatcagtggaagactgggtaaagaaatataccatggaatactacttagacataaaaaagaatgaagtcatgtctctcgcagcaacatggctggtaccggaggccattatgctaagcaaaataactcagaaacagaaagtcgaataccacgttctcccttataagtgggggctaaacaatgggcatacacggacatacaaagagtaatcagacactggggactccaaaaggtgggaggtggaggggatgagggctgaaaaattactcactgggtacaatattcactactcaggtgatgagtacactaaaagcccagacttcactactacacaatatacgcacctaagaaacctgcacctgtacccccaaaatatatataagtaaacatttttaaaatgcagattctgattcagtagttctgggcatggcttaaaactcttattttataacaagctttcaggagatgctaatactggtggtctgtagatcgcattctgggcgcaagggctgagaagccattctgagcttcttgtctatctctgggccatgaatgcacctagtgaacatttgggcaatggatgggttaccttatgtgtaagagaaggacagtattttccctcataatga

SEQ ID NO: 231076 - DNA, 527 bp, Homo sapiens
agtcttagtttgctgagttttaaaaattactatgaatggatgttgaattttattaatgtttttactgcatctattgagatgatcatatagtttttctttaatctgtcgacatggtgaattactagtttttcaaatatcgaaccatctttgcccgacccacttggtcatcatatttttttaatatattgctggattcaatttactaataaattgggtccatgttcttgagggcgattgatctgtgtgatctgtggttactttatattgtctttgtctagttctgatgttctggtaatgcttgtaacattgaggtgagaaatgtgtcttgtccaccccttcaaccccaaagacacacacattgtgtaaattagccaggcgtgttggcgcatgcctgtaatcccagctactcgggaagccgaggcaggagaatcacgtgaacccgggaggcagaggttgcggtgagccaaggttgcaccattgcactccagcctgggcaagaagaatgaaactcgatctaaaaaaaaaaa

SEQ ID NO: 231077 - DNA, 479 bp, Homo sapiens
atacaaagcatatatcattttccttgagtggcaaagttgaggaattaattaaaaacaaatagtagtttgataatttagtgtataaatatcaactgtcaattagaaaacaaaacacaaaacaatcactgcatacagtttcaggtaagacttatagtttgctatgcctttattctcattggtagaaagcattttaatgatttactcatggtcacagaggaagtgtatccaagttacaattaaatttcaaaatattgaactagcttatatagagccaattttatcttgaatttaaaaacagttgtatagaatagagtcacataaagtatcaaagattgccttggttgtatatggaagataaaagccaggttcttacacttaaaagaaatgttgatttatgttgaatttcaaaagaaatgattagattatccctgttgcctagttagcacaattgtctcagtgctctgaccttggtttgttaa

SEQ ID NO: 231078 - DNA, 382 bp, Homo sapiens
cattaaacaaaaacataaaacattcctaaaactagatgtccttttcctacattatgtccccaaagtactgatgaagagttttatatttaaaaaattatgcagtagaataaaatgtatgcattttaaaaaatctgactgctaaacagagaaggcttatttacgttgggaattacattaaggaaaagtggtgacaatgattgacagatttaactacatagctcattacaaacagattaataagaaataaatgtcgaaaaattgttacttatacaaaatttgtagaccacagttgcttaatatataaagaagtatttgataatcaattaaaaaggtaaacatgacaaaaaatagatccagggaagaataaatatacatgaatcga

SEQ ID NO: 231079 - DNA, 313 bp, Homo sapiens
ttttttaaaaaagctcatcagctatcattgctgttagtgtattttatgtgtgatctagtgtctagatcatgggtgttcaatcttttggcttacctggaacatggtagatactcatgtttaatgaaacaatgaacacaaattatcaatctgctattgtattacatactacatatctgctcactgcagaagtgattctgtaagttttaaatatgacctaaacaatattttgacatttaatccttgccaagtcctgacagtagccaagttatattttccataccgtaaagcaaaacagatcttgcctttgaaaatg

SEQ ID NO: 231080 - DNA, 409 bp, Homo sapiens
agaagacacagagcagccagaggcccaagagagtcctttctggcctttgcaaagaatgtctgcacctccctccactcagaggcctggagggtttggatgaggggagatggcacgcttggcctgggtggtgggcttcttgtgatgagctgtcactgtgaagagacttgctgtgctgaaggcagtgtggatggcagggagaagaagaggaagaacagagcaaatgtgcacggtagcaagctggttggaagcacttgtgaagcaccgctgggggctcccaggggtaaactggggctctctgcttaggtcccaccactagacagatggaagctaccatgtcattagacattgatttacaggtatttgtgttcacatctgtattcattggaatataaagttggcttctttaaca

SEQ ID NO: 231081 - DNA, 328 bp, Homo sapiens
tgggtgttgataaatgggtattaaaagaatgagagcaatgagcagatagaagaggaaattaggagagtataataccatggagaccaagaaagatagactatcaggaaggagtggtaaaaataagttactagttctaagagagatgttaagagggaccggggaaagccttgtacaaatgagttagtagcattttacattatatacatctaattaagaaacaatgcgagagtctcaccattcctatagactcttacttgtacttgtctgaacacgaaaactggcttttgtttataaataagctaaaaattattttgctccaatttctcat

SEQ ID NO: 231082 - DNA, 500 bp, Homo sapiens
tgaggaaggagattccataccctgtctggaatgctctccttccacttctgtctgacagatactcactccccattccctgttctgcatccagctgtggcatatttgagaagccttctttcattgctatcctgcatcttccttgttcctggggtagcacacagcctctctttcatagaacatcacacaagacagctgctgggatggctgacttgtgtatctgtctctcccaccagactgtgggttctctcaacagggtgaacatgaaaaatagaagcctccagtttctcctgatagtgtatagatgggcagatctggcctcaatggcagaagatacttggggaactggagaaagtacagaaggtgatgtgaaatcaattgggtcatcaaaagaagacgggtgtaccacaatttgttcctccacctgctgcccatgaacatttggagggtttctagtttttggctattacaaataaagttgtcatgaacatttgcatacaaat

SEQ ID NO: 231083 - DNA, 470 bp, Homo sapiens
aactcatgtggttgatcctgtctaaccttcatgatgacctcatgatgtactgttatctctcttctaaggtgagaaaacaggctcagagaagtccattcacttgtccaagatcagacagctagaaaatgacagagccagggttccctcttcagcccaggcgatgtcttggacagcagaaggaacaggaatagggctgggaggctggagatccacatctcggtcccagttctaacactgccttaccctgggcctcagcaagtagcatccctcttcaggatacaaagagatagtatgtctgtcaggttgcagacggctgagggtgtggacttgggagctaggctccttggattctaatccttgggcaagctacttcaccatctgagcctcagtgtcctcatctgtaaaatggagatgacaacagtgtctccctcataggcttgtgaagataaaacgagtaacaagacttagaa

SEQ ID NO: 231084 - DNA, 251 bp, Homo sapiens
atcatttgagctcaggaatttgagaccatcctgggcaacatagtgagacctcatctctacctaaaaaaaaaaaaaaaaaaaaaaaaaaaaaaggtagtatgcaggaggctgaggtggatggatcccttgagcctgggagatctaggcagcagtgagcagtggttgtgccactgccatgagcagtgattgtgccactgtacttagccggtacaacagagcaagaccctgtttcaaaacaaaacaaaacaaat

SEQ ID NO: 231085 - DNA, 485 bp, Homo sapiens
gtgggtggatcacctgatgaggttgggagttcgagaccagcctgaccaacatggagaaaccccgtctctactaaaaatacaaaattagccgggcgtgctggcgcatgcctgtaaccccagctactcgagaggctgaggcaggagaatcgcttgaacccgggaggcggaggttgcagtgagccgagaccgcgccattgcactccaacctgggaaacaagagcgaaagtccgtctccaaaacaaaacaaaacacaaaatgagcactgatccgggggcgcccgtttcctcgacctcaggctgtggcgcctgccagtccccaacatcccgacagcccgacggcgtctccgcgttcctcctcctctcccggtaccagggtctctccccagaaacaaactcgcattcgtaaccggcatcttggccttgcgctgggggtgacccgcccaagccgccatgaagggacgctcgcacaaagtgaagcccaggtac

SEQ ID NO: 231086 - DNA, 349 bp, Homo sapiens
ggtcagacatctggcaaacaatccttgccatagggaaatagacatcaatgcaatatcaggaaataggtacttagaaatggatttaaacaatttcttgggacaagcatccctctgaaatcaccagaatcagagcccaggcaacaagaattacttttatctttggatcccgtctgtttatccagtgccatagttgggcactgtgctaggtattttgaatgtgttatctctactatacacaacaactctacatgagggatattcttattctcttttcacagatggagaatctgaggataagagaggttaaaatccaacatcacacaactggtaaatggtaaagttaggcttc

SEQ ID NO: 231087 - DNA, 316 bp, Homo sapiens
gaaaataggaagagcaagttggaaagttggcactaagagtttcagtttaagatattttaagtttgtgatgattattatctgtccagtttgagatgttgcgtaggcagttgaatacgtacacctggaacttggagcgattacagcctggtttatgtttggctgtctgtatgattggaatttacattcatggatctggatgtgaccaactagggaaggcaggcaggcccgagaactgactcatgggtcactccaccctgtagacctttgaaagagggaaagagggacaacaaaagagataaagaaggagcagccacta

SEQ ID NO: 231088 - DNA, 444 bp, Homo sapiens
gcctggcctcctgggttctttgctgaaattatagttgaatggctttctcacattggccaagcatgaggcctcttgccaaagatcagctgtccccctaaagccacagggatggggtatcttcagcaagagagagggcgttaaagatgtaaaatgctttgtccatggggaagtgcacagatatgtgggagaaccttacaaggctctaaaatgagatgtgatatggcttgaaatgggaggagacactttctgacagtggggggtctggaatggaattggtggggacaggcagcaagctgcacttttgaggggcctcatttaccccacctctgttaaaaacttgactactctcctctttaatagaaagtcaccatcatctgtagtgatggaggaagggggtcacttatataaagatgggacactttaataaagacaggatatcttcca

SEQ ID NO: 231089 - DNA, 466 bp, Homo sapiens
atcttaaactcccagcttcaagtgatcgtcttgcctcattctcccaaagtgttaggattacaggcatgagccaccatgcccaaccaatgtcaacattttaatgtatatattatttacaggaaattatgtaaataaataatggattggattctagaactcagggtcacaaaatttttagaggataagaaatacttctggtttagattatctaatcccttatttaatattacaattatctgaaaatagtaagtgatttggggaaaaatgctcatacaaaatattatgaatggacataaaatattatgaatggactccaggattatggtgtagaccagttcagtacctttcaagaacaccataatatcagctattatttaaaatgttaattcatactgtaggcttcttacagtgaattgaggttatttaatatacgttctttaactgtgaatagtaaggcacacccact

SEQ ID NO: 231090 - DNA, 782 bp, Homo sapiens
atcttggaagcagccaccaccatcttgggagctctgggagcaaggacccctgtaacacattcatccttgaatgacaaaatgtctggtccagcatggtattataacataaacatgaagaggaagagacatgagagatacgcacagtgaagagaccaagcggggacacagtacgaaggtggcatctgcacgccaagcagagggacctcagaagaaactgagccagccagcaccccaccttcgtctttgacctccagcctccagaactaaggatagagctcttcatctctgttagaaacgaccatcaaaaagatacatcaattcattagaatcaaaaggacatgagttatcagaattctttctcctgaaagaaagtggagatcaaaggtaaaacttctagagaatgagatgaaggcagatgaaagaagttaacaagacattacatgacttgataatattgcatgtatgcaaaaaccttatgaaatcaactgtgttctagcgaccacttgtttttctttttgtcataatactttttattctcttgcaatgatattgattcatctgcacctgacatcaactctgcatttgtagaaggtgataagaatacagggaaatggaataagtggctttgcctgcaatcccgcagcagcagaaatgtccatttcctctctcctgaataatactacattctccactgggttccacaagtttcgaggtaaaagcatgaacatacacgaagtcaccatcactaccctcaccaccaccaccattatttccaccatatt

SEQ ID NO: 231091 - DNA, 481 bp, Homo sapiens
atcttggaagcagccaccaccatcttgggagctctgggagcaaggacccctgtaacacattcatccttgaatgacaaaatgtctggtccagcatggtattataacataaacatgaagaggaagagacatgagagatacgcacagtgaagagaccaagcggggacacagtacgaaggtggcatctgcacgccaagcagagggacctcagaagaaactgagccagccagcaccccaccttcgtctttgacctccagcctccagaactatgagatatacctttctgttgtttaatccatccaggctgtgtcattttgttattgcagcctgagagaccattacagaatgtgtagttggatcacttacaaggatagaggatctgggtatcgtacagtttacagaatgtatggaccgctgtgttcctattgataatatgtattaattatcaaatactcatgtgtatggcagaatttgtcctgaggct

SEQ ID NO: 231092 - DNA, 536 bp, Homo sapiens
gctccttcccctgccaggccggggtaggacattcttcctgttactgctctaagagctcatgggagctcttccgtgctccttgcccacggactgagtgtggacagttggagacagggcacggaattttcatggggggtgatgtggaattggggatacagggtctgatggaaccctgtgagactggatagcaaatgcagtctgaggaagccagaccctcgtgggagccagcagtggactgatggcttcagtgggtgattcagagagggtaagggctggcccctccatggatgtggttttggggatgccatgtgtctacagggttatcctcatctgcacaagaagcagtgtggtcagtggaaaaatggcctccaaaagataggcatgtcctcatctctggatcgtgtgcatgttacctgatagtgcaaaaaaggttggggtggatctttgcagatgtgatcaaggaattcaggatgggtggattatcccggattacatgggtgggctatgtattagtccattctctcactgctattaga

SEQ ID NO: 231093 - DNA, 417 bp, Homo sapiens
tgataacttcatgcacagttttaccagagattacttaatttatgtattattatttcatggccattatgctgtcctgacttaatggttgataaatgtagcttataaatcagacaacactttgcaaacatagaagttgtttcgttaatgtagatatattacaacaagaaggtactctcccttgcccctactttttattaaaagtcatatggtaatgaacagtcaaatcatttgtctttttaatttgtttggaggaacttgaaaaataagaatctgaagtttaaaaagaatttatggcttgtaacactatatcctgtccaggaatttaacaccttacaatatcatgtagcattatcattacattcttaaattccttgttcaccagtccagctacattttaagagtttttgctttcactta

SEQ ID NO: 231094 - DNA, 415 bp, Homo sapiens
agagtaccgggggctagggtcagaccttatgggtcctgaggggataaggtgagagtggggcacaggtggcccagacagcccactccctccagccagatctcactcattagacacccaacctaggttcaaatcccctctcaggcacttactggctgagtgaccctgagaaaattgcttaacctttctggacctcggtttcctcatctgcaaaatggacactataataatagccacctcaggatatgattcagtgaattaatgaagcaatgtgtttagcccaggacctaactagagttagccttcagtatatgtaagctattgttaccaattaagttatttttataggttttaaatattgggtctgtggataaatttcatttggaggagaaaagtttgctactaaaacaaacaaaca

SEQ ID NO: 231095 - DNA, 455 bp, Homo sapiens
ggaatctggtgaaacaaagcaacagaaaaaaatgaattcaattcttccatactctgaatccatatgttttcatttactgcctccaccactaaagatgtatgcctgcacacatctgtacaaagacaagcaaccatcatcagggtagttaacacactgattgggagaggttatttatcttctgtaatttcaaaacgtgatttctgaagagcatatcatgcccaattcagagaactgaactatgtactttgactaaatttccaagaacttgcagaaaaagatgaattatgcatattatcttttgtcctcctcttttggcaaataattcttccatttttcaactcccaagtgtagaaaactaatgtacaaattccactgctgtgaaacaatttaccagaagtcttcatcttttcactgttttctattgagaaagaaactatattttagacaatcttaaa

SEQ ID NO: 231096 - DNA, 356 bp, Homo sapiens
ctggaaaagggaaattattgatctaagttggggtttttttgttgttaaaaaggaaagggaaaggagaagatataatctgtttctgcttgcttcttagtctttacaagtgttaaatttttttttttttttaacatttcactagggcagtttatattcacacctctttttgaacatgggtaagagacgaaacaaaaagtgatgtcagtaggatcaagctattaatcatactaagataatataaaatgttacaaatgttgctgaaggatcagaagatgacaataaaaataattaggctaatatttttactgaagaagtgaaaaacgtgtctgataaagctgacagctttgcaaagaaaa

SEQ ID NO: 231097 - DNA, 453 bp, Homo sapiens
gcctgacttggatccactgtctcagatataagaggagcgggtccttctacagggaagagaccacagttctccaggaagccacgatatttcctcggggtgcattgtacgaccctccaacggttgctatggcaggaaaaaacttgagctctggaaaccgtggctgaccccaggcaacagggaccagttcctccttgtgtggttaccaggacacccccaacaccaggtcctaaccccggatttgtagccccacagccagctttgagattctgtgaatccgtgactcttggatccggcatctaagggacaccaatccatgagggatttggtagtgaaaggcccaagggtccttaaccgactgtggttctttggattcccttacgtgtgtttgtatttgtgaagttcctgtgcatttgctattctgtctcccggtttaaatttattgccagttatcaa

SEQ ID NO: 231098 - DNA, 224 bp, Homo sapiens
aaaggcggggcccaaataggactcacacacacacaaatacacacacacacacacggtctgtgaggtcttgatcctcagaaacgaagtacaggctgggtatggtggcgtgcacctgtagtagcaggtacttgagaggctgagatgggaggatcacatgatcccagggaggtagagactgcaatgctgcactccagcctgaacaacagaataagaccctttcttta

SEQ ID NO: 231099 - DNA, 529 bp, Homo sapiens
gtttttgagtttcagtggaagactctgacgtttcaaataccaaggctctttacgttgttgggacccaatttgttctcctctacggtcactaaaaatataatggctctacaattaactacaaggaagtatgttgcaaggtagtccaagtgcacacactgcaaggcagagatacaaacatcacatccagcaagcaaataagagtgtatctgtgcctgaaacaaggatactaaggtcatccacaacagtggtgtctaatggggtaagctaatatgaaagagtgaagcagcatcaacagtgagtaaaacagagtgactgcaacatgttcttcatttttgtcactgctttttaatacattacttcagatttcaatgtaaagttttgaataaaaggaatcattatatacatgttttatttgtttttgaaacagatgttctctctttttgaagaataaatcacattttatttccctccagctttattgaaatataattgacaaacaaaattaaataaatctaaagtgtgtaatata

SEQ ID NO: 231100 - DNA, 448 bp, Homo sapiens
gatcctgccatgtggtgtccacttcttaatttagtgatccaagcatttaggttctgcccatggttgcattcttagttcatctgagcctcctcaagttacatgaccttcaacctgggggtccatggcaactaaaaaacaactcacagcttcgctatataaatggtgaaccataaagttgaaccagctaattaacacaggaacagaaaaccaaacactgcatattcttattagtgggagctaaacattgaatacacatggacacaaagatggaacaatagacaccaaagcctactggagggaggagggtgaggattgaaaaactacctatcaggtgctatgcttattacctaggtaatgaaataatctgtacaccaatcccctccttgacacacaacttacccacataacaaacctgcacatctaccccctgaacctaaaataaaaattg

SEQ ID NO: 231101 - DNA, 479 bp, Homo sapiens
tgatgaagaatttattttagtgttttgactgagccaaaataaaatcagtttcattgttgaagaaacacagtttaacataaacttgtagatagactattaaagagtgctgtatcagttaagtgagcactgtcttctaaaatttcatgtattcaaggatggagagggtcaaatgaatagttaaaaatacaaattaaggccaggcatggtggctcatgcctgtaatcccagccagcactttgggagtctgaggcaggcggatcacttgagctcaggagtttgacaccagtctgggcaacatgacaaaacactgtctctaccaaaaatacaaaaattaacctggcctggtggcgtgtgcctgtggtcccagctacttgggaggctgaggtgggaggattgctggagcccccgaggcggaggttgcagtgagccgagatcgcacctctgcattccagcctggttgacagagtgagaccccatct

SEQ ID NO: 231102 - DNA, 528 bp, Homo sapiens
aaaggaaacatggagcaatgagaaatccatagaggttttgaaaagctctgaaagtattcctggaaaaatagaggaccatgcacatacatagagcatgaacatgttcaggaaagacctaaaaagaccctaaggtctcacttctggctgatcttgagaatatgtgtgacagcaagtgaaggctaaggcagagttgttaattacctggctgagtgttgaaggcatacccctacaagtaaacagtggctctcagcaacacttagagatatattgactccatctatttaaatatgtctatgtccagtagttagctaaccactaaagacttcggtgatcaaacacaacaatgaatacagactgttcagaattagttcagaaaagtcactaaactaaacaaacaaaaaaaacaaacccagcaactacaataagcagcaattgcagaccctggggacagaagagggcaaagagagaatctgatatctactattgctacattatattatttaaacatcaagttttaaaaaaataaga

SEQ ID NO: 231103 - DNA, 422 bp, Homo sapiens
tagatgtccatctcctgataaatggatcatatctgataatctatgtaaaggaatattattcagctataaaaagggatgaagtaccgatacatgttacaatatggatgaaccttgaaaacatgctaaaggaagccagtcacaaaagtcacctattgtatgtttccatgtatatgaaatgtctagaatagaaaaatccagagacggaaagcacattagtggctgccagggacttgggggtgggggaagagggaatgactgccagtgggtaaggctttttggtgggggtaaaaatatcttcaaatcgattgtggtgatggttatacaactctgtgaatatattaaaaaaatggtacagtttaaatggatgaattatatgatacaatatggtatgtaattctatctcaataaagctgtttaaaaat

SEQ ID NO: 231104 - DNA, 440 bp, Homo sapiens
ccaatcaatcttatgacataagtttgccttctagtggagtcttagaacatgcttactggagatttccgttgtattgtatcatgaactgttacatttattcagataaaataatatattgttcttctgggcttacacttcaggttgatgaacttagtctgttactgagatgaaattccattcttgccgtggcaacaaaaataaaaacttagaagtctaagggttaggctcagctatgacaaactcatatggtaattccatattttgaagtcttttggctgacagcacagagtgccattaatcactctttccatcttatgtttatacattgtgaaggaggagactcatgttgaaaagagaatactaagctgaatgagctttaggtttaaaatgaatgacattctgatgttcttaaatgttaaaaagtaaatgacatggattaa

SEQ ID NO: 231105 - DNA, 497 bp, Homo sapiens
ccctcgaggcataaccccttactccagaaccttccatctcccacactgcttcccccaaggggagtgctaaaaagaccattgtctctccaacttgtgactgttttcagtgatgttgcagacattcagctggcccaccctggctaacagaaacctcggtggtttcttcccaagagcaatggcctcagtgctccggtgtccttgtagagggtggctctgtgcttgcttgccctctgaccactgtagaggatggctctgtgcttgcttgccctctgcccactactcctggctctccggggccccccaacgcatctgtcagataggccatgacatagaaggactgcgtgctctatgggtctttataagcttaattccggcttcctaccctaatgctgttttcaaatccccttggtcatctctcccagccttacagtgctgttaatgatgcccgataggattgtgaaggatttccacctgtccttaaacttcaccctctgctt

SEQ ID NO: 231106 - DNA, 182 bp, Homo sapiens
tagccaggataaattacaatttggccatacatctcaaaaagtaagagtcaatgagaatgatctgttttcttattggaatgtccacattaaaagcttaatagtattggtgggttgtgtatgtgtgggtatatgtaaacagaatcagttatgaggtaaacaaacaggtagtttttttttggggg

SEQ ID NO: 231107 - DNA, 380 bp, Homo sapiens
caggcagaccacctgaggtcaggagttcgagactagcctggccaacatggtgaaaccccgtctctactgaaaatacaaaaaattatctgggtgtgatggtgcgcacctatagtcccagctacttgggaggttgaggcatcagaatcgcttaaacccgggaggtagaggttgcagtgagccgagatcgtgccactgcactccagcctggatgacagagtgagactccatcaaataaataaataaataaataaataaataaataaatacagttcaaggtcctgctcccaccccgattctaccctggggactcattccttccctctctcgccctttcatttgagaaaccttcacttctaaatgaagttcagctgcttatgcca

SEQ ID NO: 231108 - DNA, 189 bp, Homo sapiens
aaacaaccattaaatagctgccactgatgtctacttcccatttcttctagtctatgccacacttgttgggaaagtttactcactcactgctccaacttccttcctgttcactgttgaagccgctctcatcaggcttggttgccgtcctctacttaggctctctctccatggtctcctgtaacctctgca

SEQ ID NO: 231109 - DNA, 313 bp, Homo sapiens
gactctgcccccccccaccgccccagagcaccagctaccttgaacatgtgtgggtgaggggcataatcagggcgtgttccaatgtcctcacccaagcccagctggggccacacatgcagtcaatgttgaggaaaggactcaactcaaaatcctgtcttttcaaaaactgagactacagagccttagcccctttaaagcacttaaagttactacttccaaatgtgatttgctttctagtgctgtaattggaaaaaaaaaatactccttttttgaatgctggatatgatcatattaaaaaatgttagtcccaaca

SEQ ID NO: 231110 - DNA, 259 bp, Homo sapiens
ctctaaatagcaccgagtttgaggcaggaaaatttcctggttgtctccccctgaggaacaggtttttatctagtttatcctttcactgaaattatagtccttcgtatctctggctttcaggagttttctcctgtaagactgttatactgggcaggcactaggttttgtctcacactttcccatattccaggtggtcataaaaattgaagctcagggtactagggccaggactgtccttatggaagcctctggtttgggg

SEQ ID NO: 231111 - DNA, 193 bp, Homo sapiens
cattgccatctaaacaagacactcagctagtgaggaaatatgtgatctatatgatgtctccataatttcacctacttacaatgaggccaccttttaaaaaatctgaatttttgaagcctgttttgtttgttaaactttctacataagaaaattaatgttgacttggtggaatagggtggagtttttcaatgat

SEQ ID NO: 231112 - DNA, 496 bp, Homo sapiens
tgttataatacgtgagaatcaaacctcactttttttttaatctattttttcttatactagaaatacgtgtgtgtgtgtgtgtgtgtgtatgtgtgtgtctttaatctgaagtatagcaattatgggtagcatataaatgaaaattttaaatattcttcctgagacttcctagcggtactttctagaaatagctactattgatgtttcttctgaattcttccaggcgtttctctgcatagccagtcagtcgtgtaccatgtgcacatgtccctgatttacttattagtgaaaatgattcttctggtttttaagtgactgtatagtattccattatatgaaaagtccctctctggatcaattcagatggtacaaatgctcttgatgggcattttatttgttgccaggtgtttgctattagaaactgttctagtgatcattccatgtatatctttggataaatttttctaaatataattgccatactgacttttgtgtt

SEQ ID NO: 231113 - DNA, 471 bp, Homo sapiens
agtagagacacagaagatatgttattaaacttctagagatgaagttatgttattaaacaacatgtgagatgaaaagtgcactggttaggataaaccacagattcgatgctgcgggaagaaatgatttatgaccttggaggcagcatagaatctatccaaaaacgcagagaacatagactggaaaagagggtgtggtgacagagcatcagtgagttgtgataaaactttgggcagactaatacctacatagttagaatcttaggtaaaaaggtaggggagggaagaggggcagaaaataagattatttagcccatttaaaattatcacctcaaggtagatggtgacaagttaaaggtgtgcactataaatccaaaaacactactaaaaataattacagttaagaacccatcaaaggagaagaaaatgtaatcataaaaaatatccaattaatccaaatgaaggtagaaatac

SEQ ID NO: 231114 - DNA, 269 bp, Homo sapiens
actgaccccaaggggcatgcttttctgctacaaatgcaagaagcctagagctaagagtcaggagttattttgaagtttaaaggagaggatatctgccaaagctttgtccatgggaaagtttgccatataacagacactacgaggcagttggctaagggcaaagtgaggaggtcaaaccgtaggtgccaccggagttaaaagatccataaaagagagccctaatgtcagaggaagcctcttagaggaaatggatcttcaactggaccttg

SEQ ID NO: 231115 - DNA, 348 bp, Homo sapiens
tgtattagcttttaaaatagattctaattttaaaggtaacatagtgagaccccatcactacaaaaaaaaaaattaattttttttttaagttacctggccaggcatagtggttcatgcttgtaatcccaacaagacaggcagatcacttgaggccaggagtttaagaccagcctggccaacatggcaaaactccatctctactaaaaatacaaaaagactagccaggtgtggtggcaggcacctgtaatcccagctacttgggaggctgagtcacgagaatcatttgaatccaggaggtggaggttgcagtgagccgagatcacaccactctactccagcctgggtgac

SEQ ID NO: 231116 - DNA, 486 bp, Homo sapiens
aataccttgtctgtgacaagggaacttcttcaggttctccctaaactgcaaattcttcagctaacaaaataaacttaatgccctgcagtcctcactgtggcagagccatactgtgtttcataccacatctgccgtgtcactatcctggggccctcagaagacgtgcttgccctcaagcctaacaaagtattccacaaaaatgcctccttttaccagcacctgctcattttttaggactcaaaaaatgcatagcaactggggaacaaacactgttctgtttgctgcaccctctgtttttgacactccaggcccagcagagcacatttatctctgcctattaatgtgagcaaacagattcctttactggccccaccaatttaatcagatatactgtcaaacctaggctcaagcagagatccctatgatatgtttgttttagcttttttttttctttacagcgggaggaaacttaaatagctttcagta

SEQ ID NO: 231117 - DNA, 951 bp, Homo sapiens
ttccagccaacgacaaacaaaggcaagctcaatgtccccacatgggaaaacaatgaaatatttttatggaccacacaatggaattatattatgctcgtttactgattatgtggggaaatgctgatacaataatgttacatttaaaacagattacaggattgcacatagaatatgctcagctacttttgtaaaggcataggaaaaaaagactggcaggaaaccttccaaaatattaacagtgttacccatgaacactttcctcttctcctccttttctatgccttccatgtacttatgtatgctcctgtaatgcttttaaagggaaaattaaaattataaaaatccagaggtgggtggacagtcccacagaggtggtcaagactctgtgctaagagtgtcagtgcaagggttaaacatgtgaccccggaaagaaaactatttagcaaggcaactcccacagtgggagactacagtggactaggacagggtaggctcctgaaaagaatggaagcagtgaaggttcagaaatgaagttggttgaaaatcatttcctgagcacccactaatgttacacaccaagaagttacccatttccagagaaaagaaagaaaaagactttcaagagcataagaagtgagcctttggaatgtaaatctaccataattctcaactcctggaggtcttacagatgaggaacacgaggtgagagtgaagaatgcatgaagtgtctcggtctgagccctaacacaacacgactattcactgtccccagtcccttatgtgaaacccttaggaccagatgtgtttcaggagtcagaatttttcccatttcagaaaggtgacctggtgtaaatattttacataacgtatcatccccagtagggtttggagtggtgccctcaaatacactgttatttttgttgttgttttgttttgttttgagacggagtc

SEQ ID NO: 231118 - DNA, 766 bp, Homo sapiens
tgttcagaggatcccctctccacactggcaggaaaccttccaaaatattaacagtgttacccatgaacactttcctcttctcctccttttctatgccttccatgtacttatgtatgctcctgtaatgcttttaaagggaaaattaaaattataaaaatccagaggtgggtggacagtcccacagaggtggtcaagactctgtgctaagagtgtcagtgcaagggttaaacatgtgaccccggaaagaaaactatttagcaaggcaactcccacagtgggagactacagtggactaggacagggtaggctcctgaaaagaatggaagcagtgaaggttcagaaatgaagttggttgaaaatcatttcctgagcacccactaatgttacacaccaagaagttacccatttccagagaaaagaaagaaaaagactttcaagagcataagaagtgagcctttggaatgtaaatctaccataattctcaactcctggaggtcttacagatgaggaacacgaggtgagagtgaagaatgcatgaagtgtctcggtctgagccctaacacaacacgactattcactgtccccagtcccttatgtgaaacccttaggaccagatgtgtttcaggagtcagaatttttcccatttcagaaaggtgacctggtgtaaatattttacataacgtatcatccccagtagggtttggagtggtgccctcaaatacactgttatttttgttgttgttttgttttgttttgagacggagtc

SEQ ID NO: 231119 - DNA, 352 bp, Homo sapiens
aaaagatacacatagaacagtgtggccattggaaatgggcccggaacagtggtcatgctgccattactctcttccaaaaagatgttaaatctctaatttcacatttttttttcctttgagatttcacttaagcctgatactctcttcatagatcagagaatcagattcttactcattttataactttagacataaaacctagattaggattcaagaaactgatttaccaaacaatttgttttatggattttgtttaatggctaaactaacatggaattcctcctttgttccagaaaagtaaattcattttaaggtgaatattttttcatcctgtatttaatattacttgaat

SEQ ID NO: 231120 - DNA, 433 bp, Homo sapiens
cacatggcattcaaggctctgcaaggttcctgtggatggtgattagaggatcgtggagaaagtactataaaatgaggtttgcttgccatccatttttacttaattttttagctttctcttttcctgttcttgtgtatccttttgtcttcatcattatattttatctttatttttcaatagcttaaatattgaataactaaagtaacatcagcacatttcatcatcctcccaagtcttggatgtaaactctgaatcataatttgggaaacatggaaagttggaaaagagttcaaggagattcatattcttaaagagcgtgaaaatgacattttaaaaatttaaataattcatactttgaggaggaacaacttaaaagtgtccagtacctattgagtgggaatacagagtgaattattaaaggagaattaaaata

SEQ ID NO: 231121 - DNA, 405 bp, Homo sapiens
tggacaccctgatttcagcctggtgaccctgatctcggatgtgtggcctgcagagctgtgagaggatggctgggcgttgttgtgacccagccagcttgtggccactcgttacagcagctgcaggaaactgatgcagcgccacagacggagccagggctcagctcactggagttgctttctgttattctatttcttcctaaaacattgtgttaagccaaccactaacaaccactgactccgatgggcaggaatcgcagaggtttcttggtttgtttctttaatcccttttccaattttgaaataatattccttgttggtttttctgattataaatgtaatatctttctttgtattgagtttagaaacaagagaaaaagtaaaaagcagaaaccccagctgggcaag

SEQ ID NO: 231122 - DNA, 175 bp, Homo sapiens
aaccactgcattctttttatctcctggtattttctttgcggtaagaaaagcattattagttattttctttaaggaacatgaacaaatgagacttagactgcagagtatttgcctctgtgttaaaatactcactattaaactgtctctattttcagtacaatgtaaatagttactg

SEQ ID NO: 231123 - DNA, 370 bp, Homo sapiens
ctgatagtctttgaagaagttaaattcagattttatgcttgcaacactatgttttttgaaaggatgtgacaatctattttaataccacatttacatatagaaatcatctttgacattgctagactgattaatttcagtgctaaattaactttacaaccataacaattacactgttagtaactaattcttattcttctaaattgagccccttagatttctataactaatagagcttttaaacatatacattaaggccgggcgcggtggctcacgcctgtaatcccagcactttgggaggccgaggcaggtggatcacgaggtcaggagatggagactatcctggctaacacagtgaaaacccgtctctact

SEQ ID NO: 231124 - DNA, 409 bp, Homo sapiens
cagggtcagtcagcaccattgtaattcagagaatgacagaatgaggcttctactgagaatgcattttggtttgacaagaaaagtgagcccctgcaggccaccgtagtccaggaggcagggaggctcaggcaagtccttgggaagtggaggtaactatggtgcaggtgaaggatgttcctggcaggctctccacggagaggtgcatgtgaggagccacgcagccagagcagcggggccaggctgaagctctgcctttgcctgtgtgggtaggagaggctttatcccatgattaggacgtggaagctacttcggaggctgaggcaggaggatggcttgagcctgggaggttgaggctgcagtgagctatcactgtgccactgcactccagcctgagccagaccctgtctca

SEQ ID NO: 231125 - DNA, 672 bp, Homo sapiens
gagaagaagcaaagacaagagttccagaacgtagaagctggggtatcaaagggctggcccagatacaaagacaggaagacactgacctaggtccagataaccaatgtgctcagttataactgcaaatgcaaatttcacatattttataacagatgcatacaacagatgcatattctacatcctaattgaatggcagtgataatattctaatactttactgcatgctagtgtgagaggccgctaaccacacgtggctcttgagtgcttgaaatgtggctcatgccagttgtggaaatggtaacattctggatgtaccgggttaaataagatctattgttaaattaattgcacctgttccttctgccatctttaaatgtggctgttataatatttaggattgtatgtgcggttctgtttctactggaatatgctgtatgttgttttcaatcaaacaagaaagactgagaagcgggtgggggtggaaccgtgggctgatgttgaggagagcaagattaattctgttttaaatagaaattctcgaattgcggttccattcctcactttaatagttaaaaaataagcataaaggtaaacttaaaagctatttattggtacaattaaaaacagaatgtatatttttcaaaacagcaaataaaagtagaagagaaaaaa

SEQ ID NO: 231126 - DNA, 517 bp, Homo sapiens
cagttggatcctgaaaggtgaatagaaggtcaccaaaagaagggaagataaattaagtatttgtttgttgtttatctttgttactagactgactataagttccgtgtgggtagggactggatcttgctcaatgttgcatttttggtggtcagtgcttgaaaacacctcaagtgttctaaactatctgttgactaaccaactgaacagtatttcaggcaaagagaaccatatgcacaataacaaaataaataacagaatgatttttctaggctatggcttgtaatatcaacactgttcactcctggagaggaagagtatatcataagacagctaaaaagggcaggtattatagaaggaaccagaagatttgcattctagtcccatccctgttattaactaactacatgactttgaataaatgcttagcttataccacctgtagttttctcacttgtaaaatagctttggaagagtatattcttgtaagaaaaaaaattaaagaaagatcaagaatgta

SEQ ID NO: 231127 - DNA, 170 bp, Homo sapiens
ctaaaggatctggaaaggaatccttctctgcctcttccagctcctggtagctgtcagcattccttggcttctgtctgcatctctctctgctccatcttcacatcagcttctcttctctgtgtcttgtcttctcctcttctatctcaaatttcctcctgtctctctcttga

SEQ ID NO: 231128 - DNA, 361 bp, Homo sapiens
ctggaggcccacacacagttgggaaggcaggtaggggggaaggagtggacggaccctcttccgatattactttatcaccacatttttctcattgaccttggcatatttgctttaataagtctctgcatctatctgttcttactctccttcaaaagacaaaactagctaagtctaaatttatattaggataatatttactaagaatttccaatttggagaaaagaggtgactcaaatttgaaacaatacttaaataagaacaagtgactataataataatttttttaggatttatgtcactttgaataatctactttaggagaaaacaatgaaaaagttagggtcagaaattaatttgtatg

SEQ ID NO: 231129 - DNA, 253 bp, Homo sapiens
caaaacatttagaatcaatttagccagtaccctctaattacattttagatttttaaaaacacaaataaataagctaaaaacacacaagcaaacaaacaaccaaaccaaaccaaaccaacaaaacaacacaaatgtcccaaataaagaaataatagccaaagtcacagatgaaagctaatgctgtcataaaacattaagacttccccacttgggtttgggtcctagttcttcctgaggtcttaatgtctgtaac

SEQ ID NO: 231130 - DNA, 738 bp, Homo sapiens
gttaaactctgataagaacattaccaagataatgttttgtcctttccattactcatatcaggagacaagtaatatgagatgtatgcattattggagctgtaaagtttaattatttggttaggatgttgtctgttgggtacccttttcattttctaatatataagttgtctatggggtgattcaaatggtaaatatcctactgcttaaaaacttcacccggtggtttcagcattcattgatttttgctgtaatcacctatttcattgatgtttaaaaattgtggtatttttctcattctgtttttttctacatttatcagctagcattcttctgtagagaaatgctttgatctaccccctctactttccatctgcccacccccgccccctttttccagtaaactacttattggacaccagcacccagatgaaggaatagaaaattaccagtgctagtctggcatggtggctcacgcctgtaatcccagcactttgggaggccaaggtgggcgggtcacctgaggtcaggagttcaagaccagccttgccaacacagtgcaaccttgtctctattaaaaatacaaaaattagctgggcgtgggggtgtgcatctgtagtcccagccactgaggagcctgaggtagaagaatcacttgaacccgggaggcagaggttgcagtgagccgagatcgtgccactgcactccagcctgggcgacaaagtgagaccttgtctcgga

SEQ ID NO: 231131 - DNA, 635 bp, Homo sapiens
gtaatctcagcctcccaaagtgttgggaatataggcctgagctactgcgcctggacgatatttgttttcttactgaattttaaaaattctttggatattcaggatatttctcttgtcaattagatgtttcttttagactaatatgcatgtgtgtgtgtcttgtctttttatattcctaacagtgtctttcatagaacagacgttttaaatttctttcttttatgcatcatggatcatgcttttgatgtcatttttctttttttttttttaactaatattttttagagacaggttctcactttgtgtccagggtagggtgcagtggcacaaacatggctgactacagcctcaacctcctgggctcaaggaatccttccattttagcctcccaagttgctgggactacaaatgtatgccaccataccccagtttgttttaaaaattttttgtagaaatggggtcttgctatgttgcccaggttgctcctgaacttttgtcctcaggtgatgctcccaccttggcctcccaaagtgctaggattataggcatgagccaccacgtccagcctggtgtcatttttctaggaatattttggagttttagtttttacacttggctctgtgatccattttggt

SEQ ID NO: 231132 - DNA, 636 bp, Homo sapiens
gtaatctcagcctcccaaagtgttgggaatataggcctgagctactgcgcctggacgatatttgttttcttactgaattttaaaaattctttggatattcaggatatttctcttgtcaattagatgtttcttttagactaatatgcatgtgtgtgtgtcttgtctttttatattcctaacagtgtctttcatagaacagacgttttaaatttctttcttttatgcatcatggatcatgcttttgatgtcatttttctttttttttttttaactaatattttttagagacaggttctcactttgtgtccagggtagggtgcagtggcacaaacatggctgactacagcctcaacctcctgggctcaaggaatccttccattttagcctcccaagttgctgggactacaaatgtatgccaccataccccagtttgttttattttgtcctcaggtgatgctcccaccttggcctcccaaagtgctaggattataggcatgagccaccacgtccagcctggtgtcatttttctaggaaaacttttaggaaaccaaggtcacaaagattttttctgcaaacttttcttatacatattttggagttttagtttttacacttggctctgtgatccattttggt

SEQ ID NO: 231133 - DNA, 635 bp, Homo sapiens
gtaatctcagcctcccaaagtgttgggaatataggcctgagctactgcgcctggacgatatttgttttcttactgaattttaactaatatgcatgtgtgtgtgtcttgtctttttatattcctaacagtgtctttcatagaacagacgttttaaatttctttcttttatgcatcatggatcatgcttttgatgtcatttttctttttttttttttaactaatattttttagagacaggttctcactttgtgtccagggtagggtgcagtggcacaaacatggctgactacagcctcaacctcctgggctcaaggaatccttccattttagcctcccaagttgctgggactacaaatgtatgccaccataccccagtttgttttaaaaattttttgtagaaatggggtcttgctatgttgcccaggttgctcctgaacttttgtcctcaggtgatgctcccaccttggcctcccaaagtgctaggattataggcatgagccaccacgtccagcctggtgtcatttttctaggaaaacttttaggaaaccaaggtcacaaagattttttctgcaaacttttcttatacatattttggagttttagtttttacacttggctctgtgatccattttggt

SEQ ID NO: 231134 - DNA, 1082 bp, Homo sapiens
ggcaggaggatcacttgacagtttgagaccagcctgggcaatgtagtgagccccccaaaaccctctaaacaaacaaacaaatctgcagaatatttcagcatcactctacactttcctagaatatcaacatacctgataatgaagtagaaagagttccaaattgatgattgagtgttgggttctagttctatttctgccactaattagttctctgaacttaagtgtttcatgtcatattgaaactttctcatttgtaaaatgtggaggggatctcttaagtgctttctagtttcaaagtactttgatactgtgactttattttgtagaggttctggtgtcatttatttttaatagctacatgaataatgtagagatactatcttttgatttcaacttcacatacatggaaatgaaagtcttgttatttaacacaaaaggaaatttaatttgcattatttaatgcagttaatattacctaaaatgttgaacttaagcttttctactttaagtgcctttaaaagttttgtatttggaatctaaaatataaaggaaattcttatgtagctctatacagttgcttctttattatatagttttgagtgttttgtagcaacttttttttttttaaccttagattgcacagagcagcatattcatggattcttcactattccgctagtgaatccttgagaaatgtatgttaaagattagctcactgagcaggtaagtaagtgctctgtcttgggtgggcaacaaatcttcatacagagtaggataaagaactattcagatataccagtatttgtatttagatattcccatttagatggctggtgttctgagctagtaaatggttaatgttacagatcttaaatattgctttggtagcaaatagtttattccctgagttttcaggttggtaaatgtttctgtaaaagaccagatagtaaatattttgggcttcacaggccatatagtctgtccttactattttcctctgcaattgtagcacaaaagccaccatagacaatgtgtaatcaaatgaatgtgaatgtgttctaataaaagtttatttacacaaa

SEQ ID NO: 231135 - DNA, 371 bp, Homo sapiens
cctagctatagatacccaggaaaataagtatgtatcttcacagaaataattgtatgagaatattcatagttacttatgcacagtagttatcaagtaaacctgtctcccatcagaaaaatggatatcaaattgtgtgataatcatacaatcaataggatattacttggccaaaacaaaatgaaacaagggaaaaacacaatcaaacaaattagtggcatatatacccacttgagtaaagagaagtcggccgggcgcggtggctcacgcctgtaatcccagtactttgggaggccgaggcggcagatcacgaggtcaggagatcgagaccatcgtggctaacacagtgaaaccccgtctctactaaaaataca

SEQ ID NO: 231136 - DNA, 390 bp, Homo sapiens
aatcaaagacaaacctaatcaatgaattcagtacagataaaatttgtagaatatgatttttattaggactgttaagtcacagaagggttaaatagattggtagagcaaaatatgtcactgttatcataaatattcattgtaatgaaagggactctcagaactataaattagtacgcttcatttctacaccaagcaagctcacatattatttaataaaaggataatgtccctaaatttaagtaggtctaacctgttaaacaaagagaccacatagtgtacgaagagatgtcaggagattaaataagtgtgtggataaaggtaagccagtggaggtaatctgttttgatggtcaaaaatactttagcatttcattgcaaaaacaattgaaga

SEQ ID NO: 231137 - DNA, 393 bp, Homo sapiens
caaaacaggaaacataatcaaagcgctagtcagctagtctaaccactaggctttcttcacacatgcttatatcctttaataaccaattgccaaccacggctataagattatttcagaggtggggctgggaagtgccacttgctccttagagtctgtttgtcaaccaggcagagtccctttcttttctgctccccaccccaaccctgcccctatgtacaggaataagagcaaaggacccacaggctacagagaagaggatggggacagagtgtgggatggagaggacagaccatatactgcactgtgtttgcatgagcctctaccaccttcctctatctaccagatcattaaacctgctgtcaaagggccacaacagtagcagccaaaactaaa

SEQ ID NO: 231138 - DNA, 488 bp, Homo sapiens
tcggtctgtccctcggagacgctcttcttccctgtggtgacagggaggcctacataccccagcaagggcttgggcctcccttggtgacagtggggccagggtccggcagtatctgagagcagctgggatgtactggggcctggaggaggtgcttggttgtgggaagccccagatgacctctttggaaggacttggaacagcaccaagatccacaacccctccgtgtgacggggtcactaatccagaaggtcagctggagggggcccttagagatgtgttcacctgaggaaactgaggcccagaatgggaaggggtgacactccttccaccgctgggggccctgctgctgcctcccattttgtctttcctcgggcctcctgatctttgcaacctcattttcatgccttggtgttttggggcaaaggtggaccacttgtttcatgtttggaccacttgtttcttgggaaataaatagatttatggtctta

SEQ ID NO: 231139 - DNA, 341 bp, Homo sapiens
tgcccatcagcagcacacagacatgaaacatgcctccctgtcttggtcccacttccctctttagccaccacttcatgtttctgccctcttaatggtaaaactcctcaaaaacgcttgtgatactcacttcttcagccttctttcccatggggatgaaggcccagggttgaacatgaccgtgaatcccagtccttggtagcatcccatacttgatcctcccctccttgctcctaggatgtccgtggtccccctcctgccctgctggttcctcctcatcccccagctgccccctggattcattctctcaacctctcctctgcatcgtctgtacctactcctca

SEQ ID NO: 231140 - DNA, 139 bp, Homo sapiens
catcccaactcccttctattccccccacccttaacataaaaagagcctgaaatgtgtactgacttattttaggatgcaagtccaccatcttcttggtttactggctttccaaataaactggttgtttctcccaccaact

SEQ ID NO: 231141 - DNA, 255 bp, Homo sapiens
cagtgattatagatatcatacctttaccataattaaacattaaaatgatatagattttgcctccaattccaggcaaggatgggaaaggcaaaattacacaagtgagctgttctgcccaaaggggaataaaggtgaggagaggaggctagtaacaatcaacaagaaattgattaaatttccagtcacaataatatttatctgcaagggtattaccaagaatttagatgctcttggaaagaataatttttgcctaca

SEQ ID NO: 231142 - DNA, 353 bp, Homo sapiens
gtctcactgcaaaaataaatgttacgaatagtaagttctcccttcatcaatacgttcttggaaattgcaactttgcacttaaagtatattgagtatattgtattggtataacaacataccaatgtgaaaccaatttgacatagactaattgatataaacaagagttaagttcctatggcatatttctggtcacaaaaatatcaccaaacttctaaataaacacccatttaagaaagattaacaaaaacaagtaagataatcatttacccaattattccagtttaggagcatgtgtggctgcagcctgtcctggctgctcaggatacaaggagagaaccagccctggacaggat

SEQ ID NO: 231143 - DNA, 223 bp, Homo sapiens
tacatttatatccctgaatttaagtaactgtatatcaaaagaggagtggaataaacatcaccaaaagagggttccatggattttgtttttgtttggaaggtaagtacggtttaaagatgtgtgtggggtgctgagcaagttgcaatacataagcctttgtcagcataggcaatggttgaaaacaggaacagaaaatacagaaattagaacccaggcttgtcca

SEQ ID NO: 231144 - DNA, 279 bp, Homo sapiens
caggctgttctcgaactcctgagctcatgatccacccacctcggcctcccaaagtgctgggattacgggtgtgagccatcgtacctggccactttaattatttttaaatgtgcaattatttttttactacaggttattttatgattataataagtatatgagtataattataattcacacatttctaagtcatgaatgcttttaaaaaatgttccatatttatctttgaacatgtagcatctctttccgcaaataaatgcagactttggttttgattta

SEQ ID NO: 231145 - DNA, 1309 bp, Homo sapiens
aaaagctccctaaaacatccgttcggcgcgcgggcccagggggtggatgaacttggatgcgatatggtgataccttaggtagaatcctccgtggtcatgactagatgcattggactgctgctacacaactaaatataaaacgcctggaggacgactcggagacgtcctgaagcaagggcgctgatggcagtgctgaggtcatagggatactatacaacgatgtagtcctatacgtcagagctacgaaattcgtcatttagtcccactgctgtgacgtttattgcatggcttaagtgaagatttgggttcattttcctagtgtttgaattttaccaccattgttttttaaaaaataatttgcgttttcctctctgacttaaaataccaacttttagtaaaaggaatctctgtatatttatgtctatttctgggcttaatatttagttttagtttaatatctattactagacctattttacaacatattcagtggtctaaattttaatatttgtaaatatcaggcaggtcaaaaaaaacatcattttcacttttgaaaatattattttctagtatcagctgtttattcttccaggaaagtttataatcagtggaccttatttaaaaagacctgtagcagtgtttttagagttgcactgaattgcaataaatccaatggggagaaattggtagttataacagtactcaatgtcaatattcaatatcaatagtactcaataatactgatataagaacatgataagacttccattgctgaacttggcttcaggttttcctcagtcaagtattagtttgcttcctgcatttcctatgcatttcttacaaaacttaaggttgttatcttatattttctgaatctgatttttattcattgtattttcaggaatattggaaagatatcatttgaatatatttaattttttaactgaaaaaactattgctaagctatcttgttggtttcgttttgaataatagattcttgtgttttcgggtagatgatcctcatcatttgcaaataataacaataataatgggctaatattgggattcctttattctttatggctttaattgcacagcctctaggcatattcttaaacaataaattggctgttaatttaaaataggcatttaattatgtcaatgaattgtctttttgttcttttttagattgaaaatcaaaaaccaagaatagaaattgagttttgttaaatgtgtttgtagcttctattcagatgattgcatatttttctttgttgtgatttattaataaaatatacttttaatatta

SEQ ID NO: 231146 - DNA, 741 bp, Homo sapiens
cagcagctttggagtcatccagaaggtgtgagctcacgcagagccaaaaaggagagaaagaagagtgtttccttctagacaattcatagtcttttgttcatctgtagacgtttattgcatggcttaagtgaagatttgggttcattttcctagtgtttgaattttaccaccattgttttttaaaaaataatttgcgttttcctctctgacttaaaataccaacttttagtaaaaggaatctctgtatatttatgtctatttctgggcttaatatttagttttagtttaatatctattactagacctattttacaacatattcagtggtctaaattttaatatttgtaaatatcaggcaggtcaaaaaaaacatcattttcacttttgaaaatattattttctagtatcagctgtttattcttccaggaaagtttataatcagtggaccttatttaaaaagacctgtagcagtgtttttagagttgcactgaattgcaataaatccaatggggagaaattggtagttataacagtactcaatgtcaatattcaatatcaatagtactcaataatactgatataagaacatgataagacttccattgctgaacttggcttcaggttttcctcagtcaagtattagtttgcttcctgcatttcctatgcatttcttacaaaacttaaggttgttatcttatattttctgaatctgatttttattcattgtattttcaggaatat

SEQ ID NO: 231147 - DNA, 201 bp, Homo sapiens
ccaaaaaaaaaaaaaaaaaaaaaaaaaaaagcagaaggcagcaagcaaaccatgaggtaagaacaactaagataaaggaaaatctgaaactaaaggtcagagagaataaaagaataatccaaacaagctaaagtgatagaaaagagagtaaacaatgatttcaaagtccaggaggttaactagtcaatattgactaaatta

SEQ ID NO: 231148 - DNA, 437 bp, Homo sapiens
agattctcctgtttgaggaacgttgctggctagtgacatggaggagcactcaccaagagagaaggggttgattttatcactgaaagcccagctctgtggtacattctagaagctctcaacatctaatctgatggtgcgcaccagaagcttctccgtcctattgaatctaatgagaacatcacgtgggcaagcgttcagttaacacccaaaaagagctgcagccacagactggcactgcatcaggaaaggcagacgggaacacattctagtgaaatgcaggaagttagagacacgaggcaaaaaagatgttaaagagttttgtgtcagagatagcagaaactccttaattactttttggagtttggatttctaaatcacagctttctggaaaattcagattcttatcagtaaaagatcctgctttaggttatttaata

SEQ ID NO: 231149 - DNA, 475 bp, Homo sapiens
gagtcgaagaagctctaactagattttctggttaatgtaagagtctttgcttagtgcatggaaggccttatgtgtgttgttttaatcagtccttttgagttagcagtatgataattcacattttacagatgatgaagctgaggattaaagaagttagctgacttgcccaagttacaggattttagtaagtctgattcaaccctgtggtacactttctcctctggttaaaaaggtcttcaaaggttaaatgttccaaattctgtttttgagaataacacagccagtttaaaaatatatatatattcagtatttgacttgctcaattttcccagttaattgtaaaatcagaaatagccctgtgtgtagtattgttacatacaatgaagttatctttattgctgttacataaaccttatattttaaatccattatttcacttcttccccaataactaggcttttgtttctcaaggaat

SEQ ID NO: 231150 - DNA, 371 bp, Homo sapiens
caaccaaaccaaaccaataaatagccttaaataatgaaccagtgggaaaaaaagacaccagttgaattaaacatatgcctcggaaaagttagaacaagcacaaaaaagtaaagcagattgtatgattatatacctggaaaacccaagggaagcaattaaaaatatactatcataataggaaaatttagtaagtttcaaaattaagatatagaaatgagtagctttcctatatgggagtaaaaaccagttaaaagatataatgcaagggaagacctcatttataataacaacgaaagcacactgccaccaaagctcagactaagtgtaaagaaagtctgcatcacccacccacatgcaggaaataaatgtaa

SEQ ID NO: 231151 - DNA, 925 bp, Homo sapiens
ccagggaacaatcaatacctactcgaaaaaggactttcctgaagggcaaacaaaacaaaacaaaacaaaacaaaacaaacaaaacaaaaagtaacactggatgtttagaatttgttaacaacaacaacaacaaaaaaccattctggaaaaaaagattatcagaggagtgaagaaaaccgtgtctaacagattcatgccaaagcttggatggaagcccctcaaagtctaagtatcgtgttagcatcaactggtactcatttctctatatctaagactagaagattctctcacagctttactgtttcctggcaagtgttttcaacagcctttccagctgaagggacgaacccaggaaagtaacaaggcccaagaccccacatgggtcagataagcagcccctactagaagcttgctactcgttaactgaaaagtggaggccacgcactactttcactctctctagcaggtgaaaggggattttctgatggcaacagtcactccgtgtaaggtttaacttacagggcaataagttatcaaaaagttattgttaaaagcatatgattagtgtcataaacatatttatatttggaattacaccatttgatatctccattaagaatgcaaagctttgagaaaagcatactgtaaaatcatgttgctgcaaacagcaaggcatccagctgagtgtaagcagtctaatgtcatcaaactgaaatggaccctcgtgacgggcactatggaaccagctacctagacagagagaaaaaaggagaatggcagggaacggttccagatcaagaatctctcccttatcagttaagagttccatactgagtctatgaaaaaagcaaattaaaaagattttaagaaagggggaattcaattccaggtcagaatttatctaatgatttgatatgtttcccat

SEQ ID NO: 231152 - DNA, 1167 bp, Homo sapiens
aggaagaggaaagaggtgccctgctgatgatatatgtaatcatgacttagtgacatatcacaagcataggaagcttctggttcagtggtcctcaaatgcaactcacaaaatatcatctggggaagttctgaattaagtcgttgagagtgttacctgggcatcaggatatttaaaatgagaatctacagttgtaggcaagccgttcaccatcatctcttgcttttgtcaccgctgggtgtttggctggatcggctgccgctggtatggatgggctggatttttctttggctgtggaagccttatcaccatgactgctgtcagcctggatcgatatttgaaaatctgctatttatcttatgttctgacttctggagcaacacagaaccaatctactaatctactccctcctgtacttgacagcctttcaccatactggaatgggtttggctgaaaagaaagcacgcctacatctgcctggcagccatctgggcctatgcttccttctggaccaccatgcccttggtaggtctgggggactacgtacctgagcccttcggaacctcgtgcaccctggactggtggctggcccaggcctcggtagggggccaggttttcatcctgaacatcctcttcttctgcctcttgctcccaacggctgtgatcgtgttctcctacgtaaagatcattgccaaggttaagtcctcttccaaagaagtagctcatttcgacagtcggatccatagcagccatgtgctggaaatgaaactgacaaaggtagcgatgttgatttgtgctggattcctgattgcctggattccttatgcagtggtgtctgtgtggtcagcttttggaaggccagactccattcccatacagctctctgtggtgccaaccctacttgcaaaatctgcagcgatgtacaatcccatcatttaccaagttattgattacaaatttgcctgttgccaaactggtggtttgaaagcaaccaagaagaagtctctggaaggcttcaggctgcacaccgtaaccacagtcaggaagtcttctgctgtgctggaaattcatgaagaggtatgaagatggatacagcatcactatggacactcgtattcacttatttgcctcttcactgctgtaaacatttgattgtggccacacttttgt

SEQ ID NO: 231153 - DNA, 519 bp, Homo sapiens
aatatgccaacatctatagagccatgaactctgtcagcatccatgttctgattcttcttgaagaagtaagctttttgatagcagcagtacatctatgtgttcttttcctatgtcctaccgtggaaatgtgatacagaaaatatccaaggaataatcctctctaccaaaagcccgcctgaggccaggcacagtaacttacacctgtaacccttgcactttgagagaatgaggcgggagaatggttggagctcaggagtttgagaccagactgggcaatgtacagagaccagtcactgtaaaaaaaaataaaaataaaaataaaaataaaaaagtagccaggagtggtggcgcaacctatagtcctggctactcaggaggctgaagtggcagaatcgcttgagccagggaggtcgaggctgcagaggctggagtgaactttgatcatacctctgcactctagcctaggtgatagagcaacaccctgtcttaaaaaataaataaataaaaaataagaggaaa

SEQ ID NO: 231154 - DNA, 389 bp, Homo sapiens
ggaggggtgtgtgtacgaggccaggcctggggcagtctccgccccgaggacaggtttcactcaggaggtaatggtaattgtgctttgtaaaaggccactctggagaaggagggtggctgtgttgtggtggagaaggtgggtgcatggctgctctggacacagcatgggaccctcgaaagggctcgaaccctcctgggggttggaacagggccaggggcttttggacaagccctgcctgttgtcctgggcaaggtccccaacccagtgccctggtgcacccttcacttgctggtgcccccaaggccaccccgccccggagtcacaggtcacagtttccgcaggacacgcaggggtgaggtggcacctgacggcctcagggacccacagga

SEQ ID NO: 231155 - DNA, 457 bp, Homo sapiens
ctgacaatctaactggtgcagcccacacttctccaatgcgataggatccctttctctgtacttctgaagaaggactaataataataattcactgagctttttgcttttttaaagttccgggccatcattacttagatctgcatcataccatacccacagcctcactagcccattggctgctagggaggaaacagctcaggcagcagcagcaaaccctgagggagaaggggtggcctcacttccagcaggatgacaaagattgagtctgtgaacagtaacaatgaaaggccacaaccaggaattgcagggaacctctgggcagtttcttaactctgattttcccatgctgaatcattataaaactccctcaattattattggctatcgcaaaatcaagaaaactggactccctatcagagatgtaataataacaataataaaaagaactctcaaacca

SEQ ID NO: 231156 - DNA, 454 bp, Homo sapiens
tggccgccgcatggccataagcttttatggtggattgtagtgagttccaacttcagccctgctgcttttaaagatttcaatatacctgtgccctattctttccttgtgtttctttagagccttttcagctatttcctgtgaagcaaactgcacgaaggcctcccccgtactcctcccctggaagtccaccggcaatgttatcccatttggcacgatttccaaccctgagaagaactgaacaatttcttccttgctacatccaaagggaagtcctctaagccgtacaaagccatcattggccgtgtcaggactatttggaccagtatgcttcaacacccaatccatttcaacgttgtttgacttgaatacttcaacatatctgtgtcccatagtttctctgtcttttttcagggccaatttgacttcatcttctgattcaagttcaacaaaagcc

SEQ ID NO: 231157 - DNA, 457 bp, Homo sapiens
tttttctttaagaaaacttcagtttaacagtttctgcaatacaagcttgtgatttatgcttactctaagtggaaatcaggattgttatgaagacttaaggcccagtatttttgaatacaatactcatctaggatgtaacagtgaagcaaactgcacgaaggcctcccccgtactcctcccctggaagtccaccggcaatgttatcccatttggcacgatttccaaccctgagaagaactgaacaatttcttccttgctacatccaaagggaagtcctctaagccgtacaaagccatcattggccgtgtcaggactatttggaccagtatgcttcaacacccaatccatttcaacgttgtttgacttgaatacttcaacatatctgtgtcccatagtttctctgtcttttttcagggccaatttgacttcatcttctgattcaagttcaacaaaagcc

SEQ ID NO: 231158 - DNA, 611 bp, Homo sapiens
  misc_feature (58)..(58): n is a, c, g, or t
gctcggtacccgccaaagttaacattttggaagttcttcatgtccacctttaagatgngcttaaattatttgaaggtctctaggaagaatacattaattcattggcaattgactacctactgaaatacctaagctactcaactttaacgtctattaaatcaccttgccataagctagccaaaactcactgctcagcaacaaacatgactacatacctgagaagaactgaacaatttcttccttgctacatccaaagggaagtcctctaagccgtacaaagccatcattggccgtgtcaggactatttggaccagtatgcttcaacacccaatccatttcaacgttgtttgacttgaatactgaaagaggtgcttagaattagtcacttttggaaaattagataacaaagttcagacttcctgggtctttagataagctaggaagagctgccacaaactcccttagatgacccatttccatgcagtcaaatacctaaaattcagaaggggtgagacctctattgtttaatgctttatttactgtaactagggcaatgtaaatcaaaccttctacatatctgtgtcccatagttctctgtcttttttttaggc

SEQ ID NO: 231159 - DNA, 352 bp, Homo sapiens
caaagaatgcaggtggcttccaggagctggaaaaggcatggaaacagattctcccctagagcctgcctcctcaaggaacacagcttggcaacctgttttggacttttgatgtccagaactgtaagataataaatttgtgctcttttaagccactaaagttatggtaattttcttgttttttgggagtttgttttttttttttttttttgagacggagtctcactctgtcacccaggcggagtccagtggtgtgatctcagctcacagcaacctctgcctcccaggtttaagtgaatctcctgtctcagcatcccgagtagctgggactacaggtgtgtgtcaccacgtctgg

SEQ ID NO: 231160 - DNA, 295 bp, Homo sapiens
tgtccaaaattatcacaggcaccagttaggcaggggcaccattgccctgtgcaacctgttcccatgagtatatcctagagaaagagagtggcctgggtacacttggtaggagaacatgtgttgttggtttatgccctggtctccagtgcgataccaaaggatggggtgaggatgtatcaggcttcatggaagcaaaggaagccccaggcaattcccatgtattgccaagaccctcaacactggaggccttgtcaggataagggagagaaagtctctgcaaggttcgttaccatta

SEQ ID NO: 231161 - DNA, 433 bp, Homo sapiens
tctttgaaaaaaataaagctcaaggttattttaactgacaaaaggaaaaaaattatcttcaaaagaaacgcatatacttcatataactgagtactggttacacttcctcagagaaatcaaacacttgatctaagccacaatctgctaatgaattgtcactgcttctcatcatttgagggctactgtaattctacattaaaacaacatctcaaatgagcaaaaggaggtgaatctatcattttgctcattttgtacacttgcccaccagaccctagaatacatatagatatgtttactgattcatgaattatttaagtatccacaaagacccctgtctataaaactgacaactcttatgcctatttttcctacatatgtagttacatgtaatattgtgtccatgtaaatacaaatatatataactggtaaagca

SEQ ID NO: 231162 - DNA, 455 bp, Homo sapiens
catgaaacatttatctcaagttttatcctcaagatacacaacattatcctcaaatcaacatcaattcaatgccaagaaaatctcctttgcagaataaatgaaccctatcctcatcacagaaggcatctgagttacatccaagccatattccctttggcaacttagtttatacccacaactactacaggcagcttcacagagaatgtgggacccagagagcctcacatagctttcttctcctacaggactttgtacaattcatgatccttctgagactgcatcttcacttgggcagcatagtaaaatctcaatcatttcaaactgcatcagaattccacaggctaaggctgggcttattttggcctggagcttatttttacatcattagtaaacaagctaagaaccaataagataagataagctgagctatttcaggaaaataaatggcttaaagg

SEQ ID NO: 231163 - DNA, 560 bp, Homo sapiens
tagtttgaagtggagcaccaagcaactctatgtccgggggcattattgaaaatagtcgcaatctctgtggcaaacaaatagggaaggtcaaccacatagctatcctaagcttgaggtcctagccagagcaagcaacaaagtggcaaactagctagaaaatgaacaagaagagtggggaatgagatgatattattgggacttgataagttcctctctgtctctggaaatttggaaggctgcacagatgcacatgtgtaggagaaaccagaaagggccctagccatccattcatccctgactgaatatgaaatcttgtgaatgcacagaagaaatgtgagaggtcctaaaagaaagcaaaagctgaaactgacttgtgaactgcctgaattttgaatatgttcccaaacatacagtcaagtcaatgcaaagagggtgaaaatattactgggtcaaggtagttgagcatgtttcctgaacaatcattggctaaccactaagctatgctgtcacaagggtgaacccctaagaggctaccgttaagaatgctaaaaagattattt

SEQ ID NO: 231164 - DNA, 156 bp, Homo sapiens
ttttttacaaaaccagtgccccgaaggtcatctctcattacacacaccacaatgatcaaaaagggaaaatattaacaccaatttgtctacccaacttaaataaactttcctcttacgttgcattattcctaaggtatgttcatttggccttttttg

SEQ ID NO: 231165 - DNA, 506 bp, Homo sapiens
gttcaagcaatcctcccacctatgcctctcaaagttctgggattacaggcatgggccaacatgcccagccaaaaatgactattttttaaagacacttctattaagctttttgccatcctttcccagagcctcattttgtataatctactaggaggtgaatcatatgggtctcctatattcaggttcatgggctcatagataccaaacctcaacaaaatgaggactagtatcccagagtaccattcaaatatccctgtggcatatctagaacagtgtcattaccctatttgctgtatataaaggtttcgaagaaaagtgattctatccctgctgccaacgaaggttaaaaagtatgcaaaacatatccggtgtgttacaacacatgcgattagcaaagatattcaaactcatgtaaactttctctgaaagctaacaggattaccatagatgtttaaactctcagatcatcactctcacttccctacacccttcaccactgccaaaaa

SEQ ID NO: 231166 - DNA, 723 bp, Homo sapiens
gctgaaggcgggagtccatggaaccccagaagctgctgataattggatttctgctatgctctctaacttgcctcttgttggagacagtagcttcctctcctttgcctttgtctgccttgggaatacaagaaaaaacaggatcgaaaccacgctcagggggtaatcacaggtcctggctgaacaacttcagggattacttatggcaacttatcaagagtgccttacctccagcagccattgttgcttttcttctcacctcagcactaatggggatcctctgctgcttcaccattcttgtagttgatccagtccactgaagaactagaagattcaacagggcaagtgtggtctctccagttggactccaaaagagtggggcatttgctatctgcttaaaatgaggaagtatctatcagttgaaattaaatcgtcttccaacttgaatcatcctttgctttcattttctccttcaaaagttgcaattttaaaatgtgaatatccttattactgttttggttataatagtaatacatatttattgcaaaaaaaatttgagaaatacagagaaaagagtaagtttccataattctagcaaccagaaataaacatcattaacatcttgatgtacctcccttcaatttttttctatatatgtattacaagttttccaaagtctgttctgtgaaacaatagttctgttttaataaaagtcacaaaacagtg

SEQ ID NO: 231167 - DNA, 586 bp, Homo sapiens
aatgtctatgctctttctgcaggtaatcacaggtcctggctgaacaacttcagggattacttatggcaacttatcaagagtgccttacctccagcagccattgttgcttttcttctcacctcagcactaatggggatcctctgctgcttcaccattcttgtagttgatccagtccactgaagaactagaagattcaacagggcaagtgtggtctctccagttggactccaaaagagtggggcatttgctatctgcttaaaatgaggaagtatctatcagttgaaattaaatcgtcttccaacttgaatcatcctttgctttcattttctccttcaaaagttgcaattttaaaatgtgaatatccttattactgttttggttataatagtaatacatatttattgcaaaaaaaatttgagaaatacagagaaaagagtaagtttccataattctagcaaccagaaataaacatcattaacatcttgatgtacctcccttcaatttttttctatatatgtattacaagttttccaaagtctgttctgtgaaacaatagttctgttttaataaaagtcacaaaacagtg

SEQ ID NO: 231168 - DNA, 501 bp, Homo sapiens
catgatggaaggagctgggatccctgaatcaccttgtggaggagaacttaacttacatcagaatgagcattcttgtagttgatccagtccactgaagaactagaagattcaacagggcaagtgtggtctctccagttggactccaaaagagtggggcatttgctatctgcttaaaatgaggaagtatctatcagttgaaattaaatcgtcttccaacttgaatcatcctttgctttcattttctccttcaaaagttgcaattttaaaatgtgaatatccttattactgttttggttataatagtaatacatatttattgcaaaaaaaatttgagaaatacagagaaaagagtaagtttccataattctagcaaccagaaataaacatcattaacatcttgatgtacctcccttcaatttttttctatatatgtattacaagttttccaaagtctgttctgtgaaacaatagttctgttttaataaaagtcacaaaacagtg

SEQ ID NO: 231169 - DNA, 543 bp, Homo sapiens
acttcattttaaagaaaggaattcatttcagtcatcttattctcaatatttttaaatatgaaaaaatctagaactatcacagaaatccccaaggcttttatcccttgtgaaagcacatggaaccttgtggctggtaaacacttttcttactttgggagcccatgctggagacacttgatgttcttttctcaaagcagtcctcagaagagaccatctcacctatgagagatgtactaataacagatcctgaataggaagaggtcgtagactggtccactcttcattttcaagggtttcttgacctctgaacaagttcattcctgaagtaaccagctgttcacatcaagggaatatagtcatgtgccacataatgatgtttcagtcaacaatggaccatatatacactagtggccccataagataataattgagctgaaaaattattattgcctggtgatgtcttgatgatcctgaccttgtacaggccaggctaatgtgtatatttgcactttagtttttaatgaaaaggtttaaaagtaaaaa

SEQ ID NO: 231170 - DNA, 413 bp, Homo sapiens
attggatgaatgcgttaatgaaaagtttgttttcaaacctcactaaactgctacttaagatcacagttaatgtgagtcctgcttaatttggaaagcatttaaaaaatggaaaagtttcttagggaagtaaaaattttgcaactctgcctacaaggtacagtaattggctaggttcttttgaagagcagtgttgactagagttaaggaaaagtcagttgtgaaaaatggacatttttaatagcaaaatgatgtgctttactgtagaaacaggaggaagggtgcattatcctggggaaaatgaattcttcagttatgttttatgctgctctactttattgcaaaacgctaatattaaatgaatcaagaccacctccccttcccgctttatgaaaataaatagaagtatagaagat

SEQ ID NO: 231171 - DNA, 502 bp, Homo sapiens
atcatagctcactgcatccttggactcccgggctcaaggggtccttatgcctcagcctccggagtagttgggactacagatgctcatcaccaccactggctttgatttttttgttctatcatacttagcctatcagctaacggttaaccttcagattcatggaaatccaggttcagaatagtattattaatgtctgctgatgctaatatttaaataattagaattaaaaagagctttcaaattgtattttatataatttaacctgtaagttagaagttttgttggcattttatggtgcatcaagaaaatttactgagagaagatgtacttactttagatctgataaaatgttaaacatttgtttgatttgatttgacatctcttactttcaggcattgctttagcatctgtggtctgtatttacccccttaattgtggttgccttgaattaccaatgcagtagcagtgtgataaattaatttctttacctatgttttattac

SEQ ID NO: 231172 - DNA, 759 bp, Homo sapiens
ggtaactgcaaggaggagagcaaggaagtcggcagaggcggcgaccctggcgaggaaacttcccagtagctttgttcagcggtaaggaccggatccctgagagacaaaaatcatcttttctactgtagcagagtggggagaacgccaggaaaaatggagagacaccaagaaagaaggaaaatcatggggacccttaggccgaagcagccctatattaagtttaaagaagaaagcaggcggcttcctgtgatggtatattggttagtactctgcatcgcggccaagggtggaatcccagtcatggcagtgtccctcctggggcgtggcactcctcctttcctttagactccaacctctgcctaggctgcgcttttacctgcgactagagaggttacaacttaccagtgccttcggagctctgtgcagtggtgagaatagaaggaacccctaccttgcatgctggggtccagtcatcttgaaaggctgggcttttgccccctctctgagcaagtgcagcacccaaaaggtgaggtgctccctctcagtcagccttattggaatcctccactattaccacgatgtggccataaccgtttttctggttcagatatttcaatcatccgtggggccttttaaggccgaatcagaaacaagcgagaggacatgaggatagtttgcactccaactgggaattttaagtaaagcctaaagaatacaataaaatctaaacttaatgtcattccccaacaaaaaaaaaaa

SEQ ID NO: 231173 - DNA, 252 bp, Homo sapiens
gtgaagcgatgcccatgaaattgtccaagggaagatggctagtagtagtagaatgagctttagagttggctatcaacaaatttagtgaaaaacctagtgaagcttccaaatctccagtagtatctgaccaattgtttgttatatctataaatactctctcacctctacagaaagatatataataaatattcctcagtgatgtgatgtttggctccactacatcttgcagatggaatctgggtatagtctgtg

SEQ ID NO: 231174 - DNA, 400 bp, Homo sapiens
gcaaaacttggaaataaggcaaaacgattactgcatgccctttcaaaatcatgctagaacattcgacaagtccactgaaatgtcatgggagactctagggaaagagaactttatttgacataccatttactattgatcagggcccaaactctgtcaatttagatgttaacttggagtagattgatacattacaaatgacttttgtccagtagagatgggaataatttctgtcttacagaaaagaaatcctcaaaggggactgttctattgccccagggcattaaactcgtctgcatcaaacttctcaatctcttaaagcgttctttttccctgtgtatatgtatgcataaatatatatacatatgtgcgtatatatataaaacttctcataacctaattt

SEQ ID NO: 231175 - DNA, 511 bp, Homo sapiens
tgcagtgggtactagacattctaaatttaaattcacattgtggggtccccaagctaaaatgctaataggaccctttaccctttagaagctgtcaccaggtcctcatgggatgtaggatctgttctaccacatacacctatgacttcaaactttctggtctgtctggaattctgattagaatagtctcccctagtcacaacagctcaagggacacagcaaatcaaaaccagctcaccttcacatgacaacacagacacaaatgacaagtgttatcaccagtcgctgatgggcaagacttcagataaggacttatgccaaaggataaacatcagggcaagggaccaaaaggaaactactgattttgaacttctggttccacttgtaactacagctctgaattatctctcacatgtgtctaggtcataaaatggaagcgtctctctccatacgcttttctctacatctgctttgcaattcaaacatatatatatatacacacacacacacacac

SEQ ID NO: 231176 - DNA, 565 bp, Homo sapiens
cccacctcctggtattagaaacagcctttctgtgattatgcctatgggtgattgagtagtaacacaatgacttcatttccatttcccagcttcctgtgggaaggtttggatccagcctgcaagagccatgattgtaggagtataatgataactgatgtttatacagtactttacaattttcacaaggatttccatctattggcttctcactacaccattattaccattcccacttcacaggcaagtaaactgagtcacaggtaagcaaggctaacagagtttgcatagataatctcacagagctaacaccagaactcaggtctgtagtgcttcttctaccttccacttatgtggaatagtttgatgtttaatattttaagcaggtaagtatttgagtcctctctaccccttaccagcactgttacctggaatagctcctgaatcttcagcttcctcatgaaacagaggaaataatactatttatgagatttgaatggactaaattatgtaaagcactgagaacattgcttagcccatagtaagtactcaataaaatctagctgtc

SEQ ID NO: 231177 - DNA, 416 bp, Homo sapiens
ggaggggtaaaagaaccaagttgcctagctttagcagaatcaaaatacagtaatcaaaccgtttattcaaccagcaacatttgagaagtcggaaggaaagtattacattttaagatcagtttgctggccgggtgcggtggctcacgcctgtaatcccagcactttgggaggccgaggtaggctgatcacttgaggtcaggagctccagaccagcctggccaacatagtaaaaccccatctctactaaaaatacaaaaattagccaggcatggtggtacatgccggtagtcccagctactcaggaggctggggcaggagaatcgcttgaacccgggaggcgcaggttgcagtgagccaagatcgtggcactgcactgcagcctggcgacaaagtgagactccatctcaaaaacataa

SEQ ID NO: 231178 - DNA, 418 bp, Homo sapiens
cccaagaattcggcacgaggatattcactaacatataccagcagagcaaggtagttgaactgcatttcctcttccgatcagtgtagccagctctattctagatcttaagctcattcaaacagtattttcaataattcttttactgttaatcccttcatatttcaaaatgcgtttgaacataaaacttgtcataatccaagccatcatggtttcaataggttgatgcaaatacagccacttaggaaagtaaattgactttgcagtcatttagagttgcaacactgactctgtcatggatgtgttttcttatgagatggttgagaggtatcaaagttcacaaagctgtactggttgaatgcctcttatgtaatagcaagtgaataatgctttcataaataaaagtctttatagcaattta

SEQ ID NO: 231179 - DNA, 518 bp, Homo sapiens
ttcttttttatggctgtatagttggaatggatttttttatacaacgcagggtgggtatgaaacaattgtccctataccatttattgaaaagctaattatatatatgaatatatatatttatattcataaattaatatatatttctttttataaatgtctcttgattattctagtttttgaacttccatataaattttaaagtcattttgttaagatatagaacaaaaaattaggatttttaactcaacttatattgaatatatagatcactttgaatagaactgatatttttaaagcattgagtcttctaatccatgaacatagttattatttttagactatctttgatgtcttacagaaatgttttttttaatttcataaacgccttattccttttaaaaatttatttctatggagtttggatttttatactattattcacagtatctttaaaattatatttatttggggtataactttcatacaataaaattcattaactaccaccacaatcaaga

SEQ ID NO: 231180 - DNA, 358 bp, Homo sapiens
gttatgtttatactgtgccagaagtttcatagtgaacattgtggatggactatactaaaaaattgagaattgttataagaattatgaatggacttttctaactctccggctttaccacagaactgtttgtttgtttgtttttgttactttgttgagttggggaccagggctgccctgtctctgaggcagtttgagcatctccctatagttctcacccatttgaggtggaattttttctgctttattcagttgtatctcagtagctcattttaagctgtaagagtgttacaactggaaggtaccttagaggtctttttagagacctcacactttattgatgccagaaacaaaaagtgac

SEQ ID NO: 231181 - DNA, 549 bp, Homo sapiens
aacatccttaatttagaaatgtattttttagttttaagataactagtcattaagtgaaaacattgtaggcaaaatggctctaagcaatttagtattcataggaatgaatccattccttgaaagcattggtcgctgggtgcacttgtcctggatgagcagatattaggcaaatcagtctttcaccagcaaaccctgccataagaactgcacaggcctgattcctgccaagcacaccaggcccctgactggggcagaggcctcccttatggggcaggaagaaggaggcagggagaaacatagggcccatgatttaaggaggctctccctctcaggctcatgcaagtgcaggatcagtacctaaaggggagcaccgcccgaaatcctgtgccccagtcaccttaacccagtccagccctggctcctgcactccaaagctaagcagggaataccagcgggagacagaagacagcatgagaaactgaatgcatctcccacatttatctaaaaataagaaaatggacttcttcagtaggaaatggctcatctttc

SEQ ID NO: 231182 - DNA, 413 bp, Homo sapiens
ctatacctgcccccaacaccaaatgcttgactgaaacattctattcctacccatgcctggagatataacattgttaagtctacttttctgcttcatttgtagagaaaaagagtatctcacaacccacagatctttagcacatgtcaaaatgaaacactggaagcttgttttcttggggacctatttggagcatattccaccactagaccccaaatatctcttgatctttcagagcctctgcaaaccagtgcccagaatcatgccctaagcacttttgctcacctacccagacgaatgcagtggcataaacaagtgatttcctagttcttttctagaaatagaacatttggtggccctaccatctgccagagctccttaaatcactggtttgaatgtctgatctcactgccttg

SEQ ID NO: 231183 - DNA, 311 bp, Homo sapiens
catacctgaaaccacagacacaggcacctgctcccacgcctcccacacctgagtgtctgcaacagtttgcattagtccttctagcatttttttcttgtaataaaatgtacataatacggatcttaacatggtaaccacttttatttttgagacggagtcttgctcttctcacccaggctagtgtaaaatggcctgatctcagttcactgcaatctcctcctccccagttcaagcaattctcctacctcagcctcctgagtagttgggattacaggcacccgtcatcaggcccagctaattttttgcatttt

SEQ ID NO: 231184 - DNA, 276 bp, Homo sapiens
gcccttggacaagcagcatagcctctcaattctcagtttcttcagccaaagaatggtttcatgacatcatgggagttatcttcagtattaaatgagatggcatgtttaaggagctcactccacaactggcacctaacagtgcttttaaacaagagttttcctttcctctcaactggatagggcaacaattattggtcccacttgtcagatgcgcaaacaggtgccaataggttgagtggcctatagctagaagaagggtgccatcccctaactcac

SEQ ID NO: 231185 - DNA, 673 bp, Homo sapiens
ctctcatttttatttttaaaaatgtaattagacacagactttactttggaaagctcatgatctatgagaagaggttaggcccagtgtttctagcagatctctgtgcctctcacctgcctaggcagcagtctcctgggttacatatccattaacaatcaccaaactgcttccagccaggcttagtgactgagcttagatcctttgagttcagacagtctagatcccaaagcagctgttctaatgcagaacctcaaaggcccttatcctggtattattgtgctgcagaattttctgagtgtctgacacatacacacacacacacacacacacacacacacacacacacttaatcattgaccttttgtgtgtccttggccacgttatttatgcttttgtgttttgatatctctgttgaaaagaaggatgtttgtacctgtcccacttagtattctgaggtttaaagaaacaagatgttaacaagacactgattaacatcattgtcacgaggctgctgtgatacactgaagatcctaagaacattttgataggaaggatagagtttctttactttccttttggaaacaaacttttctaataggttctggggattcttagtagcaagtaagaatgtaaatgatgagacaccaggtaagatgaagctttacaaattctt

SEQ ID NO: 231186 - DNA, 496 bp, Homo sapiens
caagttatatatgtgtgagctatgacgccaaattaggacactgccctattttatacatttagaattggaattttatcctattcatgagaaactcagaatatacaccaggattatggagcttaattcgtgagttattcaaaagacattcattgagtaacccattgttctataaactggagatagataaataagacatggtctctatcttagaggaatttaagataaagtggagaagacagtgcaaatgaatattacattttcacagtgttaggacatcactgttggtcactggtatattcctggtgtctaggattcctggatttttattaaaacttgaacagaaatggaattcagtggtggtattatgacacatggttttaaggggaacactaaaaagtaatctgatcagaaaattaaaacactaagaaaagtcatattttgttttcactcctcatatttttaatagaaaaataaagcagtgcatgtatatcctaaa

SEQ ID NO: 231187 - DNA, 495 bp, Homo sapiens
tgcaggaaatcagatatcctgatcagaagtgacacacacaatgatctaggttcatcacagagacatccaaagtgtcataaaggcaccacctaccaaagtgggttgttgtttgtttctaggataagctaagcacagtgatggggatgcctcctggatagagggaactgcatatgcaaacttccaaggaggaggccccagaacctcttggatctgctgggaagactgggctgtaggaagagggtgggaggaacagatggagagtcacctcacctgaactccactttctttcaagaatgcagcatagcggactgcaaaggatgtgggcttcaaagccacagaaatgggctcaggttctgattcctgctcacatctgtgtgaacctgggcaagacaacttctttgagcccagttttttcatgtcggaaatgacaggagtacgtacaacctcagaggttttataaacattaaataagataaagtatgttaaaaaaaaaaa

SEQ ID NO: 231188 - DNA, 2024 bp, Homo sapiens
  misc_feature (1069)..(1069): n is a, c, g, or t
gtttgcacattgatgaacacatttaaaattttcttaaatcagttatgctccgaaaaatcctgttcctacaacttaaagcacatgtgtgattttttttccttaggttatccttccagaaatagaactgttgagtaaggaatatgcatgttaaaatttctagtattggtccggcgaggtggcttacgcctgtaatcctagcactttgggaggccgaggcgggcggatcacctgaggtcagaagtttgagaccagcctggccaacatggtgaaacccagtatctactaaaagcacaaaaattagctgggcgtggtggctggtacctgtaatccctgctactcaggaggccaaggcaagagaatctcttgaacccggcaggtggaggttgcagtgagccgagattgcgccattgcactgcaacctgggggactaggttgagactgtctcaaaaaaaaaaagaattaaaaaaatattaataacatggtcaagtctccctccaaaaaaggccaacgtaggaggattattttttctcacattcttttttacactatcttgagtctttaaatgacagacaatatcttattttttttcatttggattttcttggatactgttaaaggtgttcgtttttatgaacatcttttaaattatcttttaggactttttcgtatcttgctctttgttctttttttgatgtagagtctcagtctcactcaggttggagtgcactggtgggatatcataaaatgtttcttgggagatattggtggagttaaaaggaatatgtagggattctgtgacacaggattttagaaatctgggataacaagtacagtcttaggcagctgaaatgagactggatagcaagttccaaagggagaaatacctggaaaaaaaatctggagaaagagactgggaccaggtattatatatgagtgtttggaacactggaaagttatctaactaaaattttagttatttccttgggattagtttacctaattacgcaagagtatacatgtgtaaaatgtgtaggctaatcttcagtgtatagacattttaatatggtantatcttaaaaatcggattttatcgggtttataaataaatctagttgaaaaagtcattttatctgaaggcttctcttaaaagtttttaaagaattacggggaaaattcccataaccgtgtacatttgtaatgtaacccacaactgcattaactcagtttctaacataacccgttgctgagctctagttaaccttgttggattatttgtgcatgtaatatgctgtgcaggctttagaaaataggttaacattattcgaaaacgatatgcgtaactgctgttgaattactcgcttgcattttctttattgggaatactgggacaaaatatagtgttaccttaaatggcatttgctgtatgttatattgctttatcaaaaagcaattaaccaaccatattgtggccaccagtcatgtaagagtatacatatttcatgactaacttttgggttttgggtactttttttaaccaacttctgataggattgcttaaatttgcattttatgattctaaaggaaatccttctagttaggaactagagtagaaactactgtttttggaagccacataaacctaccatccaaaaattccactgtgtcattctagtgtgtcaggcgagatgcgggttaagccagctgttgggccaaagtagtgaacaagccagacgaagtaaaaattaggccaggcgcagtggctcacgcctgtaatcccagcactttgggaggccgaggcgggcggatcacgaggtcaggagatggagactatcctggctaacacggtgaaaccccgcctctactaaaaaaaataacaaaaaattagccggtcgtagcggcgggcacctgtagtcccagctacttgggaggctgaggcagaagaatggcgtaaacccgggaggcagatcttgcagtgagcccagatcgcgccactgcacttcagcctgggcaacagagcgagactc

SEQ ID NO: 231189 - DNA, 693 bp, Homo sapiens
tttggtgtttgttttttctgaattctgtaatatagaaactggttctctttctccttgtttctcaatgacttttaattacaggtagttctcagacaaatgtaagatacttttctctgtccatttcatgcaaaattcatattcagtatcattcaacaaatctttgaatgacttctatgcatccctgttcatggaacccatgccattagaaaatggcagttgggatgtatgaagaaatgtaggatattctctcaaatcattccctaaattatcctttactgctgcaaatttagctgataaaactgcctttggtttatgcctcttggatcagatatttgacctatgtggaatagattatctctgtgcttccggtttaagacattacgccattttagtggatcatttaaattttttctattctgtttttttttgtttgtttgtttgtttgttttaaacagagtctcactcccgagtagctgggaccacaggcacgtgccatcatgcctggccaacgtggtgaaaccccatgtctaccaaaaatataaaaagatagccgggcgtggtggcgcgtgcctgtggtcccagctgctcgggaggctgaggcaggagaattgcttggacccggggggcagaggcttcagtgagccgagatggtgtgacttactccagcctgggtgacagagtaagtctctgtct

SEQ ID NO: 231190 - DNA, 947 bp, Homo sapiens
gttttcttttctctcttcttttcaatctgataggaagaaaccttattctactctagctggtttatgcattcaaagcctttggacatttcttttatgaaccataggcaatgagccttcattctccttggtgatgttttaagttccataaactgagagggaagatgatcttcttaaagtttgcacttccttcagtaggcaagcttgaagccatgttgatatggatatgttttctaaaagtaaccctggaagtgaatataataggaagtaagtgatttcatattgaatttatttgttggttctctttctccttgtttctcaatgacttttaattacaggtagttctcagacaaatgtaagatacttttctctgtccatttcatgcaaaattcatattcagtatcattcaacaaatctttgaatgacttctatgcatccctgttcatggaacccatgccattagaaaatggcagttgggatgtatgaagaaatgtaggatattctctcaaatcattccctaaattatcctttactgctgcaaatttagctgataaaactgcctttggtttatgcctcttggatcagatatttgacctatgtggaatagattatctctgtgcttccggtttaagacattacgccattttagtggatcatttaaattttttctattctgtttttttttgtttgtttgtttgtttgttttaaacagagtctcactcccgagtagctgggaccacaggcacgtgccatcatgcctggccaacgtggtgaaaccccatgtctaccaaaaatataaaaagatagccgggcgtggtggcgcgtgcctgtggtcccagctgctcgggaggctgaggcaggagaattgcttggacccggggggcagaggcttcagtgagccgagatggtgtgacttactccagcctgggtgacagagtaagtctctgtct

SEQ ID NO: 231191 - DNA, 506 bp, Homo sapiens
aaaggaattgccaaaactcacacatctggccaggacagtactggaaatgcggataactgctgtccctgaaagaggctggtaagtgatggagtttaataggaattgggtttgaaggacctctgttgccagaaagcatgagtatctctaaaggcgaagctgagtcagaggttactagaacagaggcatcagcaaaggatgggagaggtgacgagggcgatctctaagtgtacttggcccaggcctgaggagggcagctgattcccccagcaacagaatgctgtgcctgaggctaactagtcattcaagtctgtacataatctccaatgtcaaaactcaacaagcaaccttaagagagaccactaagtctactgcatgtctgcagggtttggcttccctggactgtgaggtcttccagggaagcgaccatattcatagatttatccccagtttctagcaaggcctggaatatagtaatattgtaactctaatatttttgttcagagcaa

SEQ ID NO: 231192 - DNA, 778 bp, Homo sapiens
gtacaggaaggagttgaggagggtgaagagcagcaggggcagctgggacagcagcgtcacccaattgttgaagttgaagcacacccctccacatgcactttgcctaccctactcccaatttacaaatctcctcttccatgaagcagaaggaactttctccctcccctggggacccactgcactctgctgcaagcctggaatgtcacgcatcatgttacattattaatagctctttggccccctcttgctctcaagcccaggggctgattcatctctgggtttccagggcccagcacagagccagtacccaagaagcatttgcaaagttgttgcagtgaatacagatgaataacccggtcccaaagacaatgcaaaccccacatttctgccttccctgaagagcctccctgctgtttcctcctgtgtccccagtgcctgctccacagtagatgcacattaaaagtttgttgaatgaggctgggcacggtggctcacgcctgtaatcccagcactttgggaggccgaggcgggaggatcacgaggtcaggagatcgagaccatcctggctaacacggtgaaaccccgtctctactaaaaatacaaaaaaaaatagccgcgcgtggcggcgggcgcctgtagtcccagctactcgggagggtgaggcaggagaatggcgtgaacccgggaggcggagcttgcagtgagccgagatggcgccactgcactccagcctgggcgaaagagccagactctgtctcaaaaaaaaaaaaaaaaaaaa

SEQ ID NO: 231193 - DNA, 803 bp, Homo sapiens
atcaggagccgtgctgagccacgtgggctttgtaaatttagccagatttttcaaatagagaaactgtttcccttcctcctccctaccttgtcttcagtctacaaggccaattctatagccggcttaataagtcttggcaaactcctgtttcacccattcctatagaaaccttctgtggttggggccgggcgcagtggctcacgcctgtaatctcagcactttgggaggctgaggcaggcagatcacgaggtcaggagatcgagaccatcctggctaacaaggtgaaaccccgtctctactaaaaatacaaaaattagccaggcgtggtggcgggcgcctatagtcccagctactctggaggttgaggaaggagaatggcgtgaaccctggaggcggagcttgcagtgagccgagattgcgccactgcactccagcctgggcaacagagcgggactccatctcaggaaaaagaaaaaaaaaaagaaagaaaaaaagaaaccttctgtggttgggagcagagccttcccgtcagcaagtggtctaagcaaaggcaaccccagcgtgtcccagagggccccaccaacttccgcccatttttctgataaattgagtgtttccattcccaggcaggcagtgtgcccacggcagtggctcagtcctggccgacaggatacaactaaaggaaatgtgctagcaatgggctttctccagggctctccagtgggggtggctggcatctggcctctggggtgggatgttcccatgcagcattgggtttggaggctttgctgagctgttgacag

SEQ ID NO: 231194 - DNA, 461 bp, Homo sapiens
catttatttaatgaaataaatttttaatttatttcattgtatatatgcgctataaattgtccattcacctgatgatggacactttggttgttcgaactttgggcaattacaaatgaaactgatatgaacatatatgtacaactctttctgtggacgtatgttttcattacttctgggtcttccttaatatatgtcagcagtggagtggtgtgcttaaggagagagagacttggaaaaatacagaccgagaacaaggccatgtggagatagaggcagagactgaagttgtaccaccaaaggcaaagaatatcaagtattatcagtaaccacaggaagctggaagaggccaggaaaggtttttcttagagaccttggaaggagcctgaccctggaacaccttgaattttagacttctgaccctcaaaattgtgaaagaataaatttctgttgttttaagcaaa

SEQ ID NO: 231195 - DNA, 1279 bp, Homo sapiens
gcagagccacgagggaaccgctagccagtcctgggtgaaactgacgctgccaggcaagtggcgcgcggggatcccggtttcccagcccccttccggcaggcagcagcccgggcgggggacacactccgtgatcccctcctggctggaggggtcaggcttggtggacccagcaagcagcctgatggagaaggtggcaccagacgcagacccctaccgtccaggaccgcaagccctcgccggctctgcgtgcttttaggttttgtctccacctctgcacacccacactcgcctcctgggccgcgacagcttccttctgtcaatcaggtgtggacgggaaggtctcgaagtttcctcgcctgagttgaaagctggaggtgggggcacctctgcccgttcctaactgccccgttataaggtccccctccccacaattggttctcacctcgccctcggagctcttgggagatccctccgtccctcctactgtgccctcgggcagatgagtctggtcccagcttctggactgcccactgtcggccacttgagagttggggacggtggggcattgtgacgctctccaaccttggaacacggtggcaaagtggccgatcaatatatgggacaagtgggggcgggggggcggactctaaggtggaaaaaacaatactacttgggatttaaggaagcaatctggattctgtctccccttggttcttcggagcttagaggtctaacggcgacattcctcctacagtaagggctcttctgggtccctcgtttccaaaggcatgaaagttctgacctgaaaatgggggccggggagggtgatgtcacaaccatataacgcagctccttcagccgactcccacccgcaagaactgagacctgacggataaaagcagagaggagtcagagtgagcgctgcgtttgggaaactgcattccagggcagcaagactggtgccaagacggagtcgtggcaaaagcatccggaggtcttccttaatatatgtcagcagtggagtggtgtgcttaaggagagagagacttggaaaaatacagaccgagaacaaggccatgtggagatagaggcagagactgaagttgtaccaccaaaggcaaagaatatcaagtattatcagtaaccacaggaagctggaagaggccaggaaaggtttttcttagagaccttggaaggagcctgaccctggaacaccttgaattttagacttctgaccctcaaaattgtgaaagaataaatttctgttgttttaagcaaa

SEQ ID NO: 231196 - DNA, 1102 bp, Homo sapiens
aagttcagctgagcttcgtgtagtgtctgtcccccaccctgacctggacccaccagccaagccgaggccagaggtgtgcggattttttttaagacccacatcttgtaaatgtgagatttttatcagtcagcacagatgacttaaagcgttccatttctccgcgatccaattttattaggatttactctcatttgtgctccgcttctctggggaaataatgctttgattaatgtaatcctggcccgggatccgccacatgcccctcgaccctctcccaagagaaggaccctatttgacaaacaataacagagcagtaactcttgcaatctgcccacacctttgggggtggctggggagagggtgatacacgttcacacaccgcttgctaaatgcagtggcgagaggagggagcagcgtctacatgaagcgaacttttcaagcgcagagccctgactcccaggcgcgggggctcaccgggaggggcccgggcgagagagcgcgtgggtgcgtgagtgcctgtgtgcgcccgccctttgcttgctcggggtgtccgcctttgtcccccgccgcgggcctccacggtgggatctgcgcgcggccggtgggcagccctcgacccggggcgcgtccacagcgcccacccgcggcccccaaacacctcgagagcagatcttaggggttaaccaggcaccgacctgaggcgccctgcagctgccaaaagctcgaccggaaacctagaacatgggacccaattcatcggttttcctcgtccatacatgcatccatccatccctgcatgcgtacatgcatgcaatacaaatcccgggacgccggcacggagagctgcgcctcgcccttgctgcgggctgagagcgggtacccccccttccagctcttcctcctcccgcgcagccgcggccccctccccgaaggaagaacagctcaattacgaagaggagccaaggaacgaaatcccaggctcagaggcgcccgccgttgctcctctgttcccggtccctgtagtgcagtccccacccccaccgtccccagctcggggagggcggggacgcggcggtgcgaggggtcctgccctgctccgccg

SEQ ID NO: 231197 - DNA, 393 bp, Homo sapiens
aattcaggttgtcagcagttagctgcaaacacccacgtcagcaggaagatggttcatcaagctagggaggatggctgaggcaccagctttaaggagtcatagaatggcctggtgtggtggctcacacctgtaatcctagccctttgggagtccaaggtgggcagatcacctgaggtcaggagttggagaccatcctggccacaatggtgaaaccccatctctacgaaaaataccaaaattagccgggtgtcctggtgcgtgcctgtaatcctagctactctggaggctgaggcaggagaattgcttgaacccaggaggcagaggttgtagtgagccaagatcgtgctactgcactctagcctgggcaacagagcaagactccgcatcaaaaaa

SEQ ID NO: 231198 - DNA, 161 bp, Homo sapiens
tctgagttgagttctggaagatggagaaaacaaatttccgtttttttgtttcccgtgggctaggagcaagttgtggccaataacctctctcttgacttttctttctcccgccccctgcatccctggctccttctcaccttcaggcctcagtaggaatcttc

SEQ ID NO: 231199 - DNA, 2189 bp, Homo sapiens
gggaaattctttatggacagctccacactcattaaacatcagagagttcacaccggagaaagaccttataagtgcaatgattgtgggaaattttttaggtatatctccacactcattagacatcagagaattcacactggagaaaggccttatgagtgcagtgtatgtggggaattgtttaggtacaactccagccttgttaaacattggagaaatcacactggagaaaggccttataaatgcagtgaatgtgggaaatcatttaggtaccactgcaggctcattagacaccagagagtccacacgggagaaaggccttatgagtgcagcgaatgcgggaaattctttcgttacaactccaacctcattaaacattggagaaatcacactggagaaaggccttacgagtgcagagagtgtgggaaagcctttagccacaagcatatacttgttgagcaccagaaaatccacagtggagaaagaccttatgagtgcagcgaatgccagaaggcctttattagaaagtctcacctggttcatcaccagaaaatccacagtgaagagaggcttgtgtgctccatgaatgtggggaattctttagctaaaactccaacctcattaaacatcagagatttcacaatggagaaagtttaccattgactattgtaattgggtagtaatgttatataaattccacatttttatgcaactaatctccagaacatttttcctcttaccaagaagtaaaatgctgtacccattaacaacaactcattccccttccctacttccccagaaatgtctcaactatatttctatactctatggtacttatatgaggtaccaatagatatctatgaatttgatatatatttgtacctcatataagtggattctacagtatttatcttttgagactggcttatttcacttaggataaggtcttcacggttcacccatgttgtataatgtgtcagaatatccttcctttttaggtgaaataatattctatggtatttatataccacatttatttatccattcatctgttagtggatacttgggctacttccaccttttgcctattgaaataatgctgctatgaagatgagtgtacaagtgtctattcaagattctactttcaattcttatagggtatatactcagaaatggtggtgctggatcatataggatttctattttttttttttgtttgtttttgagacagagtcttgctctgtcacccaggctggagtgcagtgctgtgatcttggctcactgcaagctccgcctcccaggttcatgccattctcctgcctcaccctcccgagtagctgggactacaggtgcctgccaccacgcctggctaatttttttgtatttttagtagagacggggtttcaccgtgttagccaggatggtcctgatctcctgaccttgtgatctgcctgccttggcctctcaaagtgctgggattacgggcgtgagccaccgcgcctggccaggatttctatttttaatatttttgggaaaatttttccatagtacctgtgccattttacattcccaccagcagtgcacaaggattgcaatctatatacatcctcaccaacattgttcattttctatttctgtttttggggttttttgtagtgccttttgttttggatagcagctatcttgttggatgtgaggtggaatctatagtgtctttcatttttattttgtgaatgattaatgatgttgaggatcttttcatgtgcttgttaggcatttgtgtatctggaaaaatattcaagtcttttttttccatttttaatgggactatttgctttttgttgttgagttgtagttctttatacattctggatattaactccttaccaaatatatgctttttacatattacctcccagtccataggttgctttttcgctctgttgattgtgtcctttgatgaaattttaagttttgatgtactgttgactctttctgtctgtgggttctgtattcatggatcgaagcaaccatggatcaaaagtatttggagcatccatggattgcagtgatcattaatcaaaaatatttggaaaacaaaaagggtagttgcatctgtactaaacatgaacagacattttttcttgtcattattccctaaactatatagtataataaatatttacatagca

SEQ ID NO: 231200 - DNA, 2394 bp, Homo sapiens
gggaaattctttatggacagctccacactcattaaacatcagagagttcacaccggagaaagaccttataagtgcaatgattgtgggaaattttttaggtatatctccacactcattagacatcagagaattcacactggagaaaggccttatgagtgcagtgtatgtggggaattgtttaggtacaactccagccttgttaaacattggagaaatcacactggagaaaggccttataaatgcagtgaatgtgggaaatcatttaggtaccactgcaggctcattagacaccagagagtccacacgggagaaaggccttatgagtgcagcgaatgcgggaaattctttcgttacaactccaacctcattaaacattggagaaatcacactggagaaaggccttacgagtgcagagagtgtgggaaagcctttagccacaagcatatacttgttgagcaccagaaaatccacagtggagaaagaccttatgagtgcagcgaatgccagaaggcctttattagaaagtctcacctggttcatcaccagaaaatccacagtgaagagaggcttgtgtgctccatgaatgtggggaattctttagctaaaactccaacctcattaaacatcagagatttcacaatggagaaagtttaccattgactattgtaattgggtagtaatgttatataaattccacatttttatgcaactaatctccagaacatttttcctcttaccaagaagtaaaatgctgtacccattaacaacaactcattccccttccctacttccccagaaatgtctcaactatatttctatactctatggtacttatatgaggtaccaatagatatctatgaatttgatatatatttgtacctcatataagtggattctacagtatttatcttttgagactggcttatttcacttaggataaggtcttcacggttcacccatgttgtataatgtgtcagaatatccttcctttttaggtgaaataatattctatggtatttatataccacatttatttatccattcatctgttagtggatacttgggctacttccaccttttgcctattgaaataatgctgctatgaagatgagtgtacaagtgtctattcaagattctactttcaattcttatagggtatatactcagaaatggtggtgctggatcatataggatttctattttttttttttgtttgtttttgagacagagtcttgctctgtcacccaggctggagtgcagtgctgtgatcttggctcactgcaagctccgcctcccaggttcatgccattctcctgcctcaccctcccgagtagctgggactacaggtgcctgccaccacgcctggctaatttttttgtatttttagtagagacggggtttcaccgtgttagccaggatggtcctgatctcctgaccttgtgatctgcctgccttggcctctcaaagtgctgggattacgggcgtgagccaccgcgcctggccaggatttctatttttaatatttttgggaaaatttttccatagtacctgtgccattttacattcccaccagcagtgcacaaggattgcaatctatatacatcctcaccaacattgttcattttctatttctgtttttggggttttttgtagtgccttttgttttggatagcagctatcttgttggatgtgaggtggaatctatagtgtctttcatttttattttaatgggactatttgctttttgttgttgagttgtagttctttatacattctggatattaactccttaccaaatatatgctttttacatattacctcccagtccataggttgctttttcgctctgttgattgtgtcctttgatgaaattttaagttttgatgtactgttgactctttctgtctgtgggttctgtattcatggatcgaagcaaccatggatcaaaagtatttggagcatccatggattgcagtgatcattaatcaaaaatatttggaaaacaaaaagggtagttgcatctgtactaaacatgaacagacattttttcttgtcattattccctaaactatatagtataataaatatttacatagcatttacattgtattagaagttataaataacctaatgataatctatataggaagatgtgtgtaggttatattcaaacactatgcctttttatgtgagggacctcttgagcatcagatgattttggtatccacaaggggtcctggaatcagtcccccacagacaccaagggatgactgtagtgcattttatctatttttacttctgttacctgggcttttgatgttatatattaaaaaaaattagtatcaaatccaatgccaagcattttccctatgctttattctaagaattttatat

SEQ ID NO: 231201 - DNA, 2080 bp, Homo sapiens
cggtacccctccataatgtgtgcccataatatagaattaaaaaaacaaaagacatggaaaatccacagtggagaaagaccttatgagtgcagcgaatgccagaaggcctttattagaaagtctcacctggttcatcaccagaaaatccacagtgaagagaggcttgtgtgctccatgaatgtggggaattctttagctaaaactccaacctcattaaacatcagagatttcacaatggagaaagtttaccattgactattgtaattgggtagtaatgttatataaattccacatttttatgcaactaatctccagaacatttttcctcttaccaagaagtaaaatgctgtacccattaacaacaactcattccccttccctacttccccagaaatgtctcaactatatttctatactctatggtacttatatgaggtaccaatagatatctatgaatttgatatatatttgtacctcatataagtggattctacagtatttatcttttgagactggcttatttcacttaggataaggtcttcacggttcacccatgttgtataatgtgtcagaatatccttcctttttaggtgaaataatattctatggtatttatataccacatttatttatccattcatctgttagtggatacttgggctacttccaccttttgcctattgaaataatgctgctatgaagatgagtgtacaagtgtctattcaagattctactttcaattcttatagggtatatactcagaaatggtggtgctggatcatataggatttctattttttttttttgtttgtttttgagacagagtcttgctctgtcacccaggctggagtgcagtgctgtgatcttggctcactgcaagctccgcctcccaggttcatgccattctcctgcctcaccctcccgagtagctgggactacaggtgcctgccaccacgcctggctaatttttttgtatttttagtagagacggggtttcaccgtgttagccaggatggtcctgatctcctgaccttgtgatctgcctgccttggcctctcaaagtgctgggattacgggcgtgagccaccgcgcctggccaggatttctatttttaatatttttgggaaaatttttccatagtacctgtgccattttacattcccaccagcagtgcacaaggattgcaatctatatacatcctcaccaacattgttcattttctatttctgtttttggggttttttgtagtgccttttgttttggatagcagctatcttgttggatgtgaggtggaatctatagtgtctttcatttttattttgtgaatgattaatgatgttgaggatcttttcatgtgcttgttaggcatttgtgtatctggaaaaatattcaagtcttttttttccatttttaatgggactatttgctttttgttgttgagttgtagttctttatacattctggatattaactccttaccaaatatatgctttttacatattacctcccagtccataggttgctttttcgctctgttgattgtgtcctttgatgaaattttaagttttgatgtactgttgactctttctgtctgtgggttctgtattcatggatcgaagcaaccatggatcaaaagtatttggagcatccatggattgcagtgatcattaatcaaaaatatttggaaaacaaaaagggtagttgcatctgtactaaacatgaacagacattttttcttgtcattattccctaaactatatagtataataaatatttacatagcatttacattgtattagaagttataaataacctaatgataatctatataggaagatgtgtgtaggttatattcaaacactatgcctttttatgtgagggacctcttgagcatcagatgattttggtatccacaaggggtcctggaatcagtcccccacagacaccaagggatgactgtagtgcattttatctatttttacttctgttacctgggcttttgatgttatatattaaaaaaaattagtatcaaatccaatgccaagcattttccctatgctttattctaagaattttatat

SEQ ID NO: 231202 - DNA, 2485 bp, Homo sapiens
gggaaattctttatggacagctccacactcattaaacatcagagagttcacaccggagaaagaccttataagtgcaatgattgtgggaaattttttaggtatatctccacactcattagacatcagagaattcacactggagaaaggccttatgagtgcagtgtatgtggggaattgtttaggtacaactccagccttgttaaacattggagaaatcacactggagaaaggccttataaatgcagtgaatgtgggaaatcatttaggtaccactgcaggctcattagacaccagagagtccacacgggagaaaggccttatgagtgcagcgaatgcgggaaattctttcgttacaactccaacctcattaaacattggagaaatcacactggagaaaggccttacgagtgcagagagtgtgggaaagcctttagccacaagcatatacttgttgagcaccagaaaatccacagtggagaaagaccttatgagtgcagcgaatgccagaaggcctttattagaaagtctcacctggttcatcaccagaaaatccacagtgaagagaggcttgtgtgctccatgaatgtggggaattctttagctaaaactccaacctcattaaacatcagagatttcacaatggagaaagtttaccattgactattgtaattgggtagtaatgttatataaattccacatttttatgcaactaatctccagaacatttttcctcttaccaagaagtaaaatgctgtacccattaacaacaactcattccccttccctacttccccagaaatgtctcaactatatttctatactctatggtacttatatgaggtaccaatagatatctatgaatttgatatatatttgtacctcatataagtggattctacagtatttatcttttgagactggcttatttcacttaggataaggtcttcacggttcacccatgttgtataatgtgtcagaatatccttcctttttaggtgaaataatattctatggtatttatataccacatttatttatccattcatctgttagtggatacttgggctacttccaccttttgcctattgaaataatgctgctatgaagatgagtgtacaagtgtctattcaagattctactttcaattcttatagggtatatactcagaaatggtggtgctggatcatataggatttctattttttttttttgtttgtttttgagacagagtcttgctctgtcacccaggctggagtgcagtgctgtgatcttggctcactgcaagctccgcctcccaggttcatgccattctcctgcctcaccctcccgagtagctgggactacaggtgcctgccaccacgcctggctaatttttttgtatttttagtagagacggggtttcaccgtgttagccaggatggtcctgatctcctgaccttgtgatctgcctgccttggcctctcaaagtgctgggattacgggcgtgagccaccgcgcctggccaggatttctatttttaatatttttgggaaaatttttccatagtacctgtgccattttacattcccaccagcagtgcacaaggattgcaatctatatacatcctcaccaacattgttcattttctatttctgtttttggggttttttgtagtgccttttgttttggatagcagctatcttgttggatgtgaggtggaatctatagtgtctttcatttttattttgtgaatgattaatgatgttgaggatcttttcatgtgcttgttaggcatttgtgtatctggaaaaatattcaagtcttttttttccatttttaatgggactatttgctttttgttgttgagttgtagttctttatacattctggatattaactccttaccaaatatatgctttttacatattacctcccagtccataggttgctttttcgctctgttgattgtgtcctttgatgaaattttaagttttgatgtactgttgactctttctgtctgtgggttctgtattcatggatcgaagcaaccatggatcaaaagtatttggagcatccatggattgcagtgatcattaatcaaaaatatttggaaaacaaaaagggtagttgcatctgtactaaacatgaacagacattttttcttgtcattattccctaaactatatagtataataaatatttacatagcatttacattgtattagaagttataaataacctaatgataatctatataggaagatgtgtgtaggttatattcaaacactatgcctttttatgtgagggacctcttgagcatcagatgattttggtatccacaaggggtcctggaatcagtcccccacagacaccaagggatgactgtagtgcattttatctatttttacttctgttacctgggcttttgatgttatatattaaaaaaaattagtatcaaatccaatgccaagcattttccctatgctttattctaagaattttatat

SEQ ID NO: 231203 - DNA, 446 bp, Homo sapiens
acaatacctaactaccagaactatcttgcatgaagcacaaaatttctgtagtggtttgactacagatctattactagggtgatagccaaacttgtagtattattattgcagctttgaggtgtataagatgtttctttaaaacctcaaggttttaaaacattcagaataaactatatcaacccacacattaacaaacatttaaatgtcaaataagcagaatatcctttaatttctaaccatccctttgcaaaacccattccaatgttggtttctataaaatatactggggccttgttagtttatacatacaggatatatgtatatgtatatatatatatatatatatgtaagcttagaattatgtagcaactgctgcacagattggaacagtctatgtatgtctttcgctataatttattaaaagaaatttcaattcaataagtaaa

SEQ ID NO: 231204 - DNA, 456 bp, Homo sapiens
catgccatatgagtttgtagcccaggagcaataggctacaccatctagcataggtgtgcagtaggctataccatataggtttgtgtaagtgcactctgtgatgtttgcatgatgaaatcaccatgtttctcagatgatatctccatcattatgtgatgcatgactgtaaatccttgcatgtatggtcaaatgatttttgacaagtgtcaagaccattcagtggggaaaaggacagacttttcaacaaatggtaccgggaaaattaaatgtctgcatccgaaagagtgcagttggacccttaccttacacagtatacagaaattaactcaaagtggatcaaatacttaagtattagagctaaaactatgaaactcttaggagaaaacagggataaagcttcacaacataggatttggcagtgatttcctagatacaacaccaaagacacagaaaaaa

SEQ ID NO: 231205 - DNA, 694 bp, Homo sapiens
caggtgagcctgtgggtagacacccatgttcccaagctgctctgacctcacggaggggaccacccacggcccctgggtggaagagtgcccaagtcctttctttggtggaaacacagcaggtcctgggggaggctcccaaggtggggcctcgccttggagctgggtggttcttggagtcacagggtgtctgggccaggtgcagggacggcccttctagggctcttgggtcaggctgtccatgtccagcaccttcacacaacaaagacggcttcctgcccccacttcaaggacttctagcctcctggggttgaggggggactcttgagtttttgcacagactcacccaaatgagaatctccctctgatccctttgtcctttccaactccaggaaggcccaagtcagccatccctaagtaacagtgctggcacctccatcacccacgcaggcgagctcaccgccaccccccgccctaccccaccccgccccacctggactcaagccctaccccaaactgcccagaaggcgccaccaaggacatgggggagacagcaattataggccctggaccggtcaggctgggcctcattcagtgactggctcagacaggtcaggcaagttgtctgcaggcacacagcatggctgggccgtgctaggacaagagagtggtctgaatccggggcctggcctggccc

SEQ ID NO: 231206 - DNA, 574 bp, Homo sapiens
gctgacatgtcctccctctgatgtttctgcagtgttacctctttgaggatggaggtgtgagctatgactaaactggcaaatcctgtccccacctgcaaatggaaccacagccaaagggtctccctcgtccctgactctcaggcacagagcttttccccatcgtggatctgaagagcactcggaccctttagctgtggaagggattcacagaaggccaagaaagggttgggctgcgacctgtgacctcagaccttcgctggcttcaggactgggcttggcttccctccccggcgcaccttccgatgatgtccctgaaggaaacctggccccggggtgcagtctggtgctgcggcattggtcttctctgtggtgtggatcctctggtggtgcaagagggcagggcgctcacggaaggcgcggccacactgcgtgcacacgaagggcttctcgcccgtgtgaatgcgccggtggctgagcagcacggcgcccttggcgaaacccttgccacagtccacgcagcggaagggccgctcgcccgtgtgcaggagctggtgctgggtgaggttggagctgc

SEQ ID NO: 231207 - DNA, 495 bp, Homo sapiens
agttgtcagtttatgggaatgcctctttctcagactgtgtgcttcttgaggctaaggaccctgtatttcatcttcataaccccatcacttagcacagtgatgatcataatatttggtagtgaaagaagatctgttggttgctgaacacattgtattataagacccatgagaacagtgactctattgaattcagttttctatcttgaacagctagtatatttcctggctaaaacaatgtggaatagaaaaaactataactttgtattttgtggaaaaatgttacagacatcacctgatttcaaccttccataagatggcttcatgcaatagtagataggggagtttattatcatcccattttacagatgaggagacaaaaatccagagtgatgaattaacttactaaaattcactttacttaacaaaacttgtaactatttagagatagaccgtgcaaggttggtcatctatgagttaggaaatgcccttaaaaat

SEQ ID NO: 231208 - DNA, 581 bp, Homo sapiens
catggcattatgttcttctgcaacaattgcaaggtgttcagattttgtaaatctaaatgtcataaaaactttaaaaagaagtgcaatcctcacaaggttaggtggacgaaagcattccagaaagcaactagtaaagagcttacagtggacaattcatttgaatttgaaaaacatagaaatgaacttatcaaatatcagcaagagctatggaataaaactattgatgcaatgaagagagttgaagagatcaaacagaaatggcaagctaaatttataatgaacggattgaagaaaaataaagagctacagaaagttcaggatatcaaagaagtcaagcaaaacatccatcttatcctagccccttttgcaggcaaagagaagcagttggaagagaaaatggtatagcatttacaacaggatgtggacatggaaggtgcttcttaaaaatctctgtaaccatttctttatgtacatttgaaaaagccccttggagaattagaactgctaaattcttagtttattttttacataaggtcactcaaatgaaaagtaattaaaatatatttttcctacattactgt

SEQ ID NO: 231209 - DNA, 273 bp, Homo sapiens
aatgacgcctcgtttttagaaagtactttgtagttcttttaaaaatccacttgaaatacatgaatagacagttcacgcaaaaatgtataaaaaatggctctcatacaaatgaaaaaaatttcaaagttactcataattaaataactacaaattaaagccacactgaaataccatttttcacctatcagggtggcaaaattatataaaatatgacaacatattctgttggtgaaactgtagataaaattagtatgtcccttctgtcgtcttctc

SEQ ID NO: 231210 - DNA, 340 bp, Homo sapiens
caatctcttactcttgaactactttatcactttcagacactatttacatatttatgactacttcctgaatccaggactcaaaagcttcttgaaggcatgagctttatacttcacctctttgtatactcagtaagtatctagcacagggctatgtgctcagaattctctgtaattgttcaatgattatgtttctcaaatgaaaaggctttattgtccattctgttctagggcctcttcctggagtgctttagtttgcttagtctttcccaccctacagtagttgttcccttcccttccgcccttcccttgcttctacttgcttcctgagacctgctattaa

SEQ ID NO: 231211 - DNA, 1138 bp, Homo sapiens
catgggaatgaaggaggatctactttgtttttatggaccttaatccttccccatcctaatccattaaagggacagatggaagcattgtctttaggaagagctgccgctagggagctgtatctgtgcctaacatttgttttttgcatctatggtcctgagcacaataacattaggatttgagttgttttacatccagatgaatgaacattccaatttacagaccatgatgaaagatactttctcccttgactcttcctcaagtttgctgtaccccattttgctgataacagtggtccttatctcttaggatggggctgcttttggcatctaggtgagaaataaagggtcttgctaaagatttctgctgttctctaaaccagtgtttctccatcttaacatgtacatgaattatttgggagcctgctaaaatgcatgttttgattcagcaggttcagggcaggacctgagattctgtatttctcactagctgccagggcaagccagggaccactttgaggagcaaggctttagtcctaaatagtcaagattacagaatggtctttatccagttttcatagccaccaccagatggcagcatgtccactttctctacctgatgttgctgctcagctctttccttgggaccaagaagcgcaagattggagcctttgtttttctcacagttgtttgtgatcttctctctgatttactagttcttggccttttcgagtcagcttacatcaggcctctgaatccttatctttctggtcctccagtggggagccagctgctttctgctgtgctcagcaccaggacagtgcctgttttcagtatatgcaggcatagggtattgacttaaaggatgtctgtcatacttcttcctttttataaaaccaatctttttatatacttagaaaatttatgaaatgtagaaaagaaactattaattatctgtaattgtacctgccagaaaaaaattaatgtgtttgtgatttggtcatttagtcttattccatgcatttttagttatatatttatattttcttttataaaatgtgatgagaatgtaaatttaaattgataaaaatgtatgtaataaaacctaacacttttgctttttaaaccttataaaaagatt

SEQ ID NO: 231212 - DNA, 443 bp, Homo sapiens
acttctgtgagcataagccgagaaaatggaggtaaactgcttagcccaatacttggattatcgtaaatattcagtaaaactagccaccgttgttattgtaattattattttgtattttattatacatttcatggaaacttaaaagttagtgataatcacctcattttcagttgccttgctttcttcctgtaaattttattctctcttatcttgctcactgtctttaagcattgccagtttagtataattattttcccctatcctctataaaatcatatacaggatggatttgttgatctcagacatgttcactgagttttaaaatattaggatgaaacctgaactaggtactcctggaacaaatatgaagaagtgctactttgtgtcaaaggtagcaaacaagaatgctgtcttctaaaaacaggaacttccactagtgttca

SEQ ID NO: 231213 - DNA, 210 bp, Homo sapiens
tgggaaaatgtcaagataagaatgtcctggaaagagaagagaggaaaaaatggaggaaaaaagagagaaaaaaagtgaagaaagaatggccatacacttcgcaattatggtgaaaacacatcaacttaccaatctgaaaagcacattataccacaagcaggttaagtacaacaataccattcctgggtatattaccacagtctaactact

SEQ ID NO: 231214 - DNA, 475 bp, Homo sapiens
ttcaaatttaagaaggcgcgatgcaaatagcatgttggcataaacaagtgctgcccgctcaatggagggagggagcctttcttctgagctaatttaagctaaatacatggcagctatttttcatctctacaattgtgcaactttctcctcagtttacaatacaggggagatattatcgggcagaagttggatgggggataagtgaagacgagaaggaaaagaagaggcagtggacaagaaggtactctcagccaccgagctggtgattagaggtatttcaagagctcaggagtagagctggtggtccactaggacctcaagatcttatctgggtggaaacttgattttgagccttccattcagggaagaaaccaaagagcaattggagtcaggctccttttcctgccctttatatgcagcaccccctgacttcccagaagcccagactgaacagcagaaattttacaaacctcct

SEQ ID NO: 231215 - DNA, 464 bp, Homo sapiens
ggtaccctttgtctgacaaaccctgaaagggaagcctctagtagcagccctcccgttcccacctccaagcgtttgccgaactgctaggtggagcccgcgccgcggagcccacgagcactccatatccgggttttgccggccacccctttccctggcgcgagccccctccccggctctcggagctcttgccgctggcccgcccgaccgctgctcattctggcctccgctccggccccggctgcgcctaccccgcgcgcaggctgcacggtccccgcgcgcccgcgctctgacccgctgtctgcgcgtcgcccccctcgcctgctggcccggcaccgctcgctccagttcccaggagcggggatgcagatgctgcagctggtcggggtgggcgccgccgccgccgccgccgccgctgctgctggtttttctcggactgctcgttgcctccgctccggcagctgctg

SEQ ID NO: 231216 - DNA, 343 bp, Homo sapiens
cttaatgcatatttcggcttgtgtatccatgcacctacctcagaaaacaagtattgtcaggtattctctccatagaacagcactaccctcctctctccccagatgtgactactgagatcaggtctgagtgtttaatttctgattttttcctctgcatttacacacacacctcacatgcacacacacacaccgagtaccagtataagtatctcccatctgcttttctccattgccacgtgtcctggtcaagcccccctcactctgtttcctgttcagcatgtactcccctcatccaattcccctgtatcagtcactgccagttaataaacctttgcaaacgttc

SEQ ID NO: 231217 - DNA, 251 bp, Homo sapiens
tcccctacaccaagacaaataataaccaaatattgaaaactagtaataaagaaaaactctgaaaggcagtcagagattaaaaaaaagacactacctacggagaaactaagataataaagaatgggccgggcgcggtggctcacgcctgtaatcccagcactttgggaggacaaggcgggcggatcacgaggtcaggagatcgagaccatcctggctaacacaatgaaaccccgcctctactaaaaatacaa

SEQ ID NO: 231218 - DNA, 323 bp, Homo sapiens
gtgcacacgcacacacacgcaagttccctcagtcagccgagaatcctgccatctcttttagataacaaaagctcttaggccttatgctttgggtaggatttgtcttccatggacaggtattcagttgggaacaagtatatagtcactgcctctatggtatggagatactccgatttagtccctctgcctcttggggaaaaaaaaaaaaaaattgtaaacatccccttcagcagcttctcaagtccctgtacagtggaggaacattacacgtgaacttcctggattcaatggattcttctttgcaagaaaaaaaacaaaacaaa

SEQ ID NO: 231219 - DNA, 403 bp, Homo sapiens
gcggctgtatttatttcccattccacatgtactcccgtgtgctgtccatgtgatctgtgaaaatttaccaccaccgcatggaccagtcccattagtccagaattcatttggaataatgagtcctaaaagttgaaaactttggctttttatattgttcttaacccttcagtcaccatcctttcttgccaaatgtgaacaactttagatgtctaaggaacctacttctccaagccacttctgccttcacatccacaatctctgcctcttatgtatccaagaaaatcagtgcatgggcatgggactcagagtagagataggtcacctttaaaccatgttttactcaataatgttctgccaactccttcatgcacctctagtctcctggaccttccaccccagctca

SEQ ID NO: 231220 - DNA, 199 bp, Homo sapiens
gccgctgctgtgggccggcttttccatcatgggggaaggggagagcccgcttgagaataaagcaataaagatataagcagagaggagagaaaggtggagagatttccgatgactttgagttctggggccaagcatgcctaaagccaattatactcttgaacatttgtttcatgaatcaatatacttcctttttggctta

SEQ ID NO: 231221 - DNA, 383 bp, Homo sapiens
ttttcttcctgtattctttcagtttattaaagtattttttagtttaccattttctcttctgttggtgtgttagctatatttctttgtatattttagtcatttatacactaaaaatacaccgttaacttatcacagcctaccgtgaattaatattataatgcttcctgtataaacagtgtaattatctgtgtaccttctatttatctttgtgctgtcatattcacacactttcagtcttcgtattttatgaattccacaatacattgttattactttggcttttaatagtcaactaacttttaaagaattcaagaaaaaaagaaaaattaccttccatcttattctgtagtttttcaataaatgtaataaataatcatttcctc

SEQ ID NO: 231222 - DNA, 403 bp, Homo sapiens
ccttctaggactttattttttcatttgacagccacagaagctgactttggctgaattaagcaatgaagaaattaactgcaaaggttattaggtatctgatagaattatctgaaatcatgttgcataacttgcccaatgagaaaactgtcactgttgctactatccctatgtaaccctagatgcaattgttgctagtcattgttccctaccaataccatttctgattcagaaatggaaccttaaaatcaataagaaatggctgttcctgccactagtgccaaaaaaaaaaaaaaaaggaagcttcaggcagaactggttttctcacattgctcttttctggttttctcacattgctcttttctggttggccaaaaatacggtatgtcccttctgtcgtcttctc

SEQ ID NO: 231223 - DNA, 456 bp, Homo sapiens
attgccacttcactaggccatcctccatttgaagaataggaagaaaagggagaaaatcttcccagagagaacactgcctctgtgacactgtttattcggcttggctgtaaaatgtggaaagtaatgcatgtttaaaagaaaagatgtgtaatttacagcttcttaattcataaagaattcagtgaatcatgttggccctgttggattctggagaagtctgaaaattggccagagtcagcaaaggtttttagaaagctatgcattttaatctacttgaaagttttggactctgaatgtcctttaactttgaaagtatacatatgaaataccagcatgtggaaatttccactctgtcccaaccagctgagactgtcctttgagcaaaagaaacctcaggcattgcctctatttctaaggcattgtttttcttaaataaataaaatgaagaagggcttt

SEQ ID NO: 231224 - DNA, 563 bp, Homo sapiens
gactagcagattcttatctgtgggggaggacacaggagcggatgacacagacccctgctcagggaccggctagagggcggaatgcctgggccccggccctgtctgcttcctgcttcttccccgaagttcatggcctgtccgtccacatgggcgggaggtgtcccgcgagcagccctcaccctgaccttggctgctttctccattccattccccacccctcctccctcctgacacccatggcattttttcagataagttaatacctttgattaggttccagccaaacctcaccctttctctttccccatgcctttgtgtctctcttcgtctgatgtcgagtctacaacctaatgctttgaagacagactgacttccccgtccttggtcagggggttgctgctgcgtggggggggcggtaaccataatcttgcccccgtgtctcatacacaagctgcaagcttagctcagaagctgtgcctgtcttggctgctttttcttgctgtcttccctatttttgcaggagttttgcacacggtcataaaagttcaggagaaacatgaaac

SEQ ID NO: 231225 - DNA, 460 bp, Homo sapiens
cctgcctcagccttccaagtagctggggttacaggcatgtgccaccatgcccgtctattgtattttttttagtagagacggggtttcaccatattggtcaggctggtctctatctcctgacctcaagtgatccacctgcctcggcctcccaaagtgctgggattacaagtgtgagccaacgtgcccagctggaaaaagatagatctaagcagcttgggtaactataaatggaagcagcagggggatttgagacccctgcttggggcctttctggcccaatataccagggcttagcaaactttttaaataaagagccagatagtaaatattttcagctttgcaggccatactgtcacaactactcaattctgcagttgcagtgcaaaagcagccatagacaatatgcagataagtgtggctgtttttaaataaaacttattcatgaacactgaaatatgaa

SEQ ID NO: 231226 - DNA, 273 bp, Homo sapiens
ggtgtgagctcaggctaagtcaagtgtaatttccttcaaagaatgacttacgctttgtgaaatggacatctctaactcatgacttctattaggcaaaggggggcattaaggaactacactttctgaatcaaaacttagagcacatgtttggataataaattagataattgaaagaagagctgacttagtcttagtatgtgaaagctttagttaccaagtgagacataaatggcattcattttctaatagaaaataaaatctttcagaagaaaa

SEQ ID NO: 231227 - DNA, 405 bp, Homo sapiens
tcaatctcctgacctcgtgatcctccctctttggcctccttaagtgctgggattacaggcgtgagccaccgcgcctggccaggttaacattttttgaacattttaaacttacataaaaattgataggaaaaaaggcagacaatccattagacaaatggcaatggatataagtaggcgattcacggaagaaaacattcggaagtggatgctgagcgtctgagtagatactgacccaaggcaatgatgagatgctgctctcaaccagcaagggatggggaagggcgaaagcacagctctgtgctggggaagtttcaggacgcttctgggctggcagacccggtgaatgggaagtgggaactgctagggtgtttttggaaagtaatctggcagtgttttcaaactgta

SEQ ID NO: 231228 - DNA, 479 bp, Homo sapiens
acttatctgtaacacaggtttaacatgtgtgttcttttctggcacaaacaccgagtcatttgttccttatggcaatgacaaatctaccccatgtagagtaagcaaagaggaaactaggttaaaggacaaggaataactgatatcttaggaggcaaagccctggtacaaatagtttgaatataaaggcaaactgttgggtaagaggctagtgtccctttaagtgggattaagatcaccatcttcatgattacagagtggcattcatttgcaattttagtgtaccatctgtgacacccaaccggagtcttaaatttgcctttttgttttttcggtttgttttttctcctttcaataccagctaaagtttccacagtgtacttgttgtttcaaaatctacaaactgttcactctgcagttgaattactttactttgctatctccctctcatttaacacactaatgcaagtatcttagattta

SEQ ID NO: 231229 - DNA, 570 bp, Homo sapiens
ttcatgatctcacaactgagaaggatccctccacattcttggaaatatacacccattggaacccgtaagcagaccatgtgtcaacgtatgcagagtttgtgcagacacacagaccctctggggagtatatgtttgaatctgatgaagatgagcagttatttgtgcacctggacaagaaggagatggtctggcatctgtgagagtttattcacactgtgtcaaactttctcagtcagaagttgacataaggaagtcaccagcttcggtctcctttaaatctccaggcctaactttcttttgaatctctgctcttcaaccacaatgacttatgtaccccaagacccctctacctcctggctgcctatgatcctcctgcacctagcactcagcaaagggtctgacatttagatagccctcaatcaatatgaagaatttaaagtgtagtgacaaggtggtgcccacactggatggtctgtatgctgtggtctcatcaggaacctttctctgcactgcatttttcctgagaaatcccagagttcaataaatacctgtgtatgtcagagctagaca

SEQ ID NO: 231230 - DNA, 440 bp, Homo sapiens
tgagatatgactgtttgacttctccttgctcctcagggaagaaaattttaactcagacatcttaagcctttccataataattgttcaatatgtcaataaatgtaagtaagcacccatcatatgaaaaacataggacctattgggcaagtgtcacagttgagtcaaaagaaatacagcttctaggtcgggcgcggtggctcacgcctgtaatcccagcactttgggaggctgaggcgggcagatcacaaggtcaggaaatcgagaccatcctggctaacacagtgaaaccctgtctctactaaaaagatacaaaaaatgagctgggcctggtggcgggcgcctgtagtcccagctactcgggaggctgaggcaggagaatggcgtgaacccaggaggcggagcttgcaagggagccgagatcacgccactgcactccagcc

SEQ ID NO: 231231 - DNA, 435 bp, Homo sapiens
ggagggagtccctggcagaatccagccagcctgcacactcaggtggagccttgggaagtttgcgccatttgcagcagggtggagcctgtcccctcctcttcctgtgtggaacctgggattcaaagggcgaggctggaagcactctagcagggaattccggccttgcagagagtacctgttttcccttttttccttctcaccaaataaaaccctgctttactcaccctttaaaccatctgcaagcctaaactttcatggcatgggacaaggatcccatctttaactgacctaagaaaaagtccggcaacaatgttgaagtctattatttaatctgtatgctggtcaaatatgtatactcatgttctgtggttttgttatgctatacacttttctctgttatatttaataaaatgttcaataagcagttaatatgac

SEQ ID NO: 231232 - DNA, 467 bp, Homo sapiens
cctcttttggcagatgactaccgattggattagtggttgtcacctgacttaagctgagccaatcagattcttttgctcgagaactttctttaatggagaggctaagaaagttgtcagttggtggagctcttaaggtcacaatcagatttagaaatatcagtggccaattcgaggtggtgggcaaagagacaagcaaacagggcagaagaatgaagctaatattcagggagaatcagaaatgagagctcaaatggctccttgagggctgggggggttatctcggctcccagtgcagttatcaattccagttaattgagtgttcattccattgagatcaacaggtatttattaattgctttctaagtatctgatcatggttctgcatgaatttcacttttacttcatgctcctatgggttttggagataaccttggacccatgtaataaatacttctttacttgtgcca

SEQ ID NO: 231233 - DNA, 651 bp, Homo sapiens
attaaaatgttaaactttgttcatcagaagaagccattagaaagggtgaaaaaaaaagccatgggatggggaaagatatttgtagtatgtatcactgaccaagggcttatatacaaattgtgaaaagaactcttatgctaaaaaggcagacaactctggcatttcacaaaagagggaggaagggagattccgtaaatatgtgacactagattcaccccagtagttataagggaaatgcaattcaaaccaccatgaaatattgtaagacatacaccaggttggtaataattttaaaaaccagtggtaataacttaaaaatccagcaataccaaatgttggtaaggaggtaaggatatggagcagcacaactctgatatactagcagtgatgtgaatttagtacagtcactctggaaagagtttagtattttctaataaagttgaagataaatgtgttcagtgacctagcaattccattcctacatatgtaccacctccattcctaagtctttaccatggagaaaagcatgcttatgtgcattaaggatattcacagcagcattgttcttaatagccaaaaaactgtccatcaagagtaaaatggataatgatgaatattataaacaatgaaaataaactttggttacacgta

SEQ ID NO: 231234 - DNA, 806 bp, Homo sapiens
gttcaccctctcctgaagctggcctctgtggtccttgaccccatcaggtcccacggtgccctgcatggactctgccatccttcaccagcttccccccatcaaacggggcttgctgtcagctcttcctgcaactcccagccctgccgcaccactcagccttcttccttcaggcttcagctccagtgtcttttcgccaaagaagcctttcctgatctctcagccataaatgttcctctccccagttgctttttccctctccctctactcagttgctttatttaactgtcatattgtctttggagcacttgccaccatcagaaattatcttgcattatgtatttatagtctgtcttccgcctactagatggtgggttgcttgaggcaggaactctgtcttgtttacatctctatctccagataacgtgtctggcacgtgatgggtactcagtaaatacttgtggaataaagaaatgtcattacaggttctctatgcattaaaattttttagaaatggggtgttgcagccgggcgcagtggctcacgcctgtaatcccagcactttgggagactgaggctggtgtatcacctgaggtcaggagttcaagaccagcttgggcaacatggtgaaaccccatctctactaaaaattcaaaaattagctgggcatggtggcacacacctgtaatctcagctacttgggaggctgacgcagaagaatcacttgaacctgggaggcagaggttgcagtgagctgagatcacacaactgcactccaccttgggtgatagagtaagactctgtttcaa

SEQ ID NO: 231235 - DNA, 473 bp, Homo sapiens
ttttgctaccctttccttctctacggacaaggggaaaacaccagcttgaggtgagataaacagtagttttaggagacattccctctgcagtgtgggtcggaaggatctcagacttaggtcactgttctgggcaagctctaggggcaaagcagacacaggagccgagaagccaggctctcttagcctttgcacaggcccctctgcctggcatgcctttccttttcagtctgacagactcccaccttagccttcaaagcccgaccaaatgtcacctcctcgggaagcgtgggctacctgccttgatgaggctccacttcctggagctactcttccatacagaccccatcctagcactggccacacacccctccctcccgctttcctgcatggagggctgctaaggggcagaaaggccaacatgccagcacttgtcaatcataaagagccagaaagacaaaaccggaagtcgacgg

SEQ ID NO: 231236 - DNA, 752 bp, Homo sapiens
ctgagttaggtgttcatgatacaaaaaaagctgctttgatttttttcatttaattttaatgattttggatgctggccttgacaaatgttcccatattgtttaaattttgtttcttaaaatagttctattgaaaatgttataaaggacattattgaatcaactggcaaaagtggaatatggatggtagattaagtgttgataaatttactgaaattgctaactactctggttatataacataatatccttgtcttaacaaatatgcaccctgttctcagtactcaggagaaaacatattgtatgtatatatttaaaatggaagggctaatgataaagccaatggggcaaaatattaatgacaagtaaatcttggtaaagggaatatggaaatactactcttattcatgaaagttttctttcaaagtattaatatttccaaataaattgtttaaaacaaaacataaattcactggccggttgccgtggctcatgcctgtaatcctagcactttgggaggctgaggtgggtgggtcacttgaggccaggagtttgagaccagcctggccaacatggtgaaaccctgtctctactaaaaatagaaaaaattagccacacatggtggcacatgcttgtaatcccagctgcttggcaggctgaggcacaagaatcgcttgaacacaggaggtggaggttgcagtgagctgagattgcaccactgcactccagcctgggtgacagagtaaggttctgtc

SEQ ID NO: 231237 - DNA, 805 bp, Homo sapiens
ccttcctttttgtccgataggaagtactattctgaatctaccagcaaggctggcatgtgctctcttataaaaggaaaagacttcaccatgcatagcctcttcaccctaactgctcagttgtttgctacccctggcaaggatgttctaattgtgcagtggagggtgtgaactcgttgctttaactgcagttccattagctaatcggagtcctgatgtcagtgtgacattgtggtgtaaatcatgaaggggtttttctgccacttcctgtggagagaaaacagttttgcaggatcacctgatgattggccattgtggggttgtcttcttgaaaaagaaaagttgttctgacctgggctgtgctcaggatgcctacattttgcctttgcaaagcgatgaaccccccagaaaggaagtgtatggggggcactgttggagtctgagtgctcccttccctcagcacttctggagaagcctggaaatactgtagacacagttttggagaagagaattcaaagggcttacaaaaggagagtacttttttgtccacttctctagaagaggcacagcaacttgttgagtttgtgttgtgttgtgttgtttttctgccaccaaattaggtgttcctattgtgtgggaggtgaaaaagagagcacaaatctattaataagtaaagcaactgaaacaaagggaaaaatgaatccccattttgcttttttgcaacattacatccagttaataaaagaggcttacaaatccaacagagatctgcttgcaggaactaactaggaagaagaagaagaagaag

SEQ ID NO: 231238 - DNA, 928 bp, Homo sapiens
  misc_feature (22)..(22): n is a, c, g, or t
  misc_feature (53)..(54): n is a, c, g, or t
  misc_feature (56)..(56): n is a, c, g, or t
  misc_feature (63)..(63): n is a, c, g, or t
  misc_feature (72)..(72): n is a, c, g, or t
  misc_feature (76)..(76): n is a, c, g, or t
  misc_feature (81)..(81): n is a, c, g, or t
  misc_feature (84)..(84): n is a, c, g, or t
  misc_feature (86)..(87): n is a, c, g, or t
attctgctacgaaggatggagnatgctgtctggcgtcataacttgtagaaggnncnattagantatataatngtgnagctncangnncagctgactgtgctataagaataatgatttaagatcgagccaagagttaactgcccatctcaccaaccagtggccttctccaggagctctggatgtcaatgctgttgccttggatacgttgctttaccgaagacacaatagacagtggtatgagaagagttatcacagtcttgaccagttatcagcagaagttagcctttctcagacttcactagatccaggccagtcacaagaaggagatggaaaacaagacacattaaatgtaatgagtgaaggtaaggaagatactccctcattacttggcctctgtggatctctaacgtcagtggcaagttacaagtctctaacaagcttaaaatctaatgactaccttgcaagtcctacaacagagatgacaagtccaggcctaactccatcctgaaaatttttgtgtaaaagccaaaactttttatgttgtaaatgtttaatttacatgtttgactgctgggaagacctttgaaattttatattgttctggtacatgtctgaaattctattgcttggagagaatcccctccagataagagattttgagtgaaaaacataatgatcctgccatttttcatttttaaaattcttacatttgtcattgagaaagttcaaaatggaataggctttaaaaaaaaaaaaaactttcaaagatccgccaaatcattcatagcaaattgtacatattgttcagctgatttttatatatttaaatacaccttagtggccagagactgacttcaaggttttattccagagactccagagacttaagctaagtattttttcattctttcagattttcaaaaaaaaa

SEQ ID NO: 231239 - DNA, 382 bp, Homo sapiens
tgatccatccatctcgacctcccaaagtgctgtgattgcaggcgtgagccaccacgcctggcctcggcatcccctttctaaaggacatctcaaagcacagcgcggcccctcagcacagacgctgctatcacagcagaccttactgaggagtcagagcctgtgggggcaccatcagcaggggcgctcagcccgtgccacactcagtctcgttagaggagaacgaagggagtgggctcccacagaccacattgcactgcgacaaggcaaaccgatggtgtgctcgggcattcgggtggacagactgcagatcccactgagaagggaggcctcggttatctgatttaacacgaagaaaccagtcacacacacaaacatgaaggca

SEQ ID NO: 231240 - DNA, 2230 bp, Homo sapiens
  misc_feature (779)..(779): n is a, c, g, or t
  misc_feature (897)..(897): n is a, c, g, or t
  misc_feature (1148)..(1148): n is a, c, g, or t
  misc_feature (1574)..(1574): n is a, c, g, or t
  misc_feature (2210)..(2210): n is a, c, g, or t
  misc_feature (2213)..(2214): n is a, c, g, or t
  misc_feature (2216)..(2216): n is a, c, g, or t
  misc_feature (2218)..(2221): n is a, c, g, or t
  misc_feature (2225)..(2225): n is a, c, g, or t
  misc_feature (2228)..(2229): n is a, c, g, or t
ctgactctgtctgggcattcttcctgggctagagatgctctgcctcccagcagaagacaagagccctagaaagactgtcattcatttactggagagagaaatggttcatctacacacacactcagagcctggctagctacaaagccgtggtccgtggtaggatgtacgtcttagtggaataagtaaccttgagcagacaatggatccagcagtaacaagcctgccctgatgccggcgtaaattccgaaggagctggagaacgattcttcccttcactttatctaaatcctctgaaggatgagtgggaggatggtttcttctcccttcctgaaggttgttttgttggtgccttatgctaagagaactcagcagatacaaatttattattttcttttagacagcattttccctgcagttagaagaaaacagcagctcacattgaaaaatatctaattcccaaaatacgtgattccaatagggagtttatagaatttgcttcttaccaaagcaaaatcttgaatacatgaaatctaaaatcttgccaatttaatgaatgcctaataatttttaaatagcatatatcattttaatacattaaatagttggaagattgttgagggataatttgtcaattttttattaaaaagaaaattcataaaaattaaatattctacatttattttatattattatcttggcaattttattttttatgacaaaattctgagtctgttatattatccaaatcctaaaaagatttaattgattacagaaaaatntattgggaaaaattgctttgcccctcttttttctctaagcaattcctgagttttaaaaatactccttaaaggaactaatttatttttcatggcccatcaccaatatccaagagagtanccaatttttaaattctgaaccctgtcttgtgtgactttcaaactaaatgaaatgaagaggcctcaggcagtctgtgtttacacagggtggcaaaattaaccttaagttacttggatcactgcactggggacacttcagagcctctactcaggctacttttgagcatactatgtatgtcgctgtgcagaagcctacctctttcactctagataaaacaagactttctgagcacttactctgagcaaagcacngtgccgcaagtacaaaggtggataagactcagtccttgatttgatggtctttgttggaataggttttcaaactgtaatgtcactgtgtctcccaggggccaaaagtttgctttcattgatgggtttcaaagtagggatgagtttacttataagtacacattgtgtcattagtatgcttgactctccatggtgcaaaatttctttctaatgctgatcaattgcaaacatgatagaacaatgaaatacttccaggacattctaaatcactctcctccttgtgagaaaatagggtagagagcctagcctggtacaggcagccatccatgtctgatgtgggtcatctctgagaatgacactcctcaaagggccagagggtgctctttcttcatttcccttacacatgggtgttattcaatacttatctanagccatgtgtcacttaacaactggaatatgttccaagaaatctgtcattaggctattttgttattgtgtgatcacagagtgtacttacacaaacctagggtggtatagttcactgtaccaccaaggccatatagtgtagcctaggctacaatatacctaggctatatagtatagcctgtagctcctaggctacaaacctggacagcatgttactgcactgagtactgtagcaattgttacacagtggtaactatttgtgtatctaaacatatctaaacatagaaaagatacagtaaaaatacagcagtataatcttatgggaccaccgttgtatatgtggtccatcgttgatggaaacattgttatgtggcacatgactgtatatgcttcgtatatagtgaacattcagcaaaggttttcatcaatgaatggataaattggcaacttttatgggcttaattgggctaaaatatatacggagtcactatttgacttaacacctagacattattttactgatatttttcaataattctgtttttgtaaagccttccttccatttgggtgcaatttccacttggggaaaatctcattccccatcctcttgtaattaaaaagcatggtttgtttgttttntanntnannnnaaantgnnc

SEQ ID NO: 231241 - DNA, 421 bp, Homo sapiens
aaaaacatactgagtgcctgctacatggcaggaactgtactgggactagaattaacagtggggagttttgaacacacatcccccacccttaaagcttacagcttagtaggagagtcagatattaaacacagtaatgacaagtaaagaaagaaagctgtgataaatgtggagagagaaaagcacaagtggacagtaaaggtataacacgaatacagtttaaactggggagtcaggggaggtccttcagggaagagatctttgagacctaagtgatgattaagagttagataggcaaggccaggtgtggtggctcacgcctgtaatcccagcactttgggaggctgaggtgggcggatcacaaggtcaggagattgataccatcctggctaacacggtgaaaccccgtctctactaaaaatac

SEQ ID NO: 231242 - DNA, 196 bp, Homo sapiens
cagatatccattgaattgggaattttataacatagtgactttctaaatgcctcgaaaacatcccctgagttcaggaaaagatcaagtttgcaggcttgaattttacttccactagactactgctgcatttatctgtctcctatttgggagggaggtatgatacttcacaggtaaaatgcatgctgctattaaaaga

SEQ ID NO: 231243 - DNA, 507 bp, Homo sapiens
tcagctctgaagatggacggagccacggaacaaggaaacggattctccctaagggagcacagccctgccgactccctgactgggcccatgcctccctccctcccttgattggcccagtgaaacccatttctgacttttgacctccagaaccataagacaataaatttgtgttattaggttggtgtaaatgtaattgcagtttttgccattactttgaaaatattttaggccgggcgctgtggctcacgcctgtaatcccagcactttgggaggccgaggagggcggatcacgaggtcaggagatcgagaccatcctcactaacatggtgaaaccccgtctctactaaaaatacaaaaaattagccaggagtggtggcgggcacctgtagctccagctactcgggaggatgaggcaggagaatggcgtgaacctgggactcggaggttgcagtgagccgacatgtgccactgcactccagcctgggtgacagagcaagactccatctc

SEQ ID NO: 231244 - DNA, 468 bp, Homo sapiens
tcttcctcatatgagtttctgtatgcccgaagccctgaaccatgctgtatttatggtatttattgtaaacacctgtttttgtatgattaagcccttgggctacactgtaccagtttgactggataagtttatcctagaaaagtgatttatgatgaatgcctggttttgctctgtggtgaagactggatggagtctgagtagctgaggtcattcatatgggcactgcatgcctatgtgactgacccccaacaaaaactcttgataccaaggcttcggtgagctttcctagcaacacttcacatgtgtagtcacacattcctcctggaacaattaaggacatccctatgtgactccactgggaagggttacttggaagtttgaacttgatttctcctggacttaatccatgtaactcctccctctgtcaactgtgatatatccttttgctgtaataaactgtaaccatga

SEQ ID NO: 231245 - DNA, 316 bp, Homo sapiens
taaaagtcccaaggctaagacctgggagcccctggctccccactctgcctactcttgaaggatccctgtgggtattgaccagagcattgctagaatcctgacaccttcccccaccccttctttcccagtggcttggtgtaatttctcccatctttgaatcccagggcatttattaccttctcttaatcacctacttcatctgacctcccatacagttgttttttaatcatttttattgtgaaaaatatcacatatacagaaaggtgcatgaaacataaatgtacaggttagtgaacttttaccaagcgagccagca

SEQ ID NO: 231246 - DNA, 440 bp, Homo sapiens
gtcaacagctcctgtgagttgggtccaagtacatgagtcacaatctcaacagcggaatgcatcctcatgtgagagccccaatcccttctgcaagttgtgtcctggtataagacatcatccagccacttgtccagggagcacatcccaatccagttcctgaccagacagggatctgccactctttccagctgggtgacctggtatatgttaaaaagttccagaaggaaggactcactcctgcctggaaaggacctcatactgttatcctcaccatgccaaaagctctgaaagtagacagcattcctgcttggattcatcaccctcacatcaagaagaccaacaaagcccagcaagaaacatgggtccccaagcctgggacaggccccttaaaactgtgtctaagtcgactgaagccattaaattaattctttacctctttt

SEQ ID NO: 231247 - DNA, 443 bp, Homo sapiens
ttgagttcccaaaatgcatgacttggttcctcatgtcacatccagacaggacaacacccactggaagaggaacgcttgctcaagtcttctccacacctccccaacccatcctcagcaaggaaacatttcctagcagcccaattggcccagaactggatcacaggccacacactattgggcttagactgataagaacctaaccctcagctaagtatgagctactgttttttagaccatgggtgttcaggggagggtggacacagagagagactggattgcgttgcttttttcaagaaagagtttgggaactcattggaatcaagaaaagtcagaacaaattatgtttgtattgtcccctttaaggttgttattctatggatataatgagagttgtgaaaaaataaaatatgaagaaagaaattgttattttcttcaaactctaa

SEQ ID NO: 231248 - DNA, 304 bp, Homo sapiens
ccttgggtaagtgcctctacctctctgtgcccaggtttcctgtctgtgcgatggggatggaggtgatagtgtctaccctcctgaggtcgttggggggactaaatgggatagtaagtgtaaatgggacagcagtgccaggcacagagtgagcacttcaataagtcaacctcttcaccatcattcccgacaccacagcaacagaaatgataatgctatcaacccccaacggttcaacccttgccccctgcccgtgtgcccaacatcctttatgctcaaccccaagaaagctgagatcgttccttcc

SEQ ID NO: 231249 - DNA, 534 bp, Homo sapiens
ctgctagtctaaagctccttatcaaaaacaatttgagaatcacttatctttacatgatcccgtaagcttctactaatgtgccttggcaagtgggcatggtttataaatatcatagcatgattcattcccacatctccaagtgtaataatgtggattttaaaataacatgtttttgcctttaagttaaaaatattggtgtgagagaaatcaatatctgtatgtacgtgtgtagatatgtgtgtatattaaatgcatgtatatacacatatatgtatacacacatacacatctatgcatatatgcgtgtgtgtgtgtatgtacgtatataaaagagccgtctcctagaagaaactgggatggtagaacaaatgagaagattttgtaagaaatgtactacctggattcattttgaaaaaataaattattataatcatatttatttgagtaaaaaatatttttcatgtcagtgactaaaaataactacaggaaacttttattcagattccagataactggaaaagtctaggagccaca

SEQ ID NO: 231250 - DNA, 189 bp, Homo sapiens
tgtgtgactgtatgatgaactttgagctcatgagaagtaagtaggaatgtattaagaccataaaaatctctttaattttgtaaaaaagtgaatgtgaactcttccctctccttttgctgctagctgcaatggagatgtgagggctggagaccatgccaccatattgaaccatgagtagaaagtcacata

SEQ ID NO: 231251 - DNA, 429 bp, Homo sapiens
tcccctctccaaattgccctctcccccagggcaggctcagcaatgagcccctgtagacagccctcctctctccacaaccccacagggacagcaccccctctaagctccttggtactggtaccattctcagtggttccctgattattccataggactaaggcttgtttttgcagccagaccaaaacttccacgatgggagtctgtctgtgatacaaggcacacaacacgtactcactaaatgctgaaaacaactacccctttatgcttcaaagtgctcaaatggttctctagtcctgagatttgaagaagtcttaaggaagatgacccagtatagatgtgcaaacaggcacagaaaaagacagcgcccagcagcgtgtgcgacaaggctgagcggggagcccggtcgcatcatctgaagctgcaggaata

SEQ ID NO: 231252 - DNA, 207 bp, Homo sapiens
ttttttggagcacatgtgtgatctgtcatcacgttgcttcccgagaagttaaatcaaagacttaggagggactctgctttgtccttaccaaggttctgctagaatttgggaatcactgattctaaaataacagtaagagagctggagtttttttttcttttcttttttctttctttctttttttttttttaactgattccttcttgg

SEQ ID NO: 231253 - DNA, 832 bp, Homo sapiens
ggagctctctgctcttgcagcctgtctctctgtctgcccaagatctctgtgccgttgctccagagctggaggctggggcagtggctcccttctcttggagtgacatccctgcagccttgggtggtgtagtagcttggcttgcctctgtcagggtggagcttttgccccacaggtgaactggggcaagagtgagtggggtcctggtgctcctggactgttgtgctaggctggagccttcacttacacatgggttctgggtggaggaaggaagctccagacctctcagctgctcttgcctggaatggagcttctgtacaaggagctgtgggaagagaaatgctggcagaagcctctcctgtggatatactgcagccctgaccaggggctgggggaaggaagtctgtgttcttacaaacccccttccccaagaggagcttccatcaggctgacctgcagcggggcacaggttatagctcaaatgtcaccaactctctcttccttaccaatatttaatagtgttcattgaatcaatgtgtcttcattttcttcacttgccatatgcccttaggacaatttccagaagtgttaatttttaaaataatttttaccagttacggttattttgctgtggagagggtctgtggcctctttatgccaccactgcagtgtcattctgatttgtagatacattctacagtgggatggagattcaactgtaattgttaagttttagctcttcttttgttagttatagaacagtgaacaaagtacttaatcttcctgaatcaaatctgtaaaataaaaaatttttaagttgaataaaatggtcctt

SEQ ID NO: 231254 - DNA, 426 bp, Homo sapiens
gagccactttgcctgggaaggacggaggaagggcaacctgcacaggctttgcccgagaagggttctcatcctccttgcaaattctaagaggacacccacccattggaaggtgagccaggagcctaccctggatgcagaggagagctggggagtgcccctttctgggacccctgtctccttccagaaagtacgagaccctcccagaagggggctacagcggtcagcactgcgcccgccaaacctaaagctcatctcaagatcttcccgtggctccgaccgactctgcaaatggagcgggccagtccaccgcctcttgggacggcatctctggacggccactgacagtaccagtctctgtcaccccctggggggttaggggcaatgtcatcggccagggtggcagaaatagaaaagtgcgtgagctca

SEQ ID NO: 231255 - DNA, 790 bp, Homo sapiens
gagccactttgcctgggaaggacggaggaagggcaacctgcacaggctttgcccgagaagggttctcatcctccttgcaaattctaagaggacacccacccattggaaggtgagccaggagcctaccctggatgcagaggagagctggggagtgcccctttctgggacccctgtctccttccagaaagtacgagaccctcccagaagggggctacagcggtcagcactgcgcccgccaaacctaaagctcatctcaagatcttcccgtggctccgaccgactctgcaaatggagcttaatgggtagcagggggaaggaattgctctcagccgaaaaacattaagctttgtcaattatcccccaaacccgctgggtttataaatatccctttttatttttagggttttccctcccgctcgcccccatcccgaactctctccacgccccgcttcttcccccacgcacacggcggctgcaccgtcacagaaagcaggtgaacgcggggccacggggcgctcgggtagaaatgccacgtcgcaccaccaagtcacaccgtccctgcccgtccctctccggccatcccactaactattgtattggggccatgcagccgctggaataatcagcgaagccacaggtctccccatcttggcaagtggaggtgtgcgctgccctcagacatctgtgaaccgctgttcaacgccaaccccgaaggcagaaggggaaaccaagtcacctcccagaaagacgtttgatgagcagagatagatttgcctccagactggtacca

SEQ ID NO: 231256 - DNA, 460 bp, Homo sapiens
caaagtttaaaattgaatatgaaaaccgtgtttaaagtaatgatgaaataaggatccaaatctttagaggcaaagaaaatttaaaaactgtagtagagatctgtacatcaacctaaaagaaaaatagcctaccacttttttggtgtttctccttatgggattttaaaacggtaaatagaggccaggcgcagtgctcacacctgtcattccaacactgtgggaggccaagacaggggaatcacttgaggctaagagttcgtgatcatcctgagcaacacaatgagaccccatctctacaaaaaaacaaaaaatattagtcaggcatggtggtgcacctatagacccagctatttaggaggctgaggatggaggatcacttgaactctgaggttcaagcctgctgtgagctgtgattgcgccgctacactccaacttgggtgacagagtaagaccctgtctc

SEQ ID NO: 231257 - DNA, 399 bp, Homo sapiens
agggctctccagagaaatagaaccaaggagaaagagatcgatttattgattgattgattgattttaagcaaattggcttctgggattctggagggtggcaagcccaaaacctgctgggtgggttgctggctggagacccaaggaagagctgcagtttgagtctgaagcagtctgctgtcaaaatttcctcttcctctgggaagtgagtcattgtttggtgaaggccatcaactgattagatgaggcccagccacactgtgggggtcttctgctttactccactgatttaagttttatttcacctaaaaagtactttcttagaaacatgtagaatagcatttgagcaaatatttgggtaccttagtctagccaaattaatacagaaaactgcccatcaca

SEQ ID NO: 231258 - DNA, 441 bp, Homo sapiens
tttatattaataataagcttaaaagtcagataatgtacatctttaatgttttctctatcagttagaattgttttgctattctcagtccattgccttcctgccttgcaagtttctgagactgtgaaaagtgttttgcttcttttgttacccaattgagatcatttaataatcttgaaagagtggttaggaggaatgtattttatcatagcaacaagacttttaagaaggaactgaattggcaattggttcattaaaaccttctgaggttttaatttctaaaaagttagtatggggctgggcgtgttggctcacgcctataatcctagcactttaggaggcagaggtgggaggatagcttgagcccagcagttcaaggcttcagtgaattatgattgtgtcgctgccactccagcctgggcatcagaaccagaccctgtgtca

SEQ ID NO: 231259 - DNA, 272 bp, Homo sapiens
agcaggatctggactgggtagaaaattgtctgatctgatgtgacaatgttttatgttgctaggctggtggtactaaccagcagtgtaaaattccatttgtattttgcatgtaggtggatatactaatatactatactgttcctgtcctaaacagtcacaaactttttaaaatcttattactcagaataattttttatttcattacaataataggagtcaattcagagctttacagcccagttcgccatattctacttcatcattccacccaa

SEQ ID NO: 231260 - DNA, 500 bp, Homo sapiens
gacgaaacttcagataaatgcaatggcatctcacccattcagtataggtttctcaccagcaatggtgatcttttttattaaaaagagtcttagatttggttctattacaaccaattttgtagttatttttataacattagctgatgtcaagaattgaacccatctgatacaaagaactgacaaatcttatcatagctttggtgtctaagcagcatataaggctgtatacttatttgaggattctaagtcattttttgaaaatcagcagcacctattgacaataaacagaagattataaaaatttcaagtcgaagagcatcattttttaaaagttttctaggggttggcaaatgtttgctaggaagggctagatagtatgtattttagattttgtgggtcaaacagtgtctgtctcaactactcaactctttcatcaaagtgcaaaagcagccatagataatgcaaaagtgaataggtatggctgtgtcccaataaaactt

SEQ ID NO: 231261 - DNA, 473 bp, Homo sapiens
tagaaatttaataatagcctagaattaaacttccagacggcctcagcgggggtggcagaggagacttgtgaaggcagctgaagtgcagtggcttccctgtcttgctctggaggaagaatcagacgctggccacacatgagtgctgggtaaacgtgggcttaaaaatgcaggaagtaaacctcagggcatcactagaaggatagaaatagaggaatgactttaaaccactggaggaataaaatgaaacaacaaaatcaaggaaagaaaaaatatcactaaagaatggttaatatgaaccaaaatggcaggaaacagtcaaaccgtaacagtaataaccacgcatgtaagtggcgagtctcatattgggataaaaacataacacaactagttcctgctattttccatccacaaaagactcacccgaaactagagggacgcataaccgctgaaaacggggacgtctacaccaggca

SEQ ID NO: 231262 - DNA, 365 bp, Homo sapiens
atttgagcatgttcttgattgatttaatttaggaaaggaagagtggaagaattgttgcctttttgggcagcctttttcattttcccaagtgtgttctgtggtgtggctctggctgtggaactggactttctggagtaggagacagttactttatgttctcatgcagcaccctcactgagaattgataatgttagcacacgtgcacaatgccacattttaagctgcactgccatgggcgatttatccagtcactatttatttatttattgaggctgcaatttcaaatacactttatttatttgttacatcctccatctctcctctgtcattttgtatttgtattttttattttttttttttatttc

SEQ ID NO: 231263 - DNA, 432 bp, Homo sapiens
aatgtccttgtaaaaatggagtatggaaatacattctttcttactgtgtggtcttagcccaatttacccttctccgtgcttctatcctcaccttcaaaaatatagtatttatcttatctggtagttctgagtattaaagataacagaaatacagatgtttggcacatatttattgttcaataaataatgtcctgtcttcttttgtcttgagctttttattgtgtaaacaaaattgacccaaaccgtaactatggtggttctttaacttctgaacttctaatcgtgaatgcattgacagggaggtgttgaacacttttctgtgtgcctgggtgttgtgacttacttgtaagagatggaagctaatgtgcttgcggccaaaatataacatttttttttcttagcgatcggcagaaatgttatatttcagaaaac

SEQ ID NO: 231264 - DNA, 411 bp, Homo sapiens
ctctcttttttcctttaggtaatagctcccccaaagtttagattggcatacagctaatcagctcaagtgtatatttctcagcctcccttaaggctatatgtggtatgtaagttagttttgactaataggatgaaagagaaagtggtatttgcaacatataggttatcccctccacattactccccttcccactagccagaacatggctgtgacagcagaacccgtgcatccatcttagacaacatctcagccccaaatattgtaaagccaccatattggtcttgtactgcttatgttcagactgttacatgagaaaaagtaagcttttatcttctttaagccactattatttcggcctttcttaacagccatactaaaatgataaccaaaataaacagtagctcttgtgta

SEQ ID NO: 231265 - DNA, 469 bp, Homo sapiens
gaagaaaatgacaagtatcaaagacatttaggcaacttaataaagaaggttacatcatatgaagaaatcattgaatgtgctgaccaaaggcttgcaatatcccactcccagattgcacatttggaagagagaaataaacatttagaggatttaattagaaagcccagagaaaaagccagaaaaccaagatcaaaaagcttagaaaatcatccgaagtccatgaccatgatgccagctctttttaaagaaaatagaaatgatttagattaaacaagcctgaagattaaacagtaatcatttttgtcaaccactccaggaagagtcattactacatatgctagccaaatcaatccatgcagatgatatattaaaatctgtataaagggtaaagtcttacattccaaagatgtgattacttttcttctaatttcttcctgtgaataatcaaatatattctatttaacataaa

SEQ ID NO: 231266 - DNA, 812 bp, Homo sapiens
gcctaaatagacttggttgtcctaaaattttagaaatgtaaatctctaaaatcttacaggactagctctgagctaagtcgatcataattaacatgactttgtgttacaagagtcagtgtacttttgaacagttttccttgattatttccaaggaccacacaaagaaattataaatatatagattgaaataagtataagtaatttgaaataattattctattttcctaaactttcccacttgctatttgacaactaaatatatccttcaaaaactaagtatatctcagattgagaatgctgcagttggcttcagtgttctaacacttgctttgatactttttaaaatgttttagacttccagaaatgttgaaaaaatagcctagagttccttttgtatacttcagtcaatttcttctaatgttaactaacgtctaatacaaacataggacagtaattcaaactaagtaacatgagaacaatacgattaactgaattacaggctttatttggatttcatcagtttttccatgaagctctggttctttggagtctggcatgcaacaggccatttctaagctgttgtcctgctatgaggatttattgcctccagctcagttataactttattgccctttaatattacaaatagttaaatttatttatagatgcgattaagggaaatgaacttgatacagtcttatccaataacccctttaaaaagcaattatattaaaccaactaagtattatactattaaggaatattatgtggtataaagacaaatttaaagaaataaatgacttggtgccatg

SEQ ID NO: 231267 - DNA, 464 bp, Homo sapiens
ataggggaatagcctctggactttaaatctgttgcttagctactgatccacaatagctcccaattgacttgaactacagagtactagagaatttgaagatttgaaaaagatcatacctcaacagaaataaaaagtgaaaagttctatcaacagattgttctatacataaatcacttcatcactctcatcgaatagattcatgtattagtatattcattttttaaattttcatgacatcataaatacattgctaggtgatactgtattgtaaatatatattagaaaatacctgcataagctcttctcaatctttttcacgtatatatagagaggaaaattattaagtaaccttcatatttacttatcctcagttgtgacaacaaaagccatgtcaactgtcaggtgatatatattgtcatgcaccccaatctaccatattaaaaaattaaagtggaattcgtact

SEQ ID NO: 231268 - DNA, 672 bp, Homo sapiens
caacttagtgtttggattttaccctttagaagttggattcaagcttccttcttgaggtagcccctaagtgtcatgggctcaaacacccactaccaaaagagtctgctcttttcatggtagcttttggcagacctggaaggagattgtgtcacatggcctgtaaacaaaaccagtaattcactgggtgaagaccaaatgcctcatcaactgccaagcctctgtctgtctcccttagatcagtagcccatgatccctttacgaacctcagcctcggctctgcttttattgtttttcactgcatagcgctgcctttgctatgtcctttagttcaccatctatgaattggcaagaaaaattttcctgccaggcacagtggctcactcctgtgctcccagcactttgggaggctgaagtgggagcatcatgaggtcacggagatcaagaccatcctggtctaaccatgttgaaacgtccatctctacttaaaaatataacaaacattagctgggtgtggtggccggcacctgtagtcccagctagcttgggaggctgaggccggagactggtgtgcaccctgggaattggacgtttgcagtgcgcagaggtcgtgccactgcagctccagtctgggctgacagagcgagactcaggtctcaaacacaaaccacaaga

SEQ ID NO: 231269 - DNA, 493 bp, Homo sapiens
caacttagtgtttggattttaccctttagaagttggattcaagcttccttcttgaggtagcccctaagtgtcatgggctcaaacacccactaccaaaagagtctgctcttttcatggtagcttttggcagacctggaaggagattgtgtcacatggcctgtaaacaaaaccagtaattcactgggtgaagaccaaatgcctcatcaactgccaagcctctgtctgtctcccttagatcagtagcccatgatccctttacgaacctcagcctcggctctgcttttattgtttttcactgcatagcgctgcctttgctatgtcctttagttcaccatctatgaattggcaagaaaaattttcctgccaggcacagtggctcactcctgtgctcccagcactttgggaggctgaagtgggagcattgcttgagcccagaagtttgagaccagcctgggcaacatagagagaccccatctctacacaaaatttaaac

SEQ ID NO: 231270 - DNA, 339 bp, Homo sapiens
ttgggaggggtgagaagtctgaatcataagcctgagcctaagcaaggtgtgtgaagttgttgaggctgagaaaaataaaagtcagagatgacttatcttggcgtctgccagcccacagcaaggattgtcagctgggcaggttgtcagcgttgtggtcccattctgagaaattccctttctcagaaaccaggcatctgagagcatagggttgaactttggtgttttaggtgatgtggtgaagtgtttgtcaacttgctggctgagcctcctccacaccggtagtaactcttggtgcctgtgccaggaactgtgtcatccttgtgagtcacctgtcatgca

SEQ ID NO: 231271 - DNA, 426 bp, Homo sapiens
agagccttaattaggcaggaaaattaggatgttttaagaatatcaaactgaaagtgtatctatactttgtaatttctcagcctggagtaacttgaactttcaaaggaaaaaggaaagaattgagtggatattttttaaactattgcataataaggaggctgttgccatctactccaataagtctagagtgataaatgctccagtgggattattaatattattagcgatggtctattttcaaaagcatctgggaagtatcaatgcagccatattgagcatattttagtgtctaaatttaaaaaaaaaagaattataaatggaaaaggagaattctgccagctaaaaaagttaactcattccaaaaataaaaaagtcacatttttataatttgttccaaggatacctaaaggcagtaccatgatacag

SEQ ID NO: 231272 - DNA, 335 bp, Homo sapiens
tctcaaaataaacaaaacaaaaaacaaaataaactgtgcccttcataaactggactgtaatgaaattaaaacttgtgctcttcaaagcactgttcagataatgaaaaggccagccacagaagggaggaaatgggcagcccttgtgcctgagaaagggcctgtgtcaaaaccaccaagatctcttaggactcaatactaagagaagcaaccccagaacaaaggtgggcagacctggagagaaaagaagagacaggcacggccagtatctcaacagcagcggatgcaaattaaagccataaacacagaccacaaccccctgacagagcagctaggat

SEQ ID NO: 231273 - DNA, 748 bp, Homo sapiens
gcactctgggttgattagtgcattttattattgtgaaaagcatcttgcagagaaccacattctggtaccatttctggttttaaagggtggcctgtgtgggtatgtagaaaggacacggggccagcggtcccagacaggggcaccctgggagattgcaccagggctgggtgcgtgggcagttgtgtcagaggccgcgtgtgaatagtgactccgaagcctgccgcttcctgggaccatgtttatcccagtgtttatccctgttcacacacgtggttttgtttgaacacgtgactgttacgctttatgtggccttttgatttctccccacgcggttgtgcggtggatctggcggctcctcaggtggaggccggggccgtccattccctgctgctgggtggagatgttgtctccagttcctgcctttggcctccaggcacctggatttgagtgggtcagttctaggccacatcgtgcttgcatttgtgattcccgtggcccttatcaggttgctgcctcgaaagccttcctgccggccctgcagccacccctcatctcagccaacgccacatcagcgccatgggtgcaaagtcagagctcactgtcactcggatctgcatttctccacctctgcctggatttgctctttgggaattgtttctttgcatcctttgctggttttcggttgggtgagtcttttttttttttgagacggagttttgcttttgttgcccaggctccactcaatggc

SEQ ID NO: 231274 - DNA, 263 bp, Homo sapiens
taggagaggtagggatagaggggagtagtttccaagtgacccaatgcctaatccactgggacatcagtggatcttatgaactagaaatggggtgtagcagatgctgtctagagggctcccatgacccagttttgacttgggacttgtaaggggatatcttcaggcagtttcagggaaacactttcctccctaattaaagagatgcattgctgggattacaggtgtgagccactgcacctggccaataaattgtgtttgtaagc

SEQ ID NO: 231275 - DNA, 387 bp, Homo sapiens
ttttcaaacttgccttgcagttatctgtggtcatttgactgaaatctaagccaatggaatgggaatagagatatctgtgccacctacaccttcacacctggtcaatgaaaactgcctgcatgttctcccacctttcaactgatggcaacactagaactgtcttagcagcctacaggtggaaaatgtcagagttgccattgatctgagccccagaatttctgtgtagaaaagagccaccctaagctcttttcttttaagctggtgtcaacctaagcaccagccctagacagttattattgttcaacccactgaaattttagggactattctttactgcagcttaacatattgtaaccaacaacaacaaaaaaaaatttccatgttaca

SEQ ID NO: 231276 - DNA, 375 bp, Homo sapiens
agtggaggaattaagttttgctgctgcttgctgtgttcccagccaggagccagcccctgccttcaacgaactgaatggctgggagtatggggagtcctacaaaggtgaactgtgggatgctgtcaggacttacacgtggggattctttgtcctccacgaaaggcacaggaaaggccgatcaagcaggtcccaggaggcttccctgggggagctgcagggacaactgggccgggctggcgcccagacagcagcgcctgctcagactccggggatgggcaaggcagtggtgagggcggaggtggggaggcggctgccggccctggacctggactgctcccactccaatggaaggttcgcccccatgtctccctttta

SEQ ID NO: 231277 - DNA, 411 bp, Homo sapiens
agtggagagcaggagtcaaaaagagagaagaaaggggtacatgtcctttggaaaactgctgtggcttacatggccttgtttcaatggcccaggcagagaagaaagacacattcacaagcatagattcccatagcacagatggaccttgaaaatagaatgctacgtgaaaaaggccagacacaaaagaccatgtatatgattccatttatatgaaatgtccaggatggggaaatctatagagacagaaagtagatcagtgttgactttgggactaggggacctggggatgggcgagtgatagctaaagggtgtggggtttctctttatggctacaaaaatgttctaaaattgactacgatgatggttacacatatcgttgaatatactaaaacctattgaatcattcacttt

SEQ ID NO: 231278 - DNA, 519 bp, Homo sapiens
cttgattaagcacctgggcaggaaatgtcaaaacttctctttctcctctggaatgcgccttcattttacaggaaggctgcatcttccggtttgcaaactattcactagaataaagcctgtttcctccaaactccttttcagagaacttttgttcacagtaagttatgggaatcgtatggatgtttttgaaaagtacaagtttcaataaaggaggtatctaagcaattgcttattactagctattttaactggtaatcaggaaacaatatgtgaagcattttatgttctattatgactgtttattagttttcattgtttatctgtgctttatattttacaaaatcggttaggaatttttagcggacacataacacattataatgttttaccatttaaaataatggggccaggcacgtgtgtcacgcctgtaatcccagcacttcgggaggccaagacaggtggatcacttgaggtcaggagtttaagatcagcctggccaacacggcgaaaccctatctc

SEQ ID NO: 231279 - DNA, 948 bp, Homo sapiens
cttggccaaggtaacacaacctgcctgaccctctggccatgcacacgtgtggagtttgttcccgggccctgtgcctgttcaaagaatggctggacgtcggtattgcccttggtttctgccctgaagtccagtcagtcagcagttctgcttattctgaccctctctgtgcagtattacccaacacacatgcatttcctccttgccttctcagtattgccatcgtgaaccagaattgtcacctccaatttaaacagtgaaggcctttgttaggaagaggggcagggtgcagagggggatggttgctttttctaaatcacagctctgatcaaatccctcctaagcagaagccttccaggctcccctccataaggctccaggtgtttacttaccttgcctgtcaggggcttctgcagcttgcttcctacctgctatctccactcctctccaaaccaccatatcctgaggcttctagaaagcaaactctggcggcatggggttaatgggtctgtgtacccaagacactgtacctgggtgctgtcatctgcctgactgaccttcctgtgtcctggtccgatggtgtctttgatcctatagctaagatcaagacactgaaaatctctagactcaagtctgtgcttttgctgggataaagtttgtgttgagtacatctaggctgggtgtggtagctcacgcctgtaatctcagcactttgggaggccaaggcaggtggatcatctgaggtcaggagttcgagaccagcctggacaacatggtgaaaccctgtctctgctaaaaatacaaaaattagccaggtgtggtggcaggcgcctgtaatcccagctactcaggaggctgaggcaggagaatcccttgagcctgggaggcagaggttgcagtgagccaagatcgtgccattgcactccagcctggggtatagagtgaggctct

SEQ ID NO: 231280 - DNA, 345 bp, Homo sapiens
ggatgaagaaaatgtgctacataaacaccataggataaaaaataatgaaatcatgtcctttgcagcaacgtggatgcagttggaggcctatcctaagtgaattaatgcaggaacagaaaacaaaataccacatgttctcacttataagtgggagctaaacactgagcacacatggacataaacgcaggaaagatagatactgcagactactacagggggaagggagggagggggcatgggttgaaaaactacctattgggtactgtgcttatgcctgggtccaatttacccatgaacaatcctacacatgtatcctcttaatgtaaaataaaagctgaaacttta

SEQ ID NO: 231281 - DNA, 392 bp, Homo sapiens
gagccagactttgttattaacatatatattaaaaatcacatgggaggagttacgaatgtaggtaaaatcccaaatttagcactgaaactaccctctcctagataagcaacttactatatgaatatgtggaatattaatgttgcattttgtatacactcagggttctatcttaataaaagatattaaatttaaatttgtcaactgatttgtaacaggtttaaagatcttcattatcatcaatggtgattaattttgggtcacaaaagaagcttactttaaaatttaaaaacatattgaaatacacttcttctataaaataattgaacatcattagtacgtagtgtacagttagcaaagtgggttcctccaaagcatgattcacaattagggga

SEQ ID NO: 231282 - DNA, 500 bp, Homo sapiens
ccgtggacagcacacctgcgtgaacccagccaagatcgacagggcccatcatgaccaccagataaccagccaggacgcagatgcacaggcaaaaagaactggcttttgtttcaggtttcggggtattttcttacgcagcaatagctaactgatacaccaagctccgacaattatgccgcctttgtacccattggaagaaagtatgtttggcagaagccagtgttagtatggaccagaagtcttcagggaaaagtgctgagacttatttcctgaggtgtctgagtgactgatcttctatgtgcatcttcagcactggggaagagtgaggggtctcaccgcaagagatgctatggaataccaatagcaataataataaaataataacaaatatttaacttattattattagaaaaaagataattattgtataattagatacattattactatttaacctaagtatttctgtgtttagtaataaaaggaaaggagcttataaa

SEQ ID NO: 231283 - DNA, 601 bp, Homo sapiens
ggctacagagcttgggttttcccttagtccactctgatacatggtagttagactttataggacttaaggatgagtaggtttttgtggcttggtttgctcacctaatcatcaacgtactgtgtttcttagttcttaaaaaaaatagtttaaggccataggattacctgtatttttaacttttgtgcccttagaattttatgttagaataaaatctgaaatatagtttcttgtgactataattcccaaatgttatgtcaggcattggcaagccatgttatttaaaactgccagaagtatgttgccttttaagtggaagtatttgtgaaacgtatgaatttcctagtatccctctaggctgctgtgtgttgaatggaattccttctataagacgtgagattaggcagtttgccttaagctagcagaggggactagctattcattttaggaatgaatggaggccagagagaagcataataagccaaaacttaaaattcagaagggaaatagcactacattgtttaggaggaaactaaatctgtggcataagtctgaaggtaagacttggtaaaaagaaggggaagtctttgaggaagaagaattg

SEQ ID NO: 231284 - DNA, 336 bp, Homo sapiens
tcatgagggaggatctctcatgacccaatcacctcctaaaggccccccctcttaatacgattgcattggagattaagtttcaacatgaatttggagggacacattcagaccatagcatcatgcatttgcagtgggggtaagattgcccccaagggagcaaaaattgatcccttaggggtgataaaaatcttagatattacaatagtttgtggccctccaaagttcatacctacctaatacaaccttctttcctcatgtttaatttctcctgttaaggatgccttaactttaaattttaattttaattcagtaattcttcctggaggaataataatg

SEQ ID NO: 231285 - DNA, 301 bp, Homo sapiens
cctagaagacatggatacattcctggaaaaatacaactctcctagcttaaatcaggaggaattaggtatcctgaacagaccaataacaagcagcaagattgaaatggtaattaaaaattaccaacaaaaaaagtccaggaccagatgattcacagcagaattctactagacattcaaagaagaattggtaccaacccttttgacgctattccacaagacagagaaagaaggaaccctccctaattcattctatgaagccagcatcactctaataccaaaaccaagaaaggacataaccaaa

SEQ ID NO: 231286 - DNA, 452 bp, Homo sapiens
gctttatactgtttgttaaattctaacagatggagggacagatgtcagagcaatataatttggctccctgtctgattttcatcgttgatcacaatatgtgactgcctttcggcaaaactgagcacaggtgtacactttagactgcaacaaagaataatgtagaaaaggaaatttatcaaacttaatgacaagggagaaggagatatagaagacaaagttgaaactggttttctcccccagtgggaagtattgtattggaattagccttttaaagaattattgtatattctaaatgatgaaataattttactagtgttcaaggatgctgccaaatagcataaccttcaaatgtcagaatgttgtttaccatttatttggcaactctagactacaaccctgtgcattttccatttcttgtctaattaaacattaactctaattgtgaggaatcg

SEQ ID NO: 231287 - DNA, 458 bp, Homo sapiens
cgctcagggtttagtcagatgtcttgttttcacattgtgaggctggttgtcagacacataaaagtttttttttctccgtctgccaccctagttgatttgatgcagtcgagtccttgccaacacacttcatatcactgcacttaattggaaaaagagtgcttgcagtggcataaaacaaagggaggtctgaaagtttggctccaggagttttgctacgttcagatattctttggccatttttctttgaggctaagattgagattttggctaacataaaggggattaaaggatggaacggctggtgtgggctgtttttaccatggcctcaatagcagttcaacctatatatatatatataaaattttatatataaaatgtatatatataaaattttatatatatacatataatatatataagtattatatatattttttagagggagtctcgctctgtca

SEQ ID NO: 231288 - DNA, 1127 bp, Homo sapiens
tatgtccaactgcctactagacaattccctttggatatcttgtaggagtctgaaatttatactattaaaccaaagttaccattttcctaaaattgaattattttcttttggttagcaaaactagtttatccactcactgaaactgatagaatttccaagtcaaagaatatagagttttaaatggctttaaatgaccagcttttcaaattattgtgtagaagtgtagcccagtagagcgtaagagtgaccattttcccacacctcccgccaacaggagatattaagagcttttgaatatacactgcacaggcaaacaatgggtttgatctgttgaccatttgtattcttttatgagttgcctattatgtttatatgcctgttatgaggtgttttcatatttatttgtgagggtacacatacttgtgatattgaagtaccacactgtgttgtaatcattggcttaaacctctcttctaacagagtgcaagctctttaaaggctcattcacactgctttcccagcacctcacctaatttcttgttcttcgcacatcacttaatgcatgtttgttgaattgaaacttcagtgtacaggagattgaatcccggaggatttagatttgtagtatttgaattattattgttctattggggatttttattgggggagccaggcttctgttacatcagacattcacaggtcattgaatttcagtagcagttctcatgaatacaagaataggttgaacaacaccaggttatgttgtaatttagtagttgctgttcatctagtgttatctgcagttgtctgggcattatggcctacctgcttagcatcataacttagtaaacttatatgtatgaaaatggaatagttaccctctgagtatctagtaacaaatctttgaattgaatgtcacatgtaaggttgtttatgctaagtcttgttgagaagataggaatcgatagtcttttctgtttgccataatgacattgaactttgaagagagaatttctactgtgttacactccaccatcaaaaatgcataactgcgtcagtcaaccctgaaaaagtttatacggacaacttttgggatattagcaatcagtgactaacggtagtagaga

SEQ ID NO: 231289 - DNA, 489 bp, Homo sapiens
gagacagggtattgctctgtcactcaggctggagtgcagtgtcaggatcacggcttactgcagccttgatctcctaggctaaagggatcctcccacctcagcctcccaaatagctgggactacaggcacaccatgcctggctaagtttttgtattttttgtagagacagggtttcaacatgttgcccaggtggtctcgaactcctagactcaagcaatctacccaccttggcctcctaaagtgctgggattacaggtgtgagtctgtgcctggcctggagtgctttttaattactacttctcaggcctcacttaaaaccttctgactcagagtctcagaggcaagacatggaaatctgtattagcctttatttgaaaagaggtgattcttaagggcatctaggttcgcagactactggcctcgacaaactaaatgttgatttgaattggcctgttatcatcttgatcacattgtagttaagagcaagac

SEQ ID NO: 231290 - DNA, 277 bp, Homo sapiens
tctagctagatgtcattcttttggcctttttttaaaaaaactcagttttgttgattttttaaaaatattatttttctaatctctattttgtttatttatgttctattattattattatttccttcccgctgctaactttggtgttagtttgttcttctttttctagttttattgagagaaaatttaaattgtttatttaagatccttcttattttttaatgttgccatttaccactataaacttccctcttaatactgcttttgctacatcctgtaa

SEQ ID NO: 231291 - DNA, 414 bp, Homo sapiens
ccccctccgggctggggcccagcacctccgggctcagcgagcagatctgcacggtgtcgaaatggaggaggaagtcccgcagctccatcctgcacggtggcccagtcagaccctgcccggccccacctcgagggggtcccaagatcccggaaatgactcccagatcccaaagcccctcacatttcttaaatattgtcaaatacccttcaggctccagaaatgaaccccaaatgcctgggcctctagctctgccaaattcctccaagtcctcagacatgccccacaaatcgccaagattcacaagctgcccccaaatatcgttaaattgccaccaacccccaaatagcaagaccctcagactctaaattaccaacaagtacccttcagcccctcaacattgccaaatctcaagaa

SEQ ID NO: 231292 - DNA, 976 bp, Homo sapiens
gggggtaatcactgggttacaaaggtgctgctaagagcggaggagaaaaacccaattcccagccatgtgtctggtatgacatttcaccaacccatttaagtgtgcaggcctccaaatatctacctaaagattatgatagattaggcattttacactaaaaatctgtggcttcgtgtccactaaagcctgactggccagtgcctaaaagaaacagacgataacctgatccctcaggaacagatggtgttctagctttgtggaagtgaatttcaaggtatggagcacttgaggggtctttgaaacctgccaggtctcacatctctgcttttggtgaaaagctcatcaactaacagtagtcaggaatgtgcctttacttcctggggctggtctgttgaaattttgtgtgtggacaatggaaacatccaggagcatttctgctttcctatagcctcttaataattgatgccctaaagtcctatatcctttgattcctggatggtaccagatttcatgctgttaaatctaatctgcaaaaacctgagcgttaatctccatgaatagaagaacttgttgtttcttatttaaatgctcttttttctcttgtcttagattctgagcaggatttccaatacggtgttgaaagaagtagtgagagtgggcatctttttcttataataaatcttaaaaataattccaaaatttcaccattgacaataatgttaaccatgggattgtcctatagcttataaagaacatatctctttattttgaggtatattctttctatacctaatttgttatagattttatttggaatggattttaaattttgtcaaaataattttaggcatgcataaaaaagtcatgatttttaatctttttgttgtgtaaataaggagtatggcatttattgatttccacatattaaaatattattgcatcccaggaataaatccaacttgatcataataaatga

SEQ ID NO: 231293 - DNA, 616 bp, Homo sapiens
  misc_feature (519)..(519): n is a, c, g, or t
atctccccattctttcctctttcacggttgtataatcacatatatgctgtaaaacccacatcttgttaatgtgtatgttttaatgttttttgagtccaggtctgctggaaacaaattctttcccttcttgatatgtcccaaaagtctttattttgccattatttttgaaggctatttctgctggccatagaaatctaggttaacaggttgtttttttttttttctttcagctctttatggatgtcatcccattgtatttaacattctattttttcttttcttttctttctttgtttttgagactgagtctcgctctgtcgacaggctggagtgcagtggcgtgtgatctcagctcactgcaacctccacctcctgggttcaagtgattctcctgcctcagcctcccgagtagctgggactacagggatgtgcaccaccacacccggctaatttttgtatttttagtagagacagcggtttctaccatgttggccaggatggtctcaaactcccacgctnaggtgatccgcctgcctcggcctcccaaaagtgctgggattacaggcataagctactgcgcccagcctacaacaaatggagggaggaaggaaggggt

SEQ ID NO: 231294 - DNA, 1117 bp, Homo sapiens
atctccccattctttcctctttcacggttgtataatcacatatatgctgtaaaacccacatcttgttaatgtgtatgttttaatgttttttgagtccaggtctgctggaaacaaattctttcccttcttgatatgtcccaaaagtctttattttgccattatttttgaaggctatttctgctggccatagaaatctaggttaacaggttgtttttttttttttctttcagctctttatggatgtcatcccattgtatttaacattctattttttcttttcttttctttctttgtttttgagactgagtctcgctctgtcgacaggctggagtgcagtggcgtgtgatctcagctcactgcaacctccacctcctgggttcaagtgattctcctgcctcagcctcccgagtagctgggactacagggatgtgcaccaccacacccggctaatttttgtatttttagtagagacagcggtttctaccatgttggccaggatggtctcgacctcttgaccttgtgatctgcccacctcccaaagttctgagattacaggtgtgagccaccatgcctggacttcttttcttttttaaatagagatggggtctcactactttacccaggctggactcgaactcctgggttcaagtatgtgccaccatgctcagctaagactccatttttttctggtctgaaaacatggattagccataacccatgttgccattctcacataactaatgtgcctttattctcctgttgctctcctgttgcttgtaagatctcttccatcttcaattttcagcagtttgattatgatatgcctatatatgggatttttaaatttgttggcttatttttgttttgtatttaacttgcttgggatttgctgaacttcttccatttgtgaattgatgacctcatcaattttagaagttcctgagcattgtctcttcaaatatgtcttctgccacattctcttctctccttctgaaactccaattacatatatgttagaccatctgatattatcccacagatctgtcttcatattcactgattctttcttctgctatgtccataaactgttaagcccatgtaatgaattcatttctgc

SEQ ID NO: 231295 - DNA, 450 bp, Homo sapiens
tcagagcctcttatttgaagcctttcctacttttgttcactgccttattccacttggctgtaaaatatgacatacgtgttaatttaagtttgtggcttggtgtccattggctgtcttcctcaattagagtacagtcctctggggaggccgacttctattctatctcaaacccagccggtcctgcaccgagtgagggcccctgagcagtgactcgcttccttctcctggggaggagagggtgggggctgccggccgagctctctggctcttcagcagatcagtgattctgaggaggggcaagacttactcaagataagatcactgttcagaatgaagtacaacctcattgttctgttctaattagggattggtgtgtctgcataaaagaagcctgaattacggaagattttagaaggaggttgctttaattatttcctaatagtcattgta

SEQ ID NO: 231296 - DNA, 518 bp, Homo sapiens
tactcctgtttgctacaggtaaaatggatggaacatcagacagctcattatagagacaagtaagctccagttccaaagttggttgacagaacaagtcatgaccttgtgtggaggaaaatgagatcccgagtgaagtctacaatgtcattgactctgaagaaggactcagagacccattggtgtttaatgacccttactggcctatgcaatggaaactggtatgatcttcagaaatagatggttctttggcagtgttaagaaatattatttttgtcatgttctaatgcagtagataggcacttttatgcactgcctgcttttatctattggttttgcagagagagacttagcaaacttttgatgaaatattactgccatcttattaatgaacactaatccttttaatttgattacatccttagggtttgatttaatctataaaagacaccagtaaaaaccccaagatatttaaatttggtgtgtgtaaacagactcattacatagaaatgttgttgcca

SEQ ID NO: 231297 - DNA, 529 bp, Homo sapiens
tactcctgtttgctacaggtaaaatggatggaacatcagacagctcattatagagacaagtaagctccagttccaaagttggttgacagaacaagtcatgaccttgtgtggaggaaaatgagatcccgagtgaagtctacaatgtcattgactctgaagaaggactcagagacccattggtgtttaatgacccttactggcctatgcaatggaaactgatatcaagataactgcacattttaacctataaagaagccctataatctgtcggggagccacatggagagccttcacaacccagaaaatctaccttaaaagggttcttttatttggagcattggaaggctacatgatacttcacaaatgtgcttgttaagctaaattacaaaaaatattattcagtgagctaatgatggaattctaaaatatattgtgggttgcatttgatgacttattggagtccccaaaatattattgtaaagataaatattatatacattgagcctcagcttcttgataataaatcacc

SEQ ID NO: 231298 - DNA, 581 bp, Homo sapiens
cttccttccttccttccctctttctttcttttcctttcctttcccttctttcttcaaatagcatctggactggatctaaactaaactcacagcacatttattttgagtgtctgctttgaggatcagtgagactcaagtgaagtcttccccatatgtagacatgttactactttgagttactctcagttatacagttaatactctgagagtaactgtcaatcaacctaagcagtacaatctgtcagcaggctagcaggctaagagcggtctgtcagttactttttactaactttgtagttcttcatccatagtcatctttacgatttcactggaaataataaaaatacattcattcatccactcaataatgtgggatttgatggttaattgtttgtgtcaacttgactggatccggatgccaggtatttagctaaacattactttggggtgtgtctgtgagggtgtttccagatgagattagaatttgaattcatgggttcaataaagcagattgtcctctatggttgttagatgtttcaaagaatcatatttctgactggtattgaatcagatgagcacag

SEQ ID NO: 231299 - DNA, 366 bp, Homo sapiens
ctgtaggcgagagtgagccttaggaagggcgttggacgtggccaggatcacaacaccatgcttgcactcaccctgtgatctgcctgcctcggcctcccaaagtgctgggattacaggtgtgagccaccgcacctggccaagggtgacatttctaaaccttatctctaaattctgtgtccattattcagtattcctttaacttgtagagcatggctattacgtgtttaagcaacatatatctctaaaaagattcgaggccgcttataagagaaagtatattatgtgtaagcacagattcattaaaataagagtttaaaaatctggggtcaaatttagggggtagaggggatgagggataaaaaggtg

SEQ ID NO: 231300 - DNA, 608 bp, Homo sapiens
catgttataattccagttgaatcttggtatttttatgtcatctttgcagttctctagtgatgcgcaatgtgtcttcctttatgagctatagcgtgcattatcaagttggaaacgttactcactttagtacctggatggttataagcatcaaaaccaaacttctaagtctaatcacaaagcctattactttccctgatttaaaacagtaaaatgtagagaagatgatgatttttacatatcctaagaagcacttggcagagcaattagtttcataacaagtgattgttttttaaagctctctctagaataagaatgagtatcttgatgctagtgtcacttttaaatagctatggctccaggaatgtgtctgttcatgttattatcttaaatacacaccttatctatccatattgctatacttcagatgtgaaagtgaaaataaaggtgtgaagtgcctagcagacttgtatggatttatgtaaatcagaaaacacacaaacaatccattagtctcagtgctgaagccctgatatattaaaatcaaatatggattatttcctaaaaatttcacgtacacacataccatcatatccagtgatttacttgcc

SEQ ID NO: 231301 - DNA, 352 bp, Homo sapiens
ataattttttgagaaaatttataattagattttatcaaattcaagttgttaagtattgttcttttcttactgacattgtgcataaatggcttgagatcagagtttgcattatttttcattttgtgaaaattatcttgttatattggtaatatcatttaaaaatcttttttattcacagtagttctctaatctctttaaaaatatattatttctttttataagaactcatctgtgattatgggagttaaaaactttaagcttttaaaaaatgcccttgtttgttcagagcccttctgtttcttactcagaatttgacttctatataataaagagaaaactaaaattttactcc

SEQ ID NO: 231302 - DNA, 500 bp, Homo sapiens
caaggggctgaaagctggaagttgtatgaaggtgttcttttctcacaccccagctactccgccccagtcgaagaggctaattccgggcctcttataaaaataagaaagaaaaggtaaagaaaaagaaaatctaattatgtggcatgtttcagccaggtgttcctggttccaatgactcagaccctattggagccccgaggatctggataattgggcctgcctagacagagatgaaggatgccatttctaaaaggaggaaggggagaggaaagtccatctcttggggtcttgtagaaaatgccaaagaccaaccaagctaaattattgtgtccctgtagatctatttgcctatttacgtacagcaggctgtgggggtggggggtgagggaaggccgggaataaacgaccaggatggagcgggctggcaggagagaaaatgcgccccccactctttgcgggaacagccaacgggcctcctcagctcgcagctcaagcggccg

SEQ ID NO: 231303 - DNA, 473 bp, Homo sapiens
aatagtgataatagatctccattaatgcaatattgagcatatcttcttttgtttttcaaaccacttacaacaatgctcttattctggccctgtaataatccacgtagcagggaaggtattgctctttccatttacaggtgaattagcaatgaaaatgataagctaatacacacctcccaatagccagatgcttgagaagtccctagcacagtgcccagtcaagcaatgaaacaagtttctatccttccttactagagtgagttgccaattcagcatttaactggagagtcccatttcattgtagatgttcatttctagaacattcagtcctttaaagcaatgtttctagtttgggaaaagtagaatcacaaattaaaatgggtttctgctgtaggccaggtagatggcaggtgtattacattcattatctcaatccttataacaatatacaaagaagatatcttcattttcca

SEQ ID NO: 231304 - DNA, 475 bp, Homo sapiens
atattttaagataatttcagacttctggaaaagttccaagaatagtcaaagaatttccattttcttaaaccagattccaaatatcaacattttatcacatttgctttatcatttctttgctagcatactttattctctaaattatttgagactaagaacaaatgtgatgttcctttactcctaaatgtcttaatacgtatttcctaaaacatggacatcctcttacataaccacagtgcagctatcaaaatcaggaagttaatactgaagttattttccaatctaaagaccctactcagattttgccacttatctcagtagtgctttttatcacaaagaaaatcttagatcacatattgcatataggactgggggttgtggttcacacctgtaatcccagcactttggcctcccaaagtactgggattacaggcatgagccaccacacccagcctgacctgactttatcaaaaaa

SEQ ID NO: 231305 - DNA, 693 bp, Homo sapiens
gggttctctgttcattccccatcatagcccaggacagagttaatttagttcttagctaaatagagtcagtgcccagaagtatccaaatgagaatgaaatatattgataattctgttatccaaatgagagtgaaagataatgataattctggagcaaactggactaacatctttcagaaaaaacaatatatatatgtgtatgtgtatgtctgcaattatcaggataattcaaggaaaacaaatactattgctcgaattgatcatataattatggaaaatataagaagatgtgaaaacaaaggccctcttataaaatacaaagacctgaccgggtcaccaggctctgctgaaactgttcaatgacttcccagggttcttaggccagaaccctcagcctcctctcaaggcctgcctagtctgtctgtgctcttctctgcagcatcactggcaccacacccctccttgccctggcaagccagctcctctgcccttctttcagctcttgcaagacttcctcttgtttttgccactgagcctttgcacatgctgcccttgcttttacttaccctagctacttattctatagttttctactcaaatcccactttgggaggtaaaccttcttttacctcccagaacataatattttcatagtatttggctctaataaaaccaattttcttcccagaagcac

SEQ ID NO: 231306 - DNA, 397 bp, Homo sapiens
cgggctgaggaattcggcacgagggggtatggggtttcttcttggcgtgatgaaactgttctaaaattgtgatgatggttgcacaagtctgaatatgccagaaaccattaaatgagtgaattgcatgatatgtgaactgtttctcagtaaagctatgtacagaaagagaagcagacaaagaaagatgaaatatttttgcagtagagaagttgtagcagcaatgtgggatgctttgggcttcctggaagccactgagattgggtttctattggaaaaggaagagaaaggaggttgattccccttctctgtgatcatctattcagataagggttatgacctctgacttagatgataataatggcaggaattatctagatgtaacagtggggggcctccc

SEQ ID NO: 231307 - DNA, 372 bp, Homo sapiens
gctgggagagggcgcaggagtgatgttagtggtaatctattttattttcaggtgtgtttaggaactgggctcctggagacaaccaagaaattgggaactggaagtggtttgactgaaggagtaatgggagagacttcatcccaacggcgaatccctactgaggcctgaaaaacctaccattagaaattcattagcatcaatagagtggagagacagccaatggaatgggaggatatatttgcaaattgtacatctgataagggattaatatccaaaacatataaaaaactcaactcaaagtgagaaaacaactcagttaaaaaatgggcaaagagcctgggcaacatagtgagaccctggtctctacttaaa

SEQ ID NO: 231308 - DNA, 393 bp, Homo sapiens
catttggatattttcctgcttttttaatgtagagagatgtaataagctgggctattaaaataaatatagttcctgtatgaactttatttcaaggtaactaaataatagataagagaaattgatccctggtggaattccaattaataaaacagaaagaaagataaaatttgtataccaccattttgcaattcataatggaaaaattgatctagattgtgatcatcagtgactgctaaaatcattaggtgaaaactgatggacactttatacttaatgaaatagaccaacacctgaacccatgaccagcctgatcaataccaagagggagactttatgttcatcttgatgtaatagagaaggaaagagagagcatcccttttcagtattcttgaa

SEQ ID NO: 231309 - DNA, 141 bp, Homo sapiens
cctgccgcacgcccccatcacctacttgcggacattactccaacagttcttttctttctgtcctgtattatcaaatttctgttcttactggattttcatgctctttcatcattatgaaagcatgcagtaatttcttcatta

SEQ ID NO: 231310 - DNA, 678 bp, Homo sapiens
attagcaactcccaaaacacacatggtcccagagaataagaggaccacagctgagttgcttttcagacatcagacagctgtccttgtggatgaaagaaactcctttccaactttgaagaaaatgtccagggatcggggagcaggcatgtgatattcttcaaggtgccaccagcctttctcaataaaacatctccagtgggaaaacatggaacccagaaagggctggtgtgggaaaaatatgacaaggatggccggcaaagtaaacccatggtgaattcaaccctgagaaagcagatttcctggagtgtgcaagctttgcttaggcttagttttaataaataataaagagacacaattaaacaaactaaaggtgatcttgccccggatggctccttaggatctttagaacatggcaattcaatttaaacgcggagcccctactctgctggactgacaggaaattgaactgtccaggtcatgactcccgtgtatgaagtgcagctgtccaggtcacccctggaacatctttcacaaccttgctgagggccctgctaggaaccaggcatcttaagaagcactaggtcatctggaggcccttcccatcagtagttcacatgagcacgtcccagtctgcatggtctccttggggttacccctctgctattaaatattttctag

SEQ ID NO: 231311 - DNA, 162 bp, Homo sapiens
gttaatgacaaagttctccagttaaaggaaggcaaatagtgttattaggaatagattactatatgatgattaaaggctcagttcaacaggaagatgattgatagaactttcctacatttgtaacacagtcttagaagatattaaagcaaacattcaagaaga

SEQ ID NO: 231312 - DNA, 432 bp, Homo sapiens
gaacttctgcaactctggggtcgggcaaaggccccgccgagctccagctgctgaagtcgaggcgggagccccggactcctcgagcccgcggtctgcctgcgccgcccgggccgggccaagcccgcagccctgagagtccagcctgagacggccccgagactacgacctccacagccaccacctccaacgcccctaagccgaggagcgagaggggccccgcccgacggccaccgtccgcacccagtccctggccgcgttggccccgcagccgcccgcctcacctgcgtgtccgccgccatcctgccggggctgactccggaaccgcttccggaacgcttccgggtcacagcgtggcccacgcggcagggcgaggccgggagccagcgggggcagggccccgggcttggtgcccccgggcaggacggcggccgc

SEQ ID NO: 231313 - DNA, 583 bp, Homo sapiens
gcagtggctcatgcccgtaatcccagcactttgggaggctgaggtgggcggatcatgaggtcaggagattgagaccatcctggctaacacggtgaaaccctgtctctactaaaaatacaaaaaaatagccgggcttggtggcaggcgcctgtagtcccagctactcgggatgctgaggcaggagaatggcgtgaacccgggaggcggagcttgcagtaagccgagatcgcaccactgcactccagcctgggcgacagagcgagactccgtctcaaaaaaaaaaaaaaaagaaaagaatattaaaaatcacgtttgaaattaggtgagtggatcttgtgtgaatttaattttaatcagtgctatgcttctatgtccttaacttggaaaccaacccacaaatcaagatgcatttacattaatcatcaacaattctaaagatatcatgcaagtcattattcactcattcacccagtgtggtccctactctccccacaaggggttatggggagaggataaaatttgagaaaataaaaaaaaaaatccatgaaatacagtcatataataatagttaacatatattgag

SEQ ID NO: 231314 - DNA, 371 bp, Homo sapiens
gcagattaaagaaaaaatgaatacagaatagcaagatgtagccagggggagttgatttgcacggaaaacaattgaaaggggaacaggaggttggcaccagattccgtggaaagaaaaggaaatgaagaaaggggacaagtaaagatgttctttgttactcttcctgatattgaaacttaaaaggtactttttctgagaacatttattaagggcacaataatagatgtcataaacaaaatcctccacttccctaaacaactgaggtcctaacagctaatagtatttggctggaagtgaagctctagagtctgggacactgtgatgctggaagccagccccagcccctgtgcagctggacttgacccgaggat

SEQ ID NO: 231315 - DNA, 386 bp, Homo sapiens
aggaaggctgtgtttcgattgagtaagagggcaatctttgactatctgaaggattgtccttagtagagggatggacttgttttatcctttggaacaaaattagtcttgaaaatcaaaagaatgatgctaaacatgataaaatttcccagacatacaaatagtccaaggatggttcaggatacttccaaaggcagctcctcatcactaaacaaacagataaaatcaagataatgcttttaaaaattcattcaatgaattgcattacttacaatatgaagctagctaacctctctgaactcctgttgaattttatgaatctttgattgcacggaatagactagtgataccatcaataatgtctcaaggtcatgaggtgtttacatcac

SEQ ID NO: 231316 - DNA, 355 bp, Homo sapiens
tgtgttctgtgacttgcaaattattctgtgagaatacgatgatgggggaggcacagaactaggtttctgtggtcagctaagttgtggaaatgcagtaagatcatctgtcttttggaatcttgatctacatgaacataggaaaggctctgagaagctcttcattcacagacacacacacacacacaaatagacaaatcggacttcaacaaaattaaaaacatttgtgcctcaaaggaaaatattgagaaagtgaaaagacaacccacagattaggaaaaaaaatttgcaaatcttatatctgataagggtctagtatgtggaaaatataaaaaacttctacaatttaacaatgaca

SEQ ID NO: 231317 - DNA, 378 bp, Homo sapiens
gttgaaacttccttccccaacctcattcccctcgctcaccagaggtaacaacaatctaatctaatttggtgtttataattctcagatctgttttataataatgctatatatggatgaaaccataactatcccaagagatcttagaatttacattttccttttgacttatttcgacataatttcaggaagttttaagaataagaatacccacctgcccttcacccacattcctcaaatgttaactgttcccacacttactttttcgtgtctttctctctctcctcctctttcccccaccccactgtctttatcccctgaatacttcagaaatgtttcctaccaaggacatttacgtatataaccacaatctttatcagg

SEQ ID NO: 231318 - DNA, 724 bp, Homo sapiens
cagttgctaacatatctggttgtttccccattaataatgctaagattgacacctggatttagggggccatcatatttatttaaaattccttcaataattcaagcttattcaagctgcgagacttgcttaaagataagtgaaatatctaatcacaagggaagtctgttttcaaactatataaacaataacaggagtcataacagttgttttcttagaactgaatacctaacaattctgcagctctttcctcggtattttattataagcagattatatcttaattgttcccctttgttttcaaaggtttttctcttctttgcgtgaatcagtttatataaaaacatatatattcttattttcagaggtattctgctctgaagaacggttttactttataaggcatcagttccctctaatattagaaccttacaaagccacagcactttatatgttgcaaagcaccctctccatgaaaattagttctagttgatgcaacagacaaaacccgcaaatcacagtggcttaacactacagagagttatttcttgctcatgctagatttgatgtagctctcctgttggcatcactcttttctgagtagtgactcctggtcatgggctgtttctattatgtagctacactgattgctacacggggcttccatgccatgatgaagtgagaaaagagagcctcaggattcattagggtgttttcaggcttacat

SEQ ID NO: 231319 - DNA, 449 bp, Homo sapiens
ataaaagaatcttcccacagcaaataccccaggtccagatacctttaccagtgaattttactaaatattttaggacaaaatatgtaattttacgtaaactttaccagaaagtagaaaaataagagacaatgtcacccatttgtgaggacaacataaacttgatgccaaaatctgacaaggacattataaagaagaaaaattgcaagcagatctcacaaatgtagatataaaaatactactcacagagtgaattaacaacatggaaacagcaaatataaaaagaagatacactaccaagtgggacttattccaggaatacgagattggtttaacacgtgattatccatcattattcatcacatgaacagaatgttctgaatttatcaacttggcactcccactcctgtgtaagccttgaaaataaattttctggaatcctgtgttcagca

SEQ ID NO: 231320 - DNA, 554 bp, Homo sapiens
catagccatttctcattgactagagcaggccctagcgagcccagcccttagtctctgtcccctccaggctaccctccatggtagcaaccaggcggcccttttggaaacacacatatgaatatgttactcagggacttccaaaggctggctagcctttgcttcagaatgagatcagctcttcagcatggcagcggcagacagctcctaccgctggccccagcttcctctcaagctggccctggcgctctggactcctcacacttctgcctggcaaacacctacttggtcttcaagccttcattcttcatagaggctacttgggttctgccccacacctgtcacctgaattgtcattatgtgtgagctccttgagaaaaaatatatgacttggtcatctttataccctcagtacctagcataacacctggcatgtagtcagcacttagtaaaaacatttaaaaaatttttactgtctccattttgcagatgaaaataagaaactttaaatgaataaaatgtttgactcttggggtcaaggccataataattagaaa

SEQ ID NO: 231321 - DNA, 1463 bp, Homo sapiens
tacattataaagtgttgaacaaatggttttttatttaaaaaaaaaactttattaaagagatagtttggggcattttttctttacattattttaaaatgacaatatccttctatgttagaaatacaacaattttggaaatcatttctaaatatatttagcaccccactattcttaatgtcatgttacatgaaatttacataactagtttagaatcagcattactgggaaaaagacaatgttcctatataaattctactacatataatatatatatgctactgtttatgagaagggtcaataggataaagaaactttcaaaaaattatatacacatacacaaatacacaagaacattttatattcattattcaataatccttagaatgatgacaatgcttatatgtaaaaaataatttcactctagagcagattacaagtaaatttatctgccacatacgagaatctatttacttatgttatagcaacatctcttttctaaaataaaaacatggcaaatactcagcttgatcatctgcactatacaacagaatttactcggaatgaccttttgatcatttgcaaaaaattcaatttaatgttaatggatgaagatattatatcactgttggcaatatttataaaaatgtgcttatggctctggaagcaattcctaaaaagaggtagtaaatgttctgagacttcagaattgttagaaaaagttaagcttcagttggcgtttactgcatataagtatgttgacatatgttttcctgagcaaatggcttattctagatatatacgttggtatattcattgaaaattagatttattatgttataaaatgtgactaaaagcccatttaaagggcacatatctctcatcttttggttctaacgtgaagccaaatgaggacaggcgcatgattcagtttatacaataagaaaattgccccaaagtggatgaagcacacacatcagcagctcagccccactccgtacaatccaagtgcattcaacaagtgatatggtttggctgtgtccccacccaaatctcatcttgaattgtaactcccatgattcccacatgtctgtgggaggaacccggtgggaggtgatttaattatgggggtgggtctttcctgtgctgttctcctaatagtgaatgagtctcatgagatctgatggttttaaaaatgggggtttctctgcagaagctctctttttgcctcctgccatccacatacgatgtgacttgctcctctttgtcttccgctatgattgtgaggcctcctcagccatgtggaattgtaagttcaataaacctctttgttttgtaaattgcccagtcttgggtatgtcttcatcagcagcatgaaaatggactaatacaacaagtaaatcactgaacatttaatcccagcagttctcttttttcaaacttctcccgttgattttgtgtcagcc

SEQ ID NO: 231322 - DNA, 442 bp, Homo sapiens
gaagaatgtaaactccatcctatcttctcctcggccaatcctttgcctttctgaataagccaagaggttgccccacacctcaagctaagacacatatttggaactcactctgcccctcttcaccttcaaggaaaactggtttgttgctacctctgcccatacctgaaacccccgggctctccagcgttggaactgtggctgctccgagagggggagggcagacgacatgtagcaggttaagaccggggcaaacctgcacctcacacaagcatgcaatgtcctggggtcaatggggtaaagttccaagcgagtggaaggtaaatcacgactgtggcaccggagccggaacacccccgcgagcaggccttgctgggtagttccgtgcggggcggaccgcacagccctatcagcttcctggccacagaaacgccgcacgcggccg

SEQ ID NO: 231323 - DNA, 187 bp, Homo sapiens
acacgtgcagacctgggcacaaggcaccaggtcataaaggctttagaagaacccggctggagagcaccacagacaccgcctgtccagctcacggtcacagttcaggatccttgtcctgagcctttgggcctcttggaatctgggtggagggagaatctggaacttcccatcctgtccaaccctctcc

SEQ ID NO: 231324 - DNA, 445 bp, Homo sapiens
ttatgaaattaaaaacagctttcatggttatcttcaaaaacaaccaatcagctcaaacaaaagcttgatttatacttttcacagagacatttccttaggtcaataaagctgaatccctgggtcacggggatgaacttgcgtctttaaaatcacttgcgttgagcaagagaaaagggcagcatcaacgcacgctttagccctgatcaaagcctctaaaggtcaccaaaggcagggtctggcgaagccggtagaatcggctcccggagaacaactgaaagccttttgcagagcccacgagtcacaggccggcccgaccgctttgcgtgtctgtacattctccccgaaaccccaggctgctcatctttgtgttgagctttacaaatggaagttttggagagaatatcaaagttcaaagttttctagctctgacgaaactaggttaaaa

SEQ ID NO: 231325 - DNA, 614 bp, Homo sapiens
aactcgcacccgagctgacacacgatggaaatagaactgaataataattaacactattttccagtagggtaggacaattgttatttaaaacatagtccctatagctttatttaaacgtatctagttaaggttaatttggcatttaaagtagtaaatcaggaacattctcctaacttggattttcttgggaaatgcactaaacaggacaattattcctgaaaacctagtgaccttcacaggaacatggcgggacctgtgacactaagtaagcttcagtgaaaactgttcacggtcgtaaccgtagaagtgttgccaaatctgtttccatactctctttgatcatcatcaaacattctcaaatgtaggcaatgctaacactaattatagaaattaagaaaatgtgggctcctgtttgtaactaaacggacgtggggaggtgcacctcctgtcactgaggggtgcctttcatggacagtgatgctttgctttgaatggagagggcgaggaaccttgacttacagtgactatctaaggttgtgataaatatggcatttcaggttttttttcttggatttcccattaaaaatagtcttgtatcttgcaaatttttaata

SEQ ID NO: 231326 - DNA, 428 bp, Homo sapiens
gtgttgattttagctagaaacccaggtgaatctccattttcctgtgaatctccattttaccataacagagaagctgctttttaaaccagtaatttcttcaccttcccacccccacttctatttattaaattttaaaaatgtagcctgatttgggtgtattcttaaagaagtcaagtgtcctttctccatttggtacacagttactggttttttgagtgatatatgtacaagtcacttaaacttcttagagcataaagagagaaagtgaaaacttaatttggagggcatactcgtagaccttgcctgactgtgctcatgtccaggcaggggggacagtgtatgcaagaataatttggagttcctgccagctctaaccagcttcatcagtggctggataaattgcaggactctaaacatttccctgaaga

SEQ ID NO: 231327 - DNA, 113 bp, Homo sapiens
caggtaaattccttttactcctcatgatgtttctttaaaaaattttccaaaatgcaatctgtttactaaaaacaatataagtattcaaaacaatccacaattgagcattttgt

SEQ ID NO: 231328 - DNA, 395 bp, Homo sapiens
tcagctgtaagatggaatgaacagtcccatccttgtcacgaggatttggtgagataaatcctggtgtctggcacacaggaagcgctcaacagatgctcatccccttctcctgtgtggggtccatggagatactaggcccaggcctcccttagaggcatctagctctgtgctgtccgctatggtagtcatgagccacacggaccattgagcactgaaaatgtggctgtccaaaattgagatgtgctttaagtataaaatgcacacaccagattctggtggcttggtatggaaaaaggaacgtaaaatatctcagtaataatgctttatattgattatgtgttgaaatgataatatttttgatatattgggtgacataaaacagattatgaaagtta

SEQ ID NO: 231329 - DNA, 333 bp, Homo sapiens
gcgaaagggttttttggaaataactgattaactgtatttctttgtcccaggttatggactttgtgactgatctagaattcacagttcctgatcttgttcaaggaaaagagtacttatttaaagtttgtgctcgtaacaaatgtggccctggagaacctgcatatgttgatgaacctgtaaatatgtcaactcctgcaagtgagtacattcttgatgatttcttacctaatcttgttgcctgtttttgcttttagacctagagttgaagttatggggcaaggcaggggttggcaatgtgaagagaactgcataggtggcctgtgtaagactgac

SEQ ID NO: 231330 - DNA, 175 bp, Homo sapiens
gcgctcctggcagtttctaggacacaataggtattcaacaagctcttgttcatatttacctttaaaaatttccctcagtggtattaggtatatttttgctttcctacttttattttttcactttgaagtactttggaggcaggataacggactaaatagctcttatccctcacgc

SEQ ID NO: 231331 - DNA, 511 bp, Homo sapiens
agacatagcttggatagggtagtgtgaattggagggtgagaggaaaaaagaagctagagataagatgatacctggtgcatagagaagaaggaaactaggatagactgcatgctagcctacccacagttctcactcccttcaatcttccttttgttatgagcaggtgaccagttatatctatgtcccatgcaggcctttaccaccatggaaatgagaatcaggcacaaccatgaacaacactgagccctgaatgctcatgttaatggagcaataagttatctatttcaaaaatcccactttgtaagatccttcaactccttaatttatatttcatcaactctgtgaaattctaccttttcacaaagaatattctatgggaagtttatagatgtacaacaacaacaaaaaagtcggaatattctggagatagggttatggctgtacaacaacgtcaatgtacttaatgccacctaactgtacacttaaaaataaagtgataaatgttgaaaaa

SEQ ID NO: 231332 - DNA, 523 bp, Homo sapiens
agttagctgggtgtgatgatgcatgcctgtagtcccagctactcaggaggctaaagaaggagaattgcttgagctcaggagtttgaggctgcagtgacctatgatcgtaccactgcactccagcctgggagacagagtgagaccctgtctctttaaaaaaaaaaaaaagaaaaagaaaaagaacttggcatttgtccccccatccttccctaaagccccaggggtaaacctaaaccttcagagtatttattcattcaaagcactttttttttcttttttcctttttttgagacaggatgtctctttgttgctcaggctggagtgcggtgatgtgaacacagcttactgcagcctcagattttggggcctaagcgatccttccacctcagcctccccagaagctgggactacaggcatgcggcaccacgcctggctaatttttgtatttttactagacatagagtcacttgagcccaggagtttgagaccagactaggaaacatactgagacccccatttctgg

SEQ ID NO: 231333 - DNA, 479 bp, Homo sapiens
ttgatgctgtgtcctccagaggagagaaatgctgtgatctcacctggtggatggcacaaggcccaactgtcactgaggaggggaagacccaggaagaaaggtcaaaagtcaagcaaattgcctcactatcctctcaagtccttcagagcctcaggatcccctgtggaccctggaagttttcccccatcttactcaggtcactcctttctccgagaccttctaaactttgaggaaactaagagacctggccctaagcatagatgggacaggatggtgtaaatgtgcaacacaaaccagcaagacacaggtactctcctctaccttccctgcagagcaaacagtgttgacagcagtgaagatgatgataatgatgacaactgcagtgttttggagagcaaatacctagggccagctattttacagatatccttatgttactatccaaagaaactttataaagagacgatggaaaatcaaag

SEQ ID NO: 231334 - DNA, 648 bp, Homo sapiens
gtggggaccccatctgtcttgttcacggccatttccagcacaatgcctgacacatagtaagtcctcagtaagtaataactgaatgactgaatgagcaacccattttaaagacaaatacataatcagatcaatctgtaagaatttaataagatcccatgaaatgtgatttcaaaccattttttttcctaatagtaacttcacattgcagaaacttggtaggcctattttggccttatgatcaaaattaatatcaccaataataagacatactggtaccatgtacccattggtgaggtgtgcccagaagacatcatcgcttcagtggtattcttgccaaaaatccacaatctcaatctaatcataagaaaacaccagacaaacccaaactgagggacattccacaaaataactagtctggactctccaaaagtgtcaaggtcattaaagacaaagaaaacctgaagaaatgtctcagtgtggagaagacgaaggagacataatcactacatgcaaagtggaatcctggattggatcctggaccagtaaaacaacagagagtagtgggaaaactgcaggaatttgaataatgtctgcaaattatttaataatagtttaccaatgctgatttgctgggtttggtaatagtat

SEQ ID NO: 231335 - DNA, 932 bp, Homo sapiens
atgtgggaaagtgatcgatttttttttaacaccattgtcaacataaaacaactcacagagcagaaaaactctgtgagtgtaaaatatgtagggaagccttcagtcattttggtaacttaaaagtacatgaggctgggcacagtggctcacgcctgtaatcccagcacttagggtgggcaaattgcttgacctcaggaatttgaggcctgcctgggcaaaatggtgaaaccatgtctctacaaaaaatagaaaaagtagcaggtgtggtggtatgcccctgtggtcccagctacttgggaggctgaggtgggaagatctcttgagcccaaggggtgggggttgcagtgagccaagatgcactgcaccccagcctgggcgacagagccagaccctgtctcaaaaaaaaaaaaaaagtacatgaaaggattcactctggagagaagtcatatgaatgtaagaaatgtagaaaagcattgagttctctcaggtccttgcatagacataaaaggactcactggagagatactctataaatgtgtgaaatgtagggaagtattctttaatgttatttcatttcagatagaaataattctcattggagataaaccctatgaatgtaaacacatagtaaagccttaattttaagcctcagtttctttcaaatacagttatcccctaatatttgcaggagcgtggttctaccaccccctgggcatacataaatcgacacatgccaagtccttttttaaaaatgacatatttggtacaaaattacccggatgtgatggcacatgcctgtaatcccagctactcaggaggctgaggcaggataatcacttgaatccgggaggcggaggttgcggtgagccaagatcgcgccactgcactccagcctgggcagcaagagcaaaacaacctctgtcacacacaca

SEQ ID NO: 231336 - DNA, 457 bp, Homo sapiens
ctaaatagccttaatgagttgatagcatgcatagccagcttacaacaagatgcataagcaagttgcagagaagcagggttccccgaaaagcagtgctgggccaggagtcctagacagccactaatcctgtgtcttttggcaagcattcccaggccccaggctgcttgtgtgaacaatgcgggtgtgaggctgggtgattccactgatccctgcttctataaaatggctggagcaggtgtgtgagggagggagagatgctaccatgtgggcaacttcctaatgttgttggcactgggcactggggttgggggaggggacaccaaaatgaataaaaagactgcgttcctgtccttcaggaagttacaattgaattggcagataactaggcacatacatgtttgacagacacatgcatttgaccttttaagatattttctcttccaatcatagttcgcaa

SEQ ID NO: 231337 - DNA, 453 bp, Homo sapiens
gtaggattggtatcagctcttctttatacatcagtagcaatcagctgtggacccatctggtccagggctctttggggttggtatgtttttttattactgatttaatcttggaactttttattggtctgttcaggatttcagtttcttccttgttcaaccttgggaggttgtatgtttccaggaatttatccatttactctaggttttctagtttgtgtgcataggagtgtttattatagtctctgagggtttttaaaaattttttgtggggttggtggtaatgttccctttgtcatttctgactatgtttatttctattttttattagcctacctagttgtctctcaatcttatttattcttttaagggaccaacttttggtttcgctgatcttttcatggatctgtttcattttgttgttcatgtgtctgtttcattccgttaagctctgat

SEQ ID NO: 231338 - DNA, 911 bp, Homo sapiens
ataaatacaaaattagccaggcatggtggcgcatgcctgtaatcccagctactcgggaggctgaggcaggagaatggcttgaacccaggaggcagaggttgcagtgagctgagatcacaccattgcactccagcctgggcaacaagagtgaaactccatctcaaaataataataataatataataataataataggcactgttttagtggatggacaggtgagaaatacctacatttttcagtaaatagtgtgtttaccctggtgtagtgtgaagaatgtgaaaaaacttagtcttttgattttcactcagacatctagccgtgtcatgtttcaaccaaatgacctagaacaagtctcattttgtttttttttttttgagactccgtgtcaaaaaatatatatatgtatatatagtcatgtcagaaacatcaattatgaaatactcttgtttgcagaattatacttccacaagtcttcccgaaaggaagaaattcagaacttttagtgaagcaagacatggagctgagcatgatcaataactatgtcagtgattcttttgaggtgtccactgtgtgggccttttttctggcacacccttggttaatcagtgcttctaactactaccctctttccctggcagtttggcttgctgtatcctttctctgctttctgctctaaaatcagtccgtgggtttctgctcttgtcaggtatcctgggagagagattggctccaaggctactctgccattgtggcctcttttctatcagcaggacaccttctaaagcagtctgattggagccaggggctggtgcttctgggcaggagatgtcatttgagttctttgtgccacccccatagcaggtgcctctcctacattttttcccccaatgttttattatgtatactta

SEQ ID NO: 231339 - DNA, 304 bp, Homo sapiens
gcgcctgtagtcccagctactggggtggctgaggcaggagaatcgcttgaacctgggaggtggagattgcagtgagccgagattgtgccattgcacttcagcctgggcgacagagtgagactccgtgtcaaaaaatatatatatgtatatatagtcatgtcagaaacatcaattatgaaatactcttgtttgcagaattatacttccacaagtcttcccgaaaggaagaaattcagaacttttagtgaagcaagacatggagctgagcatgatcaataactatgtcagtgattcttttgaggtg

SEQ ID NO: 231340 - DNA, 639 bp, Homo sapiens
ctgggaaagcactgtgataatgaaactgaaaccctggagaagaagagtggtcttggcaatcgggatagaaggcatagagggattcaaaggtaaaacagctgtttgtcttgaaatgagtatccgtcggagggctgttttcaccccctcatgtcagcataatcgctcacaaacaaggtttcagaattaaagactactgtttatacggggaggacaggctctgacttccatttgagataaagtgattctgtgggaagcgtcatgagtgccatgctgggttcaccagttataaaacaggtgaatttcacattgcctcgtatcacctcttttggtggaattttcagttagtaaagagttccttttgagattgcagttgacagaaatttcttatgttaccctcttggccagataaatataaacatgaaaatcattccacctgggtggtggtgaatgtgttaacgtgattgtgaccatcactacacagtgtctgcgtggatcaaatcagcacactgtacacctggcacgtgtgcagtctctatttgtcagttaaatgttttacatgtttttaagaagatttgaaaccaaaaaataaagaatttagaatggtacattcctggctgaataaacaactgattctactca

SEQ ID NO: 231341 - DNA, 516 bp, Homo sapiens
gaaaaggaagactttttttttcaacaaaatttgttgttctgttaattacatttctattgttaaaaataacagaaatcagttcaagaatgtttaagaaaaagtgagcatttttggaaggatagtggagctcatgaaatctagaagttgaacaatccagctctacaagggcatgtggcagctgcagtatgtggacacaccctccagaatagcactgttgagactgactcactcccagctcccaatcctgtctcaggtcaatgcttgagagagataataggtctgattcaacttgaatcagatattcactcctgctccaaccagttgtggctgtggagttagagtcacatagcaggaacacagttgctgataagccatttttgtggacagagtgggtatctttaagagttacctatgatcaattcttggtcacattgtgaggcagttgaagtttcttttgtgtcctttatatccccctaacaacagggaagttttatcagtaaatgcctacaaaaaaaa

SEQ ID NO: 231342 - DNA, 920 bp, Homo sapiens
gagaattcactggcatgcccgaacagtgggctcgattactacagacctcccatatcaccaaactagagcaaaagaagaatcctcaggctgtgctggatgtcctaaagttctacgactccaacacagtgaagcagaaatatctgagctttactcctcctgagaaagatggctttccttctggaacaccagcactgaatgccaagggaacagaagcacccgcagtagtgacagaggaggaggatgatgatgaagagactgctcctcccgttattgccccgcgaccggatcatacgaaatcaatttacacacggtctgtaattgaccctgttcctgcaccagttggtgattcacatgttgatggtgctgccaagtctttagacaaacagaaaaagaagactaagatgacagatgaagagattatggagaaattaagaactatcgtgagcataggtgaccctaagaaaaaatatacaagatatgaaaaaattggacaaggggcttctggtacagttttcactgctactgacgttgcactgggacaggaggttgctatcaaacaaattaatttacagaaacagccaaagaaggaactgatcattaacgagattctggtgatgaaagaattgaaaaatcccaacatcgttaactttttggacagttacctggtaggagatgaattgtttgtggtcatggaataccttgctggggggtcactcactgatgtggtaacagaaacgtgcatggatgaagcacagattgctgctgtatgcagagagtgtttacaggcattggagtttttacatgctaatcaagtgatccacagagacatcaaaagtgacaatgtacttttgggaatggaaggatctgttaagctcactgactttggtttctgtgcccagatcacccctgagcagagcaaa

SEQ ID NO: 231343 - DNA, 662 bp, Homo sapiens
cctttctcctcctttgccaaagaagacgacccactcacctcaccgaattgttcctcatgtgggttcatgggagacaaaatgtttttagcaggagatgaggcatttgcttgacaagaacatttctgagctgaggcttctggttttaactttgtcaaccagcaggcagcatttctctgactgtaaatctgagttaatttacagacatgctcctaaggaaggaaaaactgaatcagtacccttgctcctgacacagagagaaagtcaccaccaggagaaaaagaaaaaaaagatctcaggtttcaatgagataatgaacttgtaaccacctgaatatatcaacgagtacaaacaggagcactccttccttccttatagcctgcaaagagatggtgtcattgagaagagattactgtttggaggaggggtcaggagaccttttctggaaagggccagacagtttcattagtatttacctaatgtcatcttcctgtttgaggaccccatctgggataccacagcacatttggtcatgtctcctgaggctcctcttggctgaattcaggaaagaacttgagttctacttttgcagtgaagaacagagaacacctgcagaagctgagaatgaaatgagcccaccaggacttagcaaccgtcttgctgag

SEQ ID NO: 231344 - DNA, 444 bp, Homo sapiens
taagtcaagacaacaacaaaaaaaatagtgccctgcttgaaccaaggagaagatgctctgtgttcccaagagggaggatacagaagagaggaaaggaaagattaagaaaagagattggaggaattagcagatgaaataaagctgagatccacatgcaatgaagcaaccattagaaattccaccatataagactagggatgcctgatgtggaatttgaaaatcttcttgctgctgtgatatgacactcgcttttgtccctaaccacctcaacccatcctcagtaaagtctatcacacttatgaatgctttgtgtgaaagttttgttttgttttttaggaattcaggaaagaacttgagttctacttttgcagtgaagaacagagaacacctgcagaagctgagaatgaaatgagcccaccaggacttagcaaccgtcttgctgag

SEQ ID NO: 231345 - DNA, 571 bp, Homo sapiens
gagagccagttccttaaagtaaatttatctctctgtttctctctcttattacacacatgcatatacatgcacatacacaacctgttggttttgtttatgttttctggagaacccagactaatacagggagtgaccccggaccttagccttccagcctgcaactcaacggttcaggggaatcatgcttcctgacatgtgatcatctcaaccaggaagaagaccctgtattaataaatgtattaactaaatatcttgcctgtaaattattttatgctctcctttgacctttttgagaataatgaacactatcatccctggacttccttttcagaaatgcccaagcttggaactgacagatgtattcaacataacaaccaaggtctgcattcaccagagtgatctcatgggtgggaagctgggcacaatacactcttgggactgtacaaatctcaggctagtcacagtacgtgtcactgctccatcctttgaaaatatttttggtagataaaagcttgaaaaaaatgaacattataggtggtcctaagatggggggaaattaaccaagaataaa

SEQ ID NO: 231346 - DNA, 816 bp, Homo sapiens
taagagacagggtctcactctgttgcccaggctggagtgcagtggcgcaatcatagcagcctcaaatcctgggctcaattgatcctcctaccccagcctccagagcagccgggagaaggggatgggcagctttccccactatttcactttactcatgcaggatttctgagggccccatgaaactagctttctgtctcacagagggacatgaatcctggataaatcagccaatgtttggttcagaaattctcctagagtgtgatcatctgatatgttgaatgttctaacaaaatagaaaaaggaggtggttgcggtggcttatgcctgtaattccagcactttgggagaccaaggcaggaggatcacttgaggccaaaatttcgagaccagcctggacattttaagcaattcccacaccaaagaaatccaccagccaaacaagtctttatgcccaaaagtaaaagtagcttctcagattttcagtcatgaaacaagacaccattaagaagcccaaattctaaaatatagtgagacatcctctctataaaataataataataattagccgggcgtggtggggcgtgccttggttccagctacttgggaggttgaggtaggaggatcacttgagcctgggaggtcaagactgcagtgagccatgtttgtgtcaccgatctccagccaggtgatagagactttgtataaaaaaaaaaaagaagagtgtatatgcatcttaattgtatgattaaagacaactattaccctggcttgtgaattctacttctaaaaacaaggaattgtttttaaaattttttt

SEQ ID NO: 231347 - DNA, 320 bp, Homo sapiens
ctatacttcaccctgccctcggtctcctaagataagccagacaacatttgcaaaagcttttcaaatatatgaagaattttggggaagccaaggctggaggatcgcttgagcccaggagttagagaccagcctaggcaacatggtgagacccccgtctctacaaaaaattaaaaattagctgggtatggtggcacgtacctgtggtcccagctaataggctgaactagaaggatcgcttggacctggaaggtcaaggctgcagtgaaccgtgattgtgtcagtgcactcaagcctgggtgacaaagcaaggccctatctcc

SEQ ID NO: 231348 - DNA, 452 bp, Homo sapiens
agctagaaggataagaaatgatggtcaggggtttcagaggtagcatggtttctgttggtgataagtacctggaagagggtggctgagttcaggaggcatttaaagaactgagaagccaggttctgggagagcatcatgccttcactgaagacacccagggtgatagcaggggctggggcagaaaggaaggagcagagtttagaatcttcctgaatgtcagagacagtgaagagagagtcaggatggtaaagccagctgccataagcaggggctcagaagggtagaagaataaggcctgaaagttgcaaggcagcctcttactgactaaattttaaacttagtctctttgagcttgatgtcttcctctgataaatggtggtaagcatgtgcacgttatcacagagttcaaatttggtgagtcagtgtacccactgcattgcccagtaatacta

SEQ ID NO: 231349 - DNA, 553 bp, Homo sapiens
atgccactccacgcccctgcagggccccctgcccccggcaccctacaccgacaccggcgtgtcacccatattgtgacatcatcgtaatttctaatccactcagcccacaggtcgcgggcgtggcccttccctcactgtgtgcgttcttgccagcatcctcaggttcccgagccggtgaccagggacctgtgcgggaaagcgtggggctctggaatttgatcgcctttggtctaacaaagccactcagcttaaatgcagactccatctgttcttccaagccttctgcggatgataggggaggaagagcaatagccgttctagactacacagattgcagttaagtgttgcttttgttctcagagcacgtgctccccagagcagcactgggttctttttaaaaatcgaaaaaggagccacaaggtcactgttctccctgacctggatagctcagaacctcagcaaaggcacaaaggaaattggtctgaccgtgccttagaataactggccctttctctcacaaaaaggggaaaaaaataaatgaaatgaacatgga

SEQ ID NO: 231350 - DNA, 409 bp, Homo sapiens
ccgaagtgtcacaggatgaatctatgctatttggagagggagtatacatttaacttgaagcaatccctggaagaaaaattctactagcagagatgctctgagcagagagaaagcctgtctatatagtgaaagaatgaaaccaatacattgaaaaaaactgagaagagaaagaggtagagacttcatctgatacaagcatgcttgaaacaagagacacctgtatgattccatcttcccaggagctagcaggcagttcttgttgagttcaagccagttgagaccatcaacccttcaactgagcctgcatggccctgttttcagggaggtggatttgcgatttgttctccttctccttgctcagcagcctggtaagcaatctcacaaaataaaatcttttcttttttgcaaa

SEQ ID NO: 231351 - DNA, 509 bp, Homo sapiens
tgaaaaatttataatcagctaaatcgaaaatttggatatttgagagatgaagtttgtgagctataataaatgctttctttaaatcataatgaagcaaactcagtaattcacaaatgcttattaatatgttaattacaaggaatttttttccttaaaatgatttaatcagcccatttttactttctcatttttctgtatatttgaaaacaataaaactacgttgtttaaaatatatttctaagatggatcactaactaaaattgactttattttaactgagttctgtggtacatttgaattttttttaaagataaattattgttgggctgttcacattattaaaaatggttctctgatttcagaaagatgtatttttttagaacaaatgtttttatagagtgaactcttccaatgcatgtaaaatgtaatttcatttagaaaataaattttattacaatgccttgctttaagattgtcaaataaaatgtgaaataccacacagactgata

SEQ ID NO: 231352 - DNA, 435 bp, Homo sapiens
agaaagagattatctggaaagaagaaaataagtagttgattaaaagcaacagtggaagccagaaagatagtaaataatatcttcaaagtcctgggagaaaatagtgatagcctagaattgtgtacccagaaaatccgtctttcaagaatgaggggccaggcgcagtggctcacgtctgtattcccagcactttgggaggccaaggcaggtggatcacctgaggtcaggagttcaagaccagcctgatcaacatggtgaaaccctgtctctactaaaaatataaaaattagctgggtgtggtggcatattcctgtagtcccggctgctcgggaggctgaggcaggagaatcacttgagcccaggaggcagaggttgcagtgagccaagattgtgccattgcactccagcctgggcaatagaatgagactctgtctc

SEQ ID NO: 231353 - DNA, 404 bp, Homo sapiens
tgccatccttctctctttgaggttgattttgtttagctacaagcttggggatgtggagttgtgaggaaaccttctagaagattggcgtggtctggtactagaaaaaaaaaatagccaagttgcccaacagtctgaaggctttcttaccctcaggtccatcctccatgctgcagctggaaaggtctttctaaaacagttgtcatcatgtgtgacttctttctaaaatcgtctgtttccagattcctccctgtcattggttccagattccagggtgtatgtaaactgaaactgattgtcctcatctatacgaaaattagaaaaataatgactgtactttgtgagtttctcataaataatgactaaaagtttctgagtttcccacacaataaaacatgtaaccttat

SEQ ID NO: 231354 - DNA, 422 bp, Homo sapiens
gtggtggctcatgcctgcaatcccagcactttgggaggccgaggcaggcagatcagctgaggtcagaagttcgagaccagcctggccaacgtggtgaaaccctgtctctactaaaagaaaaaagagacaatacaaaaattagctgagagtgctggcgcgcgcctgtagctgcagctacttgggcggctgaggcaggagaatcgcttgaactcaggaagtagaggttgcagtgagctgagatcacaccactgtactccagcctgggtgacaaagcaagactccatctcggggggaaaaaaaaaaattaaagcataaaaatctcaactgtgtaataaaatgggacataactaaacaccaaattcatttgcctagaatataaacgtttcccagaaagtaaagcaaaaaaacccaaaaatatagtt

SEQ ID NO: 231355 - DNA, 363 bp, Homo sapiens
tcggctatgttaattagcttgattgaatcattttacaatgtatgcatatatcaaaacaccatgttgtacgctgtaaatatatacaatctttgtcaactatgcttcaggctgggggaagctggggtttaacagacaaaaagctccgaggaaaagagaaaagtgttggtgaagttgtggagacattggaacccttgcatactgtttgtgggaatgcaaaatggtgctgttgctatggaaaatagtatggcagttcttcaaaaagtgaagaacaacactgctatataataaaatcaatcccacttctgggtctatatccaaaggaaagtaaataagtatcttgaagaaatatctgtatccccatgg

SEQ ID NO: 231356 - DNA, 435 bp, Homo sapiens
aggtacagaaatttattttaaggaaagaagtggacaaatttgcaaatatgtatgtaatgaatgtgcaaagatgctaattacagtgtggtttataacatcgaaatattgacaaatcagaaaaaataaccatccaacaacaattagttatagtataaccacataatagactaccatgtagcattaaaaataagtacctagagctggaaatacgttcaggttactttttttttttttttttttgagacggagtctcactctgtcacccaggctggagtgcagtggcacaatctcggctaactgcaacctccacctcctggtttcaagcgattctcctgcctcagcctcctgagtagctgggactacaggctcgtgccaccacgcccagctaatttttgtattttgagtagagacgaggtttcaccatgttggcctggc

SEQ ID NO: 231357 - DNA, 394 bp, Homo sapiens
tgcacttcaggctccggagaagctggcactataggtgcataccaccatgcctggctaattttgttatttttaaaatttttttgtagagacagggtctttctatgttgcccatactggtctcgaacttctgggctcaagcaatcctgcctcagcctcccaaagtgctgggattataggcgtgagccactgcacccagccagatttttatttctgttcggggagagtggcttcctttcgtttctcctgtccagggtgtcattgcctatgccagcctgagtgtgtgggcctcctgtgggaatcgccacactgtcctgttagagcaaagcttgcagccaactcttgcccccagtgctgcgtcgacgcggccgcgaatttagtagtagtaggcggccgc

SEQ ID NO: 231358 - DNA, 370 bp, Homo sapiens
ttgcagctacaaatcatgaaaacaggtcataaaaccaccttgggtaagtaggtgggatggaaccagtggcctcagagctgctgctggggatcaggaagcccccagtccgtttctttctccctctctccctgcctcccctcagcctccctctctccctttctcttaggaaaaaattccagccaccacctcccagctgggctccctcaggagccacagcagctctggcctacactgtgcccatttcgctgactggggcctcaagcctggggtctgaggaggctttaggcctagtgacctctccctgaggctgcccaggggacagtagttgccttggtgacagtgggtggctggtgaccatcactgcccatta

SEQ ID NO: 231359 - DNA, 534 bp, Homo sapiens
gagaataagccaatcaacgctcctgagaaagagctctggaaagacttcccctattggttgcattgccgagagcagcttggctatcctgagttgaactagctgttggtcatcctaagggcaggcggtctcctgaagttggaccgaaccattaggacgtgccacagtaacagctacgctgctcagaaggcccgaagggtcttcctcagcgacctagcgtgggcacgcgccactgcggccaaaagacagaaatctttttaccggaagagatgaaatagaaagcaggagccagaggctgacttacagagccagtgtgcggatcagagttccttaggagcggctgctggcgcttgacgggcggaatccttgctgaagagaacgtcaaggcccgggcttcgccctgcatcgaacttactgcctaagaataagacccaaatgctgagcgccccgccccaacttgccagtttaagtgcaaaaatacatagattaaaatgtcagcctaataaagcagtggcactgagccagaaaaaaatagtc

SEQ ID NO: 231360 - DNA, 454 bp, Homo sapiens
aattatgaggagatggtatcgcattgtgttttaacttatatgcccttcaatcagactccctatgttttggtcctgccttctttcttctactggatgtgtagaagttactgaagtaccttaatatcaatcgcttttataacccttgaattatatcgacataccaaaacaaacatgctgggtgcagtggctcacacctgtaatcccagcattttgggaggccaaggcaggaggattgcttgaggccagaagtttgagaccagcctgggcaacatcgaaaaccctgtctctataaaaaaaagtttttaaattagcaaggcacaatgtcaagcacatgtagtcctgcctactcaggaggctggggcaggaagatggcttgagcccaggagttcggggttacatgattgtgccactgtacttcatcctgggtgagagagcaaggcattatctctttaag

SEQ ID NO: 231361 - DNA, 513 bp, Homo sapiens
tttgaaattaactcagatttctttactggaggatatcaccatcatatgatatcattaccactcagtaaaaaatgggtgcaagtaaacatgtcctaattaatgtcatgttattactcaactagaagtcagaagacctaggttctaatctggtctcaccctttacacgtgaagtgactaaacctctcagagattcagtttccctgtctttaaaatggaaataattatacctgccctatctatctcaggttgtgagggtcaaatgagattatataatacactatacaactccaaagaaaaatgatacatatttattttttaacagatggggtgtcactatattgcccaggctggaatgtagtggctattcactggcatgatcatagtgcgccgtaccctctaactgctttctgctgttttctgatatgagcttgaatcagtgtggtcaattggagaggggccttcaggttgggctgtgggtgagtcactgagtggaaataaatcctgatggtggca

SEQ ID NO: 231362 - DNA, 233 bp, Homo sapiens
ggagcgtgcagggcccaggcccgtgagggtgtgcaggaggctgagccagaagggcaggctggcagggagagctgggtggaaaaggccttgaaggtctggaaaaggtctctggggacctgtggccctggggaggcatggagggcagttggcagggtaggaatgtggctgcacagagctggcctgaggcccacccaggccctgtgagggacaggcacggactctcttagatcccc

SEQ ID NO: 231363 - DNA, 377 bp, Homo sapiens
acaatctcggctcactgcaacctccacttcccaggttcaagcgattctcctgcctcggcctcctgagtagctgggattacaggtgcccgtcaccacgcccacctaatttttgtatttttagtagagatgaggtttcaccatgttggccaggttggttgcaaactcctgacctcaagtgatccacccacctcggcctcacaaagtgctggagttacaggcgtgagccaccgcaccagtcatttcttagatgaatcttaattgttcgtgtgcatgtgagtcagtacttcttgattggtagcgtggattcaaattgtctatttcttgaaggtaaggagtaatccttttataagctttaaaaatcctctattggccaggca

SEQ ID NO: 231364 - DNA, 440 bp, Homo sapiens
caatatgtgtgataaaatgggaagtacacctgaagttttcctcctgcattctgaaatacaagttgcctcaagaaaaagcacttgtgcagtttttgaggtggctcaactaattgcttttctcatgggacactatttttacttgaaagaacgaatgacaaactatggttatttagaagtatttaccattttcttgaaaatgaatgaaaaaatgaatgaaacaagcctgttattttaaataagataacttagtactacttattgccaataaaaaagtttgagaattcaggtgaaaattagtattttggaaaacttgtatctgtcactgtgagcttgacagcttcccacatgctcaaattcttctgacagatcattggtgatattaatgaaatgtgatttttttacattgtataataaatgagtcaacgtttggaagatctgca

SEQ ID NO: 231365 - DNA, 413 bp, Homo sapiens
aattaagataaaaagaaagtacaaattctcaatatcaagaaaaagggcaaaacaaaactatggttatatcaaattaagggataagaaaagcatataattgcaactttatgccaataaatttgaaaacaggtagacaatttcttagaaaaatgtaatgtattaaactgattcaagaacaaaaagaaaacctgaagaatctcataattctcaaataaattaagtagtaagtttttaaaaaatcttctcacaaagattacaacaaggtctgttgattttgcaagtgtgaattctacaaacttttgagaaatacctcatcctaatataaacagacttccagacattagaataaggaatgacataccagttaattccttgagacgggtataaactttaaaacaaaaccagacattatg

SEQ ID NO: 231366 - DNA, 1027 bp, Homo sapiens
tttccccagcacctaaggaagtatttctagtaagttccagtggtatagcatcggtgactctcctgacaagcagagggccatggctgggttcctctgatgaggtgcaggggcagggcactaagaggggaggactctcctgagttctctacctgagccctagactagtagctgctcctcctatacttcctactagtctgtgcctggttactccacttccctgttgcaattaacaattccctatgtacacttttcctgttcaaatgactgtgtggcttctctttcctaatcggactctgaccaatacgctatcatttgccaacaactcccaaagttttatcagtgactcagacctctaacctgaactccagctgcctccatgagatatccatttggatgtttaatggacatttccaaagtgatatgccctacagaactcagaatcttccctctcaaaccaactgctcagcagtcttatgatcttagttgatggcaattcagaagtgaattgcaggacacccggtttgtatctgcagagagaactggagaactgcttagtgtggaaaacccacacatttggtttcagaagtgtgtgagtagaaacagttttccttttatgtttgttggatggataatgatgaacctagcaggacacagaaagctaggcagcagtggaactgagaatgaagttatagttaatagcagagaatgaaaaagaaaagacagataaaacattttgaagaaaggacagtaatgtattcccaacaggtaggatttacaggatggagagaagaggcaaagataactacaaaatttctagcctgagagactggtagaaaaaaaatggtggtatcagggacagacaggggttattaagaaaaaggattggatttttaaaataaagaagatctggtgtaaaattatcctcaggaaaactggaaaactaggcatgtacttctctccatcatgcccttgcacagtgcagtccttctgcctgtccatgcctcgcctccccctccctaggattcct

SEQ ID NO: 231367 - DNA, 798 bp, Homo sapiens
tggctcagtattttttgaatgcatcctcatttgacaacaattttgtaatattttctagagagaatagtagggtaattcagtattttctatggatacattcggcaatatttaattattatttataatccctaacaattcccccatcattttaaaattcaagtatattttataatttttttcaaatgagagaaaattgctagaaatattttcaacatatgagatggaggattgcagagcacttccaggttccttctgcagtagctaatcttacacatgctttaaattgacaacagtcattggccaatttgtactgatgtcctggtttcagaggtgtgagttttatgttgtctttgttcatatcagtatttcacattacatcagcaaaaaatttttttttccaacacgtttatatgactcagtccacttcattaatgggattataacacaatacaaaagccttttaattacttgtgttcaacatgtatctcttctcttacgtaagttactgctttggtgtaacttgaagtcatttttcattacaattagcatcttcatgtcagaattatttcaacttattactttaattttgcattccatcaattttagcttcattttcgctcaggtctttactaaataaatttaatattcacatgtagttttaattcaggaatttgcagtttcttaatttattgaaacttttcaaaatgtatttttcctcaaattgtagttttccagtctatcttctttcccatgatgcctaagtccaatctattaaattctaaacaaggaaaagtacag

SEQ ID NO: 231368 - DNA, 130 bp, Homo sapiens
ttgtccttttcttttttcttcggactatttttctctctcttggaatatctttccccctctttatttatcgaaatcactctccctgtttttctcccaacttctccatggatcctctccctttctctttctc

SEQ ID NO: 231369 - DNA, 489 bp, Homo sapiens
aatctaagggcattattaaaatgtttgttcttccttatctcagaattgaagtatgtcagaagcaagacttttctttccattttgttatagtagaaatgcatacattaacaggtacgttttagacattacacgtgctcatctgacccaaaagctctaatgagctgccttaccctggaatgtttttcttagcttggatttgcttttttggagggattaagaaaagacttggctgggcgtggtgactcatgcctgtaatcccagcagtttgggaagccgaggcgggtggatcatgaggtcaggagatggagaccatcctggctaatacggtgaaaccccgtctctactaaaaatacaaaaaattagctgggcgtggtggcgggctgaggcaggagaatggcgtaaacccaggaggcggaggttgcagtgagccgagatctcgccactgcactccagcctgggcgacagagcaagactctgtctcaaaaaaaa

SEQ ID NO: 231370 - DNA, 469 bp, Homo sapiens
taagggagtataattaacttgttcattgtgtattgctcagaaagcagaattaagattactgtagattggctgggtgtggtggctcatgcctatcatcctagcactttgggagaccgaggcaggtgaatcactggaggtgaggagtttaagaccagcctggccaacatggtgaaaccccgtctttactaaaaaatacaaaaattagctgggcatggtggtgggcacttgtaacctcaactacttgggaggctgaggcaggaggatcacttgaacccgggaggcggaggttgctgtgagccaagattgcaccactgtgctccagcctgggtgacagagcaagaccctatctccaaaaaaaaaggaaacgattactgtagataaacaacctcatggccgggcatgaggtggtggtgagccaagatcacaccattgcagtctagcccgcgcaacaggagggaaactccatctc

SEQ ID NO: 231371 - DNA, 226 bp, Homo sapiens
gagagctttggttagaaatatgaggggtaggagaaaatcatttggccgtagaaaatactgattaatctttgggaaaatttggcatgtgatattaagaataggatcagggttaggcgtggtggtgcgtgcctgtaatcccagcagtttgggaggccgtggtgggtggatcacttgagaccaggaattcaagaccagcctgggtacaaagtgagaacctgtcaaaaac

SEQ ID NO: 231372 - DNA, 330 bp, Homo sapiens
tgggaccgagagattccggcttttccccatcacagggcggggacgttttggggaaactcctctgaggtcactgtgactcaccctgagggcaagcaagcaccctccacccagtgccctcgacttcgctgtgctaaaagagtttgaaaaaggatgcccagcctgcagcctaagcggagagaccccagggggacacttccccacccgagccttagtttccttcggctgtggagaggaataaccgcctggacttggcaggactgtgcagcattccatctgtaaacatgtgttgagttcagactatatgcctagcgttaaaaaggatgctgatga

SEQ ID NO: 231373 - DNA, 130 bp, Homo sapiens
ggattttccattttgaacaaaactcctctgaccagaaaaatcttacccctcctacccaggggatctgctgtgggtcagcagggctcccattgctgaaacaactaagcgcccttaaaggccaacgatcatg

SEQ ID NO: 231374 - DNA, 387 bp, Homo sapiens
catttgttttatgtttgttagtatattgagcagtgtattagggatcaggtatatagatgtaaaaggagtacacagtctagagaggaaaaatagtgacaggctgggcgcggtggctcacgcctataatcccagcactttgggaggccaagatgggcggatttcttgaggtcaggagtttgagatcatcagcctggccaacatgatggaaccctgtctttactaaaaatacaaaaattagctgggtgtggtggtggtcgcctgtaatcccaactacttgggaggctgagacgggagaattgcttgaacccgggaggaggtggaggttacagtgagctgagaccatgccactgcactccagcctgggcaatagagcgagactccatctca

SEQ ID NO: 231375 - DNA, 411 bp, Homo sapiens
ctggttcctaacaggccatggaccagtaccagtttgtggcctgtgggttggggacccttgccatagagaatacttcttcagccctaaatattctctgctctgtctattcatttctcctctcctctaaaccatggcaaccactcaattttttactgtctccataattttgccttttccagaatgtcctatatttggaatcatacagtatgtagccttttcagatcaggttctctcacttagtaatatgtttttaaggttattcatgtcatgacttgcttcctcatttctctttagaaatgaataatatttcattgtgtggatgtactagagttcagccttttatctactgaaggacatcatgttacccttcaaaatttgtcaattataaataaaagagctataaacatacat

SEQ ID NO: 231376 - DNA, 242 bp, Homo sapiens
actataaaaaatacaagaaatggattattatagaagtcagcccatgcttacttttgaaggaaaggagggtgtttgattggcctgaggcacatggagacttctgtggtggctggcaaagttccatttattgacgtgagtggtggttacaggagtttgtgcttaaataattcatcaaatcatacatttcctgtggttatctgtgtctgttttattttacaatacaaaaggttttaaaatgcaga

SEQ ID NO: 231377 - DNA, 469 bp, Homo sapiens
caatccctaggtttggggaatgcaatgtcacttccttacaacctcaggcagctgccagccagctcacttcctgggaatgctgtggacaagcagccagccccccaaagacccaaagctgctgagtagatcattgcgcatgcgccccgtagacattgcgaacatcaaatcaagtggatactaaagtgctttgtaaacccataaaatgccgttatcctcattcactgagaaaatcctagatacgagttcactctgtatggttttatatgtgcccgttcaccgtattttattcaactatgtttactctcttatcggatttctcacagcaacttctactaatgtcccccaacttctagatgctaacttaaccccttcccccaggagacacctcagaaatatatacattcacttgttctgtcacctgagagcacctagacacaataaaacctcaatagccataaataaaactagt

SEQ ID NO: 231378 - DNA, 644 bp, Homo sapiens
gtttaccatttactcagactaaaacattttattgaacttttaggtaatattaaggagttttaagaaaacttcctccacttgccccttaggtctttatatttcactaaatatctttgcctaaaccttatgatgggtatgtttactaaaggtactgacaggacttttaagtgtgaatacagtactgctcaatgtacaccaactgcacattgacaaaaattgtcctgattagattattcctataaacttaaagggatggtttcatatggatataccctagaggtggtgataactcattaagttagtctttattcttagactaatcttacttaagacataaagaagattagaaatgtgataacaagatacagcttctgaaaattaaccagaaagtttttttacttcaggtaaaacagttcttaaattccatatttctgtgacattcagaatggtttcatgactgacttaatatggatttgaagagaaggcatatttccaactattaaaactatgtgggctactgtgcccaggcagggtgtctcacacctgtggtcccagcacttcgaaaggccgaggcgggcagatcacttgaggccaggagttccagaccagcctagccaacgtggtgaaagcccatctccactgaa

SEQ ID NO: 231379 - DNA, 298 bp, Homo sapiens
ccatcaatttgtcattatttttcccctaatgtccaacatctttgtctatcgctgcatacatttaaacatacccattccactttcttcctcatggtctccttcctaaccccatgctgtcatcgggactgggtgctctctaaggatgcgttgtgccttgcatgctggagtcccatttcccatgtggctgttagcacgtgaagagatggtagtgatgttcaccatgataatgctgctggtttattgtggaagatctcagcagaagtcactgtacgtcattttgttatctctctcctttttt

SEQ ID NO: 231380 - DNA, 349 bp, Homo sapiens
caactccgcgtatttactgatcctcttaagccaattccagaactctttacattaacaattgctgctatagaatctcactttatttgggaggccaaaattataaatttcacatcaattacttcccttacttaccagccttagcagcaagagactttgtagtatttaaaaaattaaactccaacctcgaagaaaaaaattagtcagcattgaaaatatttaacataatactacatactaaggtttaaaagcaattaattccaaaagtgtggttctaaaaaagtgtttctgcaatagcaggactggtttggtatatagtctaccaaggtaacaacttctaaggtcgaacaaa

SEQ ID NO: 231381 - DNA, 440 bp, Homo sapiens
aactgaaacttggtctgagagccgccatgtttcatgtctcatttcaggctactactttgcatctttttgacttacagcacttaaatatgcaaatgcaaaattgttaaggttttttttttttttttttaaagatggagtcttgttctgtctgtcacccaggctggagtgcagtggcacgttctcagctcactgtaacctccgcttcccgagttcaagcgattctcctgcctcagcctcctgagtagctgggattacaggcatgcaccaccacgcccagctaatttgtgtgtgtgtttagtagagatggggttttgccatattggctgggcaaggtgtttcacacctgtaatcccagccctttgggaggccaaggcaggcagatcatctgaggtcaaaattgttaagccttttaaggaagagaaatgtatggcttattgatt

SEQ ID NO: 231382 - DNA, 444 bp, Homo sapiens
agctggacacaggctcagaaataatgagatgcaccctgggtttacacctctggaggactttcagagtctgcacaagtaagaaagaaatggtaaggcagaatgtcaggcagcctggctaaacagtgaaggagtgccctagttctcggaaaatttttgtctttgttcatttgttattgtgcttcaggatttaaaggcatctctgttaggtcaccagctaatgacagagataatgaaatggagacttcaccgaccacaaatgacaaggaatacaggctttgcaagattagtttgggaatgtcactaataaaatgggtgactgcagccctcagcagtaacaatagcaaaccatggagagggaaataatctgatttccagagttataacattaaaatatttaaaatgtcaacaaaagtttaaaagcaggaaggtatggcccattcacat

SEQ ID NO: 231383 - DNA, 469 bp, Homo sapiens
aagcatatatatttataaaggaggaaaaagacagttattatgtgataatcatacctggtaccctttccccctcattatgtcttttttttttttttttttgagaaggggttgggattataaaagtaacatatgtagttattaaaatgtcatacaggccaggtggagtggctcacacctgtaatcccaacactttgggaggccgaagagggtggatcacttgaggtcaggagttcaagaccagcctggccaacatggtgaaaccccatctctactaaaaatacaaaaattagccaggcgtggtggcgcatgcctgtaatcgcaactactcaggaagctgaggcacaagaaatgcttgaacttgggaggcaaaggctgcagtgagctgagatcaagccactgcactccagcctgggcaacagcgcaagactctgtctctaaataaataaataaataaaatgtcatataatat

SEQ ID NO: 231384 - DNA, 493 bp, Homo sapiens
aagaaaggaacagaagcaatattttaagtaataactgagaattcccccaaatgagtgtcagatatcaaactacagatccaggaagctcagagagcaccaaagatggtaagtgccaaaaatctacacttagccacaccatattcaaacttcagaaaatcaaaggtaaagaaaccatcttgaaagaggccagggaggaaaaataccttacctatagagaaactaagataaaaattacatccaacttctcagaaatcatgcaagcaagaagagaatagtgaaatatttagtgttgagagaaagaagcccaccacctagaattttatatcctgccatgttgtgttacccttccaaagtaaaggaagaataaagacttactcaaagtgaaaattgagggaatttgttgcaaatccgatttgtaagaaatatgtataaaagacttaaagcaaaaattgagggaatttattgcaaatctgatttgtaagaaatatgtaaa

SEQ ID NO: 231385 - DNA, 678 bp, Homo sapiens
ccggctaattttttgtattttagtagagatggggtttcactgtgttgcccaagctggtctcgaactcctgagcttaagcaatccatccgcctcagcctcccatagtgcagattttacaggcgtgagccaccgcgcccagccctactcaggctttaattatttatggcaagcctgctgtgtgtaggacactgtgccaagtgctttgcagtattttttttattgtgataaaagatggaacaaaatttattattttaaccattttttaaatgtgtaattcattgacattgtttacattcacaatgtgtgtaaccatcaccacggtttatttccagtacttggtcatcatcccaaacagaaattgtaaccattaagaaataagtctccattcccatctatgccttggtaacctttattctgctttctttctctatgaatttgcctgttttgggtactttcatgtgagtggtatcatagaatatttatccttttgtgactggcttatttcatttagcatactgtcaaaaaggttcatccatgttgcagcatgtgtcagaattcatgtctcttctcttctcgcttttgctttcctttcctttttctttattctttcctttcctttccttttctcttttctttttcctttccttttttcttttccgtcccatcatgtccaggctg

SEQ ID NO: 231386 - DNA, 571 bp, Homo sapiens
ttgtggtgaaattgccttttcttttggtagaggggaagaaagtagaagtcaagaatataaaatgagaaaacaatcttcccccttacaaaatgttagaaaggccttgactgagaaggcaagttgagtggaagcatccgcacttctaaagtgcttttgacagagcactgggattggagctacagataaattgatgttcacttttccagaaaacttgtctttcagcatctttaatggtcacaaggcttaatggtcacaaggtgggaagaggggatctacttttccaggagcttcttaggtcaattgcagaggggggacatactgcttatatggtattggcaccaatattagaagtgtttcccagcacagcaagatgaacaccttccccataatgccttccacaatctgcctttctggaacaaggcattcttgtgtcctagcaattttcagatgttcccacttggaagacattctagagcacagacaatcttattactaatgaaaaaagaaagccagtatcctctctttttattctttcccctcccccacaatcttgcttcatagtggtggtggg

SEQ ID NO: 231387 - DNA, 134 bp, Homo sapiens
tgatgttcattttcgctggtatcatatcttgaaagttttaacgatactggggcacagaaaatattagaacctccaaattcaattccagagtattccaaaacattttaatactagaactacctattctatttttg

SEQ ID NO: 231388 - DNA, 930 bp, Homo sapiens
cgggctggaaaagtcaccaactacagcatccaggtgctggccttcacccgcgcagtgagacggggtcaggagtgagcagatcttcacccggaccaaagaggatgttccaggtcctcccgcgggtgtgaaggcagcggcggcctcagcctccatggtctttgtgtcctggcattccccctctcaagctgaacggcatcatccgaaagtacactgtattctgctcccacccctatcccacagtgatcagcgagtttgaggcctctcccgactcgttttcctacagaattcccaacctgagtaggaatcgtcagtacagcgtctgggtggtggctgttacttcagccggaagaggcaacagcagtgaaatcatcacagtcgagccactagcaaaagctcctgcacgaatcctgaccttcagtgggacagtgactactccatggatgaaagacattgtcttgccttgtaaggctgttggggacccttctcctgcagtcaaatggatgaaagacagtaacgggacacccagtctagtaacgattgatgggcggaggagcatctttagcaacggaagcttcattattcgcacggtgaaagcagaagactccggctattacagctgcattgccaataacaactggggatctgatgaaattattttaaacttacaagtacaagttccaccagatcagcctcggcttacagtctccaagaccacgtcttcctccatcaccctttcttggctccctggagacaacgggggcagctctatcagaggatacatactgcagtactccgaggacaatagtgagcagtgggggagttttccaatcagccccagcgaacgttcctatcgcttggaaaatctcaaatgtgggacttggtataagttcacactgacagcccaaaatggagtgggcccagggcgcataa

SEQ ID NO: 231389 - DNA, 235 bp, Homo sapiens
acataggacgcagatggcatctgtgagaatggcagagtaataaccactaacagcttacctctccataaaagcaatgagaaccctggcaaaattgtcacaattaactttttaagagctctggaaattcatcaaaggcttgcagcaatccaaggatcactgattcaagaaaaacaactggaccttggtaagaacagtgagcattgtggcattttaacttaccctacttccatcccct

SEQ ID NO: 231390 - DNA, 305 bp, Homo sapiens
ctccattctgaatttgagtagaaatgagcaaacaggggagaaacaaagtacgtatcttccctgttggtgtgtataagggacccagaggtaagatcaccagccccaactccagttttggccataactctgggtgaggggggataaggtggtaaaagagatggacgtgggggataaggataagaattaaaccatcactaatatacaagagcctaaacttgtcctctactggcaaaatctgccatgtaaataattctgctagcccctcgtggttctggacattattgagaacacctttcaaggaccta

SEQ ID NO: 231391 - DNA, 389 bp, Homo sapiens
caggtgggaaaggcaaaggcaggaaggctgccaaagagcctggtattcaagggaaatgaatgagcaggcagttgtaatctcagtggcatcccactccacaatctgaagtgcatccccaagggttagggagagcagcttaagaaaccagcagacatttcagaagctgagccctatggacagtgcacatcccatgctcaaggagttccggtggtcctagcccattagccacgtttgttgagactcagcggagcacccccagtaagtggctgccctattcaggagtacttttcagattcaagtctttatcaatattaagggaggaaattcaggggtggaggtgggcgagcaggggcctcctctcttttgggaagcctatttctttggccagc

SEQ ID NO: 231392 - DNA, 156 bp, Homo sapiens
aggcagttttttcaatcttttgggtagtagctcttgagtctgtaaagcctggtaattttctagaggtaattggcattaaccatcaagactctcctcacatgctcccttcccactctggcaccctcctcccacaggccttcctcccgtcctgctgcc

SEQ ID NO: 231393 - DNA, 482 bp, Homo sapiens
ttgtcaacatttttggaagtataaatattattaataacatttgtaatttataaatatttttcatgcctttatttctgtagcactcctacagtcaatattataatcctattttaagaaaataagtatattggactcaaagaatttgagtaatttgattgaattcacatagctaaaggacaagaccaatatttgaattgtctttttctgaaaccatattcttattgtgccctttttagtgatgctaaaaggtgtggtgaacaaaatctctggacccaagattgtgtgtcaaggggacaaatgatactatcagcctgtattagtttgacatcctgtaattaagtagatacagtatttccaaaagtcttttttaaagaatattttgtattgtggtgaaacatatataacacaaaattcatcatcttaaccatttttaagtgtactgttcagtggcattaaatgcattcgcattgttgtgtaagtca

SEQ ID NO: 231394 - DNA, 338 bp, Homo sapiens
tgatgcctgttacgtggcttggaaaactggggcttgggaacgaggaagccctcgcccaaggtaagtagcctggaagtgcccatgtgagtgtccacccagcttgctcaggcccaaagctcctacaataaaataatgcctccatcctagagagcagggctatgtgcaacagagaaaggaaaaggcaggccgggcacggtggctcacgcctataatcccagcagtttgggaggccagactgggaggattgcttgagcccgggaggtcaaggctgcagtgacctatcattgcaccactgcactccagcctgggggacagaagacacgctatctcaaaaaaaa

SEQ ID NO: 231395 - DNA, 391 bp, Homo sapiens
cttgctggccactttgtccccagtacctgcctggagcagtgttgtcacctagtaggggctgactacgtatttgttgcacacgtgaatgagttgaacataacagtcaccacatggaacacgtactgtgccctgcgctgtgtcaggtcctttcccgtgttatctccgtaattatggcagcctcgatggatactgtggttatcctctttttacagaaagggaaacaggctcagaatggtcaagtgacttgttcaagctggtcacttgctcatttgtttattaaagctttactggatgctttgtgactgggaggaagtagactagctactgtgtattaaatatttgtttgtaaggcactgtattaaatgcttgagcagcttcattattcgtaata

SEQ ID NO: 231396 - DNA, 409 bp, Homo sapiens
aaaggtaaaaaaaaaaaaaaaggaatattaatcttactgctttgaatctttagagcaggggtgtccaatcttttggcttccctgggccacattggaagaagaattgtcttgggccacacataaaatgtgctaagactaacaatagctgatgaactaaagaaaaaatagcaaaaaaaaatctcataatgttttttaaaagtttacaaatttgtattgtactgcattcaaagccattctgggccgcatgcggctcatgggctgtgggttggacaagcttgctttagagtctaaaatttacatgacagattcaattcctgtcattgtaatgggctgctaagaatgttacagatggtttatgttgagtgttatcttcacataataaatgaaggttactgctatacctgaaaac

SEQ ID NO: 231397 - DNA, 172 bp, Homo sapiens
attggaaattatccatcaaatttgataatgtaagagagtcaagaatatattatgtcctatttccccctaccttttttccccataatttttatttcaaaataagctctagagattcttagctggttcagcaggtcatggagtaaaattaaaaaataacaatgaaggggcactg

SEQ ID NO: 231398 - DNA, 420 bp, Homo sapiens
tttttgatctgtcagaattcgttttgcaagaatcaagaaagttttggtacaaattcattacctctgtaaacccctgtttataaactctgcattagtacttttgccttctaaggcagtcaaagtttgttttaatttatttataaattgcagtagcaagtgctagtgcccattacattgtggggaaatcaagtttttgacagtattagaatttaatgttttaactgattttattggcagttctaacacaaacagatacatcccttcttaacattaccctttaatgaacaaggatcagacaagttgcataaggaaaggaaaggaaaatgaaaaagaccaagcagaaggatgaaggctacaacagagaaagtaagcctaacatattggtgcactgatgacaaaaggagtaattcagtctgaaaa

SEQ ID NO: 231399 - DNA, 376 bp, Homo sapiens
tgacaggacttttcctctcatccttctgctctctctccttctgtatattgtggtgggcaggtgggaagcctagaataacagaatccatttagttcccatgaaggaagcgaaccgtggcactgtgaagacaaagctgtcaactagaggcaggcagaaccaagagcatcacagagaaagagagcagcggccttgaacaaaacatgaaggaatgcactggtggggtgagacttaagcagttatgtgagctcaaacccccttagcgtgtgggccctttctgtgtaggttgtgttttctattcttttcaacaaaatagttctaaatgatagtttttcagtgctggcttttcaagtacagatgtgctggagaaggagtgagg

SEQ ID NO: 231400 - DNA, 685 bp, Homo sapiens
  misc_feature (42)..(43): n is a, c, g, or t
  misc_feature (448)..(448): n is a, c, g, or t
taaggtcattgttttaaaaaatgtgggccaagctcgtgcgannttcggcacgaggagttgaggggagccagtataattagtttcagctgaggctgacaaggaatgtgtaagccagccttgtccaaccggcagcccaacacaaattggtacactttttaaaacgtgaggttttttttcttttcttttttcttttcaagctcatcagctatcgatagtattagtgtattttatctgtggcccagggaagccaaaagattgaacacccctggtgtaagctaccaaaatgccccttttcaaaactggccttagttctagaacagaaaggacactttctagtttgtagtgttgcagttagttccagcttggaggtcagcagaaatgccaccatgaggttggccagggaccttttgcgggaagccatggcatggtatgttggagcccttgtggnccgtgtgtgtgtgtgtgtgtgtgtgtgtgtgtctgtgtgtgtgtgtgtgtgtatgtgtgaatggatgttttattttgtgtcatctttacccgctgctcctttcccagtgctaccacaatgctggcctccaggccagcgctcacgttttatttgtagactgggcctttgctctctgcagcctgggcttttgtgtggctcagtgggaggctaggcagaggcaggggtggagagatcttt

SEQ ID NO: 231401 - DNA, 397 bp, Homo sapiens
gagaaattgcctagatccaattgccatagacatgcatccattattgtaaatacagctggctctctgtatccactgattccatatccacaggttcaaccaaccacagattgaaaagactgggggaaaaaactcaaaaacaacaaaaaaagaacacaatagtaaaaactaatacaaattttttaaaaaatacagaatacagtgtaacaactatttacatagcatttacattgtcttaggtattataagtaatctctagagatgatttaaagtatacaggaagatgtatataggttatatgcatactatgacatttatagggattcatggattttggtatctgcccagggggccctggatctagttcctttgcagatactgagggacagctctatcatct

SEQ ID NO: 231402 - DNA, 421 bp, Homo sapiens
atcttattaaatgaagctgtgacataaaaacattttctattcctatatttcccaccaattccaattattcttcacctgtttgtttgtccaagttagagaggttttaagatcattctctttcatatgttctttaccattgaaagattacatttgcattgttttgttttaagccaagagtagggccctggatatagctaggctcactgtggttttgcaaactttatattgggatgaatgcaagttttcactgaataaaaagctggtcctcctacttcaacctgtatcacaatatgatgttataaatgtttctttcagtttatcccaagagtatgtgctagtattttcaagtgtatcgacatatagaaaaaatctgaaaccctgatgtcattcattgtttaagtgtaaaataaaaaaaaaacag

SEQ ID NO: 231403 - DNA, 365 bp, Homo sapiens
ctttgttaaatttctgtatgttcttttttgtataaagatggagagaaaggatggagtgatactaaggaccctaataacatctctgttcaaattaattactaagtgatagaagtattcatatgccattaaagatttgccaattctatttgaattttatttgataaacttgaaaatcaaataacctaacagctgtcttttctttctttctaaacccttttaagaatagatttaatatttttctgagttttcattaaagagttatttatgttacggtttgtttttataaaagtagcatcgcaaaataaaaaagtctgcatccttgcaagttattcactgctcatgtgcttgctcttctctggtaaatt

SEQ ID NO: 231404 - DNA, 266 bp, Homo sapiens
atggtgctaagaggaaagttcatagcattaaatgcctacattgaaaagtctaaaagagcacaaacagacaatctaaggtcatacctcatgaaactatagaaacaagaacaatccaaacccagcagaagaaaagaaataacaaatattagagcagaactaaatgaaattgaaacaacaacaacaaaatagaaaagataaatgaaacaaaaagctgcttatttgaaaagagaaataaaattgatagaccattagtgagattaaccaag

SEQ ID NO: 231405 - DNA, 366 bp, Homo sapiens
taaaaaaattttaaatttatttttaaaatttattttaatagcagagatggggtttcaccatattgcccaggttggtctcgaactcctgggctcaagtgatcctcctgccttggcctcccaaagtgctgggattacaggcgtgagtcaccgtgcccggttatgggcctaaattagaatcacttataattagaaaaaaatcaggctggaaagtggaataaaaaaagagattccagggtagaggattatataatacaaataaaagacttgtcatggatgaattattgtggagaagaaatgatgtaaaaatgtactaagagtggccagaggaaaaagtaatatgaagtccaaagccaaaatgtgaatttc

SEQ ID NO: 231406 - DNA, 893 bp, Homo sapiens
ggcattttccggtgcctgcaccaaatcaggaagctcctagtctgtgccccaagatcacgcctcatttggaggtcacacgaggcctggctggtgggtcctgccagggcactggatctggagagtggaggaagcactgggtgccggggtttgggctcggggccatgtacgcctcctcctaccccccacccccgcagctgtcccctagaagccacctttgcccacccccaccccaccccaccccaccccagctcaataatctgcttcttctagaaggaaggaaatcgtctcttccctctgtagcccccactgggagtgcctcagctgctgaggacagtgatctgctgactcagccttggtactcggggaactgtgaccgctatgctgttgagagtgccctgctccacttacaaaaggatggggcctataccgtgcgccccagctcagggcctcatggctcccagcccttcaccctggcagtgcttctccgaggccgggtcttcaacattcccatccggcggctggatggcggacgccactatgccctgggccgggagggcaggaaccgtgaggagctcttctcctccgtggcggccatggtccagcacttcatgtggcaccctctgccccttgtggacagacacagcggcagccgggaactcacctgcctgctcttccccaccaagccttgaggccacagcgaagaatgcaggtgtctgcccagttcactaggtcctggatgaaggaaccgtggtggcctagaccagtcaggggacagcacaggcactgctggaacagcaaaggatcctctcacatctacttgtgggcctagggcaccctgagagggactggcctaccttgcacaagttcacattcaataaacatttgttgattga

SEQ ID NO: 231407 - DNA, 315 bp, Homo sapiens
gcaaacaggaaggaagatatctagaaaaatgtcaaaagtccccttgccagagtcccacagttgcctcaggaaattgctcccagcatgaggctcatgggactcacggatgccctgcctccctggccagctcttctcctccgtggcggccatggtccagcacttcatgtggcaccctctgccccttgtggacagacacagcggcagccgggaactcacctgcctgctcttccccaccaagccttgaggccacagcgaagtacacaccgcctttggccccagtttgcttcttgtcccgccccaccttgggctgtcttc

SEQ ID NO: 231408 - DNA, 306 bp, Homo sapiens
gcttattttgatgtctaaagatctgttacctgtatcctgatgttcatcttccaacacatatttattgaatatctactatgtcctgtgttctggacaagtatgcatgagaacaacatacacgaagtttatcattaaatgggaaaagagcagacattttaaaaagcacccaaaccggccgggcacagtggcacatgcctgtaatcccagcacgttgggaggctgaggctgaggatcccttgtgcccaggagtttgagaccagcctgggcaagatagtcagagctcatctctatttaaatagaaaaaac

SEQ ID NO: 231409 - DNA, 1072 bp, Homo sapiens
ggaagggcagataaagctgccgacgctgtgttcttctttaccttcgctttaatggtcttcacagcacgtcgtgtttatgagtcagaggaccctagagcgacacttgttggggacgggcaggacaccacagcacgacaggcagctcctgcaagtggcggcgggaatgcacgccggagtcggcgtgccagcgcggtggaaaccggttctcaggttctggccgagtggacttccccttacatcagcgggccagctcctgtcaggcaggcggccggcgattggccgggaggaggcagtcattcaaactgccttttgtgtttggctaatcagggcagcccaggttcccagcggaggtgcgtctgtggtgtcagacacctgtgtctcagctctgtcttcctcgggctggctcctgcggatccttcctgggccagaaccgtgcctctaggccacctcccccaagccaccaagcccccgcggtgggccagccttggcccagtgtcacgcaggacagaaatgaccaacagataactgaggacaatggacctgcctgggcatagacttccttaagcctctccccaccggtcactgttagcctcgagtttgaccctcaacatccccagaggatgcctcctaggactcgaacctcatttagtgtctctactgctgatggacgccatgagtggagctgtcgaccaccttgggtgaagtggtggtctccacgtcccacctgggcagcacgatggccacagaaaggttgtatctaccccacccagcacaacacatgcagaaatttcaaaagagcctatttaagtagatgagcatagatagataattctgggagaacatccttaaaaggagtttggttttttgtttgctttgtgtgggtttttgtctaaataaactagactgctttaatatactgcctcttttaatgaaataaagtaattgtttccttagctgtgtgctaggaaagccaatacaaagacatataagaaaaaccccacagacctagattcttaaaaccattcatatttgatcccattctcaagatatctcattatatacatgcaaatag

SEQ ID NO: 231410 - DNA, 660 bp, Homo sapiens
aatatgaagtggcttccatagcattatgcagtcaaccatggtgtaaaagtcaataaagataagccctaccacttatctctgtggctcaactagcagcagaaagcagggagttgtctgaaggagcagcttcatttcggctgtttctctctccagcctctccccaccggtcactgttagcctcgagtttgaccctcaacatccccagaggatgcctcctaggactcgaacctcatttagtgtctctactgctgatggacgccatgagtggagctgtcgaccaccttgggtgaagtggtggtctccacgtcccacctgggcagcacgatggccacagaaaggttgtatctaccccacccagcacaacacatgcagaaatttcaaaagagcctatttaagtagatgagcatagatagataattctgggagaacatccttaaaaggagtttggttttttgtttgctttgtgtgggtttttgtctaaataaactagactgctttaatatactgcctcttttaatgaaataaagtaattgtttccttagctgtgtgctaggaaagccaatacaaagacatataagaaaaaccccacagacctagattcttaaaaccattcatatttgatcccattctcaagatatctcattatatacatgcaaatag

SEQ ID NO: 231411 - DNA, 499 bp, Homo sapiens
aatatgaagtggcttccatagcattatgcagtcaaccatggtgtaaaagtcaataaagataagccctaccacttatctctgtggctcaactagcagcagaaagcagggagttgtctgaaggagcagcttcatttcggctgtttctctctccagcctctccccaccggtcactgttagcctcgagtttgaccctcaacatccccagaggatgcctcctaggactcgaacctcatttagtgtctctactgctgatggacgccatgagtggagctgtcgaccaccttgggtgaagtggtggtctccacgtcccacctgggcagcacgatggccacagaaaggttgtatctaccccacccagcacaacacatgcagaaatttcaaaagagcctatttaagtagatgagcatagatagataattctgggagaacatccttaaaaggagtttggttttttgtttgctttgtgtgggtttttgtctaaataaactagactgcttta

SEQ ID NO: 231412 - DNA, 877 bp, Homo sapiens
ggaagggcagataaagctgccgacgctgtgttcttctttaccttcgctttaatggtcttcacagcacgtcgtgtttatgagtcagaggaccctagagcgacacttgttggggacgggcaggacaccacagcacgacaggcagctcctgcaagtggcggcgggaatgcacgccggagtcggcgtgccagcgcggtggaaaccggttctcaggttctggccgagtggacttccccttacatcagcgggccagctcctgtcaggcaggcggccggcgattggccgggaggaggcagtcattcaaactgccttttgtgtttggctaatcagggcagcccaggttcccagcggaggtgcgtctgtggtgtcagacacctgtgtctcagctctgtcttcctcgggctggctcctgcggatccttcctgggccagaaccgtgcctctaggccacctcccccaagccaccaagcccccgcggtgggccagccttggcccagtgtcacgcaggacagaaatgaccaacagataactgaggacaatggacctgcctgggcatagacttccttaaggtttgttcgacatgggtgaatcaatgaattgcacttcaacagcaaaattggattgtattgattggttggctcactcttctcatcctttatgtttcagagaaggtcggattataaatgcaagcacctacatttaagcaacagttgagatgcttaagaacgtgcttctgtgtgattctgattaatccttaactatgctctgatttcattttacttgtaaatcaattgacacatacttcagggaccatcctgtcttttctctggggttgctgtcaccgtatttgtaacttgaggatttaataattgaagattgat

SEQ ID NO: 231413 - DNA, 911 bp, Homo sapiens
ggaagggcagataaagctgccgacgctgtgttcttctttaccttcgctttaatggtcttcacagcacgtcgtgtttatgagtcagaggaccctagagcgacacttgttggggacgggcaggacaccacagcacgacaggcagctcctgcaagtggcggcgggaatgcacgccggagtcggcgtgccagcgcggtggaaaccggttctcaggttctggccgagtggacttccccttacatcagcgggccagctcctgtcaggcaggcggccggcgattggccgggaggaggcagtcattcaaactgccttttgtgtttggctaatcagggcagcccaggttcccagcggaggtgcgtctgtggtgtcagacacctgtgtctcagctctgtcttcctcgggctggctcctgcggatccttcctgggccagaaccgtgcctctaggccacctcccccaagccaccaagcccccgcggtgggccagccttggcccagtgtcacgcaggacagaaatgaccaacagataactgaggacaatggacctgcctgggcatagacttccttaagcctctccccaccggtcactgttagcctcgagtttgaccctcaacatccccagaggatgcctcctaggactcgaacctcatttagtgtctctactgctgatggacgccatgagtggagctgtcgaccaccttgggtgaagtggtggtctccacgtcccacctgggcagcacgatggccacagaaaggttgtatctaccccacccagcacaacacatgcagaaatttcaaaagagcctatttaagtagatgagcatagatagataattctgggagaacatccttaaaaggagtttggttttttgtttgctttgtgtgggtttttgtctaaataaactagactgcttta

SEQ ID NO: 231414 - DNA, 200 bp, Homo sapiens
gaagaccatttatcattttagttcatgtagaacacattgttcataacaaactatagaaaataaagtttaaggctgggcgtggtggctcatgcctgtaatcccagcactttgggaggctaaggtgggcggatcacctgaggtcaggagttcgagaccagcctggccaacatggtgaaacctcctctctactaaaaatacaa

SEQ ID NO: 231415 - DNA, 556 bp, Homo sapiens
cacacccgctcaatttcaaactcattttttcacaattccttttaatttgatctttatttttttattaatgtgatttttctcctagtacatattactttcaacatccaatatagtttatgcatttataatggttattgtgaactgtatgaccattttattagattataagccataagaagtcagggattctttcacattttgtttggtaatgtatctggagtacaaaaagcaaaatatggacttaaatatttgtagaatgaatgaatcatgctgtcataaaacttgtggcaaataaatgctagggaaaaaatttggaattaagctcatcctgtagaggtaacctatattaaaaatttgaaaattctaacacatagcaacagttatcacgaatgttattggtggagggatagaaaaatagatcaatgaaacagaataaagaaaccaaaaatagatttttgcttaaccgatttttgaaaacaggtgcaaaggtaatgaaatggtagcagcatagcctattcaaaaaatggtgctagaagaaatgtacatctagaggcaa

SEQ ID NO: 231416 - DNA, 912 bp, Homo sapiens
gagtggccccgaagcttctttgctattttttgtgccctgagctgggaagtgggcttggcccccacaggcacgaggggcaccagcctggtgacgaggccggtggaggtgggagcagttatgactgcagccaagggtggaacctctgttctcaagttggacaaaggcagccatcagacccactggcatattccagagagtcccagtgttggggctgtgtgccctgggcacaatatttaacctctctgaaccttaatttcttcagggattttgtttaatacatctgactgacagtagttacaactgtggggatgtgtttctctcttccatgaggaaggcagttcaagccagactctatgaccttcaacaggcagatgaaaggcaagaagttactactgagtgcctactgtgtaccaagcactctgttacgtttcaatattttatgttgttaattccactaacctgagaaaggatacatatttttaaaaaattttaacagctttattgaaatatagttcacccatttaaagtatacagtttgatagcgttttgtattcctatatttgtaaattgtggcaaaatatacgtcaagtacaacttggcattttagaaattaagtgtacaattcagtgacatcaaacacattcacaatattatgcaatcaccggccatgtactgtggctcatgcctgtaatcccagtatttcgggaggctgaagagggtggattgcttaagctcaggagtttgagactagcctggccaacatggtgaaaccctatctctacaaaatatacaaaaattagccaggtgtggtggcatgtacccataatcccggctattcaggaggccgaggcaggaggatcacttgagtccaggatcgtgccactgcactctagcctgggtgacaaactgcga

SEQ ID NO: 231417 - DNA, 691 bp, Homo sapiens
atttttttcagaaatgtattttggtttctcttatggctgcttcaccatacatgctgttgcatttatttcccgtgttttattttgctaatctgcctattggcattttctaattgtaattattttttttaaattagttaatttattttaattgacaaaaattgtatgtgtttattatgcacaacatgatgtatacatgaagtgtgtatacattctggaatggctaaattgagctgattaacatatgcaatacctcacatatttaccatttttttgtggtgagaaaacttaaaattttgaaatataaaaccttatatttcaagaatataatacattgttcctaactatagtcaccctgttgtacaagagatctcttctaattgtaattcttatcaataaatcatcatcatgattaggtctggcatggtgcctcatgcctgtaatcttaacactttgggaagcccaggcagggggattgcttgagtcgaggagttctgtatgagaccagcctgagcaacataatgagacccagtctctaccaaaaacttaaaaaaattagccaggcattgtagcgtgtgcctgtggtcccatgtactcagaggctaaggtggtaggattgtttgagcccaggaggtccaggctgcttgagctgtgatcatgatactacattccagtctaagtgacagagtgagac

SEQ ID NO: 231418 - DNA, 172 bp, Homo sapiens
ttgttacaaaattggtttttatatattaacattgtatcctgagatcttattaaattcaaacctcagtattagtagtttatgtattttttttggatgatctctttatacagctatgcattttagaataaagaacattttgttttttcttttcccatctgtttatgttttttaa

SEQ ID NO: 231419 - DNA, 143 bp, Homo sapiens
ggaacagaaaatggaaagccttgttttgttgttgtagttgtttttagaaaatgcagttagccacattttaacagtttttaaaaatgaatcctcaacttattgtaacagcaataaataacactaaaaactgtatttcaatctcg

SEQ ID NO: 231420 - DNA, 456 bp, Homo sapiens
agaagactaataagagtaattaaaactaattaagactgtgtgctccagcaattctacttgcatgagttaccaaaagcaaatttataaggattgttgatgttgccttgtttgttgttgcaaaatttttcagaaacaaaagggaagtggtttataaattgccatatatccatatatatgtagctgcaggggtgaagcagtcctccacttgacatggaatgatctccaagatccattggagtgagctacaggacattagcattacagaaagagggatgatatacacatccgttggtgtgaacacaggatggctctggaaggttatggagaccctgggtgcttcaggagggggacagaggaattcagtgccacacagggagatttatcgttcaccaaataccctcctgtactgcatgaacctttttttttcttgccatgtacatatatgacctattttta

SEQ ID NO: 231421 - DNA, 459 bp, Homo sapiens
cacgcctgtagtcctggctacttgggaggctgatgcgggaggatcgctcccagtccaggaggttgaggctaccttgagctatgcttgcaccactatactctagcctgggccacagagtgagacttggtctctaaaaaaacaaaaattaattaattaaaaataaaataagataaaaaattaaaaacaaagaccataaatgccatgagttatgtttgttttttctaaaattttattcccagcatagggaataaatgcagaagaggtgcttcataaatatgtactgaattaacagataaaacgagggttcataataagaacctagactccttggagggtccatgagaaggtttttctttgtgtctgcgtgacaaattgtcagtcccaggatggtgccagaagtaaagttgggtcattggagggtgactttgacaacgtctgacatctgcagagaagaggcag

SEQ ID NO: 231422 - DNA, 587 bp, Homo sapiens
agcaagcctccgtctcaaaaaaacagaacaaaacaaacccaaaaaatcacaataagataccacctcacattcactaggacagctgtaaccaaaatgacagacatatgttagtgaggatgtggagaaattagaaccctcatacactgctgatgggaatgtaaaagggtacagttactttgcaaaacagtttagcaattcctcaaaaagttaaacacagaattaccatatgactcagcaatttcacacctaggtatagacccaagagaattaaaaacatatgttcatgcaaaaacttatctgcaaatgttcatagcagcattattcataaggccgagaacatccatcatctgatgaatggataaacaaaatgtctatattcacaatggagtattatccagccataaaaaggaatggagtgctgatacacgctatgatatggatgaaacttgaactcattatagtaagtaggagaagccagtcacaaaagaccacagattgtctcattctatgtacaactgatcctcaatttcatttcattataatgctgacaagattaaaaaaaaaaaacaactcccagcgggggcccc

SEQ ID NO: 231423 - DNA, 449 bp, Homo sapiens
tgggattacggtcatggatgtgattaccaccacacccggcctgaacacactgtttaatctctgtgaatgctcttttcctcctaggtaaaatagcataataagagttcctgactcataggttgcaacaaaaactgaagaaaatgctaaaaagcacacagcatggctgggcgcagtggctcagacctgtaatctcagcactttgggagggtgaggtgggtggatcacgaggtcaagagattgagaccatcctggccaacatggtgaaaccccgtctctactaaaaatacaaaaattagctgggcgtggtggtgcgcgcctgtaatcccagctactcgggaggctgaggcaggagaatcgcttgaacctgggaggcggaggttgcagtgagctgagattgcaccactgcactccatccagcctggtgacttgagtgagactctgtctcaaaa

SEQ ID NO: 231424 - DNA, 441 bp, Homo sapiens
gtgtgtgtttgtgtgtgtgtgtgtgtgtgtgtgtgtatctatttaaaaggcctttataatttttataattttatgtttaattggcaattaaatccattttgacttccctctagcaccaccagactttttctctctgtaccttatgatataattttgctatttgatttttgcctgagttgtttcctttaacatgcaaacttaaggctatttagctgacaactccctaggggagtaaaacaggttattaagaatttgaaagcctaagataggggaaaaaagctccttaagtatctatacgatgtacttctatcagcatgcctactatgtctatatatttatgtgatgtgtacacaatttctcgctactgaaaatatataaaagagttctaattaattggcttaagataaaaagcacttgaatctaatactttatcaggaaaaa

SEQ ID NO: 231425 - DNA, 741 bp, Homo sapiens
ccatcatcaaaaccatcaagtttaagaataagcagaaacactaacaatatattaaatggagggctacgcatttgtatttctgacttttcagtatataaactgcacacatgaagactatctcaggtcatctgatcagaaaccagtataaagcactaagccttccattagagacccatactgataaaatattccatttacagtacaaactcaagcaaacctaagatccttaaattgtggatatatttcatggtaataacagaagatctaacaaatgaaaactttttgctaatttccacttagcatcaagatagcaaatcagcccacgaatgaagcacacagtatatcttgatatccttcagcaacgaaattggaataatattaagttgtccatgaactaaatggatatataaaatgccaagaggtccagctgaaacagagacctcttttttccctaaaaaagaagaatctcacttcctgggtaaagaacaggctggtctaccctgccaggaccagtcttctcagagtcttctacagacaagatttacctgataagtctgcactggggagaaaaatgcacatcacaggctctatcattctgtttcttaaccacttacaaataagattcctttactactaccaatgttctttacaatataattactcaaggttcatatggattttggggttttttggctaattcatcaagccttatcatgaatttaaaacaaaccattgacttct

SEQ ID NO: 231426 - DNA, 306 bp, Homo sapiens
tcttcaggtgccgtggggctgaccagtgcccaccaactgtccacgcagatgggcgaagaggaaatggccctgcagagaccttcagagctccccccggcagcccactcccgggcatcagtcatgaaaattcaccagctttccccacaactaggggcctgggagctgagagcaggaccggacaatctggccccagcgccaagggcaggaacttttcccagcttctcttcagagctgcatcaaagaaagcagcgcccagtgacaccgctcctcttccttccacgcctcaggcctccacccctcaccctt

SEQ ID NO: 231427 - DNA, 536 bp, Homo sapiens
aagaaatgaacatatatggtctttgctttcttgaagcctaaattcttttgttcctggtaacatttttagttcctgtttggccatcacaacagtcttactcattggttcctcattgttaaactcttaagtttcctgtggtcaactgtgagatgaaaaaaattaaggacaaaatggggagttttaaatatagctaattttgtgtttatttattgcaagattatggccttactggcattttttgatgtgaaaatgtagtgatttttttttctgtgtgtgttgtcaaaataattatattacatctctcattttcctaccttcaccatgaaatcccaaagttggagtaccgaagatcagggttaaattcagatacaagcattaaaaaatggatttttaaaaatgtgtctgaaaattgagtgtctaattcaactttcaggcatataatgagcaagtttttcatacacagatgaagagactcatttctaacgggttggtgcttcttgcttgggctgaggcaaacagaaggctggtgtgactct

SEQ ID NO: 231428 - DNA, 1251 bp, Homo sapiens
gctgctttttcccttgttttttttttcttccttttaaaacaaagcagcgattcattccctctcccccagcagcgcggtcgggtgggatgggcaggcgagaaggccgttttcctagcactgacctacgggtccctccctgaaacgcggtgtcagatggttactgattaatattttggagaggccgcggcggcaggcagcgggtgagtctctaatcttctaaaaggggttcctatagaaacgcggagcggggcgcgccccccgctcggcccaggcccgggctgcggcgcttcgcacagcgcgcccctccccaaagcccctctttgcgtgggcgctcccctctccttccccccccgccaacaaaaaatcagagcagaaaaaaggattagatcggctgagcgcgaactgaatccctctcgattctgacatttcagcctattagcatttctccacggagccttctgaaacctattaaagtgtaatattaaaaacctcttggctgggggcctctctcgccttccatccgccgcgccccctccagggagggcgagaccgggaaaaaaataaaatctgttgagctcagaggaagtagccgccaagcccaaaaagtgcttggctggccacggcggccgtagggggaagggagccccaatcccccagactttgtacttttattttgcgctttcagcaaaatcctttctgggttgagtagccgtgagctgcccgcggccgacctacctgaccgggggcgcagggagtgcggaccacgccagcaggactgtcctgggggcccccgcaccctctctctgcagccccccgagcccggctaggcattacgtaccctggaaaggaagcttggaggggcagaaatccttccaatgctgcctcgaagagcaactgcagtgataagattttaattaaaacaagagaagcccgctctttcgccccgcgctgcggactcagcgttttcgcattgcccgttctgttttttttaaatcaatttttaaggcaactttttgggaggggggaaaaatgagcgagttagtgcccattcgttctattttcttttctccacttttagaaaaaagtggggggaggcttcgagaacgaacgggggggtgtctaatttaattccaggataaatttgaggaaaaaagttcagcctcttgagggcagtttcaagttgcccttcctggagcttcctgcgttagtttctaggctgccctcttttggaagctgtagctccgctgggga

SEQ ID NO: 231429 - DNA, 1152 bp, Homo sapiens
ggttttaggattcagtttccaaagctgttttgccacattggtctaacttggtattccccaattttggaaaccagtgtatgaggttttttttggccacggagtttgaaacactctctgggcactcatgctatgtgctgtcacctttttcagagatagttttaaagtcacttggctttgtttgggatgtttgcagttcccagttacttttggtggcttattcaggggcatccaattgggaattttgaggctgccagtgacccctgtttgccacccctgcaattcaacctgggcaaaataggggggccccttttcccaaaaaaataataaaaaaaaaagccagcatcctggacagagctgggggctacctggatgctgccaaaggccccagaagcctctcagaaggcccctgtgccacccccaaccccgcactccagtcttacctcctcctggcccctgacctttctgggtatcgaaaatgctgggctgacccagctggctgaggagggggctcccactgctggggggctccaggtggttcaggtggaggtaggatgggtacagcccactgggcaggtgggagaagccttcatgggcgtggcggcccacagctgcaccatgggcaggttgctaggggttggggagcggaaggacaggtcagagggcagtggcactgggctcccatgggacgaggccgagggccccatcccgctggccacaaagctgcccaagaaggcctcgccctggaaaggaagcttggaggggcagaaatccttccaatgctgcctcgaagagcaactgcagtgataagattttaattaaaacaagagaagcccgctctttcgccccgcgctgcggactcagcgttttcgcattgcccgttctgttttttttaaatcaatttttaaggcaactttttgggaggggggaaaaatgagcgagttagtgcccattcgttctattttcttttctccacttttagaaaaaagtggggggaggcttcgagaacgaacgggggggtgtctaatttaattccaggataaatttgaggaaaaaagttcagcctcttgagggcagtttcaagttgcccttcctggagcttcctgcgttagtttctaggctgccctcttttggaagctgtagctccgctgggga

SEQ ID NO: 231430 - DNA, 569 bp, Homo sapiens
cccctcccccaggcctccttcctccaccttccccgagtccgtcaacacaccgcacagcctgcatcactggccttagccacgtggaggcaaatattggtccccggagagggcctccctccctccctcagatcctcagagttggaggtgaactcccatggctgagctgcagggtgccttggatttccatgagtccaaaccctgagcaattctgaggccggccagtcccgcgacgttatcctctgttttataaaactgccggcactggtgctaagtgatgtccaccaggaacaagaggtgaccactgactggatgtcgccacagttcctgagaacagtttattcgtctactaagtattagaatatctattacattaattttaaaaaatgaaagctcctgcctcgtgagatttttacatcaaccatgagattctttgaaagccttcgagttcatgggccagcacttctgtgacggcgtttacttagacaaacattcccaccaagtacaatttcaaaagctgaattttaaaaaatctgttgtggtgcttgagggcttctgcagcagcctcagga

SEQ ID NO: 231431 - DNA, 476 bp, Homo sapiens
catttctttgttaatgaacttttcatgcactttttttacttatctagtagtctgcttattgagtagtttgccttttcatcatgtgtctgtgacacagagcaagtatcttttctatgccttggcaaattgtcatattgctttctaattttctttctaatcatgatcatgatgtgcatctgttatttacgtagtaatttgtgaactgaaaggctaccaataaagtttatactttatgcaatttcaattaatatacagtggtaactgttatttgaaccatgatgtagggaactagtgttatttaactaaattatggtaactgaaattggtgcataacaaagctgtaaaacaaggactgcctatatccttttcagtgcactaaatgctacatgattgtttcttacctcaccctatgtacttgtcatgtctttttaaaaatgtactcaaagaacagaaataataaaccaaatagagaagca

SEQ ID NO: 231432 - DNA, 386 bp, Homo sapiens
ggttgcagcgccacaaacagggcctctggctgggaggaaacagggaaggtcccctgaacggcaatctgtggtactgtggttcaggttccagaatgggtgttaagtgaatacttggcctaaaaaaaaaaaaaaaaatcacaacgcacacagtaatatatttctctataccaaactaataaatgcagccagaggataaccttcaaacccagaacttccaacttgctctgcttatagggacacttttttacaaaatgaaaaaaaaaaaaaattaatgtgtgtgcactttgctttatcaaactttaaatatattggcaccttgatgctcagcaccaagactgctccctgcactgcatgcggaggtgtctcttaccacacagtcaggtcac

SEQ ID NO: 231433 - DNA, 437 bp, Homo sapiens
ttttctagtcaacaatacgcttattacataaaatatccatgaaaatgggacctgggcattatctctcaagtttggtttccttattattgtttaatgttaattttcttttccagaaggctcatctgaatatatttttaatattagcgggtttttagaaaaaaatacgtccttgactccaacttgccagttacacatctcatctggaccagagtcggtagttggagtacattggtgaatagtcaccactctctgcccttgtgaagcttgtattctatacaggtaactacacggcagaaaacttgtaagaatttagtcatgatcaggaagattttcagcttattgatgtttcctcacagttcttgtccaaaaatgcgggtttccactgtattgaatcacttcttaaataaatattgattatgtgaaatagtaccaagaaa

SEQ ID NO: 231434 - DNA, 322 bp, Homo sapiens
tttttttttttgtatgttagtagagatggggttttaccatgttggccaggtctcgaactcctgacctcaagcaatccactgcattggcctcccaaagtgctggcattacaggtatgagccaccgtgcctggctgccaaaagttaccttcttaacacttgaatttctggtctcctcagcttccctatccatataggcacagagaggcagcatttgttttccagttaaaactctacctcattgtgattattatccaatacaattgttacaaaataagtaaaacttttatgaaacaatacaacataactgattttactctttaat

SEQ ID NO: 231435 - DNA, 896 bp, Homo sapiens
tcaatgagaggctctagttttggggaagagggaaacacctaaccttgacagaatcatcaccagagacacctgccggctgacaaggacagctttcttggagccaacagatgatgcaaggaaataagaagtgcacagacgcgttcagcgactcctccagcatcggcagcgtgttggatgatgcagacagggaggaccgagagccaacgttgtgagagcaggcccactgccagcaagcctccggctctgaaaaatcctcccaaattcgctcctcttccagaaaacagtgtcaacttctgcttcgattctgcctttctgacagtcaggagggtgcccgctgaagtttccaacacccatcagaacagctaccagccaggcaggaagcacggagaacaggagtcctccaagaatccagaaatggcctgtcacggctccagcagcttcctcccagcagccaatgacacggccaccttatgtgagtcaaagttcccctctccacaccacaagccagtcacgggtgagcctgggagaggcaaaggtacctttctgcacagtgaaaatagtgcttttgagtcatggaatgcccaccaaccaaagctgctggagagaaaggacacagctggaaccgtcccagaaagcaaagctcccaagcactatggggacacgaccttgctaagagaaccctgtcctcctgagcgcacagtctctccctgccaggtccaggccagctgcagtcaggaagagaacagacttgcagcaggggctctgtccacatctataccctgggggtgcagggatccaggagcccaggtatttgctgtggaaggaaaagctcccagctcacaacctgattctcaagagaagccagcccagcccccatggaggaagccaaagactgg

SEQ ID NO: 231436 - DNA, 431 bp, Homo sapiens
gatggagttttactttgtcgcccaggctggagtgcagtggcatgatctcggctcactgcaacctgtgcctcccgggttcaagtgattctcatgcctcagcctcctgagtatctgggactacaggcactcgccaccatgcctggctacttttttgtatttttagtagagacgaggtttcaccccattggactggctggtcccaaactcctgacctcaggtgatccacctgcctcagccacccaaagtgctgggattataggcatgagccaccacgcccggtctctaatagtatatttttaaaaactcattgagttctctgttttcatgacctctcaacttggagtactggttaagataataaatttatagccaagtgtgtatttactatacacatttatagtcaaataaaatgcacatattttcatcatatt

SEQ ID NO: 231437 - DNA, 432 bp, Homo sapiens
caacatagtgagacccccatttctacaaaaaataaaaataaaaaatgagccgggtatggtggtgtgcacctgtagtcctggctacttgggaggctgaggtgggaggattgcttcagccagggaggtggaggctgcagtgagcctaggcaacagagagaggcttcatgtcaaaaaaaaaaaaaaaaagatttgagtttcttctcctttgttgggttgcaaaaggaacacttcgaatgtggtttcagtgcacttaaaaatagcgagttcagctgggcgtggtggctcacacctgtaatcccagcactttgggaggctgagacacggggagaaacccatcgaccttgtggggctggaccctacaaggtgggtaggtcacctgaggtcaagagttgaagagcagcttggccaacatggcgaaaccccgtctctact

SEQ ID NO: 231438 - DNA, 456 bp, Homo sapiens
ttaggagtatcctgacaacccgatggaaagtggcctgggtgtcaaggaaaaagcaacgtggaaacaattcaggtttcttccatataagagagacaatcttttcccaggtgtgggtcctccctcttggcagtagcggagaagtttttgaaagataaatgatgcttttattgtgtcatttggcctttgtttggcgcttgatacagcccagggtttgctattctaaaatctgtcactagacagatgtgtgctgcagccagtgtggagaacatggggcaggagagaggaagaaccaggtgtccccgttccccagaccagtgctgatgtgctaccagaaatgggtttgcaagattaatcaccttcctcctgcttcccttgaattctaattattgttgtcaggatctgttgaagtagtaaaagctgctggcaaccaagacacataaaagctaagctccagtt

SEQ ID NO: 231439 - DNA, 2675 bp, Homo sapiens
  misc_feature (806)..(806): n is a, c, g, or t
  misc_feature (1268)..(1268): n is a, c, g, or t
  misc_feature (1497)..(1497): n is a, c, g, or t
  misc_feature (1965)..(1965): n is a, c, g, or t
  misc_feature (1970)..(1970): n is a, c, g, or t
gaagggagacagggaagtgctgggaggagaagggtgggtccctggcgagggctccacccccgggcctgtgcccacagacctaggtgaagacaggcactccagccttcacgtccaaatgttgcatttcccaagaccactttgacccgccacgcccccattctgtgcctataaaaaccccaagaccctagcaggaagacacacaagctggatgccgagagaaacacattggcgaaggaatacacaggtggatggacgtcgagaggaatgcactggtgtaggagcacactgggatgccagcaggccatcgactggtggaatgacacaaagtttggctggggcagttggagaagagttgggccaccaagcggccagactccaggggaaaaccatttcccttctggctgccccatctgctgagagctgcttccactcaataaaacctcgcactcattctccaagcccacatgtgatcctattcttctggtatgccaaagccaggatacagaaagccctctgtccttgccataaggcaggggtctaattgagctggttaacagaagccgcctatggacggctaaactaaaagagcatcctgtaacatatgcccactggggcttcagctgtaaacatttacccctagacactgccgtggggtcggcgcctcacagcccgcctgtctgtatgctcccctagaggtttgagcagcgggacactgaagaattgagccacacccccatcacacacccgcaagtgggacaagggaacctttcccatttcactgctgtgacagtgcaaagctattaaantgaagttgaggtagcaaggaataccaagacaactgagaagtccttataaagaacacattcagtacttttaagatgttattttccaaaacatacacttttgggttgcctgtcagactggagatgtatgcctgtcgagtcacgttacactgaatttatttaggaaatagtctgacatacagaagtttcacttctcctgccacttgtgaaggatttgtctcattggtgtggtgtcagcctggtgagataggacttgcttgtggtttggaagctgtctgtgggcaactccaagagctgttgtgctctgcctctttatgaaccttctgtgcttatggaaatggttcccagcgtgtgctcctcaggaatgagtctgagtgacagaggtgccagtaggctatgagatggtagcaatgaccttagctagtcttttttgtttgttttgttttgagacagagtctcgctccnttgcccaggctggagtgcagtggtgcgatctcggctcactgcaacctctgtcacccaggttcaacctctgtcacccaggttcatgccaccgtgcctggctaatttttgtatttttattggagatggggtttcaccatattggcctggctgaccttagctagtctttcttaagaggctgggagcctgaggacagttgagaggtactgagctagttaaacctcaggcgctntccctgcgaaggctctatggcagataccacttggggctatagaagctgttacctacagtgtaaattctggatttcaatgcagagggcagacatagggctactaattttattttgttttgcaaggacattgaaaaaaagtcattgtttactgtcgtcagcattttataaaagggaggatactttttaatcacaaaatatgaagaagtttattatttgttttttgagatggagtctcgctctgtcatccaggctggagtgcaatggcatgatctcggctcactgcaacctctgcctcctgggttcaagcaattctcctgcctcagcctcccgagtagctgggattacaggcatgcaccaccacgcccagctgatttttgtattttttgtagagacaggatttcgccatgttggtcaggctggtcttgaactcctgacctcagatgatccacccaccttggcctcccaaantgctnggattacaggcatgagcccagctgtggtttcttatatcatactgttaagtgtacttttaaagctttaaaaagcagtgttaaccctttcttaaaacagatttcagggaagacagacgtttaaaacattagccttctctccccatctggagtatggtttggaagtcattgctttgtagtaaggcattattttcctggtacattgccaaggaccaacaactgttaaatcaacaaactaagattttcttctagatttgtatcggattgtgactttgctttctccctttcaccacccattaatgcttagtaaagccactatggacctcacgtatctaaacccttccctgaaatgcatctctcttttcataccactccaatgggaactcctgttgatttgtttctgggccctgacagattagcaggaaaagaaagcgctttagaaaagtgagaggggagttcagaggttagaggggaatcagaaaattaatgtcatgattatcaagaatgtttccagaaggcagggctcatcagtccttgacaaaaaggctgatgaaaaaaatggagttgagtgcagccgatcacctcaataatcctagcagtttggcaagctgaggcaggaggatcacttaagtcccggattttgaggttgtagtgcgctgtgatcacaacactgcactcggcctgggtgacagagctaggctgtctctt

SEQ ID NO: 231440 - DNA, 493 bp, Homo sapiens
cccctgtcctgcaagaggatttggagtttcttctcgggaaggtggacaataccctgtctgtcattccaaggccagaagtgactgggtaggcaagacatccctggggtgagaggaaccttcctttctatggccctcctggtggggaggcctggcctcaagtcaaggagatgcggaaagcagtcccagagggatgggggaggcagaccaggcactagattcacaagacgccactgagagcagcctgcactttacacctggactccacaagacaccactgagagcagcctacactctacacttggacttcacgagacgccactgagagcagcttacacttggacttcacaagacgccgcttctgtgcgcttttcctttgctcctcaccctttcatacagactgccactcacccttgaagacttggctcaaatgctatctcctctatgaagtcctccctgaccaccgccctccagtaagactccatctactgcgccc

SEQ ID NO: 231441 - DNA, 429 bp, Homo sapiens
gaggcatgggtatgatttctctactccccagaggaagcagctctttgagacaagggtaagattcagccacggtgtgttgctgttgtagaagctttaaccacctcagcttacagcagaggtttcagcaaaataagcttctctttctataaatggcttcttctcatcgcatctctgtggacagtgtctaatggtgggattggctcattttctggaaccaaataaacatttgttcccactagccccatagtgctagcaccactattaatgagcggcaatgttgtccattgctgcaggagtcattagggaagccctggtagagctctgtttattaccacgggaggtgtcagaggcagagaaagcacagctggggcttccaggctccagcagatcacgcagcgcaggcagccagagccatcattcttagacttg

SEQ ID NO: 231442 - DNA, 139 bp, Homo sapiens
tacagaagagacaggaaaaatattcctctccccatttgtcaccagatggaagggaaaaaagtctgtcctgagaatttgtaaccacaaggaatccctcatatctataccagtttgagatctaaatttatccgtgtagtct

SEQ ID NO: 231443 - DNA, 375 bp, Homo sapiens
ggaggtcgcagctgactaggtgagggcgggagactgcctgctcgtctcctcctggccccggctatccagggcgtcgaggtgaggtccgcagccactcgggcggtgcacaacatgttccaggagtcccgcggccgagcggcgcacagaggagcaaggagaggaccggaagaaccgtgctcttggctgcaatttgtttccaagagtgccaagacatgcccgagactctcagcgcgctctcagagcatcaactcaagcaccgaaaaaatctacctttgccttcccggggattcattctggggtatgcctgtgttgtttctttttaagaccactatagtgggaacaaaccaggaggtgccgagttgcaaaaaaaaaaaa

SEQ ID NO: 231444 - DNA, 415 bp, Homo sapiens
cctcttctcttccagggaagacttggttgcttagacacctctcctttatttcttttctgttttaattcttgcctagttggaaacttgattgaaagctatgctgaaaactagaagaaaaactgcagtgttccacatccatgacaatggtcattgtcacttttaggtattgggacaaaggtcacatctggacaacaaaatgcagggtaggaggaggtatttatttgttctccttaacaggtttaaagggacttaagatagcgagactctggaactgataattttattagttggaacagagggaacaatgcagtgaagtgacattacaaacagctcccaaagaaatattttctgatgtttccaaataccaaattgcatttcctgccttgctccaggcatgcactgcaaacttttttct

SEQ ID NO: 231445 - DNA, 412 bp, Homo sapiens
ctcatttaattctcacaaccaccctacaaattaagtgctcttatcttcactttacagattaggaactgagacacagaaaacttaagtaactcacccaggatcacacagtgacatggccagggttcaaatgcaggcagtccagataaggcagtgctataccaccttaccatggtaagtcaaacccttagaacaaaattagggagcataatttttggaaagttataactatttatctttctccttcgttttcttgtcatcccttttgtttgtttttttagtaatagccagtattttttatttccactttcccatgagtctattatagctaacttgtaatactgtaactagaaaggaaaatgttttcctctcctgcctcaactcctaaaataaagcacttaatcattaggacttc

SEQ ID NO: 231446 - DNA, 584 bp, Homo sapiens
gcatgaacaaccgggaggtgctggagcaggtggagcgaggctacaggatgccctgcccgcaggactgccccatctctctgcatgagctcatgatccactgctggaaaaaggaccctgaagaacgccccacttttgagtacttgcagagcttcctggaagactactttaccgcgacagagccccagtaccaacctggtgaaaacctgtaaggcccgggtctgcggagagaggccttgtcccagaggctgccccacccctccccattagctttcaattccgtagccagctgctccccagcagcggaaccgcccaggatcagattgcatgtgactctgaagctgacgaacttccatggccctcattaatgacacttgtccccaaatccgaacctcctctgtgaagcattcgagacagaaccttgttatttctcagactttggaaaatgcattgtatcgatgttatgtaaaaggccaaacctctgttcagtgtaaatagttactccagtgccaacaatcctagtgctttccttttttaaaaatgcaaatcctatgtgattttaactctgtcttcacctgattcaacta

SEQ ID NO: 231447 - DNA, 545 bp, Homo sapiens
gagctgcttattgctgtcagcatcaacttcacagaataagtgtaggctcacttgcctaggtaaagcatatagattggctctaagtgagtatcgctccctgtgaataattgagatttgattatccttttcccaaattttaattaggatacttatgtaatgtattttattttaatgcagaggtatttatagagtccataaggagttatatcggttcaaacatttctcctaaaaagaacaaaggttttatttgctagctgagagttcaagatatccttttggagatgaacagtattgctcacttataagaagcagacagtcagaatacaatgggatggaattagaagacctgtctctttcagcaagttaagactttaatatggtacccctgtataaatgtaagaaagttaactcattatttgatcatgtatgctgcagtgctttacaaatactaaaatccttaagcaatacaagacataacatattctgtccttttaaattactgaaagacgaagactctcggtttcttccaaatgtttccctgaaac

SEQ ID NO: 231448 - DNA, 271 bp, Homo sapiens
acaaattctctgtttttgtttttctgagacatcttaatcttttgttcttttttgaataatagttttgctggatatagaattcttgattgacagtttttttgtctttcagcattttcaatacatcattccactatcttctagcctccagtttctgatgagaagtcagctgttaatcttattgaagatcctctgtacatgattactcacttctctcttgctgcttgagtttttgtccattatttcctcaagtaatctttctgtccccttactc

SEQ ID NO: 231449 - DNA, 446 bp, Homo sapiens
ggcactctggaccacgctgagggcgggccggcttccctgcgcctgcgctgacattttgcagtttgggaaatggcggtgctcggggacgtcgatactgacccagggcgggaggcagctgcgagtggattgtcgggccttttcagaccggggtctgaacctctgggccggggcggggctcgggtgctgcctggctctgccaacgttctgggccctcgagtgtgaatgagctccgcccgccatccgccttgtagtcctcgcgtccggccaccggcgcggggctcccacccatccccaccccaccccaccccaccccaccccgtctgtttcctttctggtccagtggggacagccctgagtgagcagcgtcgtaggagtaagatacctgggcccccggcctctccttcttgccctgcccccgcaccccctcccgcacggggacccggata

SEQ ID NO: 231450 - DNA, 463 bp, Homo sapiens
cacagtaatctcctgccctacctttccctgattcctgctccctcagaggcaatcactttcaacactttgggctgtttcttcaatgtggaggtatttacctttatatttcataaataaaccaactgctatttcttgacatcatttgacttcatgttgttatacatacatgtttcctttccccatttttcagtacagttatatgatcctttttgaataacttagtattccatttttacgttattatgactgtgtaaatagtattcccagtgaagccccccacccaggtcactttgatgatgtttcctttttaaatgttgtgctttgtttttttctccttggagttagtaactgctctttcagtattgtctgctttgttttctatatgcacattcgtaatttattctcaaatgcttatttagtttccacatttttttaaccctgggcctagtaactcgtttttctt

SEQ ID NO: 231451 - DNA, 263 bp, Homo sapiens
agacaatgtgcagtagagcctctctagtatttccaaagagatgtccccaatatctcaagctcatggtttttgcaacttccatcaacccatcctcaaaattagctctttaaatcttacacctaccatagcctctcatctctgtcccctctttttcattcccagtcctattttagttgaggcgtttattgtaacagtaacctcccacagtgtactgaatgcagccttcatattgctaccagattaatcttccaaaaccactgtgc

SEQ ID NO: 231452 - DNA, 845 bp, Homo sapiens
gcagctttgctgccagagggggctgacttgatagggagcagagcgtggaaaaacctcatgtccagtagcattgtcagtaacagtagtcatcttggtggcaaacaaacagagaccagtggctcagcaggtcttagatcttgatcccagttagggcaagcagtggcccagctgactagctagaagtttactagtgagatctggatagtgagaaagctgtgggggaccacacatctacacagaagaggcctaagacagcctaagctactcacacaattctggctaaacatgagtctgcatacacatgcaaagatgtgagagggcccaacagaaagtaaaaaccagagcagagtttaaaaccgcgtgaactttgctgcacttctcccgaaatacacagatccatccagggtgaaagtattactggctcaaggtgtttgaccacaatcattggttgacaaccactaaggaatacagataggggtgaaccctaggaagccaggctgaaaaagaaaaacaagaataattaaaaataaatgaggctaggcgctgtggcccacacctgtaatcccagcactttgggaggctgaggcaggcagatcacctgaggtcaggagttcgagaccagcctggccaacacggggaaaccccatctctactaaaaatacaaaaaagttagctgggtgtggtggcaggcgcctgtagtctcagctacttgggaggctagggcaggagaatcacttgaactgggaggctgaggttgcagtgagctgagatcatgccattgcaccccagcctgggcaacaacttaacttttttgaaactctgtctcaaaaaaataaaataagata

SEQ ID NO: 231453 - DNA, 312 bp, Homo sapiens
tagaagaatcgaggctctgggggagggtggctgagaaacaggtccaaggtcacatagccagtcagaggcatttgtactgtaactcgggtctctgtttcgcttattgtagtaatttcccctttgcacagatgaagacatttagacatggaggacagttttttcgtaagattcttctgcttggcaaggacaaaacagaaccagctccagactctggaacttcctgccatgatcactttctaaaaatccaaacttatttcctccccactctgttggatttcataccttccataccaataaatatcagaaaagtga

SEQ ID NO: 231454 - DNA, 316 bp, Homo sapiens
cgtgcccgtctgctgcaagcctgtgtgctgtgtgcccgtctgctgtggggcttcttcatgctgccagcagtctagctgccagccagcttgctgtgcctcttcctcctgccagcagtcctgccgtgtgcctgtctgctgcaaagctgtgtgctgcgtgcccacctgctctgagtcatcctcttcatgctgccagcagtctagctgccagccggcttgctgcacctcctccccgtgtcagcagtcctgctgtgtgtccgtctgctgcaagcctgtctgctgcaagtccatctgctgtgtacctgtttgctctggggct

SEQ ID NO: 231455 - DNA, 456 bp, Homo sapiens
cggcgtattttaaagagcttaagatttaaagttagatttgtctacttgttgagcactatgtacaaagcaagctccacaaatctttcttgagctgggacagtgcaccaggccccatgggatagcgataagcgagactcactgccattcacgcttagtggaagacccgaggtgcatcaggaaacaacccagcactctatcatttgataacattggaatgtgctaagtgcatgaaaaggaggaatgattcactctagaaaccagtgagggcttcacagaagatgagcttagctgacaatagatgctgaagctgtggagtgaatcagaagtggaaaaaacccggctcccctaagcaccgtattcagatatcatttttcatgcactgattctagaaacctggcactaaagagaaaattgcatggaggcaacatgtatgatgtggtacaattgaatccggga

SEQ ID NO: 231456 - DNA, 696 bp, Homo sapiens
gactgtctcaaaaaaaaaaaaaaaattatttctcttaactcttttggcttagtgtagacttgaaattttggggaatacattttaaaaagttgaaatatagcctatttatagtaagatggacaagtccttagtacactgtttgataaatttttgtgaacacactcatgtaaactattatccagattaaggtatagaacattaccagcaaggccaggtgcggtagcgcacgcctgtaatcccaacacttggtgaggccaagatcatattgatcactttagatcaggagtttcagaccggcctgacaacataatgaggccccatctctataaaaaataaaaaaaaattagccaggcgaggtgacgcatgcctctagtcgtaactacttggagactgaagcaggagaatcacgtgagtccaggatttcaaggctgcagtgagctgtgatcgcaccactgtgcttcagacttggtgacagagtgagaccttgtctctaaaaaagaacaatcccctatcccccaagaacattatcagggccccagaagcagttaatattcatacctttcaatggcaaccagtactttttttttttttatcagaatagttgttatttttggatttctaatttttgaacttaaatggcatcatagaatatgtacccttctgtgtctgatttctttcattcagtattcagctttt

SEQ ID NO: 231457 - DNA, 506 bp, Homo sapiens
ccgatccgccccagacaggtctaagctacctctttgcacctgggaactctgtgccttttgagagttgaaggcttaaaacaacaacaaccaccacaacaaaactattcacctttttatccaatagaaactaaggctgtaaaggatgatgcccggcatctgctcagcttctgatgaggcctcaggaagcttccaatcatggcagaaggcaaaggggaacccatgtatcacatagcaagagcaggagcaagagaggcgcggggagaggttttaaaccacgtcttgcaagaactcactattgcgaggacagtaccttggggatggtgctaaatcattcatgagaaatctgcccccatgatctaatcacctcccaccaggccccaactccgacactggagattacatttcaacatgagatttgggtggggacaaatatccagactatatcggggctgtaccagcaattgactcctgacatctgttctgactggtcagagtctgttctgata

SEQ ID NO: 231458 - DNA, 398 bp, Homo sapiens
ccgatccgccccagacaggtctaagctacctctttgcacctgggaactctgtgccttttgagagttgaaggcttaaaacaacaacaaccaccacaacaaaactattcacctttttatccaatagaaactaagctgggaaaaccaagacatagtgaatctgagaaactgcctaaggacaagctcatcggcaagcggcagagcagtttttaatcaaggcccactttttaaccactggaaagaaaagagggaaggttctgatttcatgctcactgggacacttcctggacacattcagcttcttacccattattcagaaggagaagtagaaacctgtagaagtagccctggggagggtagtttctgataaaggatgtctccatttggaaattaattagtaa

SEQ ID NO: 231459 - DNA, 419 bp, Homo sapiens
tttaaacacagaatcttagtctgtcacccaggctggagtgcagtggcctgatctcagcttactgcagcctctgcctcctgggctcaagcagtcctcacagctcagccttgcaagtagctgggactacaggcatgtgccaccatgcccaggtaattttttttggtaagacagggttttgccgtgttgcccaggctggccttgaactcctaagctcaagtcatctgccttcctcggcctcccaaagtgctgggattacaggcatgaaccactgcgactgaccctctttgcctttttgaggcccagttttctcatagggcttttgagagacaatgagtcaacaaaatgtaaaatgaaaaaaaggctttgcaagtctaaactaaaactcttgcatttgtagcttcagtgaaacctttgagatg

SEQ ID NO: 231460 - DNA, 390 bp, Homo sapiens
tgtggaacgtgactttcctgatgcgcctggggctcttgcccctatgctgtggtgctctaccagatgccaggtccacacccctgctcactgggcaccgccttccctcccgccaagcagacaggaagcagcatttttatcctttggagcctaatttggtgatgcttttccagcacccatggggtgtgctttcccttgaggttgagtccttgtttcccatgcatcccacagggtgagactctcactcatggtcaggttcgaacactccttcccacccatgtctcctcctctttctggtttcatcaatggtaacccttccacaccagtcttctggtgctcttcaaacacagcttgtaaattttttcccttgctgaagtgattttcccagccaat

SEQ ID NO: 231461 - DNA, 322 bp, Homo sapiens
agggaaatggctaactgacgaggggcgcgcgagcagcggctgcctgaaccccaaccgctgcaagtttacgccccgggaggccgggatgaaggccagggacaggaaacgcggaggaggaggtggaggaggagggggcgcgcagcgcaggcccctgccccccggcccacccaggaggctctgccagctaagcagcgagcaggtgtcagacacagacttccctggagttgactctcagcctctcccactcggaccgcgcgcctctcccactcggactcggatcctcgaaacttttaatctttaaagaatacaatgtgaaaacctt

SEQ ID NO: 231462 - DNA, 438 bp, Homo sapiens
gaccagctccagtttcatgggcccaaagagctcagtgaagcaggctttaaaaatggatcacccagcctctgcaccctgaagtctgaagattttctaatatgatcctattcccataaacaagccttaattccaaagtcttggagtgaagaatgactgtatgaaatttgtacctgtgttaattagctctgtctccctaggaaagtctctgagcctcaactttcctcatctataaaatggggataataatagaatcattgtgaggattgaatgaaccttatagttcttaacagtgtgctttgcactctgtaaacactcattatcattattactttaattaccgctactgttattaatctatgcaaattctgtctgttcttttgagactgagctgagattcctcctcttccatcaagtgttccctgactactccacctggaa

SEQ ID NO: 231463 - DNA, 537 bp, Homo sapiens
ccttgttgcttatatctactcccaagttaaaataagaacaaactgacggggaggttacatggagatggctctgtggaagcgaggcttggggtcagatggcctcggcttggccgcagctccctgtgcgtcacctgccttggctgcgtggtgcggcggctgggagtggtgcgccttcttacctgcgctcctgcggagagtgtggccgtgccagccggtatgttgggagcccaatgacttgtttcttaagccaggcatccttgtgagccacatgttgttgagacgctagaccaggggtcggaggtgtggcctatgccagtccggctgggagcgtggccctgttggtggcgcttctcaggcccacggtcacgcagtcacatggtgccatgctgaggcatttgacttggaccagacatagtgctgtttcctcccatcttagtgggagtcaggagccagccagggcctctggggttctagcctcctgcacctccttgccggcgtcctcagggtttctgcgatcagctccttcatctgcgaaag

SEQ ID NO: 231464 - DNA, 371 bp, Homo sapiens
tagtatgaacgtaagatactggtttttagaccctagggaatagagggtaaggatcgaacttcaggtagggacttttaggttgtggttccttcttactccctgaactcactcaagggatgtggtcctctcctgaggctacagtgaactcaggcggctgagatgttgagacagggtaggaggtagaggagcagtgccttcctctggggtcggtatgattccggaaacactgcagccccccgttaccagtgctggagtgacagcattcaaaaatgtacttggtatcttctaaaagcttttaaaatggaaaccatatagtatatatacacacaagacttcaacaattttcaaatggatagtgagcgaatacagtc

SEQ ID NO: 231465 - DNA, 451 bp, Homo sapiens
aaataaagctgcctccgtacacagcttcatcactggcctgagggcatttcagtttatttcagccaattaaaataacaattactgcaggaggtgcttatgggagtaccttctgctggttgagtccccaccactcctggtatgattaaaactcctcaacttcaagttttcatatcgcgatgactacttgtacttcaaaaaaaaaacttgtacagtaatttggaagagcacgttctatttattcccttcattttcaaattcttttcttaatgttttacagacccctttctacagtattatagcctgggcttcacctcttcttcctcttctcagaaacagtttgtacctactaaattattatataaaagccagcaccattgttaaatataatttataatgagctaaagtcagaaaccgaaaaagtaaaataaaataaaatgaataagaaaccacc

SEQ ID NO: 231466 - DNA, 447 bp, Homo sapiens
attttgtatcaatcttattttctaatgtatgcattttaatgctataaatttccttctaagcactacttttgctacattccataaattttgataattagtattttcactttgattttgttcaaagtatattaaatttatcttgaaacctcttctttgacctatgtgttattcaggcatatgcttcatcttcaattattttgggatttcccatatatatttctgttattgatttctagtttaattccactgagatccgagagcagagattgtgtgatttctattttctaaagttggtaagagggtatttatggccccaaaagtgatcttcaatattaagtgctcaatttgaacttcaaaagaatatatttccttttgtagttgaatgaaatactttatatatggcaagtattaagtttgtgcaaaagtaattgcggctttgtcattgct

SEQ ID NO: 231467 - DNA, 500 bp, Homo sapiens
tatgaatgaatggatttgaagggcaggttgaatttagatcatggaagaagacaacattatcagtgaaatcatcccttaattatagagacaaatcattcaacatttctgagttcatactctgtgccttgtgggacatacaggtgaaagactctttccctgcagcgtgcttccttggagaacacttcccttctttcctctcctcatctatttcctccacctttcctgctctcctccccattcccacttactgaaatgctaagtgcccatcaactgctctgttgctgcatctttggtacctctcttgtgaccctcaccacattatgcctccactcagtaatttaatttaaagtataacctctcatcatagcctttgtttattgaggggaggttccatgccacctccagtacctggacactcaacatgtggatagactgagataggccacttatcatggtaatagttatttactaattcttagatacggtgttgtaagtatgga

SEQ ID NO: 231468 - DNA, 388 bp, Homo sapiens
ataccttgcatagctcactaagcacacctccttccatatgagctgtgttatattgtggtacatcatttggaactgctgagtctatatggaaatcctgatgtactctcgtagaccactagccacactgagagtgttggaaactaaagaccccaggtgtcctttggagccaaggacagttgtcttgtacaagatcagtggggctggacccatccatttgtgagtcctgaagtcgagctcaatgatattgtcttttgcagtgactgaacgggctcccatgccaggcctggctggatgttggcctgggagccctctttgcgcacggtggtacaagtcctctccctgctgtgcagaactaagagctctggaatgtgggcacagcatgtggtat

SEQ ID NO: 231469 - DNA, 502 bp, Homo sapiens
tgttataaaaaaagacggacaaaacaatcgtatttgaggacatgctatatttcttattttctcaatttttaatactttggatattgcttatttgctcaaagcttcagttaactccagaattaggcctagtagtattaatagtagtagcagtaaagattacgtgacctttaattttttagacagtaattcttatttaacacaataggctccatacatatatatttattatgattttattgcttgtaagtgtgtatgtttagtgtttgctgtatgattttattgaatatgtttaagaattatgaaggtcactgattttatgtgaaaatgacaaattatgtacctgtgtgaagtatatcttgcctcttagaaaggtttctcctttcctgagctggaattttctttaaagttttctgagaattaaactttgaccagaaaaccttctatcaaacttttctgggtaactgatgtgatacaaatttgatttttgtgcatttcattatta

SEQ ID NO: 231470 - DNA, 772 bp, Homo sapiens
ggctgccagcgatccataggtctttccaatgggaaagccaaggtgtgcaactacagtgggtggtattactgcagtagctgccacgtggatgacagctttctcattccagcacgcatagtccacaactgggatacttcaaagtataaggtgtcgaagcaggccaaggagtttctggagtacgtgtacgaagagccgctcatcgacatccagcaggagaacgccatgctgtaccaccacgcagagccgctggcagccgtgctgcggctgcggcagcggctgaagtcgctccgagcctatttgttcagctgccgggcagcggtggcagaggatctccgccgcagaattttccccagagaatacctccttcaacagatccacctgtattcacttgccgacctgcagcagcaataccagaagaaatggatgtgactgctttacattaatttctactgatcccatccaaacagataatatcagaagaaatggatgtgactgctttacattaatttctactgatcccatccaaacagatgaacaacttgatgtcttcctttaaaaaaaaaatgacatgtggccttcatagcttttttccttccccttgatgtaaatctcaagtgtttaaaaggaggaatgagtctaaatcatagaaaatctctatttagattgggataagctaattagctattatttattgatcccttgctgtaagtcagaaactatattcgatgctttcaatgtattaaatctgatccttctctcaaccctgcaaagt

SEQ ID NO: 231471 - DNA, 444 bp, Homo sapiens
agggaggcaaaatgtgtgtatccctgagctggaagttcaaccaggcagatttcatgggcttctttcacacaagaaggcaataccagaagaaatggatgtgactgctttacattaatttctactgatcccatccaaacagataatatcagaagaaatggatgtgactgctttacattaatttctactgatcccatccaaacagatgaacaacttgatgtcttcctttaaaaaaaaaatgacatgtggccttcatagcttttttccttccccttgatgtaaatctcaagtgtttaaaaggaggaatgagtctaaatcatagaaaatctctatttagattgggataagctaattagctattatttattgatcccttgctgtaagtcagaaactatattcgatgctttcaatgtattaaatctgatccttctctcaaccctgcaaagt

SEQ ID NO: 231472 - DNA, 1094 bp, Homo sapiens
ggctgccagcgatccataggtctttccaatgggaaagccaaggtgtgcaactacagtgggtggtattactgcagtagctgccacgtggatgacagctttctcattccagcacgcatagtccacaactgggatacttcaaagtataaggtgtcgaagcaggccaaggagtttctggagtacgtgtacgaagagccgctcatcgacatccagcaggagaacgccatgctgtaccaccacgcagagccgctggcagccgtgctgcggctgcggcagcggctgaagtcgctccgagcctatttgttcagctgccgggcagcggtggcagaggatctccgccgcagaattttccccagagaatacctccttcaacagatccacctgtattcacttgccgacctgcagcagacccaggcactacagccaaatctaacctgatccacagatgattgaaggatcgggggagctcggcacgggatgtggcagcaaatgtgcggcactaaggacaaagtcactgccttttgtggaagccagatcagaaagatgactgtgtgttgtgagtggtggatagagagccctgttgcccaggtgagaaggagctcagttgagataaggattccaggagccaactcgagcccctcaggtagagacaacaataccggttgaggctgcagctgtggagttggatggtgtttagtcagtgctgaaatcactttcctgggagtcccttggcatgcagtcatctgagtgctgttgttgttgttgggtttttgttgtttcctattttaaaagagtaatcataatactgacgaagtgagggcctgttttcaaagaacatttacttaaagatatagagtaaggttagcatcggtcttgccagtggtagaaacctatgccaccaacagccatcatgaaagggccccaggagtctttctggttcttcatttctattcagtttgattcaacaagtgtgtattgattgaatgctttctgtgtgccaatcattgagctagccacagaggaggcaaaggtgattaagccacaattccttccctcactgagctcacagtctgatgagagaggcagataggcattgt

SEQ ID NO: 231473 - DNA, 511 bp, Homo sapiens
cagaaagataaaacagtattacgaccaaatttatcagagagattacatttcttaatttggaaatgtaaaatttttagtagttttgacaaatggttgtaaccaaaaggttatcagctaggatagaaataaaattaggctgctggtagattaggaaatcatgtagaattagacgatgtctggtaaaaattttgttttcctttcaactttgaggcagttagtctaatagaaccctcagtggagttagaagtgcccagaattattaggaagtgggcaggggaggctgcctcattacttccttcagctttcaatcagtacaaaatggagcttaaaatcaggctttcagcagacagcaggatgttccatatctacctatccacaaatattcctcattatttttagcctgtaactgtcatatagcacttaaacttatttttaaatgctttgctaatgtttcacttgagtagaaaaacgcacatgatattctataaaatttacctgcaaatatactaaa

SEQ ID NO: 231474 - DNA, 541 bp, Homo sapiens
accaggaaatggagcctggaataagcatagccaccagaagggggtattctagaggagagacccagagaagtggaggtccaggttctctggatgaactctgctcaaatctttacttgacccctgaactacacatgaatgaagcagcttcaaaacaaccactgaggcttaagtaacttaactgtatattgaacttgcagtcattgcaggtgagaccacagtttgagtctaatcaaggtaattgcctgctaaaacaaatacctcagtcatttttaaagcaatacggtagaactcaggttatactaaatataactttctcaatgtccaggatacaatccaaaattacttgacagagaatgaactaggaaaatatgacaagaaaaagacagccaacaggtttacccagagatgaacaaggtgaccaaaagatataacacaaggactttataccagctattctaactgtgctcaatgaataaaggcaaagatgtttacaatgaatgaaaagatggaatatctcagcagagaaatagaatatgtaaaa

SEQ ID NO: 231475 - DNA, 230 bp, Homo sapiens
agttatctacccttctgtaaatactcagatttcttttatagctgatgttgtcacccattttttatgacaattactagaacagagttcaccaaccttgttggcatttagtaactggactcccaactgggctaagcagttgtagtaaatgtccctaataggcgtaaatagaggagagtaaaatgaactggaaatgttaataggagggaatgagaaagaaaaagttagatgag

SEQ ID NO: 231476 - DNA, 363 bp, Homo sapiens
attcactataaaaaaaaaacaggtaagtcaaaaaatgaagaaactcaccgcatagtgccaccatctcagagatgattgttaaatattgggtctttatcttgcccatccttttcatatgctatagaaatgcctatcttcccgaaaataggcttatcttagtcacagttttgtgatgtgggtccggtcccccccaaccccgccatggagtcttgctctgtcaaccatactggatggctcactgcacaccctgtcccccgggctgaggcaggagaatcccttgagcccgggaggtggaggttgcagtgagctgagattgcaccattgcactcccccctgggcaacaaggcaagactctatatcaga

SEQ ID NO: 231477 - DNA, 476 bp, Homo sapiens
ctgcgtatcctaggtgagtttgaggtccccacagagaatggaccaagtaatcattgtcaccaaagagggatccttcctggtggtaggtgcgatggataagtgaggggtaccagcaaccacctgtcataggctgacggcccagatgataagttccccactgtgaacttgcttttagtcagagaaaaatcagctctgtgaatctcctagggtctgcatatttaactaatttgggatgtttcctattaatgcctatttttcgaaatgcaaaaaaatacaagtaaaaatttacctgtaatgtcagcatccagctgtaaccactgttaatattcttggtgtgttccttacagacttttgtctattccagtgcatattgatatacatactcatgttcatttaaataaaatgggattagacaatgcttgatgttttatgatatattttctcataaaaatttaagctgtcttacaaaatttaat

SEQ ID NO: 231478 - DNA, 179 bp, Homo sapiens
ttttaagtgtacaaataggtgtatatatttatggcgtatgtgtgacgctctgatacaggcatacaaagtgtaataaccacatcagggtatttggggtgtccgtcacctcaggcatcgatcatttctttgtgttagcaacactccaattccactcctttagttattttaacatatacttg

SEQ ID NO: 231479 - DNA, 387 bp, Homo sapiens
gtccacatttaaaaagtgaatccagtgttgtcattgtgatcgaaatggctcagctccaggttctaagagcttcctgttcagtacatagtagtcaacaaccttgtttgcattaatggcatttttttttaatttggaagaaagcaaggcccttcttaactttcatcccttgttttaatgttagcaatgttagatgcaaaataaggccaggcaaaacgtcaccatggttgttctcagaaaagcaaaccaacttcggactgcattaaaagagtttctgcctgtttagtaaatgtgccacatttggtgactatttttctttttttgcaatatttcaacttgtattgtcaaaagtgctttggaaaaaaaatataatatttgtaataagaggca

SEQ ID NO: 231480 - DNA, 459 bp, Homo sapiens
taagttttatcctaattgtaacattaaattgcaaagaaaataatgttttctactctatcttaaaatatatggctaatacgcattaataattaatgtaaatgtattacttctctagaccgttcttaggaatgtctcagaagctgtttgtttatgtcaacatgaatatcatctgagatttcagaagaaagagaatacataatttatacctttagttttgagttaaattagtatcatgttcacaccccgtaaacaattaattctctaaggagtaggctctctcattgaaatggtaggttagaaataaaccacatacaggaatctgtaaaataattctgtttgttatttttattatatctaaatcttcaaatagttttcttttaattaaaaaaatttggttattctagaaaaatactttttttccatccagttaaatcaaaataaaactatataataagtatg

SEQ ID NO: 231481 - DNA, 372 bp, Homo sapiens
tgcgtgaaaatcccattcaggctatgatccacggctaaatttcagtcccaagcatctatcacatgtcacctctaaagcgccatctgtctgctggtaacactactactgaagcatttgctctgctgagggaaaacaatatgctcctatattaggggtcatttctgctctacagggaagaaggactctgtctggccttataaacctagaatactaagaataacctgacccccaattctgaggcagaggcagtgagctcaggtcaaggataagctctgacagttgtccagtcaatgccagagaagtctctctcctaaaagagaaacacacacaaatatacacaagattgaaggctgaggaaagtgctcgaaagga

SEQ ID NO: 231482 - DNA, 502 bp, Homo sapiens
aataataagtgacagagtcaggactaaagggtcaccgagcgtgcattcgagtcatacaatgctagttttacacttagaattacttgaatgagaaaatttaggagtatatacagggccttttaagtattaatcaaagtataatataatttcggtactatttatgtatgtatttcttctaggagctagactttcgcatgtcttaagtgtaaggtataggccaggcgcagtgtctcacgcctgtaatccccgcacttttgggaggccaaggtgggtggatcacttaaggtcaggagtttgaaaccagcctggccaacatggcaaaactccgtctttacgaaaaatacaaaaattagcagggcgtggtggcacatgcctgtaataccagctactcaggaggctgaagcaggagaattgcttgaatctgggaggtggaggttgcaatgagtgagatcacgccactgcactccagcctgggtgacagtgagactctgtttcaagggga

SEQ ID NO: 231483 - DNA, 870 bp, Homo sapiens
tgcatggggcggcctgggactcgggggcggggtcagtcatataaggctgtgcccagcgcttttggaagcagtaagtccagcccgaggctaaggaggtgttaaccaccgaagggaggtagaatgtttttccccaccagaggaggcagcgaccacgtctcctctatggaggcattcaagagccgtccagctgaagcagcatcactgtctgagctcggaaggcacaatccacataggtctgcatggtccacagagctgcatacccacggggccagcgggaggtgggcagctgccgggctctcttctgaagcagacaggatctcactctgttgctgaggctggatcacagctccctgcaaccttgaactctccctcaagcaattctccccactctgccttccaaagcactagcattataggcctaagccaccactcccatccactgtagtgtaaactgtctccttcaatgtttccaatagttgcggagcagatcagataagggttcttcctgtctgttgcttcaagtttcattctctctttaaacaatacaaggttggcttccatggttccttcttaaagaatgttgaaggtgtgtcttcagattcatttagtgttcgtggaaccccagggaaagctgatgtaaaaacctcttttttctcccatatgtctcaaaaagttgtattttctgggtccaagggatctgcaagcctcctaaaggcatttccattgtcactaccaccaggtgtgaactgtaatctggcacgtatagttccaagaactgtcataatagatgctgaagaaacattgtgaaggttaactcgctgttaccaactgtgaagtcattagctagaggaatcttgggcggtctgaaat

SEQ ID NO: 231484 - DNA, 850 bp, Homo sapiens
cggggtcagcctgcggtggaggggaagggccctagagccgtggggagaggcagcccgtggcctggagcagtggaggtgttaaccaccgaagggaggtagaatgtttttccccaccagaggaggcagcgaccacgtctcctctatggaggcattcaagagccgtccagctgaagcagcatcactgtctgagctcggaaggcacaatccacataggtctgcatggtccacagagctgcatacccacggggccagcgggaggtgggcagctgccgggctctcttctgaagcagacaggatctcactctgttgctgaggctggatcacagctccctgcaaccttgaactctccctcaagcaattctccccactctgccttccaaagcactagcattataggcctaagccaccactcccatccactgtagtgtaaactgtctccttcaatgtttccaatagttgcggagcagatcagataagggttcttcctgtctgttgcttcaagtttcattctctctttaaacaatacaaggttggcttccatggttccttcttaaagaatgttgaaggtgtgtcttcagattcatttagtgttcgtggaaccccagggaaagctgatgtaaaaacctcttttttctcccatatgtctcaaaaagttgtattttctgggtccaagggatctgcaagcctcctaaaggcatttccattgtcactaccaccaggtgtgaactgtaatctggcacgtatagttccaagaactgtcataatagatgctgaagaaacattgtgaaggttaactcgctgttaccaactgtgaagtcattagctagaggaatcttgggcggtctgaaat

SEQ ID NO: 231485 - DNA, 1414 bp, Homo sapiens
cggggtcagcctgcggtggaggggaagggccctagagccgtggggagaggcagcccgtggcctggagcagtgggtggatcgggcggaggccgtcaagctagccggaaggggctgtgctgtcaaccagcgagcgcaggaggtgttaaccaccgaagggaggtagaatgtttttccccaccagaggaggcagcgaccacgtctcctctatggaggcattcaagagccgtccagctgaagcagcatcactgtctgagagagaggcatccaaaagggaaaaagccggcctgaggtggaccacagcagacttgataggcaggcttgaggaggcggcgtctgatttacacagggcccacagattggtctgatcaggtgtgacgtttacatagcgctcggggaaggctggtcgtcccaccctaatcttattaaacaaatgggctttctacttggccagtaccatcttgtctgctccttactatacacgcgggtggcaaagacaggagaagatggagccaccgttttgaacgtgtctattcccaggtaacctttctctgttggcacaaccaccagtattagcctatgcaagcttccagcttgcttgtctgtgcctgcagcttgattttacaggttgttctttgttagaaaagaaaatgatttggggcattccttttaatgcttttcattaaaaggaaaaccttaccaaggacttccttattctgtctgcctaaataatttatttttaactcttctatcacagctcggaaggcacaatccacataggtctgcatggtccacagagctgcatacccacggggccagcgggaggtgggcagctgccgggctctcttctgaagcagacaggatctcactctgttgctgaggctggatcacagctccctgcaaccttgaactctccctcaagcaattctccccactctgccttccaaagcactagcattataggcctaagccaccactcccatccactgtagtgtaaactgtctccttcaatgtttccaatagttgcggagcagatcagataagggttcttcctgtctgttgcttcaagtttcattctctctttaaacaatacaaggttggcttccatggttccttcttaaagaatgttgaaggtgtgtcttcagattcatttagtgttcgtggaaccccagggaaagctgatgtaaaaacctcttttttctcccatatgtctcaaaaagttgtattttctgggtccaagggatctgcaagcctcctaaaggcatttccattgtcactaccaccaggtgtgaactgtaatctggcacgtatagttccaagaactgtcataatagatgctgaagaaacattgtgaaggttaactcgctgttaccaactgtgaagtcattagctagaggaatcttgggcggtctgaaat

SEQ ID NO: 231486 - DNA, 298 bp, Homo sapiens
tccacagagctgcatacccacggggccagcgggaggtgggcagctgccgggctctcttctgaagcaggtgagtatggagtcccctgtttgtctgcaaagaaacagactgcagacattgctgcagtcatggtctcggcaacgtcatccctgatctagtggaaggccaaggtctctttctagcaactacataagtagagatggaggagaacacaaaacaggaagacaatttttcctttttctctcattttgggcctcttttaattacgaatgctgacctttgtcagggaatcatttttaa

SEQ ID NO: 231487 - DNA, 584 bp, Homo sapiens
tttggagtggcggttgggcggttgggcggttgcatggggcggcctgggactcgggggcggggtcagtcatataaggctgtgcccagcgcttttggaagcagtaagtccagcccgaggctaaggtgagagcgtctgccgggacagtgtggctggacccacgtggcaggtgcgaggcagggtcactgcggatgggagagaaggcgtagaggcctcaggccttgtggggtgtcacctagagatgccccaggagggctggggggccggggtgtttccagtgaagccagttggcatcctggccgctctctccgagtggaaggcagagggaaataattgtattcacgcagggtggatcgggcggaggccgtcaagctagccggaaggggctgtgctgtcaaccagcgagcgcaggtggcctggtgtagaccccgggaggctgggcggggacgctgggcggggacctggttgaggacctgggcggggacactgggtggaaaccctgggtgggcacgctgggcggggactctacagggctctccctctgggtagtcacattcacttgttgagttgggtgtccatctcctctg

SEQ ID NO: 231488 - DNA, 852 bp, Homo sapiens
aaatcttcatcttgtcagaattcccactgctgtaattgaagaataggactcttataggacctggggctcccaggaggaagtcattggcaaaatgcagatccagctgctccaaagtctacaatacctgcagacaaaggcacggcctcctctgaaggtagagcctggggaagtccttgggcagccctaggaaggaggtggacctcctgcctctgctctgccagcaacacaccttgaggggtcctgcttatcctaggtggggttgtgttcagagaagtggagggaggctgctttggtgaaggggtcttatgcgaggtcctcatgcaaggaccatctcctatttgtagagacaatctttttgttttccagatgcagaaacctctctggtttagtcaggtgccctacactctgacatgtggctggcaggctgcagccactgccaccccctgtgtgaagtgacgagaaccactggcagtccttaagggctatgtggtcattttcctagatggccttgaggctcagtgattgtaactctcaagtgccttgtcctgttagcctcctctgttgaagaacttagagcatgtggggtctggctgtcagccccctgacagcttgctgccctccaaggcatggcgttcttcataacacacctgctttcacaggctggcttccccatccgccatgatattcacatggtctcttggtagagccctttcattctagggtccggggcaaggcgggtagtcccaaagtcctcttgctgattctctttctcccaggaggctccaaggccatcagacaaatgcacccttggtgacctcctttgatatcccagcaatcctgagtgtttgcaca

SEQ ID NO: 231489 - DNA, 466 bp, Homo sapiens
tgtctctggcttgtgagacttagcataatgttttcaaggttcatccatgccgtggcacctatcagtactttattcctttttattgaggaataatatttcattttacggacataccacattttgtttattcatctgtggatggacattcagattgtttctacctttgggctattgtgaatagtgatgctatgaacactggtgtacaagttttgtttgaatacctgttttaacttctttggggcatatacctgctagtagactgagtgggtcatatgttaattctatgtttaactgtttgaggactggccaggccaatctgttttcctgagtgactgaaccattttacatttccaccagcaatgcatggggggttcaaccaatttcatcacatctttgctaactctttggtttctatttcttgttttgtttttttaagtgttaattatagctaccctagtgagtatga

SEQ ID NO: 231490 - DNA, 327 bp, Homo sapiens
aggaaggatctggtcccaaggaaatactcagagaagcaaaagcagcaacttttcaatctgcaggtcagaaccaacaggaataaaactctccagggacagatggcaacaaaacctgccaagcaactctactcaagtgactgaagcaggcgccgctgccggggaggaaccgatgggagagaaaggccaggctgggccctgacaccgccaggactccccctccaggaaccagggggcttctcctggtaagcgtctcaatagctatgcaggacccaccaatggcaaaggttaagcaggtatatgtgcatgtgcgtgtgtgtgcgtgtgtgt

SEQ ID NO: 231491 - DNA, 2398 bp, Homo sapiens
gggacccagacttgccgacctgtacgactctggccatggggaacagccactgtgtccctcaggcccccaggaggctccgggcctccttctccagaaagccctcgctgaagggaaacagagaggacagcgcgcggatgtcggccggcctgccgggccccgaggctgctcgaagcggggacgccgccgccaacaagctcttccactacatcccgggcacggacatcctggacctggagaaccagcgagaaaacctggagcagccattcctgagtgtgttcaagaaggggcggcggagggtgcctgtgaggaacctgggaaaagttgtgcattacgccaaggtccagcttcggttccagcacagccaggatgtcagcgactgctacctggagctattccccgcccacctgtacttccaggcccacggctcggaaggactcacatttcaggggctgttaccgctgacggagctgagtgtctgcccgctcgaggggtcccgagagcacgccttccagatcacaggcccactgcccgcacccctcctggtgctctgccccagccgggccgagctggaccgctggctttaccacctggagaagcagacggccctcctcggggggccgcggcgctgccactcggcacccccacagcgccgtctaacccggctgcggacggcgtcagggcacgaacccggcggcagtgctgtctgtgcctcgagggtcaagctgcagcacctgcccgcacaggagcagtgggaccggctcttggtcctgtacccaacgtccttggccattttctccgaggagctggacgggctttgcttcaagggggagctcccactccgtgccgtccacatcaacctggaggagaaggagaagcagatccgctccttcctgattgaaggccccctcatcaacaccatccgcgtggtgtgcgccagctacgaggactacggtcactggctgctgtgccttcgcgctgtcacccacagggagggggccccgccgctgcctggtgccgagagcttcccagggtcgcaggttatgggcagtggccgaggctcactctcctcaggcggacagaccagctgggactcggggtgcttggcgcccccctccacccgcaccagccactccctgcctgagtcctcagtgccatccaccgtgggctgctcctcccagcacacaccggaccaggccaactctgaccgtgccagcattggccgacggaggaccgagctgagacgcagtggcagcagccggtcacccgggagcaaggcccgggcagagggccgcggccctgtcaccccactgcacctggacctgacccagctgcacaggctgagcctggagagcagcccagatgcccctgaccacacttcggaaacatcacactcgcccctctatgccgacccctacacaccacccgccacctcccaccgcagggtcacagatgtccggggcctggaggagttcctcagtgccatgcagagtgcacctggacccacgccctcgagcccactcccctcggtgcctgtgtctgtgcctgcctctgaccctcgctcctgctcctccggccccgctggcccctacttgctctccaagaagggagccctgcagtccagagccgctcagagacaccggggctcagccaaggatggggggccgcagcccccagacgcccctcagcttgtctcctctgccagggaaggttcgcccgaaccctggctgcctctgacagatggtcggtcccccaggaggagccgggaccccggctacgaccacctctgggacgagactttgtcttcctcccaccagaagtgcccccagcttggagggcctgaggccagtggggggcttgtgcagtggatctgatggccgcggtgaggtgggttctcaggaccaccctcgccaagctccagggtacctgcccctctaacccacttcaaattacaagtcagggtctgaacccagtgtgatggggggagtctctggggccctgagttcagagcccgtccctcagctcctgttccttggtgccagcagctggggcagggaagggtgggaggggccccatccaaaggatgccctggccagcgaggctgggtcacaggtcagggaggtcctggccgtccacagggtcggccctcagctcagcccgccaggagtcagggaggagactcgctgggagtgggagggcagcacgggcgtgaaggtcggaggacagagaaaggtcagcagggtcagagtatgtgaggtcagagggcatgagggtcacaggtcagcaaggtgtgaggagcacaagccagggtgccccgaggaggagggtgggtgggtccttgtgtggcctggcgcgcgccacagggcagcacgggagacgttgacaccaccggacgagaaag

SEQ ID NO: 231492 - DNA, 124 bp, Homo sapiens
cagctctgaaggaggctctggggcctggggtaggctgtgccctgcccagcagccgtctcatcctcagtctgtccatctacaccatttctctgccttcacggctgcaggaagaatgatgaggccg

SEQ ID NO: 231493 - DNA, 396 bp, Homo sapiens
agcactgccaaggacatggatctctcaagctcctgtctggcacattgcaggaagtaaggggcatgtctaaccaccacgctcagccaagccaaagaacaaaggcagcggcactctctctggaccttggggaataacacagccctcccaggcagaagatgcaagcattcctgttgcagtgcaattaggagcagcgaagaaactcagacatgtgccccttctgtgttggcaactgatatgacagaacttcatgaggtgcaaaatacaggctgtgtgtgtgtgtgtgtgtgtgtgtgcacactcggtgctatatgctgcagcccaagtttcagagtgatttttaacttgaagctgatgagatgggatattgtgtcttttttaaaaatgtaaccaacaaca

SEQ ID NO: 231494 - DNA, 396 bp, Homo sapiens
catagtatgcatttttagtcttattcctgggtctgttttatttcttcatccatgttctgtcttttttctcaccccaacttttttttgcttttacctctaattcttgtccatctagttaattccttttgaataagttagaatataaataagtagtaaattaatataaatgaataaaatagaaaacttcattgaaccatcttgtcattactttaatcaacagtttccaaccttggctgcatattttaaaaatactgatgcctgggtgccacctcatgaaatttcgatgtcattgctctgagttgcagcccagacatcatcattttgataagcttcctaggtgattcctgtgtgcagccaggataggaaccactcttctaagtctttgctgggatttaa

SEQ ID NO: 231495 - DNA, 968 bp, Homo sapiens
gtctttcacaatagagctacccagagcactggctactgttagaacaagatatatagcatatatttcaatagaacgcccagataataaaaaatctgaatctggatgtatctatatcctattggcttgttataggttatcagagcactggatactgttagtacaagatatatagcatatatttcaatagaacgcccagataataaaaaatctgaatctggatgtatctatatcctattggcttgttataggttatcctttattttattccagagggaaataactttaggtataattctaagaactgcataataacttgaatactttttctctgacaggacaagttcagaaagagattgatttaattatgggccctaatgggaagccttcttgggacgacaaatgcaaaatgccttatactgaggcagttttgcatgaagttttaagattctgtaatatagttccattagggattttccatgcaacctctgaagatgcagttgtacgtggttattccattcctaaaggcacaacagtaattacaaatctttattctgtacactttgatgaaaagtactggagagacccagaagtgttccatcctgagcgatttctggacagcagtggatattttgccaagaaggaagctttggttcctttttccctaggaagaagacattgtcttggagaacacttggctcggatggaaatgttcttgttttttacagcattgcttcagaggtttcatttgcattttccacatgaactagttccagatctgaagcccaggttaggcatgacattgcagccccaaccctacctcatctgtgctgaaagacgctgaaactgcctgggatgttttcgggaacaagaatgtatatttgccttatccctgaacttggtttaatcaaatcaatgtgtgtattagaataaaagtcacagcatcaaaaagccaaatgaaaaacaaaaaa

SEQ ID NO: 231496 - DNA, 1103 bp, Homo sapiens
ggcacgaggcttcaggtccagggtggacgcatgccctcaggtgcgggcgtcttgcgagtcggcctcgcagctctgtggaagccgcacgcggcttgtcggaaaatcaaggcgttctgagttctagatggttaatagcaggttcttcggtgtctgcagtcgacgaacgactggtgtaggcgtttgctgtgagaatggagaatgcaggggaacgcccctgactgagaagcgggccctgggaaacgattgtgaacgcgtgaatgaattgatgactaaaatccgctgcgggggtcctacagcgcagatggtaatgccgttctgactggctgggaacggcaccttagcagatacttaaaaggcgccttctgtgtgccactgtcactgccaacttggtgactcatttaaaactcataaccagccggtgaggtcggtacttcgctcctcctcattctgcggaggggaaagcagcacggaaatgccctgtgactggcagcggaaaaggcgaccaccgcttgtgtgtgggtgtcccgacgtccggagggggcaggagtttccacgggtcctgggacagagctcacctgttttgttttgaattacacttatttatatgcaactacaggcctgacgctagcggtgaagaaggcagatacagccttttaaggagttggcagatgagtgggagagagaaaactaatctcattatcggccacaggctgtggtcagtgttttgaaggaaaagtacagggatgtttggcaactgtggtatttcaggtttgaccttaaatccttacttaaaccaatttttacaaggattggtctaggtgcccgggcgcggtggctcacgcctataatcccagcactttaggaggccgaggcgggcggatcacgaaatcaggagatcgagaccgtcgtggctaacacggtgaaaccccatctctactaaaagaatacaaaaaattagccgggcgtggtggcgggcacctgtagtcccagctattcgggaggctgaggcaggagaatggcgtgaacccgggaggcggagctttcagtgagccgagatcgcgccactgcactccagcctgggcaacagagccagactccgtctc

SEQ ID NO: 231497 - DNA, 1712 bp, Homo sapiens
ggcacgaggcttcaggtccagggtggacgcatgccctcaggtgcgggcgtcttgcgagtcggcctcgcagctctgtggaagccgcacgcggcttgtcggaaaatcaaggcgttctgagttctagatggttaatagcaggttcttcggtgtctgcagtcgacgaacgactggtgtaggcgtttgctgtgagaatggagaatgcaggggaacgcccctgactgagaagcgggccctgggaaacgattgtgaacgcgtgaatgaattgatgactaaaatccgctgcgggggtcctacagcgcagatgatcttcagtttagatcttggaggcatatcaactgtggttctaaatggctatgatgtagtaaaggaatgccttgttcatcaaagcgaaatttttgcagacagaccatgccttcctttattcatgaagatgacaaaaatgggaggcttactcaattccagatatggccgaggatgggttgatcacagacgattagctgtaaacagttttcgatattttggatatggccaaaagtcttttgaatctaaaatcttggaagaaaccaaatttttcaatgatgctattgaaacatacaaaggtagaccttttgactttaaacagttaataacgaatgctgtttcaaacataaccaatctgatcatttttggagaacgattcacttatgaagacaccgattttcagcacatgattgagttatttagtgaaaatgtggaactagctgccagtgcctcagtcttcttgtataatgcctttccatggattggcatcctgccttttggaaaacatcaacagctgtttagaaatgcagctgtagtctatgattttctctccagactcattgaaaaagcttcagtcaacagaaagcctcagctacctcagcattttgttgatgcttatttagatgagatggatcaaggtaaaaatgacccatcatctactttctccaaagaaaacctaattttctcagtgggtgaactcatcattgctggaactgaaactacaaccaatgtgctacggtgggcgattcttttcatggccctttatcctaatattcaaggacaagttcagaaagagattgatttaattatgggccctaatgggaagccttcttgggacgacaaatgcaaaatgccttatactgaggcagttttgcatgaagttttaagattctgtaatatagttccattagggattttccatgcaacctctgaagatgcagttgtacgtggttattccattcctaaaggcacaacagtaattacaaatctttattctgtacactttgatgaaaagtactggagagacccagaagtgttccatcctgagcgatttctggacagcagtggatattttgccaagaaggaagctttggttcctttttccctaggaagaagacattgtcttggagaacacttggctcggatggaaatgttcttgttttttacagcattgcttcagaggtttcatttgcattttccacatgaactagttccagatctgaagcccaggttaggcatgacattgcagccccaaccctacctcatctgtgctgaaagacgctgaaactgcctgggatgttttcgggaacaagaatgtatatttgccttatccctgaacttggtttaatcaaatcaatgtgtgtattagaataaaagtcacagcatcaaaaagccaaatgaaaaacaaaaaa

SEQ ID NO: 231498 - DNA, 1923 bp, Homo sapiens
ggcacgaggcttcaggtccagggtggacgcatgccctcaggtgcgggcgtcttgcgagtcggcctcgcagctctgtggaagccgcacgcggcttgtcggaaaatcaaggcgttctgagttctagatggttaatagcaggttcttcggtgtctgcagtcgacgaacgactggtgtaggcgtttgctgtgagaatggagaatgcaggggaacgcccctgactgagaagcgggccctgggaaacgattgtgaacgcgtgaatgaattgatgactaaaatccgctgcgggggtcctacagcgcagatggtaatgccgttctgactggctgggaacggcaccttagcagatacttaaaaggcgccttctgtgtgccactgtcactgccaacttggtgactcatttaaaactcataaccagccggtgaggtcggtacttcgctcctcctcattctgcggaggggaaagcagcacggaaatgccctgtgactggcagcggaaaaggcgaccaccgcttgtgtatcttcagtttagatcttggaggcatatcaactgtggttctaaatggctatgatgtagtaaaggaatgccttgttcatcaaagcgaaatttttgcagacagaccatgccttcctttattcatgaagatgacaaaaatgggaggcttactcaattccagatatggccgaggatgggttgatcacagacgattagctgtaaacagttttcgatattttggatatggccaaaagtcttttgaatctaaaatcttggaagaaaccaaatttttcaatgatgctattgaaacatacaaaggtagaccttttgactttaaacagttaataacgaatgctgtttcaaacataaccaatctgatcatttttggagaacgattcacttatgaagacaccgattttcagcacatgattgagttatttagtgaaaatgtggaactagctgccagtgcctcagtcttcttgtataatgcctttccatggattggcatcctgccttttggaaaacatcaacagctgtttagaaatgcagctgtagtctatgattttctctccagactcattgaaaaagcttcagtcaacagaaagcctcagctacctcagcattttgttgatgcttatttagatgagatggatcaaggtaaaaatgacccatcatctactttctccaaagaaaacctaattttctcagtgggtgaactcatcattgctggaactgaaactacaaccaatgtgctacggtgggcgattcttttcatggccctttatcctaatattcaaggacaagttcagaaagagattgatttaattatgggccctaatgggaagccttcttgggacgacaaatgcaaaatgccttatactgaggcagttttgcatgaagttttaagattctgtaatatagttccattagggattttccatgcaacctctgaagatgcagttgtacgtggttattccattcctaaaggcacaacagtaattacaaatctttattctgtacactttgatgaaaagtactggagagacccagaagtgttccatcctgagcgatttctggacagcagtggatattttgccaagaaggaagctttggttcctttttccctaggaagaagacattgtcttggagaacacttggctcggatggaaatgttcttgttttttacagcattgcttcagaggtttcatttgcattttccacatgaactagttccagatctgaagcccaggttaggcatgacattgcagccccaaccctacctcatctgtgctgaaagacgctgaaactgcctgggatgttttcgggaacaagaatgtatatttgccttatccctgaacttggtttaatcaaatcaatgtgtgtattagaataaaagtcacagcatcaaaaagccaaatgaaaaacaaaaaa

SEQ ID NO: 231499 - DNA, 1493 bp, Homo sapiens
atagaaagtcactaatggtttacgttcctttcatggttcacgaatagtttacgttgttaaagggaagctggacgagataataaagatcttcagtttagatcttggaggcatatcaactgtggttctaaatggctatgatgtagtaaaggaatgccttgttcatcaaagcgaaatttttgcagacagaccatgccttcctttattcatgaagatgacaaaaatgggaggcttactcaattccagatatggccgaggatgggttgatcacagacgattagctgtaaacagttttcgatattttggatatggccaaaagtcttttgaatctaaaatcttggaagaaaccaaatttttcaatgatgctattgaaacatacaaaggtagaccttttgactttaaacagttaataacgaatgctgtttcaaacataaccaatctgatcatttttggagaacgattcacttatgaagacaccgattttcagcacatgattgagttatttagtgaaaatgtggaactagctgccagtgcctcagtcttcttgtataatgcctttccatggattggcatcctgccttttggaaaacatcaacagctgtttagaaatgcagctgtagtctatgattttctctccagactcattgaaaaagcttcagtcaacagaaagcctcagctacctcagcattttgttgatgcttatttagatgagatggatcaaggtaaaaatgacccatcatctactttctccaaagaaaacctaattttctcagtgggtgaactcatcattgctggaactgaaactacaaccaatgtgctacggtgggcgattcttttcatggccctttatcctaatattcaaggacaagttcagaaagagattgatttaattatgggccctaatgggaagccttcttgggacgacaaatgcaaaatgccttatactgaggcagttttgcatgaagttttaagattctgtaatatagttccattagggattttccatgcaacctctgaagatgcagttgtacgtggttattccattcctaaaggcacaacagtaattacaaatctttattctgtacactttgatgaaaagtactggagagacccagaagtgttccatcctgagcgatttctggacagcagtggatattttgccaagaaggaagctttggttcctttttccctaggaagaagacattgtcttggagaacacttggctcggatggaaatgttcttgttttttacagcattgcttcagaggtttcatttgcattttccacatgaactagttccagatctgaagcccaggttaggcatgacattgcagccccaaccctacctcatctgtgctgaaagacgctgaaactgcctgggatgttttcgggaacaagaatgtatatttgccttatccctgaacttggtttaatcaaatcaatgtgtgtattagaataaaagtcacagcatcaaaaagccaaatgaaaaacaaaaaa

SEQ ID NO: 231500 - DNA, 1514 bp, Homo sapiens
ggcacgaggcttcaggtccagggtggacgcatgccctcaggtgcgggcgtcttgcgagtcggcctcgcagctctgtggaagccgcacgcggcttgtcggaaaatcaaggcgttctgagttctagatggttaatagcaggttcttcggtgtctgcagtcgacgaacgactggtgtaggcgtttgctgtgagaatggagaatgcaggggaacgcccctgactgagaagcgggccctgggaaacgattgtgaacgcgtgaatgaattgatgactaaaatccgctgcgggggtcctacagcgcagatggtaatgccgttctgactggctgggaacggcaccttagcagatacttaaaaggcgccttctgtgtgccactgtcactgccaacttggtgactcatttaaaactcataaccagccggtgaggtcggtacttcgctcctcctcattctgcggaggggaaagcagcacggaaatgccctgtgactggcagcggaaaaggcgaccaccgcttgtgtatcttcagtttagatcttggaggcatatcaactgtggttctaaatggctatgatgtagtaaaggaatgccttgttcatcaaagcgaaatttttgcagacagaccatgccttcctttattcatgaagatgacaaaaatgggagactcattgaaaaagcttcagtcaacagaaagcctcagctacctcagcattttgttgatgcttatttagatgagatggatcaaggtaaaaatgacccatcatctactttctccaaagaaaacctaattttctcagtgggtgaactcatcattgctggaactgaaactacaaccaatgtgctacggtgggcgattcttttcatggccctttatcctaatattcaaggacaagttcagaaagagattgatttaattatgggccctaatgggaagccttcttgggacgacaaatgcaaaatgccttatactgaggcagttttgcatgaagttttaagattctgtaatatagttccattagggattttccatgcaacctctgaagatgcagttgtacgtggttattccattcctaaaggcacaacagtaattacaaatctttattctgtacactttgatgaaaagtactggagagacccagaagtgttccatcctgagcgatttctggacagcagtggatattttgccaagaaggaagctttggttcctttttccctaggaagaagacattgtcttggagaacacttggctcggatggaaatgttcttgttttttacagcattgcttcagaggtttcatttgcattttccacatgaactagttccagatctgaagcccaggttaggcatgacattgcagccccaaccctacctcatctgtgctgaaagacgctgaaactgcctgggatgttttcgggaacaagaatgtatatttgccttatccctgaacttggtttaatcaaatcaatgtgtgtattagaataaaagtcacagcatcaaaaagccaaatgaaaaacaaaaaa

SEQ ID NO: 231501 - DNA, 1476 bp, Homo sapiens
ggcacgaggcttcaggtccagggtggacgcatgccctcaggtgcgggcgtcttgcgagtcggcctcgcagctctgtggaagccgcacgcggcttgtcggaaaatcaaggcgttctgagttctagatggttaatagcaggttcttcggtgtctgcagtcgacgaacgactggtgtaggcgtttgctgtgagaatggagaatgcaggggaacgcccctgactgagaagcgggccctgggaaacgattgtgaacgcgtgaatgaattgatgactaaaatccgctgcgggggtcctacagcgcagatgatcttcagtttagatcttggaggcatatcaactgtggttctaaatggctatgatgtagtaaaggaatgccttgttcatcaaagcgaaatttttgcagacagaccatgccttcctttattcatgaagatgacaaaaatgggaggcttactcaattccagatatggccgaggatgggttgatcacagacgattagctgtaaacagttttcgatattttggatatggccaaaagtcttttgaatctaaaatcttggaagaaaccaaatttttcaatgatgctattgaaacatacaaaggtagaccttttgactttaaacagttaataacgaatgctgtttcaaacataaccaatctgatcatttttggagaacgattcacttatgaagacaccgattttcagcacatgattgagttatttagtgaaaatgtggaactagctgccagtgcctcagtcttcttgtataatgcctttccatggattggcatcctgccttttggaaaacatcaacagctgtttagaaatgcagctgtagtctatgattttctctccagactcattgaaaaagcttcagtcaacagaaagcctcagctacctcagcattttgttgatgcttatttagatgagatggatcaaggtaaaaatgacccatcatctactttctccaaagaaaacctaattttctcagtgggtgaactcatcattgctggaactgaaactacaaccaatgtgctacggtgggcgattcttttcatggccctttatcctaatattcaagtactggagagacccagaagtgttccatcctgagcgatttctggacagcagtggatattttgccaagaaggaagctttggttcctttttccctaggaagaagacattgtcttggagaacacttggctcggatggaaatgttcttgttttttacagcattgcttcagaggtttcatttgcattttccacatgaactagttccagatctgaagcccaggttaggcatgacattgcagccccaaccctacctcatctgtgctgaaagacgctgaaactgcctgggatgttttcgggaacaagaatgtatatttgccttatccctgaacttggtttaatcaaatcaatgtgtgtattagaataaaagtcacagcatcaaaaagccaaatgaaaaacaaaaaa

SEQ ID NO: 231502 - DNA, 1054 bp, Homo sapiens
ggcacgaggcttcaggtccagggtggacgcatgccctcaggtgcgggcgtcttgcgagtcggcctcgcagctctgtggaagccgcacgcggcttgtcggaaaatcaaggcgttctgagttctagatggttaatagcaggttcttcggtgtctgcagtcgacgaacgactggtgtaggcgtttgctgtgagaatggagaatgcaggggaacgcccctgactgagaagcgggccctgggaaacgattgtgaacgcgtgaatgaattgatgactaaaatccgctgcgggggtcctacagcgcagatggtaatgccgttctgactggctgggaacggcaccttagcagatacttaaaaggcgccttctgtgtgccactgtcactgccaacttggtgactcatttaaaactcataaccagccggtgaggtcggtacttcgctcctcctcattctgcggaggggaaagcagcacggaaatgccctgtgactggcagcggaaaaggcgaccaccgcttgtgtatcttcagtttagatcttggaggcatatcaactgtggttctaaatggctatgatgtagtaaaggaatgccttgttcatcaaagcgaaatttttgcagacagaccatgccttcctttattcatgaagatgacaaaaatgggagtactggagagacccagaagtgttccatcctgagcgatttctggacagcagtggatattttgccaagaaggaagctttggttcctttttccctaggaagaagacattgtcttggagaacacttggctcggatggaaatgttcttgttttttacagcattgcttcagaggtttcatttgcattttccacatgaactagttccagatctgaagcccaggttaggcatgacattgcagccccaaccctacctcatctgtgctgaaagacgctgaaactgcctgggatgttttcgggaacaagaatgtatatttgccttatccctgaacttggtttaatcaaatcaatgtgtgtattagaataaaagtcacagcatcaaaaagccaaatgaaaaacaaaaaa

SEQ ID NO: 231503 - DNA, 387 bp, Homo sapiens
actgaggaggagagatactctgtgaggtaaatgggagttgcagagaagagggctggttgtgagggcacctgatgaatgccatgggagcagcaggatgtctaaggactcagcaggtatctggtcccaattaatcaatacccaagaaaagcaaaagcccaacagtttccttgtgcttaactgttttctctgacccaattggccaatcttaggctgttaacattctctcttcagcatttgaggacagaaggaagcttaatgactggtctggggtacatcccaggattttgtaatggatccccaggaagcctaagggatcaggatcactctagtatttgtgtctactatgttaagagctgctgctcttagggtgggtgagcatagccaacc

SEQ ID NO: 231504 - DNA, 385 bp, Homo sapiens
ttcattcattactgtggtcataatacacagttacctggccaggaaagagtacacatcacagggatctgctcactgcacgtgtgcctgagctctccctcactttctgccttcttcaagaattcttccctgattggtccaaccagaagcgctgattctccccacctgatttcctgtaattttataatctatgtccttcacttttgtgttatattgtttatttccttttggtctttttgtgtgcatatgtatatgttttggggaatggggtattcacttttgttactcactgtgttactcacttttgtatgcccatagtgcagagcatggtgccttgtacatagagtatgttcggtaaatatgtgcaataaaaagtcctttgattaca

SEQ ID NO: 231505 - DNA, 834 bp, Homo sapiens
  misc_feature (236)..(236): n is a, c, g, or t
  misc_feature (806)..(808): n is a, c, g, or t
aggggagcaatgtagacacaggatctttccagagttatcccctggttgtgggaatgccggaatacctcagataaagtaggctaaatccgctagccgcgacagacagtctcgagtcaagtgagtcaggtttggaaggtttaatgattttaccctacactaaaagagagcgggtaacaaagttccaccgttgaggacaacggaggccgattaatttttatatttttcaaatgtgaaantgtgttgttataaacaatgtagctttaggatacattctactcacaaaacagtcgcatgtaaaatgtttttatacacgcattaaagaaaaagaaactccttaaaatgaagtaactatttcctgtttcattttgtttgaacagcttttgttgctcactacgagttgctttaaatctctgggaaggtctgttccgaatttactacttctggattggctaaaatctctttaaagtgtgtgctttgttctctaaaaagcttaggtcagttgagcaacaagctcctcctgtttttttctttttttaaaaaaaagagctgagtaatgctggaggcttctcatgtggctgatgcaaacctggagaatttgcatcatcatttagctgtagtaagttggtgtgacaggcaggcgcttaaatacaagcccatgaggaagctgagctggtttgtaatgatagggcggcagcagcagcagcagcagcagtggtggaacgaggaggtggagaattgagagcacgatgcatacacaggtgtttctgagtagtaattagatcgtgaagggtctctgtggttggaannncgtggggccgtaggatattctctatg

SEQ ID NO: 231506 - DNA, 2468 bp, Homo sapiens
  misc_feature (1937)..(1937): n is a, c, g, or t
  misc_feature (2016)..(2016): n is a, c, g, or t
  misc_feature (2187)..(2187): n is a, c, g, or t
gctcggtccgagtatcccatctcaccggcggcagcagcagcagcagcagcagtggtggaacgaggaggtggagaattgagagcacgatgcatacacaggtgtttctgagtagtaattagatcgctgtgaaggaaaaagcacacctttgagttttcacctgtgaacactatagcgctgagagagacagtctgaaagcagaggaagacatcgatcagtaacaccaagagacaccaaagttgaaagttttgttttctttccctctgttttatttttcccccgtgtgtccctactatggtcagaaagcctgttgtgtccaccatctccaaaggaggttacctgcagggaaatgttaacgggaggctgccttccctgggcaacaaggagccacctgggcaggagaaagtgcagctgaagaggaaagtcactttactgaggggagtctccattatcattggcaccatcattggagcaggaatcttcatctctcctaagggcgtgctccagaacacgggcagcgtgggcatgtctctgaccatctggacggtgtgtggggtcctgtcactatttggagctttgtcttatgctgaattgggaacaactataaagaaatctggaggtcattacacatatattttggaagtctttggtccattaccagcttttgtacgagtctgggtggaactcctcataatacgccctgcagctactgctgtgatatccctggcatttggacgctacattctggaaccattttttattcaatgtgaaatccctgaacttgcgatcaagctcattacagctgtgggcataactgtagtgatggtcctaaatagcatgagtgtcagctggagcgcccggatccagattttcttaaccttttgcaagctcacagcaattctgataattatagtccctggagttatgcagctaattaaaggtcaaacgcagaactttaaagacgccttttcaggaagagattcaagtattacgcggttgccactggctttttattatggaatgtatgcatatgctggctggttttacctcaactttgttactgaagaagtagaaaaccctgaaaaaaccattccccttgcaatatgtatatccatggccattgtcaccattggctatgtgctgacaaatgtggcctactttacgaccattaatgctgaggagctgctgctttcaaatgcagtggcagtgaccttttctgagcggctactgggaaatttctcattagcagttccgatctttgttgccctctcctgctttggctccatgaacggtggtgtgtttgctgtctccaggttattctatgttgcgtctcgagagggtcaccttccagaaatcctctccatgattcatgtccgcaagcacactcctctaccagctgttattgttttgcaccctttgacaatgataatgctcttctctggagacctcgacagtcttttgaatttcctcagttttgccaggtggctttttattgggctggcagttgctgggctgatttatcttcgatacaaatgcccagatatgcatcgtcctttcaaggtgccactgttcatcccagctttgttttccttcacatgcctcttcatggttgccctttccctctattcggacccatttagtacagggattggcttcgtcatcactctgactggagtccctgcgtattatctctttattatatgggacaagaaacccaggtggtttagaataatgtcagagaaaataaccagaacattacaaataatactggaagttgtaccagaagaagataagttatgaactaatggacttgagatcttggcaatctgcccaaggggagacacaaaatagggatttttacttcattttctgaaagtctagagaattacaactttggtgataaacaaaaggagtcagttatttttattcatatattttancatattcgaactaatttctaagaaatttagttataactctatgtagttatagaaagtgaatatgcagttattctatgantcgcacaattcttgagtctctgatacctacctattggggttaggagaaaagactagacaattactatgtggtcattctctacaacatatgttagcacggcaaagaaccttcaaattgaagactgagatttttctgtatatatgggttttgtaagatggttttacacactanagatgtctatactgtgaaaagtgttttcaattctgaaaaaaagcatacatcatgattatggcaaagaggagagaaagaaatttattttacattgacattgcattgcttccccttagataccaatttagataacaaacactcatgctttaatggattatacccagagcactttgaacaaaggtcagtggggattgttgaatacattaaagaagagtttctaggggctactgtttatgagacacatccaggagttatgtttaagtaaaaatccttgagaattt

SEQ ID NO: 231507 - DNA, 3128 bp, Homo sapiens
  misc_feature (236)..(236): n is a, c, g, or t
  misc_feature (2597)..(2597): n is a, c, g, or t
  misc_feature (2676)..(2676): n is a, c, g, or t
  misc_feature (2847)..(2847): n is a, c, g, or t
aggggagcaatgtagacacaggatctttccagagttatcccctggttgtgggaatgccggaatacctcagataaagtaggctaaatccgctagccgcgacagacagtctcgagtcaagtgagtcaggtttggaaggtttaatgattttaccctacactaaaagagagcgggtaacaaagttccaccgttgaggacaacggaggccgattaatttttatatttttcaaatgtgaaantgtgttgttataaacaatgtagctttaggatacattctactcacaaaacagtcgcatgtaaaatgtttttatacacgcattaaagaaaaagaaactccttaaaatgaagtaactatttcctgtttcattttgtttgaacagcttttgttgctcactacgagttgctttaaatctctgggaaggtctgttccgaatttactacttctggattggctaaaatctctttaaagtgtgtgctttgttctctaaaaagcttaggtcagttgagcaacaagctcctcctgtttttttctttttttaaaaaaaagagctgagtaatgctggaggcttctcatgtggctgatgcaaacctggagaatttgcatcatcatttagctgtagtaagttggtgtgacaggcaggcgcttaaatacaagcccatgaggaagctgagctggtttgtaatgatagggcggcagcagcagcagcagcagcagtggtggaacgaggaggtggagaattgagagcacgatgcatacacaggtgtttctgagtagtaattagatcgctgtgaaggaaaaagcacacctttgagttttcacctgtgaacactatagcgctgagagagacagtctgaaagcagaggaagacatcgatcagtaacaccaagagacaccaaagttgaaagttttgttttctttccctctgttttatttttcccccgtgtgtccctactatggtcagaaagcctgttgtgtccaccatctccaaaggaggttacctgcagggaaatgttaacgggaggctgccttccctgggcaacaaggagccacctgggcaggagaaagtgcagctgaagaggaaagtcactttactgaggggagtctccattatcattggcaccatcattggagcaggaatcttcatctctcctaagggcgtgctccagaacacgggcagcgtgggcatgtctctgaccatctggacggtgtgtggggtcctgtcactatttggagctttgtcttatgctgaattgggaacaactataaagaaatctggaggtcattacacatatattttggaagtctttggtccattaccagcttttgtacgagtctgggtggaactcctcataatacgccctgcagctactgctgtgatatccctggcatttggacgctacattctggaaccattttttattcaatgtgaaatccctgaacttgcgatcaagctcattacagctgtgggcataactgtagtgatggtcctaaatagcatgagtgtcagctggagcgcccggatccagattttcttaaccttttgcaagctcacagcaattctgataattatagtccctggagttatgcagctaattaaaggtcaaacgcagaactttaaagacgccttttcaggaagagattcaagtattacgcggttgccactggctttttattatggaatgtatgcatatgctggctggttttacctcaactttgttactgaagaagtagaaaaccctgaaaaaaccattccccttgcaatatgtatatccatggccattgtcaccattggctatgtgctgacaaatgtggcctactttacgaccattaatgctgaggagctgctgctttcaaatgcagtggcagtgaccttttctgagcggctactgggaaatttctcattagcagttccgatctttgttgccctctcctgctttggctccatgaacggtggtgtgtttgctgtctccaggttattctatgttgcgtctcgagagggtcaccttccagaaatcctctccatgattcatgtccgcaagcacactcctctaccagctgttattgttttgcaccctttgacaatgataatgctcttctctggagacctcgacagtcttttgaatttcctcagttttgccaggtggctttttattgggctggcagttgctgggctgatttatcttcgatacaaatgcccagatatgcatcgtcctttcaaggtgccactgttcatcccagctttgttttccttcacatgcctcttcatggttgccctttccctctattcggacccatttagtacagggattggcttcgtcatcactctgactggagtccctgcgtattatctctttattatatgggacaagaaacccaggtggtttagaataatgtcagagaaaataaccagaacattacaaataatactggaagttgtaccagaagaagataagttatgaactaatggacttgagatcttggcaatctgcccaaggggagacacaaaatagggatttttacttcattttctgaaagtctagagaattacaactttggtgataaacaaaaggagtcagttatttttattcatatattttancatattcgaactaatttctaagaaatttagttataactctatgtagttatagaaagtgaatatgcagttattctatgantcgcacaattcttgagtctctgatacctacctattggggttaggagaaaagactagacaattactatgtggtcattctctacaacatatgttagcacggcaaagaaccttcaaattgaagactgagatttttctgtatatatgggttttgtaagatggttttacacactanagatgtctatactgtgaaaagtgttttcaattctgaaaaaaagcatacatcatgattatggcaaagaggagagaaagaaatttattttacattgacattgcattgcttccccttagataccaatttagataacaaacactcatgctttaatggattatacccagagcactttgaacaaaggtcagtggggattgttgaatacattaaagaagagtttctaggggctactgtttatgagacacatccaggagttatgtttaagtaaaaatccttgagaattt

SEQ ID NO: 231508 - DNA, 2797 bp, Homo sapiens
  misc_feature (236)..(236): n is a, c, g, or t
aggggagcaatgtagacacaggatctttccagagttatcccctggttgtgggaatgccggaatacctcagataaagtaggctaaatccgctagccgcgacagacagtctcgagtcaagtgagtcaggtttggaaggtttaatgattttaccctacactaaaagagagcgggtaacaaagttccaccgttgaggacaacggaggccgattaatttttatatttttcaaatgtgaaantgtgttgttataaacaatgtagctttaggatacattctactcacaaaacagtcgcatgtaaaatgtttttatacacgcattaaagaaaaagaaactccttaaaatgaagtaactatttcctgtttcattttgtttgaacagcttttgttgctcactacgagttgctttaaatctctgggaaggtctgttccgaatttactacttctggattggctaaaatctctttaaagtgtgtgctttgttctctaaaaagcttaggtcagttgagcaacaagctcctcctgtttttttctttttttaaaaaaaagagctgagtaatgctggaggcttctcatgtggctgatgcaaacctggagaatttgcatcatcatttagctgtagtaagttggtgtgacaggcaggcgcttaaatacaagcccatgaggaagctgagctggtttgtaatgatagggcggcagcagcagcagcagcagcagtggtggaacgaggaggtggagaattgagagcacgatgcatacacaggtgtttctgagtagtaattagatcgctgtgaaggaaaaagcacacctttgagttttcacctgtgaacactatagcgctgagagagacagtctgaaagcagaggaagacatcgatcagtaacaccaagagacaccaaagttgaaagttttgttttctttccctctgttttatttttcccccgtgtgtccctactatggtcagaaagcctgttgtgtccaccatctccaaaggaggttacctgcagggaaatgttaacgggaggctgccttccctgggcaacaaggagccacctgggcaggagaaagtgcagctgaagaggaaagtcactttactgaggggagtctccattatcattggcaccatcattggagcaggaatcttcatctctcctaagggcgtgctccagaacacgggcagcgtgggcatgtctctgaccatctggacggtgtgtggggtcctgtcactatttggagctttgtcttatgctgaattgggaacaactataaagaaatctggaggtcattacacatatattttggaagtctttggtccattaccagcttttgtacgagtctgggtggaactcctcataatacgccctgcagctactgctgtgatatccctggcatttggacgctacattctggaaccattttttattcaatgtgaaatccctgaacttgcgatcaagctcattacagctgtgggcataactgtagtgatggtcctaaatagcatgagtgtcagctggagcgcccggatccagattttcttaaccttttgcaagctcacagcaattctgataattatagtccctggagttatgcagctaattaaaggtcaaacgcagaactttaaagacgccttttcaggaagagattcaagtattacgcggttgccactggctttttattatggaatgtatgcatatgctggctggttttacctcaactttgttactgaagaagtagaaaaccctgaaaaaaccattccccttgcaatatgtatatccatggccattgtcaccattggctatgtgctgacaaatgtggcctactttacgaccattaatgctgaggagctgctgctttcaaatgcagtggcagtgaccttttctgagcggctactgggaaatttctcattagcagttccgatctttgttgccctctcctgctttggctccatgaacggtggtgtgtttgctgtctccaggttattctatgttgcgtctcgagagggtcaccttccagaaatcctctccatgattcatgtccgcaagcacactcctctaccagctgttattgttttgcaccctttgacaatgataatgctcttctctggagacctcgacagtcttttgaatttcctcagttttgccaggtggctttttattgggctggcagttgctgggctgatttatcttcgatacaaatgcccagatatgcatcgtcctttcaaggtgccactgttcatcccagctttgttttccttcacatgcctcttcatggttgccctttccctctattcggacccatttagtacagggattggcttcgtcatcactctgactggagtccctgcgtattatctctttattatatgggacaagaaacccaggtggtttagaataatgtcagggttcctagcactgatgcctgcacaagcatgtgatatgtgaaataaaatggattcttctatagctaaatgagttccctctggggagagttctggtactgcaatcacaatgccagatggtgtttatgggctatttgtgtaagtaagtggtaagatgctatgaagtaagtgtgtttgttttcatcttatggaaactcttgatgcatgtgcttttgtatggaataaattttggtgcaatatgatgtcattcaactttgcattgaattgaattttggttgtatttatatgtattatacctgtcacgcttctagttgcttcaaccattttataaccatttttgtacatattttacttgaaaatattttaaatggaaatttaaataaacatttgatagtttacataat

SEQ ID NO: 231509 - DNA, 562 bp, Homo sapiens
actatgtgaacatacaaaaaaaaattgaaatgtatactttacatgtgtgaattctatggtatgagaagtctagtctcaacaaagctgtaagaaaaaaaaattccaactctatcaaaccccagagctgtgtgttcttagaataaaggtttcccagcttcaagtctcagtttcctcctctgcaggatgggctaataagccacatcaccttgcatgaaaatcaaggagacagcacagctggggcccagcacgtagtaggcctcactccgcacgaggttccttccgcagaggggaagggaatgggggttgcccaagtagggcgcacggccaaggccatggctggtcctggacggccagacggactggacggaggaggaggctcaccgcccatgacataatgtagatggatggctcgggccatccgtcaggctgggagcgggtggccggggaggaggccgtgagggagcccattaccgtacacgtgttaacagcgcatcctttgtacagacagccgcgcgggcgcgggccagggccgctccccacattgtctgggcgccgcggccgc

SEQ ID NO: 231510 - DNA, 498 bp, Homo sapiens
ctccagcgggtccccgcccaggcgggaggccctcccagctgaagcctttcgctgactagattacctgggggaaaatgacttaacctcttcgaacccccagaaggtcagaagctttgcttttgggggagaaaatggtgtgcaaacgagacgcgaaggaaacgcaaaccctcgggcgtcggcgcagcctcttccccgagcctgggtctgtctaatggcccagagggagaggtcgcacccccgacccctggcacctgcgaaaccaagcgcccggtcggctggcagaaacgaaacctcaacaccctccagcctcccccgcttggttcccggaaccggcgagccaggcttcgcggaaacttgcccggcggcagccgcctagggccccgggatcgccctgaccgcagcccgcagctccgggccgggaggtgcgggccggcgcggtcgggcccgagcagcagcgcgacgcgcgcttccgccccgctcggctccggcggcggccgc

SEQ ID NO: 231511 - DNA, 210 bp, Homo sapiens
cagtggtcaggatcacagccagtaaatccagatgacctgggttcaagtcccagtcctgccacttcccagctgtgggcttttgcacaagtcacatggtcttcctgtgtctcagcccccacccccccatctgtaaacaaaacaacactgtaaaataacagtgtctacctcatggggatcttgcaaagatcaaataaagagctttgaagaaca

SEQ ID NO: 231512 - DNA, 235 bp, Homo sapiens
cggccccccagtcctctcttatgtgttgactcctgctcggcacccgggatgtgcggagtgactgatgttgtcagtgacctttccactgtgccctccgacttccccacccagatgggaagtattttcaataggacgtctgttggctgagaaggatttcttttcccacccatttgaaagctatccactgtgaaatgtagccagcaacctgccaccagcaataaattaaaatcaatga

SEQ ID NO: 231513 - DNA, 362 bp, Homo sapiens
aacagaagacattaagaaaacctaactctgaccccttataattccatctccaaactgaccaatcagcacttcccaagcccctacctgccaaattatctttaaaaattctgatctccaaatgctcgggaagactgatttgagtaataacaaaactctagtctcccacacagccggctctgcgtgaattactctttcttcattgcaattcccatcttgataaatcggttctgtctgggcaacggacaaggtgaacccattgggcggatcccacaattaagtgggatcaagtaagcttatactatactatcagaactgttgtgtatatttaataaaaatgaatgaacacagaatataccaaataa

SEQ ID NO: 231514 - DNA, 719 bp, Homo sapiens
aaacaacagcaacacactagagtttggaaaccactgatctagttcaaatccttcattttacagatgagaaagaggtccatctgttaagtgacttgttccaggcctcaagaaactcaacatttgtataattattcttttcgtttacaaaaagtcattcagatatattctcacctgggaggtgcattctattctgatccacagggtgttgctcagatcatgattcagtcttttcagttgtcatcttgtgcagtcttcaacgcccaaatgcaggacgtaagtcccacgtgcctgtgggaggatggcttctcctgttttacctgccttttcacatgtgccttttcattgttggcttcatttgccaaaatctagatgattgatacatgataatgtttgtaatgacaataatagtgataacctgactttagacttcagtattcttcagagttttcacatttggttctcattgccaccaccctaatatagggatggagtcatataaccattttacagatgaagaaattgaggcacagaagactgtgatctgcctcaagtcacataagagattaacggtagagctggaactagagcacttttaacacggtgttctgtctaccccgccacaaattctaatttgggattttcatgtttctcaagaaaataaaataccctctcaatagtataagctttgcacatgtgagaaattgaatgctgtgattaga

SEQ ID NO: 231515 - DNA, 410 bp, Homo sapiens
gacttctgtgatttgattcacagcaaaaacaattcatttactcaatacagaagaataagcaacagaataaaaatagatttcgttatacaatctggatttggggaatctataggtctaccccttcaaatatttattatcttaaatattattttcagtgcttgtaattcctttgaataaaatataaataatgctttctgaatgctttataaatagtgaatatggatttgatagtgaaacaggggctaatgtcctatataggatatattgtctctaattgattaccatgagcacttcttacttatcagtaacttccagctcattaactgaagacattaatttacatgaaccagaatcacaaagatacttgtttaaaattcagatttctgagccctatttggcctactgaatca

SEQ ID NO: 231516 - DNA, 280 bp, Homo sapiens
tctggataaaccaaatttgctgacctcttaaccttggacatccagtctctagaacagtgaaaaaattaatttctgtggtttaaactacatagtctttgcaactttgttatggcagccctggcagactatcagaaatgcattaagatgttcacaaaaagaaatgtacaaaatgttcttagcaacattcttgtatttggttattctgagaataaccaaagcctaaaaacagtccagatgtccatcaagtgtaatttgtataaattatgtttatttattccaa

SEQ ID NO: 231517 - DNA, 559 bp, Homo sapiens
cacgaggggcttttaaaaggtaattagattataagggcagaggccccataaataggattaacatccttattaaaaagacctggagacgtcccttcctcctactgccatatgaggatgcagcacaaatatggtgggtgtctataaatgaagaaatgggctctcaccaaaacctgatcctgctgacaccctgatctcaaacttccagccttcagaactgtgagaaataaaggtctgttatttataagttattcagtttataatattttgttatagcagcctgagatgactaagacacagccagtttactggctttttgataaataatagataactgattattttaaaactcatgtgggtatgggagcaatagggagagaaaagaggagataaaatacacacggaagttggcacatgctctccagggttttgcagaaaccaggtggtagccccaaaggaaaatcaataaccactgcttctatttgtggctctgtttccacagaaacatgtttgtgggtgaatttggaaggcagatttacaatgccaaaacaatcagtccaaa

SEQ ID NO: 231518 - DNA, 781 bp, Homo sapiens
  misc_feature (605)..(605): n is a, c, g, or t
  misc_feature (663)..(663): n is a, c, g, or t
tcagataatactaaatacacatataccccaggatgcccaattttttactgcttacaagatattatgcgagtctgtagtgaatccagtactcattttgctacacttacagcaaggatgttaatagccttggataagtggttagatgaacgtcatgcacaatctcactttattccagctttattccgaccttctcctcttgagcggataaaaactaatgtcataaatcctgcatatgctactgaatcaggtcagacagaaaactcactacatatgggctatagtgcactagaaataaagagtaaaatgttagccctagagaaagcagatacctgtatttacaaccctttgtttggatcagatcttcagtatacaaatcgggtagataaagtggtaataaatccatactttggtctaggagctccagactactcaaaaatccaaatacctaaacaggaaaaatggcagagaagcatgagcagtgtcacagaagacaaggaacgacagtgggtagatgattttcctctccaccgaagcgcctgtgaagggagattcagaattactaagccgtcttctcagtgaaagattttcagtcaaccagttagatngtgaccactgggcacccattcattatgcatgctggtatggaaaagttgaagccactcncctattgtttagaagaaagggaaagttgcaatccaaaccttttaaatgggacaacttagttccccccctccttttgctgccgggaaggaaggacattgctgaaaattagttccgattc

SEQ ID NO: 231519 - DNA, 571 bp, Homo sapiens
aaaaaatttgcatgtttcttccttttgtttttcagacaattgagaatctgaaattctttaatcctgaaattctttaatcctatctctcacagtaatttaccaacacaatttttgcatatacttctaaaacttgatttagaaacagactgtgttttaaatttgtatttaatttttgtaaagttatgttcctgtgtctgctcacaaaagtctataatgcttggtataactgtactcaagctgaactataggataaaattttaaaagttaggccgggtgcggcggctcatgcctgtaatcccagccctttgggaggctgaggcgagtggatcacaaggtcgagagatcgagaccatcctggctaacacagtgaaactctgtatctactaaaaatacaaaaaattagctgggtatggtggcacgcgcctgtagtcccagctactcgggaggctgaggcaggagaatcatttgaacccgggaggcggaggttgcagtgagccaagattgcgccattgcactccagcctgggtgacagagcgagactccatctcaaaataaaatataataaaataaa

SEQ ID NO: 231520 - DNA, 358 bp, Homo sapiens
ctgcctggctgagtaaaggaatgaataaacaaacttccatttattgttttgtcaacagattgtttcataaacagtcttcagttgagtgtgggtatgttcgagaaaaaaaaatgagagatactgttttgaatacaatcgccttgacagatggtgacaatgaccaggtcttttgatctggactgacttgtatagcccagcacccagcacctaggaggtctccagtgaataccttttcataaatgccaggtagagggcagctgctgctattgcggcctcaagcagaaaggtttctttggctgaataaactgtagcactagcaacaacacagtggttattttctgtcctgtttcagtctcca

SEQ ID NO: 231521 - DNA, 438 bp, Homo sapiens
tcctaagagaaaaggaatatcatttattgcctcttgcaaagtaaatactcctctatttaactgacgggatgaaccaatgatgtcatttaacagtttgtttgttggtgatctctactgctgaaatctcattaacatacacatttactcctttgatcttcacgataatcccatggaattggcaagtaaaaggcattattgacattttacagctttttcaggagttaagctgccttcgcaatgaggatcaaacctgcagcttacagcttatagactcgatgtatgtaagcaaaatggggaattgccaagtctaccttaaaatggccatttgccatacagttacttgatagacccattaaattccagtaaattcaaaatgttccaatgtggctaattattccagaaatgccaataaaaatgaaatgtgatgttccccaccct

SEQ ID NO: 231522 - DNA, 551 bp, Homo sapiens
ggctaatttttttttaaaaaacattgtagagatagagtctccctatgttacctagcctggtcttgaatgccttggctcaagtgatcttcccatctcagcctcccgagatgctgggattacgggtgtgaaccaccatggcaggccatgaatgagttcttgagaaagaagactttatgaagagatgaccaatgggctatagactgaatttcagacaatggtcagatttcagaagtccagaggaaaaagaaaggacagctactgagcactcaggaaaacagacaagtttagagctatgtgtaatggtggatgagtgggaagaacatacagttccattccaccatcaggttagagaccagaatgaataggctcaagatggaaataaagaatagacaagtgaagagatggagacagtaatggagatggtttactgagcagacgaatgcagagggagatagttcactcttgacaagtaacaagcttgttaataatgaactaaaggagaaaagttagaagcatgtagatccgagtatggtcatttttgtcaggattta

SEQ ID NO: 231523 - DNA, 488 bp, Homo sapiens
ctcttgaggaaggagacctccctgtaggtatgtcggctgtggactcttgcctgtcttctctgtgggatccaagagatagtcccatgatcctacgagagagtagatgtgagccagccaaaagaaacatcaaacagaggcccaggaataaattgcaaaatccctaaggatccaaaagatctgcaggattcctcaggcctgcctagatgttgtaggggtgagtctttttcaaacttgttccattgtgatttctagttacagcctgcatgttcccctgggttgctgtctcccaaaaggggatctagcaaaaccatgcagcgtcagaagctaacaagcagtgtgtttcttcaggattcttgcaagtgttggatgtctgcctgtgtgtgtggtattttgtgtgtgtgtgtgtgtgtgtgtgtgtgtgcgcctgtaagtcacttctgcttaaaggaatgtggcaaacacactccagggcttcatcttttttgagt

SEQ ID NO: 231524 - DNA, 429 bp, Homo sapiens
atcatggagcactaagtttaattcatagagtcattcaatgcttatttattaagggctagtaccaggccctgggcatataaagtacaatgaaagaacacagtttctctcattagtatagtaggatcctatatagtaggacagtatcctagatagtaggacagcctactatcctgtcaatttaaaaatcaactaaaagtcatacaaccgaaaagcagactaatctgagaaactgaaagggaaagtaaaacagcaaataaaaaacaacacataatgaatatcacttttcagaactacagctgacccttgaacaacatgagtttgaaataaatgggtccaattatatgtggattttttttaaaaactgtattggaaaattttttgaagatctgtgataacatgaaaaacatgccaaccatgtggcctagaaat

SEQ ID NO: 231525 - DNA, 369 bp, Homo sapiens
gataataacaaaggataaaaacagaaacttggctgggcgcggtggctcacgcctgtaatcccagcactctgggaggccgaggcgggcggatcaagaggtcaggagatcgagatcatcctggctaacatggtgaaaccccaaaccccgtctctactaaaaaaattagccaggcatggtggcgggcgcctatagtcccagctacttgggaggctgaagcaggagaatcgcttgaacccaggaggtggaggttgcaatgaactgagatcgtgccaccatactccagcatgggtgacagagactccatctcaaaaaaacaaaaaacagaaacttggcttattagccagagttgtatgcactgaggtctatggt

SEQ ID NO: 231526 - DNA, 518 bp, Homo sapiens
gcggggaggatcaagtgtaaaaatgattttgtgaccagggaataaattgaatagcctgccagatgtgagtgtttggaaacttcacaggcactgggatataaaaacaaggtaaaaaacatgtgcagtattctcttttactggtaaagttcacaagtttcttataagagtgtaacataacatgtatctcaaagttcctgagacatgtaactcaatatggttcttgtagagcagcagaaagaggaatgtgaagaagcttccagatacataattcatgagtgtccgtagactctaggctgagtagctccatctgccattgtttccaaagggtaacacccttccctgaatgtgctacaagaagtaccagtgtgcttttggtgttcatgtctaatattctcactgcatcatagcatttatttttacagggaagaagaatctattactctgatttacagaaaactgaaatgcctgactgtccaaaatatatttccgccctgcaaccccctaagcttgataggagc

SEQ ID NO: 231527 - DNA, 477 bp, Homo sapiens
taagtattcaaaaatttccagtgacctagttttttaagtttatgtacaattgtcatgatttttagaattctttttcagtcatattttgttttttatgtctaaagttgcaatttactcaataatgccctggcaccctgaaaacattaacgagcatgtttgaaagctggtttgaggtacctatagaatcattcacaaaaatcctcaaaaacctgccttaaaagtcccgtttatttatttctggaatacagcaaaggtgggctttcctggtgtgagcttccttctcatgatcttcacaaataaagaagcaaaaccaaaatagtcaaatggctctgctcagggtcatgaagcaagtgcatcaaaaatggaaatggacattctctttgtctttttgccagtccaatgaccacacagatggcttcttaacatggtgggaagatgatgacctatcccctttattcctccaatatcaggaacata

SEQ ID NO: 231528 - DNA, 383 bp, Homo sapiens
taaaaacccctccttgcaagccatcagagagttcaggtcttatgcatgagttacctgcttctccttgcttggcaccctgcaataaccacttcgctttctctcactgaaaatccccatgtcagtgtttggctctgctgcattgggtgggggaacccaagtttgattcggtaacaatgacagttataatgtattaggtttatgaatttaggaaaaacatatgagaatgcaaacacattgctgaggcttacccaacaccctggaagaaaaactgaggcaagaaaggagtttgaagcttcagtttcatcagcttcaaagtagatccacctttgaacacattccagtgcttttgagagaataagtgctgaatgaatgaatgaatgaat

SEQ ID NO: 231529 - DNA, 426 bp, Homo sapiens
cattgttcagaatctagacttaatcctgaggattttgaaacatgatttgacagcaaaacttgatcttgtctcaaacagcagactcaagcaactaggctgtcaagactgttgtatgcaatcagactttactaatttgcaagggaaatataattgcagagtaaatggtgttaccaagtccactgcctaatgtagtttcttcctgcagataagtaacatgaaaacattataatgagaatgccagttgattgattttcaaagagaaaaatcttcttttacaggcacatgtaatgggaaaaaaatgagtctcagctttttcaaaacatttgtaacattgctgtgtgttcatttggtatctcaattctgcaatggaaaagactatgggcaatcatacttcttatgacattacaggcatctttttctctgatt

SEQ ID NO: 231530 - DNA, 340 bp, Homo sapiens
cctagacccattctagtgaaaaatgtttagttgctgctttcttatatgtaggattaggaggtttaagtatgtgataaaatgtaaggcctcttctggtgttaaaatgctgaagtattttatatgtaggtatgtacatatatccttatatatgtgtgtgtatattatatgtatgcacacacacacacacacatatatacactttttgttgcaacatctattaagcttttggttttgtttgctttatttagaatcatatcatatatgctattcttttttaacctgctctttttcaccttaataatcacagggtattccatcatcttggtgtactaaatcaatt

SEQ ID NO: 231531 - DNA, 326 bp, Homo sapiens
tactcacattcagagtggtaagaagtcgctggactctagtatagtttttatcttaaaaaaaaaaaaagactcaggagtgaggctcttaacgctttactctcatttgaagaccttccgacaaaaaagcagcaactcctcaagccgagtttctggtttcttgagcatcgacgccgcgtccccgcagcgcccacaggtcccgcaagcccccagcccgcctcctgcccaaaacaaaggacgtcacccccagacctctggacacagaagccccacacgcacgcacacgcacccctccctgtcacctccctccgagagcccctcaaacgcct

SEQ ID NO: 231532 - DNA, 365 bp, Homo sapiens
ggggaagggcaggtagatctgaagggggatgaggaagggtgttggcaaagctttcgagaggagctgagaatacagttgagttgggaagaacaaatagtgattatccaaagaaagaatagggaagcgtaaatagggctggagaagcaacttgttctgggtagggaagcaccatgcttcgggagctgcagggtcgtgagtttaacggtggagaatacagctgggatgtggtgagggatcaatctcggtgtgcatggtgcagcccttcgtagatgaccctgatatcagtggacatcacttacccatgtctgctttattttccagtgggttcccagtgctagtgtggtgcctgtcagatggaaggccct

SEQ ID NO: 231533 - DNA, 839 bp, Homo sapiens
  misc_feature (676)..(676): n is a, c, g, or t
cctttcagtagcttccagtttcctttctggttacatcacattgtcgcttctgtaatttgttcccagttaaccaagtcacccacctgttttcacctccttctccttcccaccctcacggccatggttttgaaccagggtttcttcccacggtctgttgaggtcactaacccctgtgtcgtcttctcctgaaccgagtctgttcagattctcagaccagatccctggccatgccaccatggtagaaataggccttggcgtcaaacttatttccagggaaattttgccagtgatttggacttccttcctttccttttgcctcgcctcctctcccatcggtcatttactcacctccgcatttccgctggttccgcgtttctgtctagtggctcaggttgtcgcccttcagggcatgcctttaattgagataatttctctttacttactgtataggagggaggggacccagaaggcgtcttccttcctcactccctcatctgtgcgatgctacacctctgacagatgtgaacttgagggtttttttttgtttttgtttgtttgtttgagatggagtctgtcacctaggctagagtgcaatggcacaatctcagctcactgcatcctccacctcctgggttcaagcgggtgtggtgcgtgagtgcgtgggaggctgaggggngggatggcttgggggcgggagggcagggttgtggggggcgggaagggggcgatggggctcggaggtgggcggcggggcaggagggggtgggggaagagggggggggggggggcggggaagcgggaagaggggcgcggcgggggtgggggtgggtggggggggg

SEQ ID NO: 231534 - DNA, 1172 bp, Homo sapiens
tgatggaccattccagttctagagttcccaaagagacgtctttttggagagcggcagggtaccagaaatccttcactcaggctatagcatggccaccaattataagtaacttgaggcccacccagccaaacatgcctttccgggtctagtgctgggttccagaacaggaagcctggcagattcctactgccacagattctttttactattattattgtcaccttatttttcttttggtggaacccctctagggcttccaccggattctccaccatttacgctatcaattttatcagttttggttttatcgtttcagtgcttctttttgctaacggtagcagccaatatacatcatctctggagacaaatcacgccatagaaaatattgtagttttcctcatttttcttaacgccacagagtcagctgggctgtagtaccagcccggatgtaccagtttactcagccactccccctctcatggacatctgcatggtttccagtcttgcaaattcatacagtgccactacaaataaaaccttgcgcgtatgctgttttcatatttgtgcaagtttactttcagagtagattctagaggtggattgcgggtcaaaggtaaatttgcactccctcccaacaatgcaggacagatcaggttcctgtattgtccttaacagcgtacctcgcttgttaaacttttggatttttgacaatctgatggatcagaagccttagctcagtgaggttttcgtttgcattcttctgattatgaaaaaggctgagcacccacttaaatgtttaggggccccttgcatttttttttcctgtaaactgtccattcatgtcttgtcccattttctactgaataccatccattaaatctccgctttagctgagttgcgcacatttccgacgatcttcgcggtaatttgggctcagcgcggtagttttccaaccctgaccctgcacggggagggggtgccttaactaaggtaacgaaaaggaatctgggtcattccagggaaagcctactaaaatcaggaggctttgtgagagccaaaatactaactttcaaaaaagcgaaaatactcccaaaactcaccggcagcggttttacttaggcgttaattttagctactgtgcccgttttatctactgtagggaccaacgcacg

SEQ ID NO: 231535 - DNA, 647 bp, Homo sapiens
tatgaagtgagggacaaagatctgttcattcagcagagccgtggtatgtgcctgttaaatcgggcactgtgcaagccaatagggtgaagatatacatattaatgagacacagccctaatctttaggagctcaaactttagttgtgggagagacagtcaagtccattaaaatatacacagtgctaagtgtttaacagtagcctttgttaaggctacagagcacaaagggaaagagtaacaaagcgcctgggggaggtgggagagcttagagaggaggtagcgttctgagttggatcttgaaggctgtggtattgaacctccaaagcggggagagaggctctctcagcgcaaagaccaaggtattataaagtgcgtacagtagcagctacttactatggctggatgatgatgataattttatctaatatttatgtaatccgtagaatgtatcagttatgtcttttcctatttaatcttcagaaatagaaacagcccaacaatttaggtaagtatagcccccattatccctcatttccttttggagacagggtcttgccctgttgcccaggctggagctgcagtgagctgtgatcatgccactgcaatctagcctgagtgacagtgcaagactctgtctttccaaaacaa

SEQ ID NO: 231536 - DNA, 509 bp, Homo sapiens
tttttctaacacctaaaaaatggaaacaagccaaatgctcatccactggtaaatggataaacaaactgtagtctttctatacactggaatatttggctataaaaaagaatgaaatattgatacatgctacaacattgatgaacttcaaaaacatgctaagagaaagccagtcacagaaaaatacatagtattctataaaatgtctaggaaacgtaaatctatatagtcagaaagtagattagtggttgcctaggaccggggggaaagggataagggaacatggggagtgacagctaatgggactgctaataggacctacagtttctctttaggtgatgaaaacatgctaaaattacattatagcaatgattataccatgtgaaaacatatagaaatcactagactgtgtactttaaaaggtgaattgtatggtttatcttaataaagctgtttttaaaaaatatctcactgggggctgggcgtggtggctcacgcctgtaatcccagca

SEQ ID NO: 231537 - DNA, 876 bp, Homo sapiens
gtgtattcacaagagactgactctccatcagtcacctcacctcctacctcctgtcccagtggccatcttggtggtaaccatttttaaaagtgtaggagaaaaatctgttcataaatcttgcttcctatgatcagttcccctatgccatgtggttgcccactcattcttttttgattcaaagaattatccacttcctcatgcctactaaatacacagaagagagtctccaacattcctacatgatttagttacattatgttcagcctgcgttcacactgcagactctgtggtcatctccagactttaaggtctgtatggacaacctttgtgagcaccaccctctctggtttctgcagtggctggctctctatagttcctacacatctgaggaccacactgagcaccattggaaactcctccagccccgcgattggccctcagaggtctccctgtctacacaccagcagcgtctccaacttgcacactcagctgtctccaggactctccttccgagacctggcctctcatcctctggctcttcagaggtctcctggcccattccagctctcattagctccccatgcagctaggacaccatggcaggctgtttcaggaatttactagctaccactctggatttccttactgagaaaattttcttctgtcctctctattgttccctctttgcaagttccagttctgggaactcctttgatcctgggagtgcctgagatatctgcagaaaggcagggatccacactaatggagacacccactgacttgtaatctctgatagcaactggatgccacttcaaatcagcagttgcttcctgaatgttttgtgacccctcttcacatccctatagcagctgatca

SEQ ID NO: 231538 - DNA, 452 bp, Homo sapiens
cactttctattgtgacttctgttgtgtggtacctaggtccaaagcctgggcatcatgtttgatcctctcccgtcagcttctcacatttagtcatttgccatgtgctgtagattcttcctctgagggtttttttttaatccaactcttcctttctcttttcattgctaccatttttatttaggttcttatgacttccgagtggcctcactccaatttgttcttcatatctcagcgagctaattcttcctaaggcacagttcctataatgtcaactgtagtggccctgattacctcattctagaatttatggtctacttcactagagccccaaacctccatctacttaatttcctattaccgcctaatgtgtatactatgtttcagcttacctggtctagctgctgttacctaagcatgctttttcctacctctactcatacttagttaaaaaa

SEQ ID NO: 231539 - DNA, 969 bp, Homo sapiens
acatctttccatcatcgaaaagttattgataagatttttccatcactgaaaagttattgataagtgccaccatgtgcatgagcagccctccaggtgctggcttgtgggccggtgtttgagaatcttgccagttgaatgtgggcatctgttgagggtttcccaaaggctaaccgttcgtgccagagggaggccgtggctcattcctagggccctgggtgagactggggctcatgcacacacaggtatcgatggcatgggctgtaacgagctgagtgcctgctgccctttcctagtggggggggtgggctcctggagaacagaggggaggctgctactctccagggccacagggagcccagaacgccacctcctggtgtcagcagcagcaaatccatataagtctgcagcaacttagcttttgcctcctcagaggaaataattcatccagggggcacaaggcagggtcagagactgaggtaagtttcagagcaagagtgaaagtttattaagtgggcatcttgagagagcaagtacacggttttgacctttgacttggggtttatatcttggcatgcttctgggggctgcgtcccttctcccctgattcttcccttggggtgggctgtccgcatgcgcagtggcctgccgacacttgggagggccgcgtgcacagtgtgcttactggagttgtgcggtgccctcttgaggcagtcttcccttaccagttcctaggggaaggtcacacgctggttaaactttgccactttgcctcgtagtgtgcatgcttgacctcactcaccaactcctgagattttttttaaattttttaatttaagttctagggtacatgtacacaacgtgcaggtttgttacataggtatgcatgtgccatgttggtttgctgcatccattaactcgtcatttacattaggtatttctcctaatgctatccttcccaccccacgacag

SEQ ID NO: 231540 - DNA, 1023 bp, Homo sapiens
acatctttccatcatcgaaaagttattgataagatttttccatcactgaaaagttattgataagtgccaccatgtgcatgagcagccctccaggtgctggcttgtgggccggtgtttgagaatcttgccagttgaatgtgggcatctgttgagggtttcccaaaggctaaccgttcgtgccagagggaggccgtggctcattcctagggccctgggtgagactggggctcatgcacacacaggtatcgatggcatgggctgtaacgagctgagtgcctgctgccctttcctagtggggggggtgggctcctggagaacagaggggaggctgctactctccagggccacagggagcccagaacgccacctcctggtgtcagcagcagcaaatccatataagtctgcagcaacttagcttttgcctcctcagaggaaataattcatccagggggcacaaggcagggtcagagactgaggtaagtttcagagcaagagtgaaagtttattaaaaaagtgttagagcaggaacgaaaggaaataaagtacacttggaggagggccaggtgggcatcttgagagagcaagtacacggttttgacctttgacttggggtttatatcttggcatgcttctgggggctgcgtcccttctcccctgattcttcccttggggtgggctgtccgcatgcgcagtggcctgccgacacttgggagggccgcgtgcacagtgtgcttactggagttgtgcggtgccctcttgaggcagtcttcccttaccagttcctaggggaaggtcacacgctggttaaactttgccactttgcctcgtagtgtgcatgcttgacctcactcaccaactcctgagattttttttaaattttttaatttaagttctagggtacatgtacacaacgtgcaggtttgttacataggtatgcatgtgccatgttggtttgctgcatccattaactcgtcatttacattaggtatttctcctaatgctatccttcccaccccacgacag

SEQ ID NO: 231541 - DNA, 477 bp, Homo sapiens
  misc_feature (341)..(341): n is a, c, g, or t
  misc_feature (347)..(347): n is a, c, g, or t
  misc_feature (350)..(350): n is a, c, g, or t
  misc_feature (386)..(386): n is a, c, g, or t
  misc_feature (399)..(399): n is a, c, g, or t
  misc_feature (417)..(417): n is a, c, g, or t
  misc_feature (447)..(447): n is a, c, g, or t
  misc_feature (469)..(469): n is a, c, g, or t
gacaggcctaagactgggtggacattgaagaactgtgtggatggcaaggtcgaaatgggatatcctatagaaataggtttctcagtgtgagtggagttcagttttgggtgtaatgaaggcggagattacttgagagacatccaagtgaatgaagaagtcttttttctttttctttttctttttctttttctttttctttttcaagacagtgtctcactctgttgcccatgctgttagcagtattaggagaaagaatacctccaaattgcctgtgggtagcaaagtgagccaaattccaatagcattctagtcccctgcccagcactgcaaaactgcatacngaatcnganaaagaagcttaaaatgctttgtccaaaaatttgaangtagttagcaacntccgccaaaatagaaganttagttcctctaaggagcctcctggcttcncagaactcctaagcaccagcancctaagcc

SEQ ID NO: 231542 - DNA, 567 bp, Homo sapiens
acatcttatttgagatgtttaacaatgtctggatcatcttttcttatatattacccaggaaacactgtgaagtaagcaaagttggaatgcccaagtcaaagaccatttgaatatttacaagtagatttcagacaggaatactacagggtggtcacaggataacaaattctaggcagcagatttacatgacttgaggctgtgggctgttaagatgctgaaaaaccagggtgtggaccaagctggctaagactgagtggacccaatgtggtgctggatttgacggaggttttacctaggccctcattatatgctcattgacatactaaatcacacacccgccagtgccgtgacagttctgagaccaatatttgatgtaaaaatggatggcaccacagttccgagaaatctccacctttacccaggaatttttatgaacattccactccttggttaaagaaacccatcaagatgaaaccccagaacccattgttctctcttgggtatgcctgaactcccctttcttgagtgtgtactttttgctttgcaataaatctcttctttcactat

SEQ ID NO: 231543 - DNA, 409 bp, Homo sapiens
gccgagacaggagaatcgcttgaatccgggaggcagaggttgcagtgagccgagattgcatcattgcactccagcctggataacaagagtgagactcagtctcaacaaaaaaacaacaaaaaaagaaagtacccaacctagggcccggtacatagtaggtgttcattaaatagccttgattgccagggatatcatcaacaccgtcatcatgactgagtcccttccagcagctggccctgagccgagggctttacagatatctgtcaccattagcacatggtgctgtcgtcccattctgcggaaagcaaggctcaggctaggggaataagagtccagggtcacacagcctttgaggtaggtggccttgctgtatttcaggttcctagaggaagagccctaggaacagcac

SEQ ID NO: 231544 - DNA, 391 bp, Homo sapiens
atgagttttgagtctgtgtttttggtggtttggagcaagacccatcagtttttatttaataaaacttttttaagatataaataggaaaggatgcgttctagaagctgttaacaagagtaaggtgattcactacaaaatgtaacaacaaggaaggaacttattctgaaattgttcagtataagacacagctttggtggtggtggtggtggtggtggtttttaatcatgttttatgtttcactctgccaaccaccacaattaactgaggagaggaatccagttaaattcaggaaatatttttgagcacctaatgtgtatcactattgtgctttgacttacggatacacaacagtgactaagacccagtccttgctcatgttgtggttgggaca

SEQ ID NO: 231545 - DNA, 463 bp, Homo sapiens
taataatcctcacatgatttggctttttcactttgttgatatttagattgatggtacaaaagctattggtggtgccttagttacaccaaactgtactagaagtcattttatgcttcacccttacatactcataattttttaaaaaattccagatgcaattaaaaatactcttggtgaagcagtaaaaattaaatatagacccttgaatatatgccttttaagttgggtgatgaaatgtgaagtttatataaagcactttactgcatgccaaattatcaggcttttcctgaagaaaaatatttgtgtaattgtttgagttgcaaactgaactggttgctttttcatcgaacatcatttttacttgaaaaagaaaaagacttatggaaaaactgtggttattctgacctgagtatttggcagaaaaaaaattcttgaaaatgaataaaatgagcctgtcacttca

SEQ ID NO: 231546 - DNA, 270 bp, Homo sapiens
aaatgcctttgaagttttggtatttatgggtaagccagaaatgactttagccactggagggaaagtctgttaatttatcaattttttaaaaatacacacatgttctgccttgtaatttaagagaggattttagttggtttgcagatatatattccatacagcagaaagagaatatgaaatagatacctcagagtttatgaaagcagattttacttatccagatacttcaaggaaagcctaaaaaattggggcatgacttatgacagagat

SEQ ID NO: 231547 - DNA, 460 bp, Homo sapiens
agcgctggctacagtgctgacagaaaccttgtctttcaagccagacaaactggaaaaaggcaggagagggtaggaaagtcatggagagaagaaaagttctctatgaaccaatacaagactcatccctgtgcaaagcatatgacagacccaaaccagaaaagtaaaagctttgagaatcgaactcaaatctcagactagcccctgagtggcatatacacaggacaaacccaaaaaaaaagcaaggcaaagcttttgaaaactgaactgatattgaaaccactacatatagaaagcaggccaaaacttgtggtctgaccctaataaaggttgattgcctgctaaacaaacaaaataaatcagccttctccaagaaatataacacagctcagagtctaccaacataactttcacaaaatcaggaatacaatccagaaattacttggcatacaaaaaaaaaaaa

SEQ ID NO: 231548 - DNA, 403 bp, Homo sapiens
ctaagacatagatctcttaggggttgtttggctgcaaaaaccagaaatctagatgactagctaaagctaaacaagaaaatttactgtaaggatacatggatttctttatgagaaaatgcaaaaggaagtggaaacttaccaggaatgaaagagaatgctgtttataattggagaaatgtggacatgagaggggcacagaggaagactacctgaagacacacagagagaaggtgaccacgtggttggagtggagcatctacaaaccaacacacataccaaggattgctggcaagtatcaccagaagctagaagaggcaagaaaggattctccccaaagctgtcagcaaaaacacagcactgatggtaccttgatttcagacttttagccccgaaactgtgagag

SEQ ID NO: 231549 - DNA, 147 bp, Homo sapiens
tttttttttaagtaaaatgcactggtcttaaatgtagagtttgaatttgacaaatgtatacacccaggtaaccaacatccctgacaagatacagagcattgccatcaccctagaaaatgcccttctgtcgtcttctccaggctgcct

SEQ ID NO: 231550 - DNA, 398 bp, Homo sapiens
ctaacagatattcttctacattaaaacatgaagcaaatagaaagatggttcccccattcagtaagattattatctgaggcccaaagagaagagcccaataattattcatgtattaaaatattaagaagccttaaagtcatatacacctttaggacattgaagcttataatctatatttaatatcatagtaatgcctcaaagtactctcttaggcattatactacatgctgttgtttaaaataccacactgtatctccaggattcagaaagaagagaggacaagccactttcacacttattccaaactgctcacaaaataattgctttctttaaatagctaacttttaccttctcataaaaatggtatacactgtcactaacagaaaaatatgactttc

SEQ ID NO: 231551 - DNA, 135 bp, Homo sapiens
acacagtaaggtacttaatgtttgcttactaacattatactgatactgataataaaaggttatttatactaagacttgtgttagtaaaggccgtgtagttgaaggcgggtgtagtttcagtattttactagaatt

SEQ ID NO: 231552 - DNA, 662 bp, Homo sapiens
ctgaaaatttgatcactggccagagtaacgctgaggagccatcctgtcttctgcttgagtgtcttcactctggggattctggcaggctggtttcctggccagatgcttctcatccacacctgtggacctcaggaaaccaaaggtgacctctgttggcatggccttgacttcctttccaccaatgcccatgagatgtggaaattgagcgaacatccacaccagaaccatacactcaaacaagcaggttggggcagggaaactccatcacatcatggtgaggcagagatgctgcagccacccagatcattgtgtagtagaggtggcaccattttactatgtgtcctccctgcactcagtgaagtctgtgaagggaggggtcagtgcagcaaggagctcgctctgccccagaggagagagtggaatgttcgaggacacatgaaagcagttactctgcctaccttttaaaactctttcctcctggggaactggtttattctgtactcctaaacagactatatccatgtattcactccttctataaatatttgagaaaaacctactatatgccaagcacttttctaggcaaaggaaatgcaatagccctttcttcccatagcttccagcctggtggggaataaaggaattaaataagcaattacaaa

SEQ ID NO: 231553 - DNA, 416 bp, Homo sapiens
agcggcggggcgaagggctcctcaagcgcggccagagtggacgccgaggccgaggaggcacggagagcgagcaagggctgcctgcacgctgtcacctctcattaaggttttggtatgaagatgatgctggtctcatagatgatgatgctggtctcatagaatgagatggagaggagtccctattcttcaattttttggaatagtttcagtaggatttgtaccagctattctttcaatatctactagaattcggctgtgaatccatctagtccttggcatttttgtttgactccccgtggaacagagttgttgttcagcagaaataatcaagagttgacatcataccagacctcgggactcaacaatccagaccagtatggctctatcttcatgaagaacatacacaatttcaggct

SEQ ID NO: 231554 - DNA, 1189 bp, Homo sapiens
gatgtttctcaaggtccatccaggatagaatgtctcataggtggccacatctcccagataattttgggatcctaatgacctgctcttaccacaggggtgaactagaaataaacgcactccagtttccttcaggggctgggggattataaggaaaagagtctgtcttaaaatttgtcattgattaaaatggggaaaaataaatctcccatgaaagtttatgacttagcttttgcataggttttcacctgaattcatactattttgatggtaaaaaaaaaagaaagaaaaaaagttgagattttgattaagtgttctataatggtggtaatccccaaccacctaacagaatcaaatctaaatatcttctgaaggaacttgccttaaagaattttccacaagtaaaaccttaagcaaaatgagctcacagcaaaaatatcactcatgaaaacaaccatgaagagaatcagacaaaaaatacttcacattggaattatctgacacaaatataaatgtttcagttatttcatgtaatgagaggcctgaacatgactaagaagtaaacatttgataaagaaccaaataaagatattagtatgtttgtgtatctcctcttaacaaaacaagctgtttaaccagtaaagatgagtaatgcatttgcatatagaacaaacagcttgatatggagtgttattttttcagagtaagaattttttttcctttctgagtaacaatttgaggatctctgcatttagaaagtagtaggatttttaaattctttttcattagaagaatggtaatatattggttagcctcttggtttttctcttttattaataatttcagtcttgaaaaacaaaaataacagttaaccttttattagtaatgaaagccactttaaaactgtgttacagcctggtgcggtggctcgcgcctgtaatcccagcactttgggaggccgaggcgggcagatcacaaggtcaagagttcgagaccagcctggccaatatggtgaaaccctgtctctactaaaaatacaaaaattagctgggtgtggtggcaggcgcctgtagtcccagctgcttgggaggctgaggcagaagaatcgcttgaactcgggaggcggaggttgcagtgagccaagatcatgccactgcactccagcctgggcgatagagcgagactgtctcca

SEQ ID NO: 231555 - DNA, 420 bp, Homo sapiens
gaacattaggtctcaggcatgatttggggagagaattgggcagtcagaaaccttgtcatctgaaaaaggtcaaggtctggtagcaataaaaatgcctaagcaaataaaaactcagtagaaaaattacttccctgggcaaggatttgggctgctgtaggacaaatgaggctgtgttgggagagggtctgtttattcctgctaagagcagtaacagtgaaatgcagatgtggaggagatctcccaatgctggctcctcctggggctgagatctgaatctttcagaaaacagcggaggaaccagatgctgtggaaagcctgccacgccgcacccggatctcaccacggatatttaagaaccactggcttcatgacgtttatgtctggtcaatttttccaggggtcgggggcagtttttattga

SEQ ID NO: 231556 - DNA, 570 bp, Homo sapiens
tttttttcactcaaaactttttttttttaatctgtgccatgtacatgtattatacagtatattcacaaaaagaggggggaaattccatttttaacaattaaatacataattattaagttttaaaaattctcctttgtgtaccactccaaaatcctctcctgcacatactatttttttggaaacacctagtcgtctcatcgttatcacaccggttgtaactatgtacctacgtgtctaccttccccatcagactcgggaacaaggagtcgggtttgagtcccactgtcccaagcacagaacgctggactcccagtagaccatatgttgcaaataaagaccttcgtccctttcaactcaggccgtccacgagcccaggagttccaacaaaatgatgtacagcaaccttttccaggcctttatgttgcctcaatatttctcacctgcaaaatgggaatgatccgtacctgcctcgctgtgctgtcggaaggagtcagacgatgggtgtgaaagtattgtaacactatagaaattaattcactcatccatttaacaggcaattattaagtgcta

SEQ ID NO: 231557 - DNA, 349 bp, Homo sapiens
ttaaagatcctagtctacatagcattcctttgggtgtatcttttcagtgtcaaagcaatttcagcaaatacagaattacagaatattgaacaataataaatgctttgtaggctgcttatggaacacttattttgtgctaggtaccttttattagttaacttatttctgtgagggaagcataatttcagctactttactaaaatggaaactgagactcagctagatgaaaatatttgcccaaagtcatatagccagtaaaaggtagagctagtatctgacagacttgatttttataaagctcatgtactttctgctattgctatgtggtttcatttaaagtttttttcaa

SEQ ID NO: 231558 - DNA, 425 bp, Homo sapiens
gattgtcatttggctggctaatgtcacctcagaaggacaaagggttcagcttttggcactgccaggggaaaatcagctctaaagtgttccctgagaccctttttctttcaaaaggccaatagtaaagcactctttaagatgagaaaagttggccgggcaccgtggcttacgcctgtcatcccagcactttgggtggctgaggcgggaggattgcttgagcccaggagttcaaaaccaacctgagcaacacagcgagattccatctctacagaaaatttaaaaattagccaggcatagtggcatatgcctgtggtcccaaatacttgagaggctgaggcaggaggatcccttgagcccaagaggttgaggctgcagtgagccatgcccacaccactgcattccagcctgggcgagaccctgtccca

SEQ ID NO: 231559 - DNA, 539 bp, Homo sapiens
acagatgtacttaaatccttagatagtgttaatgtactacttaaaaaacacacaaaacattatcatttgtaaaatatgctttatcatctattcatgtttgtgaatcaggtttttcttgatatcatgcaatcaaaacaaatttaacataagactgcccaatcatccataatttaaagtttgtgttcatcagaataattttattgttctccttatacatgttgtacatttgagtttgtttgttttttttttaagatagagtctccctctgtcgcccaggctagaatgcagtggtgcaatctcagctcactgcaacctccatctcccagcttcaagaccagcctggcaacatggtgaaccaccatctctactaaaaatacaaaaattagccgggcgtggtggtgggtgcctgtagtctcaattacctgggaagctgaggcatgagagtcacttgaacctgggaggcagaggttgcagtaagctgagatcacgccactgcactccagcctgggcaacagagcaaaattacatccaaaaaaaaa

SEQ ID NO: 231560 - DNA, 461 bp, Homo sapiens
catatgtgtgcatgtgtctttatagtagaatgatttagaatcctttgggtatatacccagtaatgagattgctgggtcaaatggtatttctggttctagatccttgaggaattgccacactgtcttctccaattgtatagattcaatgctatccccatcaagctaccatggactttcttcaccgaattagttgtatattttatatcaaatatacttcataaccatatgatggtttctgaatgaaattttgaagcccaacctaaagcttttcaaaaggaatggataagagagcaggatacattgactacactgctaaaattctagtcctatagaattgattaatctgaaacccaatcgcttgcgtggtttacctttgattaaaaaccttaattatctactgtgttctaggtgtcaggctagctgttgaagatatgttaatgagtaccttgttcttaaattac

SEQ ID NO: 231561 - DNA, 473 bp, Homo sapiens
cacaatatttcttttttaaatttcttaattttttaaaaatagagacagggtcttgccctgttgcacaggctagagtacagtggcgtgatcatagctcactgcagccttagacgcctaggctcaagctatccttccacctcagcctcacgagtagctggttctacaggcttatagtttttgtaaagacagggtcttgctgtgttgcccaagctggtcttgaactcctggctcaaatgatccacacacctcggtttcccaaagtgctgggattacaggcatgagccatggtgcctggccccctggtacttttctttaccaaaatacttataaaaggttagtatgctcttttgcttttcttctgctttgcaaataactagggctttttttttgtcttcttgaaattctcttatcaaattaaacttttattgcctgtttttaaagatcttgctactgtgagaccctgtctcaaaaaa

SEQ ID NO: 231562 - DNA, 358 bp, Homo sapiens
gatcacttgagttcaggatgtagaggctgcagtgaaccaagattgcaccactgcactccagcctgggtgacagagaccctgtgtcaaaaacagaaagagagattacagaattgaaatgttaagtttgatctttctggatgtttctaaataggtaaaatcaatgagtgtcttatttatggtttttctcctgaaggattgacctattcatggaaatccaaacggatctcccaaaggagagattaaataccaagttcaattaagtaatagagagttgactgttagtgcccacatgcccagagattaggacgttgtttattttttcctacagttctaaagagattgttacatgttttttttt

SEQ ID NO: 231563 - DNA, 223 bp, Homo sapiens
ggccgagctggagctggaagaggacgaggaggagggggaggaagcggagctggacggagacctgctggaggaggaggagctggaggaagcagaggaggaggaccggtcgtcgctgctgctgctgtcgccgcccgcggccaccgcctctcagacccagcagatcccgggcgggtccctggggtctgtgctgctgccagccgccaggttcgatgcccgggaggcg

SEQ ID NO: 231564 - DNA, 434 bp, Homo sapiens
ccaacttgtggaaacagctaaaggattggactaggagcagaagtttggaatggttaaaatgtagcaacatgtgtttcctgaaacaaaattccactataataaaaaaagcatttgaatgctcccttgtaattctgttggagcttgttgccttttttatgacacaaccataatcagtgatagacagtagcataaagaagcaagagcaaagcaattaagtaataatagcactacaaaaatgtgtgctgtagcttaccaaacacgacatttatgaattattagataggagataaggtgatgttattggattgttttaaatttagttctttgaaataggatagtgactaatattagtttgtgtgctgattttataactttatatgggcctttatatcaggaaacaacgtaacctacataattgactaataccagagcaa

SEQ ID NO: 231565 - DNA, 490 bp, Homo sapiens
tttggggtaagaaaataagagttcatttgggggtatgtaaagcttgaaatgtttattcaagtggagatgtcaggttgccagttgaacaaagtagtctggaattctagggcgataacaggtcctaaggcatacattttggagctatcagcatggaagtgaataagaaacctagaaagtgagtatggagaagagagagggagatctgagcaaggagcctgggattactgcagcattcaggggttcagggtgaaggggaccagcaagagatagagaagaaaacaatgaggcagtaggaagagaagaaagtgtatatggtgtcctgggtgctaagagaagaaagcaatcaaggaggagggcgtgattggcttggacagatgctgctgagagtggagttagataggcactagcaatgcacgttgagtttggaggtgtgaaggtggttagtggctctgagagtgatggggataaaactctaactgcagatggttca

SEQ ID NO: 231566 - DNA, 475 bp, Homo sapiens
tcaagtgagaaacacaacaaggaacacacccatgatgctagtgaattagaagatgagtcggccacctggccacgtggggctcccatgccaccaaaccaaccagccaagaaagctttactctactacctggagtgatttattccaattaccatggagaacttggcttgccgctgcacaatagaagcaagaagggctatgtgtacaacccagaggagttctctggcacacctcttagcactcccatgccccaaagtaatggttaatggaaaattacagcaaccaaacaaggcagaataaaggaggactcaggcctttcagaaattaaggtttgggccacactacccaagtaaagaaccccaaccacctgcaattcgaactgacaatggaaatatggaataactcgtggaagaaggaagctgtggatatctactatggctttgcgaccaattacagaatcaagaaccacaatagcttt

SEQ ID NO: 231567 - DNA, 644 bp, Homo sapiens
gatgcagtacacgtgtacatccagatggcacactccttttcaggatccataaatgtcacttaagtagagagatagacatggttccataatctgttcctagctgagaaaacctgaggatctttccaaagtagtaccccatttttacactagaaaactaaatttaacagggagggtaactaaattagaaaatttgttcaaagtaatgctttttagtaaaaggtcactaaataaagaactatccttagattaattgacttatatttgctttatgcatctggcaccaaaaacctcttttaaatactttacaaatacaaataaagtttaaaaaaacaacattattattcaaatgagctattcagtacttataactatcctaaaaagttatcaaattaacttattgccaatcccagaaattttatgacttggacgtcaacaaaacagcaggtgcaactgagaaatggtggaattggtggaactgtatagaaaaaagccagtgttctggtggacgacaagacttttgatctattggtattaatcaatttatggaactaagaatagcctccaaagcattctgccttctttcttgctactgcatttagctggaaattttataatatagattttgctctctaacagggacagat

SEQ ID NO: 231568 - DNA, 175 bp, Homo sapiens
acgttttaataatagccactctgcagccaagctctttcaaggccaatgtgggatagagccacaaacatcccttttccggaagagaattcttgcctgcccactggtagaattcttgttttcatctgtcttttattatttgtttttcaaagaaaaactggcctgtaatcccagcact

SEQ ID NO: 231569 - DNA, 481 bp, Homo sapiens
tgagggcacaggggcaggggagttcagagtagttgcccagggtacctttcccaaaagcaactcggctgctgactaggggtctaccggctcgctcgggctcttagacacgagcgcagaaacattttctcggactcaggagcgagggcgggtgggcctggtgttccaggctccgcaggcctgagcctggcgggaaagctcaaggagcagaactggaaggcacggtcccagacatgcgtcccgcccccgcccgtgctagctcggtgtagcttgcctgtggagggtctgagaggggaaaaggcaccgggaaaggctggcgggggccgcggaggagcaaagaggatgggactggagagcgcggtgcggccggcgcggttacctttgccattgttttccttaagctgagcggcgccgaggcccccgggggagcgaagcgcggagcagcccacctccacgtcgctgctcatgtcggcctcagcggccg

SEQ ID NO: 231570 - DNA, 89 bp, Homo sapiens
ctaataaatggaagagctgggattcaaatccatttgtgactttagggcctctgctcttaaccactgaattatattaatattcatagaaa

SEQ ID NO: 231571 - DNA, 386 bp, Homo sapiens
aaacctctcaggctgtccctaggtgtgctcacctctccagggtgccctggaagtatttatggagcccctctcactgctccttcactttctgagcgggagctgcacaagatctcccctcagcttctcttgctacttgagcccagctaaagggacagagctggcaatgtgggagctgcttcccagacagagaggtgggaaggaatccaccggctgtgtgctctgagggagggggtggggagcaggagaccagagcacgaggggtatggatgcaggcattcagctcatcgtaaagtctaggcctgcgtcgtgctctcctctttcctaaatttgatatgctcccccacccctaaaataatctatactcatcatggaaattccagaaatca

SEQ ID NO: 231572 - DNA, 553 bp, Homo sapiens
tcagtgccagatgacattcttaggaatttcggggcaagactctccaagcagtgccttgaatgagaactgagagaaagaggtagaaatctccacctgggtgctttagatgaaaagactccagggcagtacagcttcagaatcatcagctgcacacgtattaatgtgcagaaaagcagagtctcttctaaaacagccacacccaaggatttgagaagcagaacgccatattggaaatgcctgcctacacaagcaattaaattggatttatgtcacattgcaagtctgcccccaagaactgttctcccaatgcaattctgctaaatcagatgacattcaaaggtattttcttgccacccataaggctcctgaatgagtcatctgtaaaaggagttagttaacctctatatacctcggtttcctcatttatataatgggaataataatagaatctacttcgtaagattcttataaggacacaatggattaacaaatgaaaattactatatgcatccagcatatagtaagcagtctgtaaattcttgttctttttttt

SEQ ID NO: 231573 - DNA, 512 bp, Homo sapiens
ggtgggccaatcgctgctcggtattccaggcgctttctcaggtttctgctgatcttgcagcgcccagaaatggaccgagcggacccgccgccgcacgcaccctgctccactccaagctcctaagggctcctggcgcgccgcgtagccttggcgaggtccgcgctggggtgcggagagcgaagggaactggagagccatgtagatccaggctctcgcccgcccgcctccttcgggatcgaatcaagggctcccatagtgttaggagggggcgagagtgctgtttatcgtcatttgcctcggagcttcgagagagggtggtattttgcttttccgccccgcatcctccggaactccctgcaccggagagaggacggcgtctccaggttgctggcaaccggtgagaatgggggtagggaaggaacattttcgccgtagctgctccgtaaagcgattgtccaactgagaggggcgtcggacgagtggaccagggcggcgagtttgcccggcgcgtc

SEQ ID NO: 231574 - DNA, 346 bp, Homo sapiens
cctccacacctggctttcagggttttccaggtgggtccggagcggcctgtgcttaagggctcaggtccacccgagactctgcctggcgtgcgtatctgggcatctgcacctggctgccgggcacaggccgtgccaggcctgtacgagctctggggttgttctcccttctttccagggttcctccctggccctgggtggttccagcaaaacagtcgccagggcacatgagtctagttccagaaagaccttgcccctgcctctgagagatggaaaggatacaaacgcattctcttaccaaaaagaattaaattagaagtaaataaaaaagatatatggaaaagtctca

SEQ ID NO: 231575 - DNA, 271 bp, Homo sapiens
aaaaagaagaagaatggggccaaggaggatttaagactaccattataggttacaagttgaattctttttaatattcttcaagcaatgacagtaaagattcaaataacttttaaattacctttgatttctaaaccaagtttcttggaatgtgaaagtcgccaagactgggccctgcagggcctgggttgggctactactgcctatggagattctgagggtattaaccttaataatggcatgaaatcaataaaaatcatccaaaagctttttt

SEQ ID NO: 231576 - DNA, 738 bp, Homo sapiens
tagattaaagtgtaatcacctcccagcccaggcaataactaacaatgttccactgatttactttattaaatactgaatagaaacaatatatttataaaatatttattttatatatataataagcacataatgaacacctgtgtctccagtcttggtttaagaaattaagccaaaagtaatcataagtgcttatgattacttttgaagtcacctgtacaacttttgctgactacatccccttcttcaacactctaacgatggccactgtgagcactgtgtatattgaattgtgttgtattttaataccgtgtgcactactttgttttcctagctgtatgctattgcatttagtgagcataatgaattatatcagtataattcacttttgtcatttcattgtttcagctcttctgtactaattattgccaatatatttctactggcataaaaacagacacataggacagtggaacagaatagagatcgcagacaaatctacacatttacaaacaattcatctctgacaaaggcatcaagaacatacactgggaaaacaacagtcttttcaataaatgatcctgggaaaactgaataaccatatgcagaaggataaaattaaacccatctcaccatacacaaaaatcaaatcaaataaaaatggattaaagacttgaatctgagacctgaaactatgaagctagtaaaaaaaaaaaaaaaataggaaaggggtcgggcgcg

SEQ ID NO: 231577 - DNA, 356 bp, Homo sapiens
ttaggggtttgattttaagggacctgactgggacattcaaagtaaatagtctcagttaatatgtaataatgtaaggctgtggtaaacatagttcctatctctactgcccccaatctaaaaaggtataccatccacagtcatttcttggcagtcaggtgatatctgtagagtactaggttatgtatccttaggagaaacatctaccaaaaatggacaaaactcttctgcccacatgttcatgaactctaattttcatacactatatctcactccatatggaactcaaatgagggccatgcagaaactgccgccaatatgattaatgagtgaactctacactgcctgtcaatttcttt

SEQ ID NO: 231578 - DNA, 409 bp, Homo sapiens
cagccagaaaacatacaatatttattaagttcactgtcttatcctggcatggttcatggtgtaccaaaacaattacaatagttaacatcaaagatcactaatcacagatcaccataaaatacaaaatagtagctgggcatggtggttcatgtctgtaatcacagcactttggaaggccgagataggagaactgcttgagtccaggaattcaagaccagcccagacagcagagaccccatctctataaaaaatacaaaaattagctggatatggtggcatgcaactgtagttccagctactcaggaggctgaagtgggaggttcacttgagtctgggaggttacggttgcagtgggccatgattgtgccacagaactccagcctgtgcaacagagtgagactctgtctca

SEQ ID NO: 231579 - DNA, 272 bp, Homo sapiens
tactgtccaggcaaactcctactcagggtccaaggctttcattccacggcctctcctcaagacaacttgctcaaccccccaggaagagtctcagtgctcccattgtgaccttgaccttggtgctttctgggcactgtgatcacccacaacccttgcacagctgtggccaccctgttgtgtaatggcttctgtgcctggggaagtctctctgacctccagacccacatggataattgcatgaggatataaaacagggcaggggcccagccaca

SEQ ID NO: 231580 - DNA, 303 bp, Homo sapiens
ctactaagactaaaccggaaagactaaaacccgaacagaccaataacaagtcttttattctacctaactagaatttctctgctccctaatccactgagaaagcaatgttttctcccagcttttcttcagttcttctgtccctaaaacaagggttcttttcagagctctcttaaggttttctaaagactttcactgttagtaacaaggagaaaaaaggcaagagatcaaagccataataaaaagtctcccagtaaagaaaagcctgggacccaatggcttcactgcagaattctaccaaacatt

SEQ ID NO: 231581 - DNA, 772 bp, Homo sapiens
caaataatggtcaccaagtctcggaataggttttgtgagccccttgaggcattcatccagcactgtttcagagaaatctctatttcaatctattcctatactttagttattgaaaaacaacagacaacggcaaaagcaaattgacctttttgtgttcctttgtgcatggatgagtggctgactctggagcccaggctgttgcttctcggtctggtgatgaatcctgcatagtctatcctcatatatatatatatacatttttttccttctccccttcccactgcaatttgcttattgtatcaatttgcttattctatcatttgcttattatatctgaattgccatttatgtgggatcgagtttgttgacctttaaaggtattgtgtgtgtgtgttttcttcttccctggagcatctcctgcacataacacctctcttgctgtcatagccagaaattcagtttttaagtttttttctggggtcttcttgctcaagaggaagtatgttcagttgatacggggcttagaattttatttatagcttttattacattctaaaacccccagcagaaacaagtcttaacaaacacagattttaatttctgaacattcttctaataagttttgcacaggtagcggaacaactaaaaaaactgttttttgcattgatggtctacctcattacaatttaacctctaaagggtgttttagccagctctagagtctgctacggttaaggtgaatttactgcttcttcccataataaagaatggt

SEQ ID NO: 231582 - DNA, 428 bp, Homo sapiens
agtttgaaaccagcatggccaacagatgtcagccacttttcccagcctgttttttgattcttattttctatttttcttttttgagatagtactttttaaagagatagtacttttttgatatagtactttataaaagggagatcaggccaggcacggaggctcatgtaagtaatcccagcactttgggaggccgagacgggcccatgacaaggtcaggagatcgagaccgtcctggctaacacggtgaaaccccatctctactaaaaatataaaatattagccaggcgtggtggcaggtgcctgtagtcctagctgcttgggaggctgaggcaggagaatggtgtgaatcctggagacggagcttgcagggagccaacatcgtgccactgcactccggcctgggcgacagtgagaatctgtctcaaaaa

SEQ ID NO: 231583 - DNA, 418 bp, Homo sapiens
ttagtaattgtcattgaaagcaatagggaattgtagattgctcagaaatgaggggattactggctaaccatttggaaagtaaaattaaaatacctaataggtttgatacactaaagtaaattctaatagaatcaagaatttaataagaaaaagtataatgatactaaaataaaatttaagaggctatttttatatttatatccttgttgtagaggaggattctaagcatacttcccaaagccaaaaatgatagaaaggataacattgaaatatactactcctttaaagaacttgtggctgggcatgggtggcttatgcctgtaatcccagcactttgagaggccaaggcaggtggatcgcctgagctcaggagtttaagaccaacctgggaaatgtggcaaaaccccatctcttaaaa

SEQ ID NO: 231584 - DNA, 644 bp, Homo sapiens
gatacatgtcattgtacatttgtcacaacccatatgatagataccaccaagagtgtaccctaatgtaaactgtagattctgggtggtaatgacttgccaatgtagattcaacagctgcaacagatgtaccattctggtgagggatgttgatagtaggagaggatgtgcaaatgtggggtcaaggaatatatgggaatgctctgtatactctgttcaattttcctgtgaacctaaaactgctctaaaagataaagtctattaaaaatgcaaggaatagtacaattctcaacttcattgaaaactttgttaatgaggtagaagttaggactagaaaaaacatagcagaatagcggtgttccactcaagaactcacaggccaaccctggcactatcctctggtattgaaaccctgacatacctgggtgggagtgatactcatagcccatctcaaattgtttatttctgtcgtggtgctagatttatgttaagaaatctacaaattttgttttggctccttcactggtacattatacaaattatgcaatggaactatttatgcccatggagaggttgacatggagtgtatgtgtatacaaaaaggggggaagtggagagagagagagagagattttgcagagattaag

SEQ ID NO: 231585 - DNA, 380 bp, Homo sapiens
agcaccatagggattaccttgtcagaggaaatgtagtagtggaagtgttttggtaaatgggctgtttcctctggaaaatactcatatagtcattgctattgtggttgcttctgtgattttactgtttcttctctatgcctcatgtctatggaaacttcttcttagatataataatttttctggttatcttgctctggtctaagagccaccatctgtttactatgtattgttttgtataaataaaccctcagaaaagcacagtattttgtttaattccaagttcttgccatgggaacagcttacttgtgaactgtgcctacttatgtcttccaccccaaccctcttttcttcctggggaaataccttgggatactgttaaa

SEQ ID NO: 231586 - DNA, 288 bp, Homo sapiens
aaccccccaggagacaaagagggtgtacacacaagtaacgatgtcatgttaaaaatgtataagagcattgtgacctgaccaaggacaaagaactttaccctcgctgccacccagatgtccatagtcattgctcaccctttgatctcaacccccccgcctgcttcccccttcccttaacataaaagaaacccaaaaattcatattagcttaggaggttctttaggacactagttgccatcttctcggttcgctgggtctccgaaataaagttgctttccttgccccaac

SEQ ID NO: 231587 - DNA, 461 bp, Homo sapiens
tctctactaaaaatacaaaaaattagccaggcttggtggcgggcacctgtagtcccagctactcgggaggctgaggcaggagaatggcgtgaacctgggaggcggagcttgcagtgagccgagatcgcaccacttcactccagcctgggtgacagagcgagactgtgtctcaaaaaaaaaaaaaaaattgtctcactaaaacaaaagagcctcctatcacccttgatatgaaattccagaattttctgtgataccacatggccattgcttgttttgctatatgttaatgtctttcataataacttctgagctctgtatatattggggtattagctccttgtcatatgttaaaaatatttttactctagttgtccattaactttatttttcatgacccttgctgtacaaaagcagattgttttcatctttaagtgaataaaactattactggtttattgtaa

SEQ ID NO: 231588 - DNA, 316 bp, Homo sapiens
atgggagcacagtactgagaaatgggagcacagtactgggaaatgggagcccagtactgagaaatgggagcacacagtactgtgaaatgggagcacagtactgggaaatgggagcatagtactgagaaaccccagacctggattctgagtttttcagtctagcccagacttcttatcttagtagacaaaaagagtcaataccagagaaccagaggcatcctctgtattttaatgaactctgcgttttagtctgtttagtagtcatattttaaaagataatcagttttctaaatatatctataagttactacatgca

SEQ ID NO: 231589 - DNA, 490 bp, Homo sapiens
gagcccatgcagaagaaggagttctgtgcgaacaaatcagaaacgggcaaggacacaccccggcagtctctactggttaggaacattcatgggaagtatgtttctagttcccccacaaagctccccagggccccagcatgtcctggggatgccacagctcctgggcagagcctgcagggagtgggcagctgagttggcccaagcaccaatgcatgaatcatcctagaggcatcccaggagcccacagccaggagccaaaatcggggggctgcagctgggacccctctcccgtgaactgcccctgccaggcctttttggcctcactttatctgcctgtccagtgggcacaaccaccttgctgggacaggcgtgtctgccccaccagcaggtccatcctaacagcctctgactcctgtcaactcaccacaaacgggtttcctccacctcagtgactctgtgatttggaaaccaaataaatgtgaaaccgtct

SEQ ID NO: 231590 - DNA, 382 bp, Homo sapiens
tgaactaatgcatgttaatagagaacatgccttaattagggccctatctacacttctgatgggctataatcatttgtggaatcctttgactgagcctccccagagaattactgtcataactgcttgtcagagagagaggaagtccttgaatttaatgtgactatgggaattatagtctttcattttctgggagacccaggcttgaaaggccaccacttggctgggcgcggtggttcacgcctgtaatcccagcgttttgggaggccgaggcgggcggatcacgaggtcaggagatcgagaccatcctggctaacacggtgaaacgccatctctactaaaaatacaaaaaattagccgggcgcagtggcgggcacctggagtc

SEQ ID NO: 231591 - DNA, 275 bp, Homo sapiens
ctctgccaggcctttcccagatggtaactgaaccatttgtttaaattaagtcttgcctaaattataaggagctgagctaattttcaatgtcaagaattcttggaatagagccacaggaggtgggaaaatgtacagtaatgtggaggggttgggggagaagcgaaacatttgtcagctgagggtttctgggatccttcactcatgtttaaaacaatggccaccctccagaagccagccacttcatcattattatagtgttgaagcctagttgcatg

SEQ ID NO: 231592 - DNA, 345 bp, Homo sapiens
gacttattgggtcctctctagaaaaaaaaaaaaaaaaaagattatttttaaggaataactaaagtaaaaacaaagctctacgaactggaaacttgtggattagctactttatgaaagaacattattttagtgtgcaattctggagaagcaaacattgatcaacatttatatttgatatccttaactttaataaacatacacaaaacaaaaattgagttcagtccagtaatggcaaccaaatggtgttttttaactttccagattgactttgtgcccattatttcattaaagttctcttgctctaatgagctagacttgtgggaaaaggtttaaaaataaagctga

SEQ ID NO: 231593 - DNA, 365 bp, Homo sapiens
aggcatgaaccactacgcccagcctggtttggttttttgagcatccatttcctcatctttattattattattttgtgaggcaggtgactcacccaggagagtctcacagtagcgtgatcacagatcactgcagcctcgacctccccagggtcaaggagtcttcacacctcagcctcctgagtagtacatcaccatgcctagctgattttttaaaatttttagtagaaacaaaggcacggcgggggttgctccctttgttgcccaggctggtctcgcacttctgagctccatccatccatccatgtcggcctcccaaagtcctgggattataggcgtgagccaccatgcctggtccatttcttcat

SEQ ID NO: 231594 - DNA, 499 bp, Homo sapiens
aattaagtacaatcaaatatggctgttgtaaattctgggaattggcttggctaggattatatgcatatgcccagacagtgcttagagaaagtgaaaaaaaagacaaaagttggtttgggcaagacctggcttctcatcctccatgtcttttctttcatgtcacaggcatctaacaattagaattactaattatttattcattcactcacagaaaccaatatatgttgagcttctactgtgtctcagaccctgtgaacaagctaaatcagaccatgcccttgtgtagcctacaatctaatgaaggaatcagatggaaaaaaaaatatgaatcacattaagtattgtcatatagttcccagttttatgtctgctcttatgtgcgtggcattttaatgatgactactgcttgttgaatactgtgctaagatatctgtgccggcatctagcctaggacttagttggtgctcaataaaatgtgttgaattaattggtttaatcc

SEQ ID NO: 231595 - DNA, 591 bp, Homo sapiens
gcactccggcctgggtgacaagaattaaactctgtctcaaaagaataaaaaggtaacatcaggtacttctatcatatgtgctcatctctgtgaatggaaaactcttttgttctgtctgcctttacatgaaaatagaatgccagatattcctaatagttggaagcttcagtgtccaatgagtcagctacctgggaaatttggggcagttataaaatgttcccataacctgtttcttcatatttaaaatgcaaataaatcatctccatcctcacatctgaaaaatgcaatgacagatggaaagggctagcaagacatctaagtactactagaccttacgtacatgtagttactttgatgaaataaattcatacaagaaataaatgagtgataaaaacataaacgggaaaaatatatagctcttcttctctgaaagcatctaataaaattacaccatgtcattctttagatgttctgtttacaaaacacctgagggaactgacatgaaactgagacataaacctcttcaatgcagagttcctaaaactttaaggacaaataatattgaattccaccagaatttcttttgaagga

SEQ ID NO: 231596 - DNA, 353 bp, Homo sapiens
aaagattccttcggaattcctccgtataccagcatgtcatctgcaaatagagggagttttatttcttcctttctagacagtatgcccttaagttcttttccttgccttattgcagtagttacaactttcagtactgtgtttcagtactgtgttagagtgttgagagtgaaattgttgacttgtttctgagctcagcaaaaacatttgttgtttcactgttaagtatgacatcaactgtaggttttttggtaggtgctttttatgacattgagtaagttcccttctattcctagtgtactgatagttttttttttattgtgaataatattcaattttatctaatgctttttctg

SEQ ID NO: 231597 - DNA, 840 bp, Homo sapiens
cgaaccccctccgtcgggggtcccccagaggatcaactaaaccttgaactaagaagaaaaatgtgttgtgagcagggggagcctcagctgcctcaggccgttcaggacagaagggtgtttctgaaggccggagcaagttttgaagaagtccctatcagattacacttggttgactactccggagcagccactaagagggatgaacaggcctgcgtggaaattgaatgagattagttgagtccacgctccatgagaatgctgaacaccatccaaagcagcaaattgagattccttgatttggggaagaggtttgggaggaacccttcaataattggcatgggacaagaggggacccagtccaagtgtatttgggactcgcagtagggaggaacaattcagagagagacttgagaagactcgaagactggctgtggccatgggaagatacaggtacatggaagccatgtccccacattgaaagcccaacgttcctgaagcccaaattactggcccacacagggaataatggatgcgtccctgctaaagtgtcattcacggaaggtggtctggggaccctactcagtgatagaccatgaaggatggcccaagaaaggtcttgccacgcaggaggtggtagaaaatgtccagctaatctcattgcaggcgtacgcagactatagcagaggcaccccacatggaagttgggccaatggcgaagtgttgtgacgagaaacgatgcacagaaccagctccaagaaggaggagacatacaatggcgcacatgtattagaacgaagggagatatgtgaaacaatcacaaacaggcaaagagaaggaaaa

SEQ ID NO: 231598 - DNA, 589 bp, Homo sapiens
cgaaccccctccgtcgggggtcccccagaggatcaactaaaccttgaactaagaagaaaaatgtgttgtgagcagggggagcctcagctgcctcaggccgttcaggacagaagggtgtttctgaaggccggagcaagttttgaagaagtccctatcagattacacttggttgactactccggagcagccactaagagggatgaacaggcctgcgtggaaattgaatgagattagttgagtccacgctccatgagaatgctgaacaccatccaaagcagcaaattgagattccttgatttggggaagaggtttgggaggaacccttcaataattggcatgggaccacccctcccagggaccgacccctggcccaagctccccttgctggcgggcgctgcgtgggccctgcacttgctgaggttccccatcatgggcaaggaagggaattcccacagccctccagtgtactgagggtactggcctagccatgtggaattccctaccctgactccttccccaaacccagggaaaagagctctcaattttttatttttaatttttgtttgaaataaagtccttagttagccaa

SEQ ID NO: 231599 - DNA, 448 bp, Homo sapiens
cgaaccccctccgtcgggggtcccccagaggatcaactaaaccttgaactaagaagaaaaatgtgttgtgagcagggggagcctcagctgcctcaggccgttcaggacagaagggtgtttctgaaggccggagcaagttttgaagaagtccctatcagattacacttggttgactactccggagcagccactaagagggatgaacaggcctgcgtggaaattgaatgagattagttgagtccacgctccatgagaatgctgaacaccatccaaagcagcaaattgagattccttgatttggggaattcccacagccctccagtgtactgagggtactggcctagccatgtggaattccctaccctgactccttccccaaacccagggaaaagagctctcaattttttatttttaatttttgtttgaaataaagtccttagttagccaa

SEQ ID NO: 231600 - DNA, 410 bp, Homo sapiens
ggccatctcctgactcgggattctttcaagttagcaaatatgtgatgttttcattactcaggaaaagtgtatagaactactttcaaaaatattttagggacaatacactagaagtgttatcaagagataaattgctttgtagttaaaaagtgaaaactacagcctaaatgaaaggaagggagaataaaaggaaaattgtatttttttcagctgtcattataaaagtgatgttgcccccatttaccaatgaaaagacactgagggccacagtgtccctctgagaccctctttccagggtcacatagctgaaatatgtggccaaaacagtatctttcccaaggcttataactgtaggcccttgtactacactgtgctatatctggtaggaaagaatatagatacacaaacta

SEQ ID NO: 231601 - DNA, 588 bp, Homo sapiens
  misc_feature (548)..(548): n is a, c, g, or t
  misc_feature (551)..(551): n is a, c, g, or t
  misc_feature (569)..(570): n is a, c, g, or t
tctgcattgggctttgtttctctgtttatcaggaaagtccttttcctttactaactgaagctataactgagctggtattttaccctggtgtgtccccacactctcatcctttactcgggactcctcagccccagcacggttcaataactagcaacaaacaggcctgtgacatcataggaaccaacttcactgcatgtttccatggtattaaagagttaccttaaataaacgtagtcaagaatgtaaatgaaccccatttttattccaaaaatagcaggctggccaggcacagtggctcatgccgataatccctgtaatcactttgggaggccaagatcgggggattgcttgaccctaggagttcaagaccagcctgggcaacatggtgagaccctgtctctacaaatttttttctttttttaattagccaggcatggtggtggacccctgtacatccagctactcaggaggctaaggcaggaggatcacttaagcccaggaggtcaaggttacagtgaacagtgtttgtgccattgcactaacagggnggnttttagagtcaaacaaanncgggggccaggggaagag

SEQ ID NO: 231602 - DNA, 564 bp, Homo sapiens
ttctgcattgggctttgtttctctgtttatcaggaaagtccttttcctttactaactgaagctataactgagctggtattttaccctggtgtgtccccacactctcatcctttactcgggactcctcagccccagcacggttcaataactagcaacaaacaggcctgtgacatcataggaaccaacttcactgcatgtttccatggtattaaagagttaccttaaataaacgtagtcaagaatgtaaatgaaccccatttttattccaaaaatagcaggctggccaggcacagtggctcatgccgataatccctgtaatcactttgggaggccaagatcgggggattgcttgaccctaggagttcaagaccagcctgggcaacatggtgagaccctgtctctacaaatttttttctttttttaattagccaggcatggtggtggacccctgtacatccagctactcaggaggctaaggcaggaggatcacttaagcccaggaggtcaaggttacagtgaacagtgtttgtgccattgcactccaggctgggcaatagagcaaga

SEQ ID NO: 231603 - DNA, 473 bp, Homo sapiens
gtgttcttactcctacaagttttccactactcaggggctctttagggtaaattaaccatgaaaacacacacatgcacacacacatacaaactaaattccattcatattaagatatgcttccttttttctctcccctatccatggtagtaataacaagaagtaaaagctttttcattataaagtaaacttccatttttctttcttgatacgttttcaggttttcctctaaaagtaattaaaagtactactcaagttgttcctagttgtctagaatggcttatgctgccattagcttctacagctctgtcattagagaaatggactgtacttcttcttcacctttcacatgcggccaaaattgggttactttaaaaggccagatgtcaaaagcagataaatcctttgtactgtaatgagcataatgatgaataatggcacttatgttcaataaacgatgccctgcccataaacag

SEQ ID NO: 231604 - DNA, 428 bp, Homo sapiens
aatatcatattttaactttattttgtaaaatatactgacagttctcatgccttaggtcttctcctcctttttctactagtttccaccaccactcctgtcaaaatttttggactctgttctaagattaagcttatgataaaagttagtagggggccgggcagggtaatcacgcctgtaatcccagcactttcggaggcagaggtgggcggatcacttgagcccgggagtttgagaccggcctgggcaacatggtgaaaccctgtctctacaaaaaatcagtcggcactgtggcatacacctgtggtcccagccccttaggcggctgaggcaggagaattgcttgggcctgggaggcagaggtaatagtgagccaagatcatgctattgcactcccacctgagtgaaaggaatgaaatcctgtctcaaaa

SEQ ID NO: 231605 - DNA, 764 bp, Homo sapiens
ctgaatgctttttgtcatctctgttttcatagttcttgagcaggtactaaaaattaactggaaacaatgaaagtcatccaggttagggagaggaagttacccgtttatgagagttgcttgagagataagctgaaaggatgtggcgtgctacccccacccctgcctcgtgtagaaaagcctgccaatgttgcctcatttagacccagactccaaaacgggagtcttatagctgggccacctaggaagagaggttctaaagcataaaaaagaaagcatttcattttgggacacttatttgcagctggaaatgggggaatgggctaactggctaaactactatcttgtccatcctgccttcacttcagtccttccacattgttatttggtgtttggactgtgctagaagaactgttttatacaggctgctattcaataaatttgtaaataccatacccacaccaaaggatttaacactgaaaagattaaggtaattttggaaaattctaaaagtcacttttcactcctgagatagtaggtggtcagaagaaatgaggaactctgtagaagccatatgcaagatgcacagatggcattgtgtttgttgtggactgttgatgttaacaggatggaagaagtcgtgctaagaaactagacttgaagaacttgtctctctcagaaattgagaaattgttagcaatggttgaactaagctcatcctcttggcatttgcagcctacctgtgcatcataggacatgaaataaag

SEQ ID NO: 231606 - DNA, 698 bp, Homo sapiens
ctgaatgctttttgtcatctctgttttcatagttcttgagcaggtactaaaaattaactggaaacaatgaaagtcatccaggttagggagaggaagttacccgtttatgagagttgcttgagagataagctgaaaggatgtggcgtgctacccccacccctgcctcgtgtagaaaagcctgccaatgttgcctcatttagacccagactccaaaacgggagtcttatagctgggccacctaggaagagaggttctaaagcataaaaaagaaagcatttcattttgggacacttatttgcagctggaaatgggggaatgggctaactggctaaactactatcttgtccatcctgccttcacttcagtccttccacattgttatttggtgtttggactgtgctagaagaactgttttatacaggctgctattcaataaatttgtaaataccatacccacaccaaaggatttaacactgaaaagattaaggtaattttggaaaattctaaaagtcacttttcactcctgagatagtaggtggtcagaagaaatgaggaactctgtagaagccatatgcaagatgcacagatggcattgtgtttgttgtggactgttgatgttaacaggatggaagaagtcaaaactgaactttattagggtataagtgtctctctcagaaattgagttgttagcctggttg

SEQ ID NO: 231607 - DNA, 480 bp, Homo sapiens
cataaacctaaaggtaagccaaaactagaaaacttccagaagaaaacaagagaatgtttttgtggcattacgataaacataaagttatcagttaagacagggcaaaaatatccatgatgcattaaaaaataaataaaatgatctttttcaaaaataaaagtgtttgcactttaaacaatacatttaggaaaaataaaaggtaattcccagatatgaagactatatttataatgtatgtatgtgatgaaggatatgtatctagaatgtatgagaaagtcttatcattcaataataagacagataacctgatacaaaagtgggcaaaatgtttgaatagaaagttatgatgagttttttaaaaaagagtagatatgcaaatggaaagtaagcctgttaaaaataatattttcatccactagggcaatagaaaatgaaattatagtggcatagcactacacactgactagcatggctaaaatg

SEQ ID NO: 231608 - DNA, 478 bp, Homo sapiens
cagatgagaagagggggcagttaaagctcagatttgatgtaacattacagatcaaaggccccaaacagctctcaacctgctggtttttgttctttctccatgtgtgaactgtgttatgaaaggaagtccactgctcaaaatatattctataatactacaatgcaaaccaacatcactcagaacatgaatttgtatacagcacaagtaataaatatttttagaaaactatttacaacattacttcttgtgaacatttagacgagagcaaaatttatttcttcctgcaaagttaaaaaagttttgactgtctagttcagtgctaaattccctggcacctagtttctcattcacatttcatcttaaaatcagatttgcttacaaagtctcctagaaaaaacattctccagcattactgttcaagtgtctgcctcatttgtttagaaaagacaaagggaggccgtaagaaaatatgcaaatt

SEQ ID NO: 231609 - DNA, 244 bp, Homo sapiens
cccctaagtatatcatgctttgtgatattcgctattggtagtgttgtaggtagttataaatacatataaataaaataaaatataaaaatataataatataggataataaatataatcaaaatataagtgtacatatattaaaagtgagagatcaacaatgttttgcttcaagagagcatatcaaaacagttcttacaagagcatcgtgtcagccagcatttccccagcagtgcgatggaacaca

SEQ ID NO: 231610 - DNA, 168 bp, Homo sapiens
gtagtggtggtggcatgggttccggtgttagactcactgaggttctaatcccacatccaccaacaaccttggcaagttacttcccctttctgaggatcagtatcctccttgtgaaatatccccatatcgtgtgtgagaagagtaaataaaataacatctgcaaaccca

SEQ ID NO: 231611 - DNA, 369 bp, Homo sapiens
cacaaatggagcttgcaggattggaagttgctgtgggtgtcagtgagtgagtggggagtgaacgtggaggcctaggatattacttgtttgcttttctatgacttgcaacccagtgggttggtttacaccagcatcgtcacggagctgaaggtggctcacactagctggcaggggccagttgttaccagtaggatttgatactattgacagtttcaggcatcaactggactcttgaaatatacacttgcagataactggtgtctactgtattccctgtttattaaatgtccttttaatgcttactctcaatttctgtatttattttgtgacacactggaaacacttagtggaacccttcaagcgacactg

SEQ ID NO: 231612 - DNA, 513 bp, Homo sapiens
gctgtggagggtggtgcgagctgtggggcgcggatacagctgccacggtttccccagctcccaaggacactcagtgtctctagagggtcaagtgtaaaccagcacgcagcttctcctggaacactgggcatgggaagcttgtgcggatcaggtgaggcatccactggctttgctgccctttcagagaaggcgggttgtctgtcggtcctgctggttggagggtccccacctctgtgaggtggaaataagaggggctctgagtccaacagcagcagctggaggcagagccgagtgcggcaaacaagagctactttaaaatttcatttaaaataaccaagtgcctgatattaaccctcattaggaaaacatagtgttaacaatattagtttgtatcttttcagatttttagatattttagtctcaaaggtatttaaaatgaaaactgtcaaaacataagtttaaaatgtcgagcctgcagggagctgcgtcctcagtagctggttcagctcgagc

SEQ ID NO: 231613 - DNA, 458 bp, Homo sapiens
tttccctttaagttattaatttacaagacaagcatgagttacgttttggttggttgtttattcattcatgtgtgtatgtacatgtgtatgatggagtcttggactcgggctcaagcgatccccccacctcagtctccctagtgcctgtgtttaattattttcacataacactccacatttctaagtgtatggcaacaggatctcacatcaacgaccctgttcccacagcctaactcttctggggcttgtagtaaaaccctaaatttccaattcttttcctatattcaaatgcaacattatcaagtatttgtcttttattgtacatttcatacagatgaagtgtgttatttttttcagagtagtgagtcgttctgaaaatatttgttttcactcttaaaatatttctgaacattacacatgagtggaaagcagaaaataatcacctgacagttaattgt

SEQ ID NO: 231614 - DNA, 137 bp, Homo sapiens
actgttgatctgtcccccaaaaaagactgtttcacttagatttcagaggctctccaattgagaagatttcatttggcactggactgttaccttcatgtttgctctattattaatagattctgcctctctttactgct

SEQ ID NO: 231615 - DNA, 162 bp, Homo sapiens
cctagaggtaaaattgctgggtcatacggtaattctgttaaacatttttaaagagactgcaccatttgacattgccaccaggaacatgtgagagttccagtttctccatatcctcattggcacttggcattgtctgtgtttttattaaagccatcctagtga

SEQ ID NO: 231616 - DNA, 393 bp, Homo sapiens
gtactatattatcatattggttcaggtttaccatactctatgcgtgccagtctttaccgattttaaagccagaagaaggaatctgtaaatcgtactaccattttcttctgcctgtgtgtgatggttctaaacctggcaatccaaatgcactttttaatttgttacacaataatatagtaaaacctcttggatagacatttgctcagttttcaaaaatatctttttatatacattaggtaatcaactacagttatttaaatctgctttttttctgtgaggttttgccatgaacacagaagggaaattgacctcctgttgttgggcaattagagccattaactgctgccgtacaagagtgtaagaaagaaggagagttgactccagagtttgtgt

SEQ ID NO: 231617 - DNA, 394 bp, Homo sapiens
gctcagcaaccaccaccttacattaaggcaagaccctccatcagcaagaagactgaaacttggccaggtgcagtggctcacacctgtcatcccaacaccttgggaggccaaggtgggtagattgcttgagcccaggaagtcaaggcaacatggcaaaaccccatctctacaaaaaaaaaaaatacaaaaattagctggtcatggtggcatgtatctgtagttccagctagtcaggagtctgaggtgggggtttgattgagcatgaggttgagactgcaattactctagcctgagccatagagtaaaaccctgtcacgcacacaaaaaaagattgcagctttctgaaggctcagatgactgttagcacttgttaacaataaagtatttgtaaatt

SEQ ID NO: 231618 - DNA, 443 bp, Homo sapiens
cattgattttgtagattctcactgatacccaactataagggagagatgtttacttgtttgaaattcatctgagtccaaataatataacctgggttttaaacgttcaccgctaatttttttaaagacactgtaaattatttaaaagaaaatgccttctggccaggcacggtggttcatgcctgtaatcccagcactttgggaggctgaggcgggtggatcacttgaggtcaggagttcaagaccagcctcgccaacatggtgaaacccccatctctactaaaaatacaaaaattagccaggcatggtggcatacaatgtaatctcagctacttggtaggctgaggcaggagaatcacttgaacctgggaggttgcagtgagcggagatcgcaccactgtgttccagcctgggcgacagagcgagactctgtctcaaaaaaaaag

SEQ ID NO: 231619 - DNA, 284 bp, Homo sapiens
caaaaatgtgctttgtacttttcaaccaccactgtagcatttagacactatcattcttaactggagcagccagagggttaatggtttgtacatctttcttctctctcactctgtaatactagtttagatcttgacagcaaagattgccagagtagagtgcagcacacatagttactttaaaatagtttactaaactgattccttccttttccctagtgatttggggggataggggctgggtgtaaattcattaaagaagttgtggcattagaaaatcacaacca

SEQ ID NO: 231620 - DNA, 171 bp, Homo sapiens
agcctcccaaagtgctgggattataggcgtgagccaccgcgcctggcgtccagccacattctttaactcagcatctgcagaccttccagtcctatcttggccgcctgccagccatgctgacctttcgtttctgctgtgcaccacctgcccttcctctctcctttctgccta

SEQ ID NO: 231621 - DNA, 416 bp, Homo sapiens
cgcctaattctaataactaggaataaccaattaggtcatctgtcctcacctctgtcacttctctctgaggcttgtggtgttcaaattctgctacccttaactttctagaaggagggagaaacacctcaattcctttccactcttccggttcagatggttcaaacagctggacttctttgacaaaaaaaaaatgactttaatcatgatagaaacatagtacttgaaacacagaacaaacagaagagaaaaacattttctgtgatagttttctcttttggtttctgaaaagtgagcaaaatttttaattaaaaaaacccataaaattgccttaggacactctcgacacagatgagagaagacagtcattaaaataaattacagaatgggaaatggcaccattaccattctccactgat

SEQ ID NO: 231622 - DNA, 435 bp, Homo sapiens
gatgttactcctaatatgtcacaggggtgtacaccctttgatattatttgtaatctcatagagagatattacttcaaatatcacagtggatgtacacacatagtgtataccctgtgatattattcataatatcctagggagatacaactcctggtatcacagtgcgtgtaccccgtgtgtgtacacccttgatattagtcgtaatatccagggtaaatattactcctaatatcacacagtgtgcacaccctgtgatatttttcataatatttaagggagatactgcttctaatatcacagtgggtgtaccgcatgtgtgtatactctgtgacagtatattttatatcctagggaggtattactcctaatatcacagtgggtgttcaccctgtgatatcattcttatttgaccttgctgccttttttaacccacac

SEQ ID NO: 231623 - DNA, 423 bp, Homo sapiens
gggcgcaagttctgccctggcaacaagtgatcagcctccaggaagaccagggattggctggactgcagggcagtcaagggcacaggagggaagccttggcagtgtggctccagctgggcagctgccttctgggcacacactccttcttcctgaggtgcctccaggcatccagcctggcactaggcaatggggactcaggctctacccctgcaccctgtaatcaagagctcctggcctggtgggagtcaagaggtgatatgaagaggtgaccaaaagaggtgattagcagatcaaagggaaaagtcatctgattatctccacagacactaaagaggcatatgataaaacccaatatccagcttacttacacaaacaaaaatcttactaaaacagaaataaattgatactttcttaaatgagaaa

SEQ ID NO: 231624 - DNA, 440 bp, Homo sapiens
tttgagagtcactattttaactctgtcagtcccccagagcattgaaaagacaattacacagaaaaaaacttcaaatcccatccagcctgtttttttaaattgatacataacaattatacatatttatgggacacgtgatattttgatacatgcatgcaatgtacagtgatcaaacaggatatttaggatatccgtcacttctaacatctatcatttctttgtgttggaggtatttcaaatcttttcttctagctattttgaaatacatattgttgttaactatagtcaccctactgtgactgtcaccctatctaacactagaacttattccttttagctcccccattaaccaacctctcttcatctccctcaaaccttcccagcctctggtaaccatccttctactgtctccctccatgagatcaacttttttagctccc

SEQ ID NO: 231625 - DNA, 479 bp, Homo sapiens
ttttgtgaaatgataaaactgcagtgttctttttcaaccacctaataagagcactggcatcaaacaggtgttcattaataaataattcaacaattacaataatataaactgaatactacagcttaagtaagtgcatccaaagtaccttgaatcttcatttcattcattacaaaatccaactgaatttttatttaataaaaatccagttttggccaggcatggtggctcatgcctataattccagcactttgggaggctgaagcaggaagatcacttgaggccactagttcaagaccagactgagcaacacagcaagaccccatctccacaaaaactttaaaaaattagcagggcatagtggtacatgcttatagccctaacaactcaggaagctgaggttggaggatcacttgatcccaggagtttgaggttacagtgatctatattgggtggcatagcaagaccctcatctctttaaa

SEQ ID NO: 231626 - DNA, 218 bp, Homo sapiens
ctccctccacagcaaagttcctccagtccctgtctgactacaatcatttgaaagatcctgagccattaccatcaagctaacccttctagaattcctgacccacagatattgtgacacacaaataaaatgattgctttaagacactaagtttgaggtgacttgttatgtaaaacagattaacaaatctcaacacagatctcaacactgggaggggctgc

SEQ ID NO: 231627 - DNA, 129 bp, Homo sapiens
ctggaagccaattttttaagacacaggtgttttgaaatatgagttcactcagaccttatggcctttgaacatttgcaccatccctacctatttcacctacttggaaggctgaaagatgtagtcacatag

SEQ ID NO: 231628 - DNA, 239 bp, Homo sapiens
atgtgaaatccaaatccaagtggaagcacgattaagtcaggaccatgttgctaggtgttttagaggaactcattgctagcctgaggggcgtgatggaggctgcagatggagacagatacgctcctggagctcctcgcgggagtgcagtagagtcacctgagagtgccccagatgagagatctacagatcctgtgggacacactaatgtcagggcaggcgtcaacagatccctactttag

SEQ ID NO: 231629 - DNA, 445 bp, Homo sapiens
gtttcctgccacagtgtgggtcatatgtattctttatcatatgaggagagtgctaattaatgtgtcatttattttgtgagcatgctaatacatatattcatattccaatttagtgaaaaaaaactgatctagagatgccccttttcgaggtgacagcatggctctggagagatggccacaggaaccatggcagtggaccaggttgctgggagaaggcaaaaggggaggcacccaagctgagaaggggctaagcactcagcccctgggaccaccaacagcaggcctgagacacatgcaggaaaccagacagcctggatgaaatttctttcaagcaaggccagtggtccctgacagaacaccagaggtttccccctaaatcctttcgcatctgtaccatttccatcttagttggagctctttgttctcatccttgcaatacgcagag

SEQ ID NO: 231630 - DNA, 992 bp, Homo sapiens
ggcacgagcagaggaaggggcggttgttgcggcctccattgttcgtgttttaaggcgccatgaggggtgacagaggccgtggtcgtggtgggcgctttggttccagaggaggcccaggaggaggattcaggccctttgtaccacatatcccatttgacttctatttgtgtgaaatggcatttcctttaaagccagaaaccagagtggggtgcctgctatgcttctactcagcactgcactggaaattctagccagtgtaatatgacaaggagaagaaataaaaggaataaatataggaaaggaaaaaccaaaagtctcagtgtgatataataacctatgcagaaaactcaaaacagtctacaagtaaattataaaaattaggagtgttggcaagttcactgagtgtaggatactaaaatcaattgcatttttctacattgataacaaacaaggcacaggcgcactggctggtgcctgtaatcccagctactctagtctcagctattcaggaggctaaaaaatgggaggatggcttgagcccagcagctgagggctgcagttagctgtgatcacgccactgtgctccagcctggccaacaaggaccctgtctttaaaaaataataaaaaaaaatagaaaaagtaattattaaaaaaatccagttatattaacagtaacagcaaaatatgagcttcctaagaatatgttgcttttgctatgtatataaagagaaagagctctatctctatgtatacacagcaaaagtggtcaaacttcatggagaaaatttaaaaattttatcaaaagccaacatggatctaaataaatgggagaaaagtactgtgttcaagcctaggttgacatattatagacatatcagttatccctattggtcaatttaatgcaatttccatgaaaatttcagcaagatttttcagtagaacttgataaaagtaattctgaagtttatatgaaagcacaaagggccaagat

SEQ ID NO: 231631 - DNA, 711 bp, Homo sapiens
ccagtagttccgcccgctggtcatcgcgccctttcccctgccggtgtcctgctcgccgtccccgccatgctgtctctagactttttggacgatgtgcggcggatgaacaagcggcaggtgagcttgtccgtcctctttttctcctggctcttcttgtcccttcgaggctgctgctgcggggcccggcggaccccagggttctggtgtgagggtctgagctggtctgatacccgggtcattcgctttctttggagactgtggccagaggccgccttgtccgcctcattatttttaaccccgaactgattcagggcctaccgggggcggggcgggaagcggtgtcttcacgttccattcctcccactgaggcaggggagcaaatggaaaccgtacgcgcttgaagtgggagttggggttgcttattgttttagtcattttaaggcggcggactcttgatttctccagtcggagcgactccaggtggtttcgggagagacgaggtttagccggtttctggggcgctcaggaaggcgattggaggccccacaaaaaccgttttgctgctttcagctccttgcaaccctttagtagagctgaaccgtagcgggctgcaccgactttgacttggaccactctgggctccgagttggaacagttacactacttgcccttgcgtccgcttagcactaaggcggcagccctcggaatcta

SEQ ID NO: 231632 - DNA, 277 bp, Homo sapiens
  misc_feature (129)..(129): n is a, c, g, or t
  misc_feature (138)..(138): n is a, c, g, or t
ccagtagttccgcccgctggtcatcgcgccctttcccctgccggtgtcctgctcgccgtccccgccatgctgtctctagactttttggacgatgtgcggcggatgaacaagcggcagctctatatcaantcctaaatnttggaatgatatgtctcatctggcactaactgatcttggcaaggggttaattggtaataacttggaagtgaaagtcctgattgtatgtgtgtgctcagatggcagctattggaaccttgcatattcatagaggagatct

SEQ ID NO: 231633 - DNA, 530 bp, Homo sapiens
aattgagggaaggggattgtcctcttgtgctctcaatggttgtgggctgccttggccttggtgggagggtggggtggggcataatttctgtagtaagtgtgttggcaccagacattcacacagctggggagggtgcactgggccaagcaaagcgggtaggggtgcaccacagcacctactacaggttaggtctcaacagggtcatcctgacatcctattttaatcccagttcacgatttctccaagaactaattatagccatagagtaacctgaggccaacaaccagccatgcgcttcatgcagcagaacagccttcccaacccccaaagctcacatctctggcaatttctctactggtttgctggtcccaagaggaggatcatgatgttttgcataagcatacaaaggaatgcagagataatttttctgtgggcttcttagtattagctttttcagccatagagaggaatttatttgaatcaacaatatttactacagtctctcagatgactagcctcagagctctaaa

SEQ ID NO: 231634 - DNA, 367 bp, Homo sapiens
gaatgtaaaagatgaaagggacatttaaaggtctagttcacatcctgtccagacaaaattgccccatagtcactttaagataattgagcttacaatcaccactagtctagtctagaatacaggatcaaatgaagataactgaagagcagatttttctctacaccctcatatgaaaatatttacggaagtcaggggttgtttttactcttcttttgaacttcagttgtcaacatcaactatttgtaaatgtctttaatagtgaaaatctcaatattgcaagtacacaagccaaaaccttagcaattggtagttatattaatttatattttgattcttagaacaacctgctttaccaatagaaatggca

SEQ ID NO: 231635 - DNA, 445 bp, Homo sapiens
ctctaatgagactatattagactctgaacttacagtttccccgaaagaggttgccctaagtatagggatacagaggaaggggcatgggttgctgagacaagtgtcctgagtttgagtcccagctctgctgcttactgactccatagccactataagtttactctgagcctcagtttcctcattgtgaaatgcagcaataatttcctcaccaagacaccgtgaggattgcacaaagtaatagcaaagtcatatactcaacaaatatttattctattcctattgtgtgtcaggccatattttcagtgctgggctacattcattgacaggacagacaaaaatatctacccttatggagttgggaatggttggagagaaagacaataaacaagataaataagtaaaatatagagagtgttaaatgacgttaagcgctatggaaaaagac

SEQ ID NO: 231636 - DNA, 459 bp, Homo sapiens
cttgacagattcccatgactctgggagtaggcagccccaaaaatgggggaagccaagtggacctggagaacggccactcgcagggacactattcaaatgcctaggagagcccactatttcccaaacaagtgcccagacccatagagtggcatcccctgttacctaaacatggagcctcatgccagcagattctctgggtgggaagctggccgctctgatcctccccagttatctgaccatcgggagttttgcctgttcctgacccactacttgatatgacaccccctgtctacaatatccaagatatttttcagctcagaaattgtgtgtgagggcttgggaagactggattcctacattggtggtgatgagcatgccagattgagtagttggaaagaactgggctgggttatggctagcaacacctctgacatgcattttctaacttgtgcaaacatt

SEQ ID NO: 231637 - DNA, 500 bp, Homo sapiens
ggcttttgatgacgtcggtgaatccgtcctcagcggcattttctggggtctcctgcagacccctcagctgtgccataaccaaacgccacgtgcctcagcttcctcacgccccaaactttggaaggcaggtcacatggaatctacacatggaaggacataggcattgcatgcaggtatccggaatcattgatattggtcttaaaatttggaagtttccacttttgctaagactgccatttataatgagccctacggagaggccatgtggcaagaagctgaggctgccagagggaacctgaggcctgccagcaaccacatacatgagtttggaagttaattcttcagcttcctttgagtcttgaggtagctacagcctggccagaacttgactaaacttcataagggacactgagccagaaacacctaactaagcaaattctggttttatgaccttcagaaattgtgtgaaataataaatatttgttgttttcattattcac

SEQ ID NO: 231638 - DNA, 364 bp, Homo sapiens
agaaacacaggaggcttatgcaggaagaggaatgagtttgctggactggggagagtgacagtaaaaagcagaggataataggcatctctggtcatctagggactatagggtggattagttgggggttacagaatcagtgaggtactttttaacagtaggatgggtaaataagagctataatttggaataattatgtagcaatggtggttaggagcaatagaaactcaaagtattacataaatattttttttcttattctcccacacaagcgttttgcctttcctcttaaactgagaacggagtggtttgctatgatgtttttaaattctcacagacaagcattattctttgctgccttttagta

SEQ ID NO: 231639 - DNA, 492 bp, Homo sapiens
tgtgtgtaggtatcaatatatagatactatgatggttcgtttcatgtgtcaacttaactggactaagggattcccagatagctggttaacattctttctaggtgtgtctgtgagattgtttctggaaaagattgtcatttgagttgttagattgagcaaagaaggtctgctcttgctagcgtgggtggcatcatccagtgtgtgggaagtccaaatggagcacagaggcggagaaggggcgaagttactcgccctgtgtgatctggaacatccatcctctccggcctgcaggcatcagagctcctgggccgccggcctttggacccggatcaagacttacactacctgcccctgcttctcaggccttcggacttgcaccaaatgactctacaagcttttctggttctccaacttgtaggcagtagatcataaggcttcttggcctccatagtctcataaactacttcctataataaataagtaaatattata

SEQ ID NO: 231640 - DNA, 305 bp, Homo sapiens
tgtattttatttgtgttcgaaagtccgctaattcccaatgtggagggttggggatgtttcccttagcgcctctgggacgctgtccctaaggccttattccatgttgaatctgacgctctcaatgtccaggctcggctgcggcgtggggaccgaaaaggggcggggtgggtcggacggcagtttaattacgtccccgggaactgcgccgatttggacttttggcacttggacctatgctttaaaaagaaaaaagtgtcattggcgtggagtggggctagtggagggtgaggtgaatgcgccgtttg

SEQ ID NO: 231641 - DNA, 460 bp, Homo sapiens
cccccatttgttcatccatacaatgatgctctgaggagcacacaaggaaggtgcaaatttgataaaatgtgcatgatgtaaggagcataaaccccctcaggaaagagttgctgccttttcactaatgtatccctgagctgcacagagcagccctgggggactgggaggacatgtccccggtgtgaggagcaggggaaaggtgagccttaaatgatcaccaacaaacaacagggcctgtgtctggggcttacaccacgacatgtggtcctcgcagcaccattgctcagaggaagaaaccaagatctcgaggaactgagtaatttgcccacgttcaacaagttggtgcaaaatgaagagtggctcccgtatttcagactttaaggccgacgatcttccatctgtgctctgggggcaagatgggaggtccacagataaaattgcgggcggtatcccccaaaca

SEQ ID NO: 231642 - DNA, 488 bp, Homo sapiens
cactgttgtaggtggtctctttaccttcctggctctcctgggtagtgctagtctcaatggaatgggctcatccgtcctattacaccttgtgaaagcttgagagctgtcatcaacacacctggctgctttgttgattgttctgtaatccatttaaaacaaacaaagaaacaaaagtaatgtattttaaaataacttccttatttttctaaaaccttagactctccctttctcagcttacatcccaatgtctttttttttttttttttgagatggagttttgttctgtcgtccaggctggagtgcaggtgcggcggcatgatgatctcggctcgctgcaacctctgcctcctgggttcaagccattcacccacctcagcatccagagtagctgagactacaggtgcatgccacaatgccctgttaatttttgtatttttagtagagatggggtttcatcaggttagccaggctggtcttgaactcctgag

SEQ ID NO: 231643 - DNA, 449 bp, Homo sapiens
gaggaatggtggaggagctggggtgctgggcgtgcagtagtgcttgactggaaaccggacgaagctgcagatgggagaggcactgcttgaacactcctgccgcatccatcactccgggcacctcctgcagtgcacacggtctcactttgattttaatcccaccaatagcaggaaggaggtatgagcctcatctgcagctcaggatgattaggggacaagtctggggtcatgtgctggtaagggaaagaatgtggactcaatctcacgtggcctggctccaaaacccgtccatttgctaatttagtttaaaccaccggttttttaacttaaaaattttgtttctgaacgttgaaaatgaatataaaattcaatgtgcttctctgtactctcttagcaacttcctgtgaatctataattatttcaaaataaaaagtttaaaacaatcctat

SEQ ID NO: 231644 - DNA, 348 bp, Homo sapiens
gtatcaggagttagcagggaggatatggggataggagaatgggaagaaataagagaagggagaggagaaagcccaaatcatggtagagatgaaagagtcagagaatgccagatggagagaaaataacagaagaggtggcaggtgtggtggctcatgcttggaatcccagccctttgggaggctgaggcaggaagatcgcttgaggccagtagtttgagaccaacttgagcaacatatcaagacccccatctctacaaaaaataaaacaatcagctgggtacttacacagaatatttatgaagaaacaagaacaaaaattcagctggggccaggcaccaggggcttatg

SEQ ID NO: 231645 - DNA, 204 bp, Homo sapiens
tttttcactttaatgagaagaacccccatttctgtcagatgactgagggaaaaaagggatcaaaggaacctcactgaggggctgaatgtgatctctcaagcaaagctaaaaactaccccaggaaattccagcctaaatgagaaactggaactgaaaacgcaacctgtcttagaattggctgcttggaaaacatttgtcatctag

SEQ ID NO: 231646 - DNA, 408 bp, Homo sapiens
gttatctcacattttctgtgtatcaggaatccaagtggcctagctcatatggttctgtcccactctgatggtgttgcaatcaagatgtcaggcagggctgcagttatctgaaggatcctcttccagcaaggctcactcacatggctgttggctggaggcctcagttccacagttctttgccctttgagcctctccatagggctgcttgagtgtcctcataacaaagtagctaactttccacagagcaaatgattcaagagaaagagcaaggaagaatttgcagtgcctttcgtgacctacttttgggagtcatctaccatggcttctgttcagaagggagttactaaaccaatcccaaactcaagggagtagggaataacctccatgcttgaaagtaagagtatccaa

SEQ ID NO: 231647 - DNA, 203 bp, Homo sapiens
ctcccgggacaccacccctggggcaagagtggcacttggctccctggaaagcagagacagacctcccccgtcctccggtctgtcctcaggcccactgcatggtgggataagacctgtggttaggacaccagccttcactgagggcagccttagggctgagccctgcccaggcctcagggggacagaaaccaggcaagaggggg

SEQ ID NO: 231648 - DNA, 326 bp, Homo sapiens
atatttttggtagaaacagggttttgcatgttggccaggctgctcacctggctggcctgccattagtaagaatcctgttcggtcagtttagcaagaatttccctacccttgatgtctcactgttagtaattgttcatccactgaccccttcaccttgctcttggttgtgaatccccagttgtccttgtattctgatttgaacccagtctctctcccctattgtgatacccctattagaatagtcttgaatacagtctccttactgttttaagaagtgttagaataattttttcttgaacacatatcgcccttcagaaagactgcac

SEQ ID NO: 231649 - DNA, 438 bp, Homo sapiens
gtcgattcttttcttcttctgttcgttggctctttacgaggtctttgccttaaacagatacattttagagatggattaaaaaggggactagctcatgagcatagaattcccgatttccttctgtttccacttctgatgagttgtggcagcattaacaccaatgtaacttaattttacagaaatttttgtagtcggtgctactcataatcaggtaaaattattcttcaacacatttctttgttaccgtaatatatttggcttttctttgtggactattttatttctatacattattgtgtaaattgcagaatctttctcgtaaagtggtaggttgccactatttttattggtaaaactctgaatttattatacattacatagttacccctattattggaaactccttgtttctacattaaaacaacaacaacaacaaaa

SEQ ID NO: 231650 - DNA, 1188 bp, Homo sapiens
  misc_feature (416)..(416): n is a, c, g, or t
  misc_feature (476)..(476): n is a, c, g, or t
  misc_feature (481)..(481): n is a, c, g, or t
gggggggtagtcactatttgacatatggagaaagtgaggctcagagacatgcagggacctgcccgaggtcacagagctaatcagcgcagaatcttgggattaaaccctgctgttctagggttttcactatttcttgccttaggagaatcacttgaacccaggaggcggaggttgcattgagctgagattgtgccactgcactccagcccaggtaacagtgtgagactccgtctcaaaacaaacaaataaaaaagataataaaatgctttatgctaagaaatgggagtaagatcatctctggcttggatttttcttttctttctttgcaattacaatagtttatggctgattttttttttaaaggtctgcctgatacatgctttgcaaactctaggtatttcaactttgtcatcatngtgtgtgtccagacgcagaggctcacacctgtagtttcaacactttgggaggctgaggtnggagnattacttgaggccaggagttcgagaccagcctgagcaacagagtaaaactctgtctctacaaaaaatacaaaaattagctgggcatggtggtgcgtgtctgtagtcccagctactcgacaagtggaggtgggaagactgcttgacccctctaggcagaggctgcagtgaaccaaggtcatgccactgcactccagggttgacagagtgagacccctggcaataatagtagttaatatttctcaagaacttcatgtctgaactcactgaattctcacacagcaggccatgagttcaacaatcttttaatccccactccacagatggggaaaccaaggatctggaagcaaaagcctgacgtcacaggctgcggagacacgggacagggacagggcccaggttcttaatctcagtaggtgttggcctccactttgtggaataaacaaggggccaagcccctcgggcttgggaccgtcttaccctcgtcactgccgcgcttctcagcctctctgccaccatctgccctccagcacagaccatgctgagtgttcccagattgtaaaagacatacatctgccctatccccaaacccagcgtcctgggtttgagattacaggcaggagccactgtgcccagccccctgggctatttttaaaaataaataaaatgaaggctttttgtccaaacttcaagatatgttgttagattg

SEQ ID NO: 231651 - DNA, 692 bp, Homo sapiens
ggtgctccacgggggaacccggccccgggcgggaccacccttcgggccacaggggacaccccggagcggcgggggctgcggacaaaggcgtctgcctgatacatgctttgcaaactctagtttcactcttgcagcccagactggtgtgcaatggtgtgttcttggctcactgcaacctccacctcctgggttcaagcgattctcctgcctcagcattccgagtagctgggatttcccagatgcctgccaccacgcccagctaatattttgtatttttagtagagacagggtttcaccatgttggccaggctggtctcaaactcctgacctcaggtgatccacccgccttgacctcccaaaagtgctgggattacaggcatgagccaccgcacccagcccttctcatatttctagagaagctggatgccacattgcaactgcaaggtgccctgtgaagaggcctgcaacggcgagaaaacaagggagacctccagccaacagctaggaactgaggctctcggccccatcacctgtgaggaactgaatcctgccaacaggcatgtgagtgggctggaagtgggccctcctcacggagccttccgatgactgcacagccccagccaccagctcgaccgcaaccccgagagcctgggagccagcagctcagccaagcctggattcttgacccccag

SEQ ID NO: 231652 - DNA, 936 bp, Homo sapiens
gaagacatgtacactggtttattataaagggcgttacagaagatacagatgaagagatgtgtaggttgaggtatagggggacaggtacagaacttccgtgccccccctgtacacgccaccctccgggaacctcagctgtctggaaatttaatgaaccctgttcttttggggttttgtggaagcttcgttatgtagacatgattgattaagccattggccattggtgatcagcttaaccttcagctcctccccactccccaaggttgggggtggggctgaaagtcccagtcctctaatcccgccttgctctttctggtgaccagcccccatcccgaagctacctaggggctgccagccatcagtcaactcacagcatacaaaaacacatcactttggagattccagagattttaggagttgtatgccaggaaatggggatgaaatcacatacgtatttcacaatctttcatgcccttttgtacgtttatgagaaattaggattaaatctaacccaaactgtggctttgaaacttggggctgttgagcatctaatatttggatgaagaaccagataataaattattatatataatacattatatatatgtaaatatatttttatatatgtgagattacattctatctgaaatcaacccaaacacctctgtaaaggagcaagctcttacacattttctaggagctgtgtatttgtaaatcgaaattaagaatagagcattcatttactaaaacgaagaggtttaaagtaacatttatagtctcattatttagagtgcctttgctggccaggtgtggtgactcatgcctgtaatcccagcactttgggaggctgaggcgggtggatcacttgaagtcaggagttcaagaccagcctgggcaacacagtgagaccccatctcaaaaaaaaagtatattaaa

SEQ ID NO: 231653 - DNA, 1052 bp, Homo sapiens
agaatatcaacagataggcattataaaaaaattctggcagagaaaagtataataaatgaaattttcactacaggggttcagcagcagatataagcaggtagaagaaagaatcagcaaacttgagatgggatcactgaaagcagaaacaacaaatcaagcctacatagttttaaaagatacatatcacacacaaagaagtgaagaagatatggtgcatttttgaaccacaacaggatgtagttagaaatcagtaacaaaaggaaaattggaaaattcacaaacttgtggaaattaaacaaaacactcaaccaatgggtcaaagaagaaatcacaagggaaattaaaaagagaaaaatgcaacataccaaaatttataggatgcagtgaaagcactgctaaaagggaaatttgtagacataaatgcttacattaaaaaacaaaaaagacctcatgtcaacaacctgactttgcagcttgagggggaaaaacatactaaatccaaagctagcagatggaaggaaataataaagattagaacagatataataaattgaataaagattagaaacactagagaaaaatcagtgaaactacaagttctttaaaagaccataaagttggaaagcctatgcctagatagactaagaaaaaaaggaagactcaattgctaaaataaatgaaaatgggaacagcactctagattctagaaaaatgaaaagggttatagaagaataccttcgacaatctagatgaaatgctcaaagtcctagaaatgcaaaacgtactactgctgaactatgaaaaaaatttaaaaatctcaatagaactataaccagtaaggtaattgaattagtaatcaaaattctcctggaaaaaaagcactggacctgatggttttcatttgtgaattctaccaaataagaagaaataaccccaatcccttctaacttttcccaaaaattgaagaggaaggacgctgcctaattcattctgatgctgaagccagacaaagatactacaagaaaagattacagaccagttattccttatga

SEQ ID NO: 231654 - DNA, 778 bp, Homo sapiens
acagctatgtctcacagtccagacttggagtacaagtaataagaagaataaaacttaatcccttaagtagattcaccataagttagctcagagcaattccagtgcaagtatggtctgtgatccagtagtatcttacagacagcaagttgaacattgtgggatgcatgagctattgaggcctttgcagctttctgctacatggaggctagggccagagtcaagatttatgctttgcagcacactggtcagctgtttttgcaaatcagattaaatgatttttaaatgaggctgagagcatgggagatactaatgtgtgtttccttgtgagctactgcataagttaggaaattgaaatacagaaagatgaaaagtgatttgcccaagcatatagatcaaagctgtggcagaaccaggactggaacctatatctctctactaatggtttttttaaaaaaataaccttgtttcaaaaatattaaaaagtcacaagaaaggtaaacatgtggataaacaaaatgaagaaaataaaaattatccagtaataacatattggcatatgtctttctggtatattttcctgtgttgtcatcattatcatctccatcatcattatatccatcattatcatcatcatcatcatcatcatcatcattatcatcaccatagtgaacatgtaatgcttacctagtgccagatgctgtctaggcattttacatgtgttactggtaactcatgtaatcctcataacaaccttataaggtggttgctattatcccca

SEQ ID NO: 231655 - DNA, 785 bp, Homo sapiens
ggatcttaacatagacgtaagatcaaatgcaatagcatgtcaaacaatgtgtaactccagttatacaaacattactgtatctcattggggatacgaagctctacacacttgaagatggtgaaggaatataaaaattatcttacagacagcaagttgaacattgtgggatgcatgagctattgaggcctttgcagctttctgctacatggaggctagggccagagtcaagatttatgctttgcagcacactggtcagctgtttttgcaaatcagattaaatgatttttaaatgaggctgagagcatgggagatactaatgtgtgtttccttgtgagctactgcataagttaggaaattgaaatacagaaagatgaaaagtgatttgcccaagcatatagatcaaagctgtggcagaaccaggactggaacctatatctctctactaatggtttttttaaaaaaataaccttgtttcaaaaatattaaaaagtcacaagaaaggtaaacatgtggataaacaaaatgaagaaaataaaaattatccagtaataacatattggcatatgtctttctggtatattttcctgtgttgtcatcattatcatctccatcatcattatatccatcattatcatcatcatcatcatcatcatcatcattatcatcaccatagtgaacatgtaatgcttacctagtgccagatgctgtctaggcattttacatgtgttactggtaactcatgtaatcctcataacaaccttataaggtggttgctattatcccca

SEQ ID NO: 231656 - DNA, 1194 bp, Homo sapiens
tcagagaacacatacaggagaaaaaccttacagatgttctgagtgctggaaaactttcagtcagagttccaccctggtgattcaccaaaggacacatacaggagagaaaccttataaatgtcctgattgtggtgaaagcttcagtcagagctttaaccttatcaggcaccggaggacccacataggggaaaaaccttacaaatgtaccagctgtgagaaatgcttcagcagaagtgcctacctcagtcagcatcggaaaattcacgtagaaaagccttttgagtctcccgacgttggggattttcctcatgaatggacttggaaaaactgttcaggggaaatgcccttcatctcttcattttccgtctcaaattcatcttcctgagtcccaaagcctggttggtgatggttttttcttccttgttggaccatgacaatttaggtattctgtgattgttgtgctataaagtttctttgatgtgtttgtcaaaacatttggaaaaagtcaacctcccagtttaaaggatgggaagaccccaatcaccaggttattggatctgtccagtgagagattcatccaccaaggatgaagaaaggaggacttttaaaaatttaaggtaagatagtaatagcttcaaaagaacacatacagagtaatcctgagagtaagcaaaggaaccatgagaaccgaagctagaattgctattgaattactttattttctcttcccttattgggtagagatacatcattactggcctcaggggtttacccaaagaaagggtatttttgagcaaataatgtgatttcctggctattttgtatgggggcttaagatttttttttttcaaatgcatttttagtcactaaaaattaactgtcgtaccatctagaactatactgtccagtaccatagcctctagccgtatgtagctatttgtattaagattaattgaaattttaaatccagttcctcagtcacactagccactttctaagtgctcagtagctctgtgtgaccagcggctactgtattggatattatagaaggttctttcattcaagatcatcattcttgacagacccataaatatttcctataaagactgtagaagtgtgttctggagggtttgctctccaaaaagaattgtaatatagagtagaattgggatagagtattgaagacactgggtt

SEQ ID NO: 231657 - DNA, 457 bp, Homo sapiens
gaaaataaatatagatgtaatactgattaagttaaataagaaccctgtagagctgtacttaaattggaagtgtcaatatcgtttttaatcttttaattattgtatttcctagctatggccaatgaaaaggcctagcaatagtgaccatcgcagtagcgataagtaccactaatacccagaccatggtgtataaataacatttctcaccaaaaggaaccaggactcctcaagaattggctcattcaaaattggggctgaaaatgcacaagataagtctgagaacatcttgtcatatcagaaattcagaaagctttccaaaaattaatagggttatagtagagctcaaactgtcatgagacaacttgaagaggctccctgttgaacatctataaggaaataactacaacagattgaaacacatcagatatgtataagctcatgagtgcataatgatact

SEQ ID NO: 231658 - DNA, 1615 bp, Homo sapiens
cagaagctggtgttccaagaagctagaatgacagactcatttctcgctcctttctccttccctcttgaaggagaagccttgagttgtgcatcttctcttgattttactgaggtatggtagctatagcaaactgcctactgcctttttttttaacttttgctctcagtggctccaaggcatcgaaactatgctagttccatgagtgctccaagtgaggcaaaacagagactagtcccttgggcagccctctgaagagccagaatgccaacacatgctccactcttctccctccttgccaaggaagaaggcttaacttgtgcacttcctcccccaattgtgccatgctgtgccaaccatatcaagccacctgctgctttccattgtcctcagtgacccccagacattcaaattatgctagttctgtgggcacaccaatcaaggaagtaagagaccagtttcttgggcagctctctgaaaagctggaatgttggaggcatgctctattcttttctcccagaggaaaaagatgtgaagaggcattctgtcttggcactgagctgtgctaacttgggggagaggctgatgcaggttgaccttgctaggttatagaggcatgttctatcgtctttattaagaaggtgtttcactcttgttgcccaggctgaagtgcaatggcacgatctcggctcactgcaacctccgtctcccgggttcaagtgattcttctgcctcagcctcccgagtagctggaattacaggcatatgccaccacacccagctaattttccatttttagtagggacggggttttaccatgttggtcaggctggtcttgaactcctgacctcaggtgatccacctgccttggtctcctaaagtgctgggatagcaagcatgaaccgctgcgtctggcccatttttcttattcttaaacatcctactaaacattttggagctagttgtattaggaggtttattttctatgtggatggagcagtttaaaaaagctgaaataagtgaaatcttccaagtgatttaaaaaatttttaagcccatgtttctacctactaaaattcaaaaatatttactatagaagatgactagtcttctttatgacagttattttaatttaaaaggaattacaaggatataacttttcttgaaacatttgcacttaatcatgctgtcaattcattatatgatttggattacttgcttaatgtttctatttcttctctgttaatactaattactcctaataattataagaatgtgttattgtatccaatttagaaatcctgttatggaagctatttttatagtgtattatgattaatgcatacaatgtccatgtaaactttcaatttttaaatgtgacactacttatctattgaacacttaccatgtgctaggcactgttcttgaatgctttatgcataaaagcacatttaatcccatcatagccaataaagtattattaccttgattttacaaatgagataactcagatatgcagacatcgagtaacttggccaagtatacgtgttatggattgaattgtgtcctcccaatattcatgtgttgaatcactaacccctaatgtgactatatttgg

SEQ ID NO: 231659 - DNA, 1138 bp, Homo sapiens
cagaagctggtgttccaagaagctagaatgacagactcatttctcgctcctttctccttccctcttgaaggagaagccttgagttgtgcatcttctcttgattttactgaggttgaccttgctaggttatagaggcatgttctatcgtctttattaagaaggtgtttcactcttgttgcccaggctgaagtgcaatggcacgatctcggctcactgcaacctccgtctcccgggttcaagtgattcttctgcctcagcctcccgagtagctggaattacaggcatatgccaccacacccagctaattttccatttttagtagggacggggttttaccatgttggtcaggctggtcttgaactcctgacctcaggtgatccacctgccttggtctcctaaagtgctgggatagcaagcatgaaccgctgcgtctggcccatttttcttattcttaaacatcctactaaacattttggagctagttgtattaggaggtttattttctatgtggatggagcagtttaaaaaagctgaaataagtgaaatcttccaagtgatttaaaaaatttttaagcccatgtttctacctactaaaattcaaaaatatttactatagaagatgactagtcttctttatgacagttattttaatttaaaaggaattacaaggatataacttttcttgaaacatttgcacttaatcatgctgtcaattcattatatgatttggattacttgcttaatgtttctatttcttctctgttaatactaattactcctaataattataagaatgtgttattgtatccaatttagaaatcctgttatggaagctatttttatagtgtattatgattaatgcatacaatgtccatgtaaactttcaatttttaaatgtgacactacttatctattgaacacttaccatgtgctaggcactgttcttgaatgctttatgcataaaagcacatttaatcccatcatagccaataaagtattattaccttgattttacaaatgagataactcagatatgcagacatcgagtaacttggccaagtatacgtgttatggattgaattgtgtcctcccaatattcatgtgttgaatcactaacccctaatgtgactatatttgg

SEQ ID NO: 231660 - DNA, 1156 bp, Homo sapiens
cagaagctggtgttccaagaagctagaatgacagactcatttctcgctcctttctccttccctcttgaaggagaagccttgagttgtgcatcttctcttgattttactgaggtatggtagctatagcaaactgcctactgcctttttttttaacttttgctctcagtggctccaaggcatcgaaactatgctagttccatgagtgctccaagtgaggcaaaacagagactagtcccttgggcagccctctgaagagccagaatgccaacacatgctccactcttctccctccttgccaaggaagaaggcttaacttgtgcacttcctcccccaattgtgccatgctgtgccaaccatatcaagccacctgctgctttccattgtcctcagtgacccccagacattcaaattatgctagttctgtgggcacaccaatcaaggaagtaagagaccagtttcttgggcagctctctgaaaagctggaatgttggaggcatgctctattcttttctcccagaggaaaaagatgtgaagaggcattctgtcttggcactgagctgtgctaacttgggggagaggctgatgcaggaccaatgaccttctaagaagaggaagacacaccaggcatgcacacgcacagaaaagaagaccatgtgagggcacagcaagaagatggccatctgcaaactaagaggagaggcctcattagaacctaaccctgcaccatgatcatggacttccagccttcagagttaggaaaataaaattctgttgtttatgccaccaaatctgtggtattcgcttatgaaaaccatagaaaattatacaatacccaacaagcaaatagcagaatggaattaaacccataaaggatggcttcaaaggcaatgcttaaccactatactgcctttaaaaattgtcctaacagttcaacttcaattacagaaagtttataataattagatgttaatacttttatgcttaactttatatttctatttcaaatgcttatttccttttcaatagttaatattttctggacagcaattctggactattttctaaattctctgttttctaaattcttatgtcatgccctctgtcataagaatgtttataccctatgatcttctaaaaataaatccttaaaagatga

SEQ ID NO: 231661 - DNA, 1091 bp, Homo sapiens
cagaagctggtgttccaagaagctagaatgacagactcatttctcgctcctttctccttccctcttgaaggagaagccttgagttgtgcatcttctcttgattttactgagaaggtgtttcactcttgttgcccaggctgaagtgcaatggcacgatctcggctcactgcaacctccgtctcccgggttcaagtgattcttctgcctcagcctcccgagtagctggaattacaggcatatgccaccacacccagctaattttccatttttagtagggacggggttttaccatgttggtcaggctggtcttgaactcctgacctcaggtgatccacctgccttggtctcctaaagtgctgggatagcaagcatgaaccgctgcgtctggcccatttttcttattcttaaacatcctactaaacattttggagctagttgtattaggaggtttattttctatgtggatggagcagtttaaaaaagctgaaataagtgaaatcttccaagtgatttaaaaaatttttaagcccatgtttctacctactaaaattcaaaaatatttactatagaagatgactagtcttctttatgacagttattttaatttaaaaggaattacaaggatataacttttcttgaaacatttgcacttaatcatgctgtcaattcattatatgatttggattacttgcttaatgtttctatttcttctctgttaatactaattactcctaataattataagaatgtgttattgtatccaatttagaaatcctgttatggaagctatttttatagtgtattatgattaatgcatacaatgtccatgtaaactttcaatttttaaatgtgacactacttatctattgaacacttaccatgtgctaggcactgttcttgaatgctttatgcataaaagcacatttaatcccatcatagccaataaagtattattaccttgattttacaaatgagataactcagatatgcagacatcgagtaacttggccaagtatacgtgttatggattgaattgtgtcctcccaatattcatgtgttgaatcactaacccctaatgtgactatatttgg

SEQ ID NO: 231662 - DNA, 373 bp, Homo sapiens
tctgccgcccgcaccgcaccgcgcggcactccactgcgctcgcctgccctagccgtttcatgcaatatcagaattctaaatacttttagaaactctgcctagagatattatgtaattttgaaagaataataagcatttctcattcattttagaaacatgacaggtttaaagtaaaagaataaaagtaccatttaaaaatgattatatgcatacagtaagttgaaaaagtacaaaagaatttgtagtgaaaactgtcaggttgggcacggtggctcaggtttgtaatcccagcaatttgggaggctgaggcaggaggattacttgagcccaggagttcaggaccagcttgggcaacatagacctcgtctccaca

SEQ ID NO: 231663 - DNA, 616 bp, Homo sapiens
tagagtagggaatattgaatattaggtggttcacagagtcattgggggagtgctagagatatagatttaagtccaagcttctgggaacattgcctgaaaccatgctgcagaactagatttgagaaagccagggatactgaacactaaatactagacactcagtttgattgcagatgctactgttgttgcctctggtgctgttccattgacaggtactccgcattgcaatcaccgggaaatggctagcattggctgttgccatcatcaaaagccaaatatgtctgccgtcttgggactgagcaagaaatggaagctctgctcattgcttacttctaaagcaaagcaaagtctcctggagttttttcttttctttttttttttttttgagggagttttgctcttctttgtccaggcagaggttggagttagcagagatcgtgccagtgcacttcagcttgggtgacagagtgaggccctgtctcaaaaataagaaaaaaagaaaaaaaaagcagcagcctgaggtgagaggattgcttgagcccgggaggctgaggctgcagtgagctgtgattgtgccactgcactgcagcctgggtgacaagagtgagaccctttc

SEQ ID NO: 231664 - DNA, 366 bp, Homo sapiens
gagccagggtctcactttgtctcctgggctggaatgcagtgacatgatcgctgttccctgcagcctctaactcactcctgggctccagtgatcctctcgcctgagtatatatatagtactacagtatataatatataggactataggtgtgagccactgcacttggttaatttttaagtttttttaatttttttaaatttataaaacattgctatgttgcacaggctggtcttgaactcctgggctcaagtgatcctccctcctgggccttccaacgtgttgggatgacaggcatgagcctccgcatccagccaggtactctcctttgagtcatatcattgaggagggactcctgtggcattttcc

SEQ ID NO: 231665 - DNA, 325 bp, Homo sapiens
ctggagggcagagtgaaagcaggggaaagctgcagcctttcttcttcgtcctccttggggagctaattacaggccagcagccactgtgcaggtgagctgtggacagcagcagcccaaggacgctatcagggatgctctggaggagccaaaggcagaaatgtgaaccttacgctgaggccacggagagtgagggctctcagaggaacccctgctcgccaccatcccggggaggggcctttctctctcccagaatgaatcccttgtaacctcctgggatctttcttttcatcacaagaaccaaataaagaaacttgaagatcttcta

SEQ ID NO: 231666 - DNA, 294 bp, Homo sapiens
ttaagagaggcacaaagggaaaaacaacaaagcaccaacgatttttacttattagaggttgctattttagcatgtttcagttcgaatgtaaagaccagttattcccataattcttaacccttactgcataggcagaatttgacttctaaagaactccagaatgtaagaaaactgttctttgataaccaaaactcaaagcaacactaaatatattttcccaattgcacaatttgcatttttgagggaaaaatggtttgtgtgtatcaacaattcccttgttttaacttacgcata

SEQ ID NO: 231667 - DNA, 519 bp, Homo sapiens
cttccatggacctaaaacacatttgaggaactgattttatgtccagcatttgagttcaatgacatcttctccattcccagtgaaaacattcaggtctttttttccactcaaaaagagatggccttactttatggctcttcctttaatcaaaatataaaatgcctgggaaatgtgagttgcagggagtcagaatattccagaagatggctccttccattcttcacctcttgccccgtctgtgtaagtgtttatcaggaaagtgcctcatgaggccaacattcttcatgatgggtcacatcttgtccattgatcattggatctgccatgttggaggatgcagccggtgggctggtttcacggtggagctgtgctgggtgatcaggtgagccccagcctaagcctgctgcctgggacactcaccagctcctggaagactctggcccttcctggcacacagggggccatcactcctctgataccttcccactgctcgtcagttttgacttcagaaatagcaca

SEQ ID NO: 231668 - DNA, 431 bp, Homo sapiens
aaaccacaaagatgaggggaaaccggaacagagaggctgaaaattccaaaaaccagaacacctcttctcctccaaaggattacaactccttgccagcaagggaacaaaactggatggagaatgagtttgatgagttgatagaagtaggcttcagaaagtgggtaataacaaacttctctgagctaaaggagcatgttccaacccatcacaaggaagctaaaaaccttgaaaaaaggttagaggaatggctaactagaataaccagtgtagagaagagcataaatgacctgatggaactgaaaaacacagcatgagaacttcatgaggcatacacaaacttcaatagctgatttgatcaagcggaagaaagggaagaaagtgactgaagatcaaattaatgaaataaagtgggaagacaagattacagaaaa

SEQ ID NO: 231669 - DNA, 465 bp, Homo sapiens
ccattttcaccccttccagagcccacagccagatgggttgtgggaactctcaactctgccctcccctcatggtcccccagaaaaggcaaaaggaagagactgatattgtatggtgattctgtgcttttccttttttattgttttcttcttccttttttggggggatgaggggagagttccatttttgactaagaaagtgatgatgaagaaggtgaccatgtgtagtggtttgtagaatggaagatcataagctcctgttttagaaaacaagctctggctgctttgtggagggccacacccgagtgcagtgacacaggagccagctaatctgtacctggattcctaacctggagaaactgaaatagcaacgcatgttgatgtaagtgctaagtttgggagtaatttgttatgtaacaataaataactaataatacttattatttaggcaataaaaccatagaaaat

SEQ ID NO: 231670 - DNA, 304 bp, Homo sapiens
tggaaagtaatcttgatccttgcataatagctatagtcattaacttggccaggtagtaagtctgtttcaaagcaggtgatgctaaaaagtatttgttcaaataagctatactcttaaagggttgttgatgaagcatagaaacaaagtcccttcacaacacattattaagcctttagactttattttcactttagtttcctgaatttgcatgacaagaacacttctagtttgcctaattctgttgcctaatacgtaattctttaacagattttttaataaactcgtgaatgcatttaaaaactat

SEQ ID NO: 231671 - DNA, 395 bp, Homo sapiens
actataaaagtatctaattcaagtttaacatgatagaattttttatttgtttctgtatttttatctcttctcttaacactgaaaatctgggtccttaaaaacagtaacataaggccgggcacggtggcttacgcctgtaatcccagcactttgggaggccgaggtgggtggatcatgaggtcaaaagatcgagaccatcctggccaacatggtgaaaccctatctctactaaaaatgcaaaaattagctgggcatagtggcacgcacctgtaatcccggctattcgggaggctgaggcaggagaatcgcttgaaccagggagacagaagttgcagtgagccgagatcaagtcactgcactctggcctggcaacagagcgagtctctgtctcaaaa

SEQ ID NO: 231672 - DNA, 426 bp, Homo sapiens
agctcaatcttctctcaacaatttgtttttttaagctgtctttacatcatagctcacagaatgacgagctggaagagacacagacaccacctagggtaacattctgattttacagataaggaaactgggactcagagaataaggctttcttcctccttatatcttatagctagttttttggtaagctaaaacaagaaccggggtgtcctgactcatagattggtgctctttccgttatactcccattttccttttcccacagatcagatatcacatttaagaactaaatatgaaaacatagcacagctgattttttttttttttgagaaagtctttactcttgtagcccaggctgcagtctgagattgtgccattgcacttcagcctggacaacaacaagagtgaaactcagtcttaaaaacaaac

SEQ ID NO: 231673 - DNA, 628 bp, Homo sapiens
ctcagcacagccccacctccacttgcccttcctacccaccccccaatctcatgtcccagcttggggtgctgagtctgctcttcggcctgggtgggatacacagaatgcctagtttcatggatgccagctggagagcacggcacctggcagacacttactgggcagggggggtcccaagagcagccatggggtgagccccactcccgctgacaccagagacaggggagacatgtgctgcggtctgggaaatagctacccccagccaaatcatgaaagagccattaaacaccgcactatacacatacttaacttaaaccaatcgggcgctcagcgagaagtgcgcagcagtgtggggagctggagctggggtggctgtcctgcaccagcccccacgaccctcagaccacaggcactgccaagagggaacatgaacctagccggcctctaagtgcaacggctgcccctgacaggtggtgacagatattttcaagagtgactctgaccagctgtgatttccaccttacatgttgtctttggatcctttccctgaatgatatgagattgtgctgggaactctagccctctgtgtgctgacctccagaatctgacaactttcctttccaaacag

SEQ ID NO: 231674 - DNA, 471 bp, Homo sapiens
aaatatcgctcggtcaatgattagacactttcagtttctccaagaggccgccctctcagctccataccctcctacctcagatcctttacccagcggttacctctcctgggagccctttcccctgacccttctcttagttaaccccaactcaccctccagtcttctcaactgtaacctcctcagggaaacaatgtcttaaaaaactcttgcagcagcttgtttatggtaaatacaattttcataatgtcttgtaattacatatttatattacattatatttttctttcttgcatataaacctaaatgtgaaaaattacattatggtttaatacctatttgtgtggctgttactgaggcctgtgagttgtctcagggcaaagactgggtctctcttgccccctgctgtggccccagcccctagcataaagccaggtccacagccgctttcaaaaaatgattgttgaatgacta

SEQ ID NO: 231675 - DNA, 434 bp, Homo sapiens
ccaggcctgccgcaagagctatctatccccgcagcctttacccagccttctcagtggcaccttgttggggaccgtgagctggtgggtccctgccttcctccccaggcctcaccctgagctcttgggtgtgaaaggcctggtgggctcagactccacccaggaccagggagcttcctgtggaaaaaacctaggcaggcaggttccctgtgcacgtggtacaggattggctgggctaaggtgccaacagagatcaggagaggctggacagtaaggatgttccctccatatacctgagtctggctggtcttccacattcagggccctggctccctgctccatggcgtgcttgtgattgagagtccacttgtctggcctgtagcttcccctttcccatcagccgcatcattacttactcaagataactagttaagtaa

SEQ ID NO: 231676 - DNA, 397 bp, Homo sapiens
ctgctttttgaacgggtttttactgatgaatttttgggaggagttcagaacctatccaatagaaagtcttttaaccaatgggccctaatcaactggatggatcaatcagcattctccatcccctgtataaaatatactgaccaatactgtggtcaaacgaatactgaatgttctctctcgaactctggagcacatcagctctctctgcataaactgttaatgtcagctatacttgctttgtaattacagaaattaaatattatgttggcccataaaatatgagtgtgaaaatagttatttgtatgaaaatttagtaaaattaaagaaatgaaagtaagtcactagaggaaatctgccattgaattagatatgattgagacaactgtgaaagattggg

SEQ ID NO: 231677 - DNA, 214 bp, Homo sapiens
ttctgaaacattccttacatgagatttttaatacaaagcctgcaaatggtttatcttgaggaagacctttactgtagtcactatgggatatgggatttaacagttgattgttggagatgttaaactatgctttctgcttctctattctctatcttcctcattcaatgataagtggtactagcagtggtgaccaaccacaggctacaaagaacag

SEQ ID NO: 231678 - DNA, 159 bp, Homo sapiens
gtagagacatggtctcactatgcttcccaggttggtcttaaactcctaggctcaagagatccccttacctcagccttccaagttctgggattccagatgtgaaccactaaccttgaccatactcctgtatttcttcattgtgtctttcaaaacagaaaa

SEQ ID NO: 231679 - DNA, 418 bp, Homo sapiens
agagttgggataggatttcagaatgcttgtggtcttactgttggatagacctgtctactggaagctgcaaagtaaataaaataaggttaaaaagcaaatgactccacaatgctcccttctgaatgtaggaggggagttaatttttaaaacctgcttctctcctgaatttttttccaaatgaaagcccagggcttctgtcacaccagtgcagtccttgacagtgctgaagtgacatggctaagggtatcagaggacctgcacccacctcagttcctcccatcccctcctcatactcagttcatgggagggtcactcaatacaggtggctccaagtgatacgttcctctggttactgccctaagcatacgtgaagtctacaataaagtatgcacttaatactaacagaaggttctgtaac

SEQ ID NO: 231680 - DNA, 435 bp, Homo sapiens
agcaaaacatggcagggctttggcccaaataccactgtctttctactattcatctgagtatagttaaaacaatgaaagtaaacatggtcttgttcacgtcattcctagatccctaaatgaggaggggaaaggaagggtgggggaagaggtttgaatcttaaaaagaggcaattatgtaacaattatgtaacatttaaaatatttaataatttttttttttttttttttgagacggagtgaaactccatctcaaaaggaaaaaaaagaaagtttcatgaggccataactttatctattttgttccttggtgtattactagcacctggtatttagtagtttctgaaatatttattgaatgaatgaataagtgtgcaagatcagaattgccattgcactccaggctgggcaacaagaacaaaacttcgtctcaaaaaa

SEQ ID NO: 231681 - DNA, 841 bp, Homo sapiens
gacccaggtggctggggtggcagctgatcatgtcaggaggactcctctgcacaacatcacaagcacaggagagaatgctaaacttgattgggagctcacagaagacccctggaacccagagcaataagggaaatttggacccagagatacattcagagagaagatgatgtgaaggcacaggaaggatgccctgtgaacatcaggaccaatgcctgcaaacctaggagagaggtctacaacagatccttccctcgcagccctcagatcgaactgaccctgcaagtaccttgattttggacttctggcttccagaactgagcaacaataactttctgttgaagccgtccagttttgaagccacccagtctgtggtgcttggttaccgcggccctagcaaacttgcctgaggctttccaaatcacagccccgttttgtcacaggggaagaattctaagaagttctttatttggccaagtgagggatagaagaataatgagcatttccctcatcacagctctgacaactgcctcagccacacacggcttaggagattggccacttcctccgccttcagcttgcagggggcttcagtaataaatgtgtagaagtgtttggtcttctcaatgctgggaatccagggagtatggcctggcatacatggaaaccagtcccctaaagacctcattgacacaggcctcatttgggggtctcctcaggcacttcccccttggctcctgaggccagaacccgaccctgctgtgtctctcttccatgcatctttttgccatctctgctctctggaatctgcaacaatatgagggtgctcaggactttgatgttg

SEQ ID NO: 231682 - DNA, 664 bp, Homo sapiens
  misc_feature (36)..(36): n is a, c, g, or t
cgggctgcaggattcggcacgagcttttgacagatnacatttaatagtaataaataagtggtaataagtaataaataataattgagtgcttttcacattccaggtgctgagctgttttgcatttcacgcccctcatcttcatttatattgttgttcttaattatccccattttaccgatgaggaaagggagattgtaaccaccccgaggctgcacagctaatacccagagagcagaatttcgccacatgcgaagattctagctaatcctaaaatctgtttttcaccagacgacgccggcccttccggcttgtcgtgcagcacggcattatctggtacccaccatttgtatcccggcatcatttatcttctccctaccttgttgccaaggcacgtgtgggtccctaacggctggaaacaccaattattcaagacaccctaagggagaccagaaggaaagcgatatttaagaaatgcaggcacagaaaaatttaagcattttagactcattctccatcagaaacagggaggtctttgaagaggctgcttttgtccagcaattagtcaatgactctagaatttcagcgcagatccgatgagtatagaggacgccgtgtacgccctgtgttgccatggcaacgcagcatgcacatcctcctcccttgg

SEQ ID NO: 231683 - DNA, 385 bp, Homo sapiens
gggctttgtgggagagaggtctgtgtctgggcaaacaacctgcttgtagaggctggaagaggaaaaggccaaagacacctgaaaagaatggggcttggcccccagctagacgcgagatggctcgttttcagagaacaaaggagagggaagaagataggtgttccttgaacatctactatgtgagaaacaccacccagggcactgcacctgcctgtgttggaaagaggatgcaaccatccccaacagggaagggtggaaaatgctgcactgtgcatgggctcacaaggaagatacataatgtacagccgaatctacagtctcctattttgtcagctgcttgtgttgattaaaacttcaataaagatcctgtgataaaacagagcta

SEQ ID NO: 231684 - DNA, 356 bp, Homo sapiens
gtacctctggtagaattcggctgtgaatctgtctggttctggactttttttggttggaatggggcttggcccccagctagacgcgagatggctcgttttcagagaacaaaggagagggaagaagataggtgttccttgaacatctactatgtgagaaacaccacccagggcactgcacctgcctgtgttggaaagaggatgcaaccatccccaacagggaagggtggaaaatgctgcactgtgcatgggctcacaaggaagatacataatgtacagccgaatctacagtctcctattttgtcagctgcttgtgttgattaaaacttcaataaagatcctgtgataaaacagagcta

SEQ ID NO: 231685 - DNA, 381 bp, Homo sapiens
cttatagaaaatattttccatggaattgaacaccaacattaaaagtaaaaaggggttgggaagaagaaacctaaaaccaatgaatggggcttggcccccagctagacgcgagatggctcgttttcagagaacaaaggagagggaagaagataggtgttccttgaacatctactatgtgagaaacaccacccagggcactgcacctgcctgtgttggaaagaggatgcaaccatccccaacagggaagggtggaaaatgctgcactgtgcatgggctcacaaggaagatacataatgtacagccgaatctacagtctcctattttgtcagctgcttgtgttgattaaaacttcaataaagatcctgtgataaaacagagcta

SEQ ID NO: 231686 - DNA, 415 bp, Homo sapiens
cttatagaaaatattttccatggaattgaacaccaacattaaaagtaaaaaggggttgggaagaagaaacctaaaaccaatgaatggggcttggcccccagctagacgcgagatggctcgttttcagagaacaaaggagagggaagaagataggtgttccttgaacatctactatgtgagaaacaccacccagggcactgcacctgcctgtgttggaaagaggatgcaaccatccccaacagggaagggtggaaaatgctgcactgtgcatgggctcacaaggaagatacataatgtacagccgaatctacagtctcctattttgtcagctgcttgtgttgattaaaacttcaataaagaccgatgcggccaatttcctttcttccacctaccgcgattgttttcgctccgatct

SEQ ID NO: 231687 - DNA, 321 bp, Homo sapiens
gggctttgtgggagagaggtctgtgtctgggcaaacaacctgcttgtagaggctggaagaggaaaaggccaaagacacctgaaaagaatggggcttggcccccagctagacgcgagatggctcgttttcagagaacaaaggagagggaagaagataggtgttccttgaacatctactatgtgagaaacaccacccagggcactgcacctgcctgctcacaaggaagatacataatgtacagccgaatctacagtctcctattttgtcagctgcttgtgttgattaaaacttcaataaagatcctgtgataaaacagagcta

SEQ ID NO: 231688 - DNA, 487 bp, Homo sapiens
gtaaatgcacccttgtttcatcagtgtgacttgctgtctaagctactgaagtctggcatattccttccctgagccccacctagggtcctgttgactttcttatatcctcaagattaaggctgttcaggaagcatcaagtcaaagtcattgacatgcttatttctcaactcatttattggaaattaattgaactggtacttctatgccagatagaagagagcctggggagtagcacaggaactcagattgcagctcaggattcaggctttgattctggggataacatagggagaaccgttttcctttttgatagcgttgctttttacccacattctctcggaagattgtcaaggaagaaagcttgctaatttatatatatatatatattttctcaaataaaaaatatatttgttaggcattaaagcatgacaatatcctaaaatttttactttattgctttacgtaagattgtatttttgagtcatcc

SEQ ID NO: 231689 - DNA, 233 bp, Homo sapiens
ctaaacggtgattccccaagtcggccactggagggatgacttgggggaccagagaggaagagcagagacagggtctagctatgttgccccggctggtatcaaactcctggactcaaacgaaagtgctgggattccaggcatgagccagcgctcccggcctgcatacgggatgattccatgtggactgccacatcaaggaagcaaacaacaaggaaagcctggcgctgcgtgga

SEQ ID NO: 231690 - DNA, 251 bp, Homo sapiens
gcaataaggcaagaaaaggaaataagagacatacagatcattaacaaagaaatgaaactgttcctatttgcagaggacatgattgtctatgtagaaaatctcaaggaacgaagggaaaaaaagcttttaaagctaagtaaagtttagtcagcttgccgtatagaagaaaaaacagacaaacaattgtatcatatgtcatagcatgaacatatggtcactgaagttaaaatacagtaccattaaaattactt

SEQ ID NO: 231691 - DNA, 278 bp, Homo sapiens
caattgctttgtgctaagagagtgtggtcgatacgattccaatttttgaaagatgatgagatgtgctttatgggctggtatgtgatgaggttttgtaaatgtctccatgaattctacagctgtggcaggtgtaacgttcgaggtacggcaatcacgtcaggatcacgggtggttctgttgatgccttcttcacacttgtctacttggcctatcactcatggaaagagaggtgtgccaagtttttgctataatgtctgtcaaattatctatgttttgtc

SEQ ID NO: 231692 - DNA, 193 bp, Homo sapiens
gttccacttgcttgcttttgaatgataaggtcttaactttctcaagtattggacacctagctgaaataaaatcacaggcatggatatgaaaaatctaccttagtaaacacttgattaaaataaaagataaatccttggtaaattattgattatgatgctgttattttgcctctgcatcacgacataaacagga

SEQ ID NO: 231693 - DNA, 203 bp, Homo sapiens
ttcattttttgattttgttcaaagaaattagagatagtatttcagaagtgtctatttagatttaatgaaatcgtttattttatacttatcacatttttactcacttaggatggtttgaactatcagtttggatagaatgatgttgtccacttcattgaggtttggcttagattaatttgaatagataatgcccaatatcgctt

SEQ ID NO: 231694 - DNA, 197 bp, Homo sapiens
cggcacgaggctcgttggcctaggggtatgattctcgcttagggtgcgagaggtcccgggttcatatcccggacgagcccctcttcttactaaaaatcgaacaatgctttgactatccctttctttgtaaaacccatctattttatcatcattaccatttaccttctctttgaataaaatattcttgattgttttta

SEQ ID NO: 231695 - DNA, 273 bp, Homo sapiens
gagatggagttttgctcttgttgcccaggctggagtgcagtggcgcagtgttggctcaccgcaacctctgcctcctgggttcaagtgattctccaggagacattttaaagtctgtatttataggcatttttcagatgtgaatttctctttaataatgatgatgatgataagagtgttgattggccattaaagccagtcatccctggtatacctcctgtttaatgatctgattgcctgctgaatctggaaagtcttattttgtaggtttttgcc

SEQ ID NO: 231696 - DNA, 1238 bp, Homo sapiens
tgcagagctgtctgtctccatttcattttaggggaaggggtggtagtggccatacccaggccccttcccatggaaggccttatcttctgttccctaggacctggggaggccttatcacaaaataatgtggagggtgcttttggcagggaagtacaaaaggaaccagagccagctgaaaaggcaggatggctgagagatggtagaaggaggagagcccttgattttggttaatacatagagacagggtctcactatgttgcccaggctggtcttgaactcctgggctcaagcgatctgcccaccttggcctcccaaagtgctaaaattataggtgtgagccactgtgcccatctgatttttttttttcttcaagacagggtctcactctgttgcccaggctggagtgcagtgatgcatcatagcctcaaactcctgggctcaagtaattctcccatctcagcctcccaagtagctgggactacaggtgtatgccaccatgcccagctttttaaaaaacatttttgtagagacgggggtctcgctatgttgcccaggatggtcttaactcctgggctcaagggatcctcccaccttggcctcccaaagtgctgggattacaagtgtgagccaccgcgcccagcccttgctaacatttttgattcgccaatatgttttgtaaactagaagaataacagaacactgcaactttagaggttttctctcttggtcctaccttgtgtatgtagaaagttaatgtaagcttttcttctgctgcttttaagtaagaccctatgcatcccctcctgtgtttcagcccactggggcattatgctgtaaaggcttgcttgttgcttttagttgagaacttttgcaagattgtcagtgtacattttttatgccacttggaaacttatgtgactattcacaattgttatcaggttgttggggcctttaccataatcttgtacttagaagcagagttctggttttgttggacttcagactggaagctgtgcctgtgttctgcaaggataacctccagaaagaattctgtgaccctgatggtcttgatgattttgtgccaggttgtaattgacatcactgtaactgacaatgcttcttttaagcagagaaatattcctgaggtggctttgtccagtcacaaggggatctgtgacacttttgttttctatacgcatgataaaaaataaaaaattgcctgtctggggaaaaaataa

SEQ ID NO: 231697 - DNA, 447 bp, Homo sapiens
gttgaaatgtttttgggagaactgctggctgcaaggtatggtccagaaatggaacaggtcctttacctcttaccatgttttagactagttggttggttggttggtttggttttgattggttagttagttggtttgtgggtagtggtttgtgctgtccttgaatgtctggaatacagaggactatgctgcactctttgcagcagtgcagtattctggtgagagtgcaggatggaagtaagaagctcatctgcattccagatccacctcctgtttgttcaagaaattgggcaggtcacttatctcctgttgctcttgattttagcctttaaacattgtgttaataatactgtactttcctctctgaggttattttgaggatcaattaacataatgtgaagctgatatgaaggaaagaaaaccacaaattcacagtgactgtaaagataa

SEQ ID NO: 231698 - DNA, 505 bp, Homo sapiens
taatcatctttgcaagagttcccattgctcctcgccactttggatgcttgcttttgtggtgttttgcttttggtaaagatgcagtatcatcttctgaatcaaaagatcataagcattccaaaggcttgaaagcagagttgctctttagtggcagtcaggcatctgtcctgcaaagtgagatgtctgcaatggagtcagtagagttccaggagagtctgaaatcacagcatttcagtcgtcagttgaaatgccactaacacagaagttctggaatgcaacctgaattatttcctcttaaatagaaagtcccttgtctttttgactcatgactcttcaacaagtagattttcatttgctctagactaaatgtagaaccttcttccacatggctggtattgttctgttgagtttgttacaatagaaagtaaaaatatcacttaattaaaagaaactcccaaaattgaaatgagtgatattttctctttaaactcattctcctttattt

SEQ ID NO: 231699 - DNA, 441 bp, Homo sapiens
ggccaccccactctttctccacccatacacactggcacatattaaaaagcaaggattttttgctgtgcagaagctctttagtttaattaagtctcacctatttatctttgtttttgttgcatttgcttttgggtccttggtcatgaagtctttgcctaagccaatgtctagaagggtttttctgatgttatcttctagaatttttatagtttcaggtcttagattttaagtgcttgatccatcttgagttgatttttgtataaggtgagagatgaggataagactacaaattgggtgcagtgtacactgcttgggtgaagggtgcaccaaaatctcagaaatcaccactaaggaacttactcatggaaccaaacaccacttgttttccaaaaacctatggaaataaaaaaattaacataaaaataatacacttaaaaaaaa

SEQ ID NO: 231700 - DNA, 420 bp, Homo sapiens
agagcaggaactcttggatgatgaatttaaaaactataagagaatgtgttttcatgaagttcccatgagggcactcattacatgaaagctgggggcggtgactcacgcccacactcccagcactttgggaggccaaggcaggaggattgcttgagcccaggagtttgagaccagcctgggcaacacagcaagatcctgtctctacaaaaaaattttaaaaattagctggcatggtggtgtgcacctgttgtcctagctcctcaggtgactgaagcaggagcattatttgagcccaagagtttgaggctgcagtgatctgtgatcgtgccacagaactccagtctgggcaacagagcaagagcctgtctctaaaaataaataaataaatatatatatttttaaaaagtgccttctttgtga

SEQ ID NO: 231701 - DNA, 464 bp, Homo sapiens
ttggtggtgcttgctgcccccccatggtgctgagacagcggaagggtgcccatgagggccagaacgtcccgcctggcagagcagggtgaggagagccacagcaggtgaccaggagctgatccccagggcttcgcgcccagagcaacccccagcagcctgcacatggagcccgtctccatctcggcagcggaagctgtgctacgatgaccagaaggagcagcaccagcgttggccacatctctcctgattctcgcagctgccaggggcaggagggactggagatgtccctgggacaccagggagggacctgatcattcccggaggtgcagagggttcaggaggctgcagtgccctcaggacatccgtgggcagagcccagtgagtcccgcccaagacccctgaggccccagctccacatccgcaggccagaatccctgcagcccatcggcaccggcacccttcca

SEQ ID NO: 231702 - DNA, 1506 bp, Homo sapiens
cagcttgggcaacaagagtgaaactctatctcaaaaaaaaaaaaaaaaaaaaaaaaaagagttagaggtataaagttaaatggtgtttgaggaattgtgaatagtcaggtatgggtagagggtagcatgtttcagtgggattgggaaaagataactgaacatgtgagaagccccatcactataggccgtaggatgttttggggcattgttaaactgaactctctaatcaggtgaagtgacatgaccagaagtaggttttatgggaatattactggccactgtgagaaggatatggtgtaagggaaaggaacttcagtaccgatgggtagatagcaatgcatgaattttaggatagaattctgttcctaccacttactagatgtgtgatccttgggcaagcaagcatctttcagagcctcagttttcttatctgtaaagtagaagtagtaatacatttcccgcagactattgcattttgtgttaggggaaaaaatgtaaagtgtgtggcattgggcttggtgcatgaaaggtgctcagtataagataatatcttggataatggtaacgtcttggaagagacgagtttaaactaaggctgtggtttaggaatggggtgagatggaggcagacttaagagctcttgaaaaaggccttttcttggctttcataacatccttgctactttgactttgtatctgacaacatctcagtctttgcaaggatgctgtgttttaggtcctctttactcaccctgttcccaatttacatacatgtttgactgcctacttgactaccttggtatcttgaaggtatctcaaactgaacatatgcaaactgaatttataattgtctttaatattccttgtcttagtaaatgtcacttaccactacccatgccagaaaccttggaatagttgttgacatctctttttctcaattcctaatcacccgacctcatcatttctatttttttttttttttggagacaaagtctcactttgttacccatgctgagtgcattgggcgtgatcacgtgctcactacagccgtgacctcccaggctcaagtggatcctcccatctccagctacgtgggactataggcttgtgccagcacgtgcagctaatttttttttttttgtgtagagatgaggtccttctttgttgcccaggctggtcttgaactctggaacacaagtgatcttctggccttggcctccaaagtgctgggattacaggcatgagccgttgtgcctggcctacatttcaaatctcaaatccgtttccctccatccccactgcccccatcctaattgcagccatgatattgtctttgacttttgaaataccttcatgcaattttttgaatataggtatacttgcacatagtacaaaattgaaaagtgacagaaaggatggtacagtgaaaatcaccctctgtgcttgctttggcagtacatatactaaaattggaacaatacagagaagagtagtatagccaaatatt

SEQ ID NO: 231703 - DNA, 301 bp, Homo sapiens
ctaaagggtataaatgtaaaattaagtccttttactctctccagttgaactacctagagaaaaccattttaaatcacaatttcagaagattttaaaaattcatctctacctaaagacatcataaaatggctcattattccatcatccaggctcccctgtttctcaggcctccagactgaagctgaattataccaccagctctcctcagtctccagtttgcagacaacagatcatgggacttctcagcctccataatcacaggagtcaattcctcataataaatctgtctgccccctgctgt

SEQ ID NO: 231704 - DNA, 994 bp, Homo sapiens
  misc_feature (830)..(830): n is a, c, g, or t
  misc_feature (841)..(841): n is a, c, g, or t
  misc_feature (849)..(849): n is a, c, g, or t
  misc_feature (851)..(851): n is a, c, g, or t
  misc_feature (856)..(857): n is a, c, g, or t
  misc_feature (860)..(860): n is a, c, g, or t
  misc_feature (867)..(867): n is a, c, g, or t
  misc_feature (872)..(872): n is a, c, g, or t
gcgcgcggttccagggcatcttcttagcgtcgggcagggctgatgagtcaactagtgacagtggcgaggaagtgggggcgctgagcaagcgagaggaaggctgaagggagctaggaaaagggcgctgatctctgcagcctgggagggcttttgtctcccggaggaaggccagaagagatggggtcccgagggcagggctcacacagcaagaaaacgaggagcatgcctgtcattttgagcccacagagaacggggagcggagccactggaggaccggctgctcgggcttattcggtagccgaggcggttaaacagttcagggctggaccagccgggactggagcagggtgcagtctccagggttgctgggcagcaccgagaccctttgagcaccgaacgaataaactacgggagctttccacacttgcacattgttcccgcgagttgcagacgcaggttcctgatgctagcgctcattccttggcagtcaccctcagtgaactacacagttgccgtgaccttcaggatgaatgcttggattccaggtttgctgagggccccagaaggctccttccaccgtatcatagtctaataaataattttgtcaagccagagaagctaacaaaggtagagacaaggcttaaagaaaagatagtggcggaaatgacggatctgaacaagcatataaaacaagctcaaacccagcggaaacagctactggaggaatccagggagctacaccgagaaaagttacttgtccaggctgaaaacagattctttctggaatacctgactaacaaaactgaagagtacacagagcacctgagaangtttggaaagntatttacnancaagnnganagattgnacgangaaagacaagaattagctccagatttggagaacaaatttcagtgcgtaaaacacgggctttgcgaaagggaaatttcatccgatttgaaggaatttgctgcatgtggggacattgtttatag

SEQ ID NO: 231705 - DNA, 941 bp, Homo sapiens
  misc_feature (777)..(777): n is a, c, g, or t
  misc_feature (788)..(788): n is a, c, g, or t
  misc_feature (796)..(796): n is a, c, g, or t
  misc_feature (798)..(798): n is a, c, g, or t
  misc_feature (803)..(804): n is a, c, g, or t
  misc_feature (807)..(807): n is a, c, g, or t
  misc_feature (814)..(814): n is a, c, g, or t
  misc_feature (819)..(819): n is a, c, g, or t
gcgcgcggttccagggcatcttcttagcgtcgggcagggctgatgagtcaactagtgacagtggcgaggaagtgggggcgctgagcaagcgagaggaaggctgaagggagctaggaaaagggcgctgatctctgcagcctgggagggcttttgtctcccggaggaaggccagaagagatggggtcccgagggcagggctcacacagcaagaaatggaggaccggctgctcgggcttattcggtagccgaggcggttaaacagttcagggctggaccagccgggactggagcagggtgcagtctccagggttgctgggcagcaccgagaccctttgagcaccgaacgaataaactacgggagctttccacacttgcacattgttcccgcgagttgcagacgcaggttcctgatgctagcgctcattccttggcagtcaccctcagtgaactacacagttgccgtgaccttcaggatgaatgcttggattccaggtttgctgagggccccagaaggctccttccaccgtatcatagtctaataaataattttgtcaagccagagaagctaacaaaggtagagacaaggcttaaagaaaagatagtggcggaaatgacggatctgaacaagcatataaaacaagctcaaacccagcggaaacagctactggaggaatccagggagctacaccgagaaaagttacttgtccaggctgaaaacagattctttctggaatacctgactaacaaaactgaagagtacacagagcacctgagaangtttggaaagntatttacnancaagnnganagattgnacgangaaagacaagaattagctccagatttggagaacaaatttcagtgcgtaaaacacgggctttgcgaaagggaaatttcatccgatttgaaggaatttgctgcatgtggggacattgtttatag

SEQ ID NO: 231706 - DNA, 489 bp, Homo sapiens
aggaatttgttcatttcatgtagttatctaattggttagtgtataattattcatagtattcctttataatcttatttttttgctgtaaggtcagtcataatgttcactctttcatttcggattctggtaatttaagagtcttctctccttttttttcttggtcagtctagctaaagtaaagttttgtccgttttcaggggaacagctttttttttttttttgaggcagaatttccatcttgtcacccagtctagagtgcagtggtgcaatctcggctcattgcagcctccgcttcccgggttcaagagattctcctgcctcagcactttgggaggctgaagcgggcaaatcacttgaggtcaggagatataaaaaaattagccgggcgtcataatgtactaaatgccactggattgtacaatttaaaaacagttaaaatggtaaattttatgttatgtgtaatttgccacaataaaaatgctaaaaaca

SEQ ID NO: 231707 - DNA, 523 bp, Homo sapiens
tgctcgcttccccacctgtaccaccacacaatctagtataacccttatgtaatttattgacctacgtttgtcttccctactagacctaattccttatgtggtcaaggactgttttttttaatccacactcaactagtgattgttgagtgaataaatgaacttaccctcacctccctgtcttcgctaatagcagcatgtcttcgctcttaagtcggttccttcaaccagtgttcaagatcccatcccctcgctagtctattaatagatcccatgggaaaaatgaaataaatttttaaaatcccatcccctcagttattctctgtgtgtatgtgtgagcgtgtatttatttatttttctttgtcttgcccccttcagctaaaatatattttagctaaaatatccaaaattctggccgggcgtggtggcttacttctgtaatcccagcactttggaaggccgaggcgggcggatcacgaggtcaggagatcgagaccatcctggctaacacggtgaaaccccgtct

SEQ ID NO: 231708 - DNA, 392 bp, Homo sapiens
ccggccgggcacgggaaggaggggcgaggcggggttttcatccaagaatgcgcatcggaacttttgctttttccttttttttcccccgcccctccgtcctgctgtttgtccgtggccgtgtgtgtatgtgtctccttctctcgctcttgcgacgctgacctggggggtgggtgggcaggggccgggggccacgtggctgggagtctgcaaccgcgcagggtgtgtgcgctgttgggtttatttaattctaagatttgtacaaatctccaatcgatctccgcctcagctcaagagtgaagcttcggtacctatcttctgcggtcgtgaatgtctgtatccaataccgctttttacgtgtttaaatatatactttgtaaatagagacatgtctt

SEQ ID NO: 231709 - DNA, 475 bp, Homo sapiens
actgctaccttaaaccccaagctcaggtgatcctcccacctcagcctcccaggtagctgggactacagatgtgcaccaccacacccttttgtatttttcgtagagatggggtttcaccatgttgcccaggctggtctcgaacgccactgcactccagcctgggcgacagaacgagactctgtctctaaataaataaagtaattggtagggcaagtatattaccttatttcttatgaaaattaatcatcttaataaatcaggtaatagtatttgtatccagtagctattgccacaatcaagtaatagaagtacaactatagctaaaatgagaaaagtaaatattaagtggggatatcagctgggcgtggtggctcatgtctgtaagcccaacactaggggaggccaaggtaggtggatcacgtgaggtcaggagttaagaccagcctggccaacatggtgagaccccatctttatt

SEQ ID NO: 231710 - DNA, 441 bp, Homo sapiens
ggaagctttgttctttccctctttgcaataactcttgctgctgatcgctctttgggtccacgctgcttttatgagctgtaacactcacggtgaagatctgcagcttcactcctgtgcccagcgagaccacaaacccaccagaaggaaaaaactccgaacacatctgaacatcagaagggacagactccagatgcgccgccttaagagctgtaacactcaccgcgaggatccgcggcttcattcttgaagtcgatttccatggggaaactgatgtagcaatgtgttaagaaatctgatgatatcatataataaagatttcctggactctgacctccatttctctaccaggaagaaaatacttcagggatcttaacccaaaagcatggaggtccacaccatcctccaggatactacagttgacaactgggatcccatctcctg

SEQ ID NO: 231711 - DNA, 477 bp, Homo sapiens
ggaagctttgttctttccctctttgcaataactcttgctgctgatcgctctttgggtccacgctgcttttatgagctgtaacactcacggtgaagatctgcagcttcactcctgtgcccagcgagaccacaaacccaccagaaggaaaaaactccgaacacatctgaacatcagaagggacagactccagatgcgccgccttaagagctgtaacactcaccgcgaggatccgcggcttcattcttgaagtcggtgagatcaagaacccgccaattctggacacgctttcatctatgtttccccaacccgttataagatagtagtgtgagtcttagcagattgcaatttatcagtgtcatattttattgcaaaatggtttgcattcacctgttgtttaatctttacaatacactcatgagaacataattggttttcttcagtacgtggaagaagaaataaaaacctgtggtgcagtca

SEQ ID NO: 231712 - DNA, 403 bp, Homo sapiens
gtctaccattctgcacagggccaacttcagggcagctgtccggggctgcagatgctccctcacaggccaggtggggctttcagctgtgacaaagtctggatgtccacccctggtgaagccactaggaggctgtgggggagccgagggtagtgtccaggagccattgagtccatctcaaggctctctctcctcttggatagtgtgtgcccgtgtgcatgtgtgtgcctgagcatatatagggtgccctcagagagtgcattgggtgatgatgactgatgtgggcagtcttttctttgatcaatggaagcaaaatcatttatggcccacgctgagcttccttctctggtttcctgttaaacacagcaaatgtgtgtctccaataaaaagctacacagcaacttaa

SEQ ID NO: 231713 - DNA, 587 bp, Homo sapiens
aaatggtgttaggtgattttgtcattgtgcaaacatcataggatgtacttacgtaaacctagagggtagagcctgcctcacacctaggctccatggtatagcctgttgcttctaggctacaaacctgtatggcacattactgtactgaataccattggcaattgtaacacaacggtatatcaaacatagaaaaaacagtaaaaatataatattacaatcttaaggggccagtcatatatacagtctgttgctgatcgaaatgtcattatgttacacatgactgtatatgagcagaaatcaataaaggacaaataatagagaaaatcagcaaagctagaagttgattctctgaaaagattgataaaattgatcaagacaaaaaaaaaagaaaacacagactaccagtattaaaatgaaagaagcatcatgataacgtacgctacagaggttaaaaatacaatgttgaattttatcagatactaaaggaagaaataagacgaattctagacaaactcagaaaatagaggaggagggaacacttcccagctcattttttgaggccaccataattctgatacccagtcaag

SEQ ID NO: 231714 - DNA, 441 bp, Homo sapiens
ctctttggagagcatgtaacatgctgcatagactggtgaacccaaggatagacagaagaaacattatcctaatttattcaggtaagaagagcttttaaaatcatattcacgctatgtatatagagagtctataacatgtagggcagagtggtggacaatgtgttcacagaaataccacagtaacactgtcttgattcattcatgccactagcgctcttagaaatagcttttatacatggcttttagagggcatatagcacagagtgcttgatatgctttggatctatgtctgtattagtccattcttacactgctataaagatactacctgagactgagtaatttaaaaagaaaggaggtttacaccatggcctgtgtatacctttgtaacaaacctgcccgttctgtacgtgtatcccagaatttaaagtataataatta

SEQ ID NO: 231715 - DNA, 219 bp, Homo sapiens
aatgagtctgaacatggcttatggggttttgaaggatctggctctagtctcatcttgacatcctttttctcttgcttactacgctctagccactccagtgcttttcatgcactggggctgttgtgcatgcttttatctttgcctggagtagttccctggtatccatctcctgtttattttctggtcctcagtgtaaaagccccttctccttatcttcgc

SEQ ID NO: 231716 - DNA, 286 bp, Homo sapiens
agatagaatggtcttgtttaacatcaataccacaacattcaggaaggaaataaatattaggacttcagacttggaatcaaaagactccacaactctttggacttagaattaaagactccaagagatctgagtctcaatctcctcttttataaagtgagaatacaagaccttgctgacaaggtcattgtgaagataaatacaagtaatgtacaagtaattgctacatagcaggtgctcaaactgtattttctccctccctccctccttctttctttccagaatcaca

SEQ ID NO: 231717 - DNA, 1520 bp, Homo sapiens
attggaggctcccattccatgttcatgaatactgtgaaaatgtgacatcctgcattgccaaggtagctgtctgaattatatgaatacaaggagatacagggtttaatgatcagcggcaatgtcaaggactggaatcatgacaggaacaagtactgcttcctaaaacacagtgtaaatgatttatagttgaaaatggcaatcacttcaatttatattgatgaaaatagaattcttttagaaagtctctatttaaaaaaaaatatgcctctttcagtgatgatagctacatgactaccccatattaccagttgaaaattaacattaaaatacctttcacctacataatctttggaatggatgtggaaaatattcagattaccaaaggttgtaaacacttcaatcgtaatgcttttttttaacttggctagtttcttatacttaaaaaaataaaaataactaaaaatacacttaaaactgtctatattttataaacattaattaggtaaataggggaggcataagaatagtggaaggctttgtacagaaagattcagtgctcttagtaaatgtcagtaaggtataatgagaggagagcagtgttacaattgagagcagctagattcaaatcttcatcaccatacactagctgtgtggaattacgcaaatcattgtatccctttgaattttactgtcctactcaaaaagttgagatgacaaatagaactattggttaaaagtttctagaagttttcatgtcattgtaaatgtaatatgctacgtagattattttaaagcactgcgaaactgttcaacattttcattaacaatattagctaaaatgtaattaatttatcaaggaataaataaaatatgttaaacccagtgtgaagtccacagtaggtcttcgataatggtgataaatgaaagttgtattgaatatgttatttattgtctttatttttcattaaaaaatctgctaaatgttgaatgatgagtacttcaattcatgtaaacaaagttaactggtcaaataaacattaaaaatattaagtgatattgatgctagtaatatttgttcaatgttgtagtggtaatgtataagttgtagtaataataaaaatttatattaatgccttcttatgagaactcaattcaacatttagaaagagtcaatcaaaaaataacctgggattttatctatcatggtttatcagatattgtttgttttatacaggaatatatatgtgtgtatatatatataaaattctgggaaagagaagaatcttgattttgttctctttgatttcccctgctgcaaagataatgtgagtttagggtactgtgtatatattttattataaattacagtcataagctatgtataaaatttttgagaaaggaaaaagtgattaatgcatagcataaaatgtacatatacaattattttatatgtaatttatagttacatataattgctaatacatatacagttgaagccatttcatagtctagctctgttg

SEQ ID NO: 231718 - DNA, 571 bp, Homo sapiens
atgtactactgtaataattatatacaggttgagtatttcttatccaaaatacttgggaccagaattgttttaatttccacttttttggattttgtaatatttgcaatatatataatgagatatcttgagtatgggacccaagtccagacacataatttacttatgttgcatatacatcttatacaagtagccagaagataaatttatggtaatatttttaataattttgtacatgaaacaaagttttgactgtgttttgactctgatccatcatataaggtcagatgtgaaattttctacttatggcgtcatgtgggtgcttaaaaagttttggattttggagcatttcagatttcagatttttggattaggggtactcaacctgtgttagtaaagagttcagtgtccaaagatgtaaagatttcttcctgagtgtatcagtaatttaaatccaaatctcatcaaatctgtcaatttagaaatgattttggaaggcctataactaaaataagacaattagaatctatgcgtatgtgtgtatatgcaatgaaaacatgtttaatgaaatttt

SEQ ID NO: 231719 - DNA, 355 bp, Homo sapiens
gggaccctggctctgaggctgcgggcccggagtggggaacgagggcagagcgccctggaacgcagcggccgcgcgcctcctcccttgctgcgtggactgggcgctaacggcgcaggaggcgcacggggccagggatgcggggaccgttggcgcggacaagggtggcgcccaggccggtgcggggggtggtggagacaccaagcggggagcgccgaagggctctcccggcaaaactgatggagtcaacctgaggcttccgggcttgccaggtgaagggctgtgctgcatcgcacgcgcttagcgaagcagggctatccatggctaaaagagaaaaagaaatcaaaagtattcgatt

SEQ ID NO: 231720 - DNA, 1014 bp, Homo sapiens
ctacaaagtttctatacttactataagtggatttagaagcgattttggttttgtattacatacggtagtcctctgcgtcagggagcacttttttgtttgcctcgagactactcattagcgcactggctaagctgcctttgccttctcgtaggcgtgggttgcctgtgtcatgggctgtgtagaccacaacactcaaacacagttgctgcacttggattttcctttaataccaagtatcatttggttatcttactgggacattttcattgatattctatacaccaaagttttgacggtttaccatcattccattttgtaccagttaaaggcattttgatgatgctttttcttgatgctaagatcactgcagaagaataacctgaccttttctttgcatttgttttgaatgtctaacaccattagcttttgtgatctggttaagaagtattagtgccacaagcctgaaaagacagttctcctgtggcagtggcgatgtggcatccagagggccattgtttctacttttgtgggacttcagtcatgctgataatagaatcttctgttcatacaattctgtaatatttatttgtacagttagtattctaatgaaaggatgaagagtctgaactagaaggtaggtttaagccatcaccaggcctttgcaaatggcctaaatggtgttccctttgaaataacgcttgccacaagtatataataagctatattaattgtgttttgcataaaattgccaaaacacagtaatgtgtatatagtggtataagatcttgaaaaaaatctctataattgtgctctttatctgtgaatgggaaaagccatttttagtaggtgactaccatttgaaaaactcaattggatgtatatctgaatgttgcattgtattgtacagtatgcatattattgtttgtggttgcatatggcaatgaagtgtttgttttatattaaaaaaaacctgttatgtacagttgaaataaattttgcatttgctagcccgtg

SEQ ID NO: 231721 - DNA, 98 bp, Homo sapiens
tgactcacccaggttgtgtgtaaacagagctctgattcaaagtgactttgacctgttggaaaaatagttcctggccgggcacagcggctcatgcctgt

SEQ ID NO: 231722 - DNA, 460 bp, Homo sapiens
tctaatcaatcaagaatattttttgattctcttaagcagggtgatgatgcaatcagatttggaattttcaagttatctttgcagtagcacaattgaggattggatgggagctctgaggcaattaaaatcaaccagtatcctaaggaagtggcaggaaatagggaggaaggaagagacttaaagaatattttccaaggtagaattgacaggttagtgatagatagaatatagtagtgagaacgtgggagaatcaaagaaaactgaggtatttaatttgggagactgcataaaaaattctgcaagtcaccaagggctggaagatagtgtggtagagtgataaggaaaatgagcttttgaactagatgaacctgaattcaaatcctagaaccagcttttcccacctgaatgttcttgggcaagttattaactaacctctctgatcctctacttcttatatata

SEQ ID NO: 231723 - DNA, 386 bp, Homo sapiens
gagaggttcccagtgactgtcagtgaatgatatccttggttgatttgaatagttcttcatgtttatgaacattgagaagctaatattcatagccaaaagcactgggaatgttttttcaaagtgttttctggcttgcactgtagacggctttgcctaggatgatatttcccttgttatttgtcaaaatgcaaagataactctttcatagataattgccctatgtttatttatgttgtatgtttccatgtttgatcactattgatgagtttgctggctctgagttgattttcattcagatttttaatgctaaataaaataccaaaaataaaataagtaaaataagggatggtttaaattttggaccttaaataaaccaatttaagaac

SEQ ID NO: 231724 - DNA, 101 bp, Homo sapiens
attcttagtttttcccattgttgattttctgcttctacttcctttcttccagaatgttattgctaatgtttcttctcgtattcttgtaaggttgtacctga

SEQ ID NO: 231725 - DNA, 641 bp, Homo sapiens
gcttagggaggcatctgggtcatgcatgttaatatccttgggtaattccagaaatctctatgaagggaaactcctgttatttatctagacttcctgattgcaaggggtttgggcatcatgatttaggggtcttaataaaattattattttatttttactaatagataatgtctgtgcctatcagataaaggcaaaccagtgctcagaggaacccaaccatctctgaattgagaccagagagctgtctctatggattgtccttagagaaggcatttcggaacacagtaaacagcagcctggtgactccggttagtaaacgcagcaaagactttcatagggatgtttttcttatatgcctgtcagtattagccagtagccaatctggtgtgaaagtgagtaagtttaggtagcaaaatgtggagggggtgatatatagttttttgctgctctggcttaatccaagatgacttttaaatgaatgaatcaacattcattgggctgtccttccataaatatgattcttctcaatcaagtgtttaataagtcttaagtagtggtaagttgaaattttactagttgtatctggaggtcagccattctttatatcgcatgcattaagcttttatagtcagctcaattca

SEQ ID NO: 231726 - DNA, 391 bp, Homo sapiens
cagagaaacacaggtcatatgtgtcttttccacacatacagtggacaaggggtactactgtatactctgtttgaactgcccgtcatgttttggtcctgaaatcatgctcttcgacactgttcattcatcacacctgttctgctaacaataccatttttagtcaatctcacagggtttggctaggataacttgtatactgcggttcacttgtagatatcaaattttataaatttattcttctttgcatttaataaatacaaagtaagggaagtaagagttcttactgcattaattatctactaataggtataattaatattaattctaataaggtcccggttatgctcccaaaggaatgctatataacaaagcatcagtcgtatgctttaaa

SEQ ID NO: 231727 - DNA, 645 bp, Homo sapiens
gaaggcccacacacctgtggttggaacactttgggagccgggagtcccagaccagcctggacaacatggcgaaaacccacctctacaaaaaatagattagctgagtgtggtggtgtgcgcctgtgtcctagctactggggaggccaaaggacgagaattaattgcctgagcccaagaagtcaaggctgcagtgaggtgtgattgtgccacagtactcaagcccaagtgacagagcaagaccctgtctaaaaagatttttttaaagtcacagaagctgggcgtggtggctcatgcctgtaatctcagctctttgggaggctgaggcaggaggattgcttgaggccacgagttggagaccagcctgggcaacatagggagaccctgtctctaccaaaattaaaaattagctggatgtggtggcacatgcctgtagtgctagctactctggaggctgaggcaggaggatcacttgagcccaggggttcaaggctgcagtgagctatgatagtgccactgcaccccagactgagcaacagagtgagaccctgtctgtaaaagaagtgttattaattgaaaaaaagatttaacaggctgggtgcagtggctcacacctgtaatctcagcactttgagaggtggaggcggg

SEQ ID NO: 231728 - DNA, 360 bp, Homo sapiens
aaatacttaataaatactcatttttttcttttacccccagtgattccatttttactgatgcccaatacactttacctcaaggacctacttttcctctctttacccaaactctgctcttttaaaaaaggtaaagatagctatgcatataaaattacgcaaaagcctctggcagaaccacatggcttttagtaacttcttagttgttgttgcagattgtagaattaaggaagtcagcatatagacagacttgatttgctaatcagacaagttcatccaccctggtaaaaatgtcaacttaatttaatgctcttggtgctcccttttctgttgaaattttaacttctctttgaaaaaaactat

SEQ ID NO: 231729 - DNA, 472 bp, Homo sapiens
  misc_feature (27)..(27): n is a, c, g, or t
acagaaaaaaattcatgaaatgtattnttatcttcttttttcttaaaatggaacttaaaaaaaatttttttaactccaacctaccttttacaccatctgcagagctttcctctcccaaatcaaagctactcctgttcctacctccaggatggaatccccaccttcgtatgcaagggtcttcatgatatggcctcagccaactatcttagctccaggtcacggccccatcttccatatcctatgctgcttgcacaggaagcagctcgctaaccccaggcacacctgctttcatctggagcgtctgcccatcatgattcctccccctggtcccttcacctggaaaactcctattcattcctcaaagcccagttcagatggcacctctccatgacttcatcagattccctacagaggtgctgattttctggtctcttgtgtttctgttgtaacacttaacatgctgtattataat

SEQ ID NO: 231730 - DNA, 305 bp, Homo sapiens
cggcacccacagtgaactcataggaatgccatgggggatttcaccaaagacatacaaatggccaataagcacatgaaaagatgctcagatcattaggcagtaaggaattgtaatgaaatccacaatgagacaccattgaacacccactaaaacagctgtaacaacaacaggggcagaccaaaactaatgctggcgagggtgtggagaaaccggaacctcgcacattgctgatgcgactgtaagcctgtgcactttgggaaacagttggcagtttctcaaaacaatcaaacataaactgccatcag

SEQ ID NO: 231731 - DNA, 351 bp, Homo sapiens
gatactcctcagtgtatgatggagttatggtccaataaacccatcatacattgaaactatcgtaagtggaaaatgcactttcgacttagaatattttcagtttacaatggatttttcagatggaattatcaggacataaccccatcataagttaattgagaagcttactgaatgcatatcgctttggtaccactgtaaatcaaactattgtaagttggggactgtctgtatttgaaatgcttagtttaagaataatgtttttcaaccataactatcatggctttataggacatcagcattcaaaacaggttgtttttgaatttggagtcggtacagttggtgcaggcccca

SEQ ID NO: 231732 - DNA, 194 bp, Homo sapiens
cattataggcagagtgtgcacaggttccagataaaactgctcaaagcaaatggattaaaaaaactgtccaagagagtctaagaacttgttttatgaagagtcttggctctccaatggtgagtcccagtctgaatttattcaagactgaaagaagttggagcatgtctgtgcaagggtatttttcaagagatttt

SEQ ID NO: 231733 - DNA, 219 bp, Homo sapiens
tcctaaataaggtaaagtctgtggtgaactgaatgtcactaaagctcagatctagatcaatataagagtagattgatcccaaacaaaatactaatggcctaatagaagaaaaggtattctcatttttggacattgacataatttacttcagtttctgttcttttacacatagtgacttgccttcaagtagaaattagataaacaacaagaaaagactta

SEQ ID NO: 231734 - DNA, 188 bp, Homo sapiens
taagggaatcaatattgtgcctgctcccaagactaagacatacatacatatcacagtcatagggaataatcaaataattttcacaatgaatgatcagattgtcctataccatcagcaaatgggtgttaattatgtagtataaatagtaactgtaaaaagagagaaaatggagtttgctagagtcacca

SEQ ID NO: 231735 - DNA, 385 bp, Homo sapiens
gttggggctttttctctttacagctgttgtcatttatgggttaccatcttctttagttctaattctgggatatatgaaccaagaagaaaccccagaaaactcaccgttatgttgtttatcaggtcccagtgtcctgaggaagtttttttcttcacatttcggagtcgtcttatgtttgttttatgtataatgtcttagggttttaagttatacttaaaatgggaagaatgggaaatatatctattccttcttcccagaacttgaagtctccagagtaagcttttaaagtataagtctgttgaggtcacagcttcaacatacctatcttcagtggatcctcattgcctccaggataaagtagaaatttctcaattctaatacaagg

SEQ ID NO: 231736 - DNA, 461 bp, Homo sapiens
tagtcttacaggaaaaacctgatcacagaggggaacactatagtgaagcaccaatacttttcatcaaaaatgttcaagtattggcaatttcatgtgtttcaacataatactactagccctcacccaaccacaggttacagagtgcctggagctgctagaataggcacaactgttctcaccatatgcaaggctcatcctcctccaaccttctcaatacatcattaccaattatcaaatcattacatctttatgaaaaagacttggcttatatgacacaggcagaagtgccaccctttcacaacattatgaaacgatgccaaataaggctagcacacctgccaccttttgcatttactgaagagctcttatgcatggacccacttggcctgtctcttagtcacagaagggggcatggggcagcctggctcggaacacctgtgcctgctgatagcagacgtgcc

SEQ ID NO: 231737 - DNA, 520 bp, Homo sapiens
atcttccagcctagggctttcttctttgcccatatttgctattttcaccttgctccttaaatgaggagacctagcagtgcaatcaagctattgtctggtaaaaagaaccaaaaatattcagcatttgtgagagaaattattgctccactgttgaggtttagaatgcaggattcatttggcctattttccatcctcaagaaacgacagcactcacagatttacatacttgattcttgtcttaaatttcctggaaaagtaaaattaatgattacattgacatcatcgaagcagcatgtttctcacaagattttatactaatataccaaaggccagattttaaagctgtagcaatatttttccatatgcgcaaagaaagcaaggtccggcatttgaaaacaaaccaaaccttccctcccagagtaggaccaacaacagcccttcacggtcagccacagagctcttgctcttgctgccaggaggcaacatttacggttaaatctggagttgtacaaagcggccg

SEQ ID NO: 231738 - DNA, 855 bp, Homo sapiens
cataattttctatctatggtacccttggcttctgcctggcttctgaggcttagggaagggaggaagggacctacaaagagccagggtacacctgcctcttgtgctgagggcacgtgccagcttctctgccagtaagccttttgctagctaacatttcccaccctcccaaggcccctaacctgccctcccctctccactatgttagtatatctacctctgtttctgactctgaggaagggtcaggccacacggagggaacagtagtgggtaccagcctcccctctgctgtccagtccaccacatcaatctcttcctcttcagagctggcaggaagtgagcctagtagttcagagtgaccagatacctccttgcctgccttgggagaagggtataataactcatctgtagtcaaggagacttccagcccagtctccacccagtttgagcagggaggtgagaggtccccataagacctctggggagtatcaagggagctgacatggagaagtttgtcttcctgaccatccagtggctgggagctggtaatttcaaggtctggtgtccaacggcctcctactgaaagcacttcactcacctcagagggcatgacaagggggctaaggagctcagttggccctctgttctcaccagcaggttccttttccaattctgtgagctccctgggccagagttccatgtctggtagacaccattcttccccttcaatccagttctttcctgtttctgtcagatggtaggtaggcgttctgcagccctcagcccctggactctccagagaccctataggtggttcaatgtctgagccacagagcatgaagtccaggatctcctcca

SEQ ID NO: 231739 - DNA, 458 bp, Homo sapiens
agagggtctgctggacacacacacattaggccacctctcctagggatgtcatgtgtaagactcgggggttggtggttggtgtcctaacctgattcttaccttctggatagtcatctggcttctgcagaatatatgtagttatgtagtctctcacagcagttggaagagttggcttccttaattttattattttaatgaaataggagtctaagcactacaatttctgggaggaagaaaaacaagttatgtgaaaaatgtttttatttgttgttcacttaagcaaaggctttttttgagttttaaacattttgatggatttatagggcttctgttcttaaaataaactaagtttggaaaggtactcttaccagcagagaacattgctcccagcctgctgccattgcccttctctctgaaccttctgtgctgctgaaccaagatcactcctcatacccctg

SEQ ID NO: 231740 - DNA, 362 bp, Homo sapiens
gacagttcttaggaaaggcaaatatcccataaatcctatttgcctctctttctcctaacctctggctccaccaactccccaacaggcctcctgcacacacaataggagtcaggagggaggaggcaggactgtgctacacaagggagatgggattataggcatgcaccaccatgcctggctactttttgtagagaaaaaaatttaaaaaggtctcactatgtggcccagagtgttcttgaattcctggcctcaagcaatcttcctgcctcagtttcccaaagcactgagattacaggcatgagccaccatgcccagccatgcggttgatatattaagcctgttttattttttattttttcttc

SEQ ID NO: 231741 - DNA, 482 bp, Homo sapiens
actgcccacgtccatccaccaactcagccctctaacagggccctgctgcctatgctgcaggtgaggcgtgaagacaccagggggctggggagaacagaagggagggaggctggagtgccccatgatgtgaaaggtcgggtgatatctgagagctgaaggaggttaagcggatccatgccaggctgacaaggggaacaggtgcctctgccctggactggagcctacgcaaccatcttctgctttatctagctgctgtctgtctcctgtctctgcgtgagtgtgtgtctactgagggctctgtagagccttgtctttaaaaacttatctgcactaaagcataaaatagttttgctgatatttgccgcatagagattaatttggcaggagtttcacaagaattattacacttttcagatttttttttcatgtttatttctctcccagtggaaataaatgtctctttgcatttatatgtaagagta

SEQ ID NO: 231742 - DNA, 463 bp, Homo sapiens
tgctgggcctactacattaatgttatgggtcactgatgggttgtagatatcagcagtctgcattatcaataactgccaccttaaacataatacaagtgaccgtgttatctgctgaactgtaatcttacctcattcaagtttcaagtgtgggggtggggaggaacagatgtatacatatacgcacacacactcagatcatagtgaggttatactcataatttgttacatgaatagggatcctatcatgtaactcttgctcacttaactcatttggccataaacacttgaaatctgtaaactcagatctcatgttaaataaatgaagattgaacttactgtaaaatagtgtattagcagtaggtagtaggtgcctatatgggtccatgccctatgtgcttgtatgcctgtatgggtagaactcaacagctgtcctttataataaagaccacttcttaatcattta

SEQ ID NO: 231743 - DNA, 421 bp, Homo sapiens
cagtcgtcatctgtgctggattacattggttcagctgaccatggggaggggaaactcctttagtaaaatgaatgtatggttttaagaagctgcaagtactagttggggccgtccatccttgctctttggtgttttatagagcatcggacaaatttcggcagagaagctctgctctaggaggacaagattcccagttcatactggactctttgtcaaagtcctcccaaactaacttatctcagttaacagatttccagtctgaggagagctaggaaggataaagatacttttctaaagtgtagatttgcctctggtttgacaaatcttcacagggcatcagaaggcaagcgtcaaaagtaatggtttggggtgaacttgacctagttacactagtaaagagaggactagcaatagaagggga

SEQ ID NO: 231744 - DNA, 123 bp, Homo sapiens
ttctaaatctcccaatatgcatgcttcaacaaccatacttctgggctaagcctgccagtcttcaagtcacacttgccaacctaattacaccaatcgccctgttctccctcctcacgtgactgt

SEQ ID NO: 231745 - DNA, 512 bp, Homo sapiens
aaaattctttgaactgaaggacaatagtgacacagcctatcaaaacttctgggatacagcaaaggccacctttcctcctaagaggaaagttcacagccctaaatgcatacatcaaaaagactgaaagagcacaaactgacattctaaggtcacacgtcaaggaactagagaaacaagaacaaaccaaacccaaacccagtagaagaaaggaaataaccaagatcagagaagaactaaatgaaattgaaacaaacaaaaaaattcagaagataaaaacaaaacgctggttccttgaaaagataaataaaattgatagaccattagtaagattaaccaagaaaaaaagagagaaaattcaaataacctcaataagaaacaaaatgggggcagaaatacaaaagatcattcaaggctactatgaacacctttacgcatataaactagaaaacctagaagagatggataaattcctggaaagatacaaacttcctagcttaaatcaggaagaatta

SEQ ID NO: 231746 - DNA, 292 bp, Homo sapiens
aaaccaagatgaaggtcacatagcatctgcagactgggaaggtaccactgatgaagctcagaaatggtctggaagtcatggccctgaggatcccccatgaggcacccaagaataggacagttatggttctgcaaccaaacagattgatgctattactgtgtgactttcagcaaatctcttgacccatttgagactctatttccacatcagagagccgaatgatgtgggctcaggccaggctcagtgcctcatgcctgtaatgtcagcactttgggaggccgaggcaggtgga

SEQ ID NO: 231747 - DNA, 417 bp, Homo sapiens
acctagatggtcatcagtggtgggctggataaagaaaaagtggtacgtatacactatagaatactatacagccataaaaagaacaaaatcatgtcctctgtagcaacatgaatggagctgaaggtcaatatcctaagcgaaataatgcaggagcagaaaaccaaatattgcatgttctcacttatgagaaggtgctaaacatagagtacacatagacatgaagaagggaacaatatacacaagggcctatctgaggatggagagtaagaggagggtgaggattgaaaactacctattgtgtactatgctcattacctgggcaatgaaataatctgtacaccacatccccacaaaacacagtttacccatgtagcaaactggcatgtctaccactaaatctaaaataaaagttgataa

SEQ ID NO: 231748 - DNA, 579 bp, Homo sapiens
gatatttcattccacctgccacctccctcccgcctcggtcgactctctcctctgctactttgcttgtccccactttaacacaaagagacagctctgtgttcacagcacctaacagtgttgaaaaagaatgctatttaaaacccgagttgagacatcacctttccaaacccatgactgcttcctggctcactaaacacgaaccagaaattaatgctgcaaagagcagagacaagagattcgactgtgttagccaggatggtctcgatctcctgacttcgtgatctgcccgcctcagcctcccaaagtgctgggattacaggcttgagccactgtgcctggcttcaggctgggatttttatagcttattatggcaagggaggagacggagagtaaaagaagaaggaagagcatacacagtcaccccttgtgtgacaaatatgcaagaaataaagataaatgtgtacaattcttacaattttacttttctgaattttgctattgcactgaatgatttgtgataagacagatggggatgaaaaatatacttattaaataaacagctattaaaagcccctaaaa

SEQ ID NO: 231749 - DNA, 528 bp, Homo sapiens
gacagtggggggccatcttcgagaacctgaaagacacgcgggggttcctggtctgtttcatggcccttactgtccagtgcaaaggcaaacaggcctagctgggggaggatggttggtaaactggcccccaggataatactctgtgactatccagttaaaaaataagaaggtgacaatgacccatcaaccccacttcacttctttcaggatgctgtagggaggaaaggtgcttccatgacctaacctcggcctctcctttcttccctcttcactcacacacatagagctaggcctttatactactgattttgaaggacagttttcaatgtctaatcatctgtttaggtgtgcagtggttgaaaaaagaaagctgagtgctagaaggaacatgaacctcaaccgttacttattgttctcattgtaagatattttaaccctgtataaatgcaacttttcctttagcttaatggcctggggtggaatattaaaaatatatattaaaaatacagtaaaaatccagaaaaatgt

SEQ ID NO: 231750 - DNA, 725 bp, Homo sapiens
cgccgagacagccccacgacgtgtggcccgtgtccaccgcgccactacacgcagttctggaactacctggagcgctgccgctactgcaacgtcctctgcggggagcgtgaggaggaggcacgggcttgccacgccacccacaaccgcgcctgccgctgccgcaccggcttcttcgcgcacgctggtttctgcttggagcacgcatcgtgtccacctggtgccggcgtgattgccccgggcacccccagccagaacacgcagtgccagccgtgccccccaggcaccttctcagccagcagttccagctcagagcagtgccagccccaccgcaactgcacggccctgggcctggccctcaatgtgccaggctcttcctcccatgacacgctgtgcaccagctgcactggcttccccctcagcaccagggtaccaggtgagccagaggcctgagggggcagcacactgcaggccaggcccacttgtgccctcactcctgcccctgcacgtgcatctagcctgaggcatgccagctggctctgggaaggggccacagtggatttgaggggtcaggggtccctccactagatccccaccaagtctgccctctcaggggtggctgagaatttggatctgagccagggcacagcctcccctggggagctctgggaaagtgggcagcaatctcctaactgcccgaggggaaggtggctggctcctctgacacg

SEQ ID NO: 231751 - DNA, 1271 bp, Homo sapiens
cgccgagacagccccacgacgtgtggcccgtgtccaccgcgccactacacgcagttctggaactacctggagcgctgccgctactgcaacgtcctctgcggggagcgtgaggaggaggcacgggcttgccacgccacccacaaccgcgcctgccgctgccgcaccggcttcttcgcgcacgctggtttctgcttggagcacgcatcgtgtccacctggtgccggcgtgattgccccgggcacccccagccagaacacgcagtgccagccgtgccccccaggcaccttctcagccagcagttccagctcagagcagtgccagccccaccgcaactgcacggccctgggcctggccctcaatgtgccaggctcttcctcccatgacacgctgtgcaccagctgcactggcttccccctcagcaccagggtaccaggagctgaggagtgtgagcgtgccgtcatcgactttgtggctttccaggacatctccatcaagaggctgcagcggctgctgcaggccctcgaggccccggagggctggggtccgacaccaagggcgggccgcgcggccttgcagctgaagctgcgtcggcggctcacggagctcctgggggcgcaggacggggcgctgctggtgcggctgctgcaggcgctgcgcgtggccaggatgcccgggctggagcggagcgtccgtgagcgcttcctccctgtgcactgatcctggccccctcttatttattctacatccttggcaccccacttgcactgaaagaggcttttttttaaatagaagaaatgaggtttcttaaagcttatttttataaagctttttcataaaactggttgtagttgcacagctactgggagggcagccggggacacctgagccgcccgctgtgcccagatccctcaggctgcctgccatcagaactgctgcccggggcttcccctacctcagacagaccctccctgggaggatcagtggggagtgccacctctgcccccagtggctgtggcacgtggcaggggcccctgaagctcagcgagggtcagggcctgggagggtatcattgctggaagaacaggatggggctcaggccagccctagtcgccggggcccacactaaccccccacttatgaattcctcccactcccaactcacaggggatttcccgagaggggacctgccaaagacctcctccaggcctcccatgcttcccgggaagtgaagcttctccccctctggggcaggctctgaagcctcccgatgc

SEQ ID NO: 231752 - DNA, 494 bp, Homo sapiens
acagggtgcagtactgaagtggtgagagtcactacaagaactccagagatctgcagaagatccttgtcatgtttacagtagagtactaatcagtatatgaatatgagggagctacccaaggctaggaaaagaaccactgaaaaggtttagaagagggaagactgtacgcagttctcacaggaataggaatagtgccttttgccacctaccagactagaaaacctcactatttatggggcattgggtacaatgttttaaaagatcttgcatcaatagtgtggaatccttagccctaaacttaaatggtcctgtggttctgtctgacatatcttaaaagcaagacctgaaaggattaaatcgtttccaatttaactgcaacccagaaaaaaagcccaggaatctttatagtaatacaaacatgttcagcacctcacaagataaaattcacaatatatgacacccagtaaaaaaaactagcaggcatggaaacaagc

SEQ ID NO: 231753 - DNA, 487 bp, Homo sapiens
cagctggaccctgtatttcctctgccatccagactgactttctttgggaaaataagaaatgtgatatgaaatcctgagtcccaccaaaaacagttcatctaatttcagtgtgatcaaaatggagtagctaaattcagtctccttcagcattcagtgcaggatttgagcacctgctatgagtcaagtggaaactatgtcaggatgccaaggatgaggagagaaatagacagattattataatacagtacaataacagctctcattgtgtctctctagggacagtggagacagatgaaggaagggcagaaaaagaaaaaaaaaaaaaaaaaaaaagaatttattcttaaatatgaaaaactcaaaggtgagcctagatccacactgtccaatatggtagacactagccacatgtggcaattgggtacttaaaatgtggctagttcaagttgagatgtgctcaagtgtcaaatacataacagatttccaa

SEQ ID NO: 231754 - DNA, 599 bp, Homo sapiens
cagctggaccctgtatttcctctgccatccagactgactttctttgggaaaataagaaatgtgatatgaaatcctgagtcccaccaaaaacagttcatctaatttcagtgtgatcaaaatggagtagctaaattcagtctccttcagcattcagtgcaggatttgagcacctgctatgagtcaagtggaaactatgtcaggatgccaaggatgaggagagaaatagacagattattataatacagtacaataacagctctcattgtgtctctctagggacagtggagacagatgaaggaagggcagaaaaagaaaaatatactgtggaagagcactggagttggatcaatgggaatgtgttgtatgaccaagagttgaagatgtttcaaggagaggcccagcatatacaaaggcatggaagtatgaaaatggtaaataagcaaatacagctgcagcatacactggggtgagggagatgggaaatgtgactgaacaggtagactgaggggatattgggaagagaggtcttgtgcaggttgctagggttttatgtagtagaagacataatacgaatttcacaaggtaactttcagcagtct

SEQ ID NO: 231755 - DNA, 485 bp, Homo sapiens
gtacatttctagccaaggtatacgagagtcagtgtgctcccgccagctcattcttccccagctcatcacctggaagtggttacaggcaaaagatgcaaacagaataaatctctgggtcaccatctggataggagaggctctgaaaagtcatcccatccatggtatacctaattaggttacgctactgatacttgagtttgtgtgttaccataattatcatagtatagcttacactaatctcactaatgtactctctaagcattttatgtgaataatttccttttcagggagatcagttttgggaaagtagtagcaacatgagaggtgggaagagcaaagtattgttagagttaaagacccatgtgccaacacatatcctttcttccctcaaataaatgtctacaccttgtcgaactgccttcctttttacacagcttagctagaatgaggcaagacccttcttctgagtttctgaaggttttatt

SEQ ID NO: 231756 - DNA, 387 bp, Homo sapiens
gagcaatgaagtttaatatagaaaagtatgagttcactgatatggattcaactaattttttacacacattacaactaatttttcagaaactgccatttgtctaattttgatgacataacaaagaagagtatccaccatgatctaaaaaggttattaaaatactattttttccaactccaaatctgtatgtagctggatttccttcatctacttcaatcaaaacaacatacacaacagactgaatacaaaaacagatacgagaatccaactatcttctattaagccaaacattaaagagagttgcaaaactataaaatgatactactattatctacatttttttgttgttttagagaagacagctgtttttataaaaagtatgttggc

SEQ ID NO: 231757 - DNA, 439 bp, Homo sapiens
tttaggtgtgaattattcaaaatgcataatgtcattataacttaaaattataaatacccaaatcaaatatacctacaattttcttagaaacagccaaaattgaaaaatatagtgtcttaaaaatatttttattttttgtaaataaaagatagaaaggcaagcattggcatatgtctttgcacttaaaacacattcttcttgccccactgaaaattaaaagtgtaagatcttttctgttacacaaaataaattccttatcaagatattctattaaaatacctgtcaaccaacttcaaagatccacaaataaaatttgttctggtgttggcacttctattctgaggctacatgatatttgttttccttcatgtaagcttcagtacatcaaaaggggctggggggctagtaactaactagccaactagcttcaggacaaaaa

SEQ ID NO: 231758 - DNA, 421 bp, Homo sapiens
agaaaattgagttgctttttcagaggaggatatcatgtttggatggtattatgtatcaatcaaatgaatcttcatttatagcaaaataaatgtggcttgtctttactcttttaaagaaaagtaaaacaggccgagcatggtgcctcatgcctataatcccaacactttgggaggccagggtgggtggatctcctgaagtcaggagttcaagaccagcctggctaacatggtgaaatccagtctctactaaaaatataaaaattagctgggttcggtggtgcacacctgtaatcccagctactgaggaggttgaggcaggagaatggcttgaacccgggaggcggagatttcagtgagccgagatcgcaccactgcactccagcctgctgacagagtgagactctgtctcaaaaaaaaaaaa

SEQ ID NO: 231759 - DNA, 450 bp, Homo sapiens
cagtgttgttagagatcagaatctctctaatgtgtggacagttgaatatgcacttgaattactatttattggtggcctggttccagaggctgtgtggttggcatataaacttggagactggaagacgtctgtttcaattggtgtggctttccagctgttctgtaaacgtgatagcaatttcatgaggtccaagaaaaagagtctgaatctaccactccgtatgactccagcacagatttttcaggaaaaactgcagtgtgttttaggtcaaccagcctctttggaagcaaaaaatgaaatgggctcaaaatataaacagtttacaggtgtgttatgtatgtatagtctgattcgtgtcagattaatataaaccttataataccttaaaaagtttatacatgtctacaaatgtattaacactttgaaataaacttatcaaaaatgaaagta

SEQ ID NO: 231760 - DNA, 513 bp, Homo sapiens
tcagtctcccaaagtgctgtgatcacaagcgtgagctaccatgtgtggcacttaaattttcattttctaataatttattgtatgttataaaattatgaattgaagtcatgatgaactggaaatttgaaaaatcaccatagatggtttgagaagcactactcttgctaacatcctcactctctcctccagaaacacttcttgaaggtataccttgtttttttttactactacatatcctatttagtcctcaacccactccaatctgaattatgctcccaggacatgacaagttacctcatttgctgaacccccaatccatatgctgaagtcctaaccaccagtaccacaagatgtgactgtatttggtaattaagattaaattaggtcattagggtgggtcctaatgcagtatgacctgtatccctgtaagagaaaatttggacatggagatggagaccccagacacatgcacatgcagagggacaaacatatgaggacacagcaaggcggccg

SEQ ID NO: 231761 - DNA, 393 bp, Homo sapiens
gttttaaacagtagctcccaaatattagatgtaaacaagtggttagtgcactatggttggtcacagtagggaagaaatgttaattccagtttttcgttttaatattaattaaggataagggggcctaacatttacatgtgtagataggtgtttcacctgttttctcattttacaggaacttgaggtttgtcgtagtcccattttagtgtatgtagcactctcccatttccccatatggatttcaaagaacttaagtcttgtaacttccttatttatttatatgctctaacttcaccgtgtttcaaagtggagttagcttatagcagtacagagtcagggagttgaggaagggaaatatatttgaaggattcagaaaaatacttttttttttaa

SEQ ID NO: 231762 - DNA, 788 bp, Homo sapiens
ttttagaatgctctttttgtgtctcactcctctcccccttgtgttctttgctgttcccactctcagtgcctcatgtggaaccatattgtctcttccctacactagggcattaatttctaactgttctccccacctccagggtgtgtatggccagattagtgttactgaggcatatatttgctttctcacttcactgaaaatcttgactggtttcggagtcatagcagctcaaactaaagtccttacaaaacatactatagaagggtttgtcataacctgactacagtctgtttctatctttaattctcattcctttccttcagtccagccaaactgtataaatgccttttcccatggtccttctataagttggtgcaaaagtaattgcagcttttgccattaaaagtaagggcgggccaggcgaggtagctcacgcctgtaatcccagcactttgggatatgatggtttgtgactggtgtactttctagtgaaaatacttaagaaaggtgagagacattagcatgtacacaatattccactttaaaggctgaggatcacgaggtcaggagatcgagaccatcctggctaacatggtgaaaccccatctctactaaaaatacaaaaaaattagctaggcatggtggcaggcgcctgtagtcccagttactcgggaggctgaggcaggagaatggtgtgaacccggcaggtggagctttcagtgagccaagatcgcaccactgcactccagcctgggtgacagagcaagactctgtctcaaaaaaaaaaa

SEQ ID NO: 231763 - DNA, 277 bp, Homo sapiens
ctaagtcaaaataaacatgggatccaagcagttgcccttttaaaagacttcgtttcacacaatgtagataaaacaacctccaggattgccagataaaatgcagggccagctaaatttgaatttcagataaacaacggacaattgtttagtacaaatatgtcccacgtttcagataaacagtgatttttttttaactacagtaagtttcatgtaatatttaggatatatttacaacagagaatcatttcattgtgtgaaataaaataattcaaactta

SEQ ID NO: 231764 - DNA, 654 bp, Homo sapiens
ccttaggtattgtggggatgtaggtaaggatctctattttatgtatagaaagactcaagcaggctaagatacaaaattttaactctgagtcatagctatgacaaaactctcaactttcattgcagtattttaatttgctagactaactttccagtaaactaactgaatttatatccacaaggaataatgatggcagatgagatgaagttatgaacctgtgagtgctgatgattgatgtggattcctttgatttcagtgcattgacatctgctttcatgtgttggcatcctgttctttcctgggtttgtctaccaaagtgagaagctgaaatcaatcatgtctatgtaattatttttttcatgtagcaaataatgatatccagtgtatattattgaatatttgttttatgatggtgaagcacatcataattccaaattgcagtggctcttcttcaaaaaagacttaaagacgattaataaacatgtattagtgacccaatatctaaaagtttcactgaagcttcttatcagtagaattcatcagttcttcctaagcatcgctctttagaatatccttttgccaacgtaaacgttgataacatggggatggtatgggagttcaccagggaagaacccaggtaatgttgggccagct

SEQ ID NO: 231765 - DNA, 495 bp, Homo sapiens
atgtatgttaggcttgaagatttcatgtcagtaggcagtcgtgtaaataggtatgggacttaggtgcaatattttgccttgaggtggggatctgagaaaaattaaatagaaaaaagagctaaagatgaaatcctgtgaaataagatgtacgcaaagaaaaagggggcttataataggagtctgaaaaaattagagagttaggaaaacccagaagaaagtagtgtcatggaagacaaggcgaaaatttccagagggaggaaatattcaccgtggtcaaataatgtaaagcaccctttggatttagcaaagatatcagtgctaatcctgataaaactggttttaaggaaggtggttgttgaaccaaacttgagtggactgaggaatgaatagaaaacgtggatatatgtagaaagctgaaactggatcccttccttacaacttacacaaaaattaattcaagatggagtaaagacttaaatgttagacctaaaacca

SEQ ID NO: 231766 - DNA, 285 bp, Homo sapiens
cctctgactccctagttcaagtgattctcctgcctcagcctcccgagtaactgggattacaggcacatgccaccacgcccagctaatttttgtatttttagtagagatggggtttcaccatgttgtccaggatggtctccatctcctgacctcgtgatcctcccgcctcggcctcccaaagtgctgggattacaggtgtgagccaccgcgcccagccgggaaagaagtatttaacattttcagcttccatagtggagggtggcacaacagaggaggattagaaat

SEQ ID NO: 231767 - DNA, 596 bp, Homo sapiens
cccaggaggcagaggttgctgtgacccgagattgcgtcactgcactccatcctggggggcagagcaagactccgtctcaaaaaaaagacaataagtaaaagaaaatgtaatgcaaactagaactactgtttcacacttggagatggttttccaaactcgagcttaacgctcttacttttggcctcctttccacatctcttccctcatctttttctggatgtaagacttaatctcattgtttatttattatttttttttcaggtggttaggggaaagcagaaacacagtttgcccccaggcggggttctccctttcttttgacacctctgcctttctgagaaaggaaaacgcctaccaggagatagtgtccagctaatgtcactccagctctctcacagaagtttccttttatctctcagatcttaagaagtcagagtgcatggagcctggaggtggacctgccctgccagttagggtcctttgcctcttgcctgccaaccctgtgtttagactgactgcaggagttggcacaagacgattttagccttaaggctaaaagttaaggaacttttggggagggcctcaattgggatgga

SEQ ID NO: 231768 - DNA, 438 bp, Homo sapiens
gagagcgccagtgcctcgctcgctcttggggagtcgaagaagagaaagaaccgaagagacagcggcggcggcgcagagcccggggccgcgcgatgaagctcccacatgcccgcagctgcccggcccggccggcgagctaatcatccaccccacgggctcggggttcgccggcccccgggacgcagccctcggcggccgggcgcccgctctgtctgcgcgccccctccgtgcaccggggaaggagtttgtgtggctctcgctccggctgtccgcggaggttgcgggcttgagaggggaccctcggctgggagagagcctcgggaggacgaagaggaggacggtttggcggagaagccacccctggccctcgcggctccccctacctattccatcgctcccgctccgaggcggaaaggggaggacgtggaagaagaaaaa

SEQ ID NO: 231769 - DNA, 469 bp, Homo sapiens
ctggcaccgagaggctgcatgggcgtgtgtagcatgtgtattttcagagcccgacacttgaggagactgttgctcaatttaagaaagcacagctattggaaagccaggaaacagacccagagaggcggatgcatgtgggagcaaagagctttgggcagcctttaaggtaggcattggcgtctgaaatcatgttattgccttttgtttatttgttagatggattttgtattggttttatgctttgttcggtttagagaattttcctttgatggagctgccaatatcaatagatttggttttgaaatcctcgggccgggttcataggataggctggagcccacggtgttagtgtagatgcctcaaagtcagaagagatggatacaaaactggtgatgattttcaaaggagattcacttgcaaatctcactgcaatggagacttgctgggagtcctggtgcctgctgaggca

SEQ ID NO: 231770 - DNA, 216 bp, Homo sapiens
acaacaggaaaagtctcagatttttcttggctgccataaaagatcattagccctttcagagggatttctctgtgacaaactgttctgggaagcaattgatgaggattgagtagttgtcaggctcttagtgccacagagttggttaatactgtcaccttcgacagttttatcaacctactctagaacttctgatccctctctctctacagctttaag

SEQ ID NO: 231771 - DNA, 147 bp, Homo sapiens
ccacccccactccccccaaaaagtcgctcccgggctctgtctgcagagagccagggtgagagcgggcaaggcaaaagagcgacctcggtcgtgggcaagtagcttgtttttacgtccctcaataaaatttttatgaggatcatttga

SEQ ID NO: 231772 - DNA, 447 bp, Homo sapiens
atatatatttattatgtactgataatacataacaaaggtgaaccctcccctaatgaaactgtattcacaagtgaacacacagagatttgcacacacatacacaaagactggttgtgcagcttttctcctcctgagccaggacttgtcaaagacaagcaaaaggaagttgttagagtaaaaaataagagaaagctagtatttttaaaaactccttactgtggaaaatgtcaaacagaagagcagaatgaatttccagaacttcataaattgtcaacacttttcagtcttgtttcatctatcccctaccaccatcttccagaccttattttctttgctagaatattttaaagcaatgggtattacatttaaagtttgacttgtttaacctggactacttttaggtaaggaaaattcagtatttcttagaaaaccctttccccaaccaaa

SEQ ID NO: 231773 - DNA, 330 bp, Homo sapiens
cagcaactttcaaatgggtctctgctgatacaaaacatacttcattccagacaccacaagccagatgagggactttaccaatgtgaggcatctttaggagattctggctcaattattagtcggacagcaaaagttgcagtagcaggtcctacttagtctagtctcatcttggaagactgatcagaataactcattttcatcaataacaggacaattgggcagaatcaccactccttcatgcactctcctagtgagggtctgagaaagttgaaatctgaaagatgtgattttgtcaggtggtgctataaagaattacatctcatagatatg

SEQ ID NO: 231774 - DNA, 430 bp, Homo sapiens
tattgcttgtgaccagtatcttgagaactgtttttccatatttatttggattttttagttgtttcaggcagatgtgtaaatctgtttttactccaccttggccagaagcaggagtgcttatcattcctcaatttaaaaacaagaaattggctgggcagggtggctcacacctgtaatcccaacactttaggaggccaaggcgggcggatcacctgaggtcaggagttcaagaccagcctggccaacatggcgaaaccctgtatctactaaaaatataaaaattagctggccatggtggtggctgcctgtaatcccaactactcagaggctgaggcaggagaatcacttgaatcaaggaggcggaagttgcagtgagctgagatcctgccattgcactccagcctgagcgaccgagcaaggctccgtctca

SEQ ID NO: 231775 - DNA, 496 bp, Homo sapiens
cagaaggatcacttaagcctagaaatttgagacccacctaggcaacatagcaagaccccatctctacaaaaaaagaaaaacttagccaggcatggtggtacatacacacctgtggtctcagatactttttgggggctgaggtgggaggatcacttgagcccaggaggtgaaggctacagtgagacacgaatgtgccactgcactccagcctggctgacagagtgaaagtgtctcaataaaccaataaataaatgctccaggaaaaaacagccacattcacacatccagaattgagcctcctgtatgcactggcctgagtattccttgcctgctgttggaggggaccctcgctgtgttcaaatcctccacaaatccatatgtgagcaaggaaggccttggaaactcttctcctttgttaatttccacaggtttctcctgtcaactcccagcctaaaactttgaaatataagccaatttgtttattttttactttgag

SEQ ID NO: 231776 - DNA, 345 bp, Homo sapiens
ttctgagtgctcagtaaacaaagaattattacctgcctaatcccaaaacccctggcctgtagacagtgctaataagggctgctacttcatactgcacaatgcctgcctaggaaaagtcacacctcctaccattgatgggattttttgggtgcctattaaaatgtcagttgatcttagagtggaagttctttctacatcatttagcacaacctggaaggtcagattaatgtggcagccagctttcccttggcagttacttccttattacttccctgcccctcacttgttctcagaaatgttacatcacaataaatgtcgttaaaaagagcaaacaaaccactgcta

SEQ ID NO: 231777 - DNA, 352 bp, Homo sapiens
ttatttgtggtgactttttgtaggaaagatggaggggggaagtgttcatttgggtcagatgaataatggggtgtgtctgctctggttttggctgatgcagcctgtttcattggctgtcctgtagttgacactttgtttcagaggtgcagaggctctctccctctcgtcctgaaaagtgatttagtcggttttcttctctattatccactctcctggtagtagcagtaacaaaggttatttagttttgttggtctttttgtgatgaaaccatttttattataggaatttaaaggttgtcagtatgcattcatgcgtagacacttatgtgaaaatctggggaggacagggaata

SEQ ID NO: 231778 - DNA, 413 bp, Homo sapiens
ctcaagcgtcattttaaagtcgtttcagttggcgtcatccgtcatagctaattatcatgtccgaaaatcttttcaaagatggcccacttactttttggtggccagactcacgtgttgcagtgttctggtaattgattatgtaagttacgttgtgatggagggaacaccaaggttttgtgaggcgcgctgcacagtgaggtcaggcagtgcatggtaacttcattatggcttagacgtctaacatagaactgcaaatgtgacatgtaaagaagaggtgtaatctgaggtctagaaaaaccagttttctttttgaggcagtaatgttgacatctcattgatttccatgttttgttctattattggattttgagggaaaataaaaataagttctttttcatgacttttatttataa

SEQ ID NO: 231779 - DNA, 158 bp, Homo sapiens
gtattactgactgttacctctggtcaagtctttggcttccatcagccggatctatttttctcctgacacttccttggggttctctctgaaggttattaataggcatggaagcatggctttccaaatagcgtcaataaatgttagaagccttcagggga

SEQ ID NO: 231780 - DNA, 910 bp, Homo sapiens
accacgggggaccttgtaattgggaggcaggagagttggggcagaacaaggagtgcaggaagagaagccaaggtggagtgatgtgatagaaacacacggaaataaataatctgctcttgaatgacatctgggttaacaaggaaatcaaaatggaaatttgaaaattctttgaattgaatgataataatgagataagttatcaaaacctccaggacacagaaaagcggtcccaagaggaaagttcatagtgttaaatgcctgcatcagaaagtctgagagagcacaaactgacaacctcatgtcacacctcaaggaactagggaaacaagaacaaactaaatccaaacccagcagaagaaaaaaaatagcaaatatcagagcagaactaaatgaaattgaaacaaaagaaatacaaaggataaatgaaacaaaaacctggtcctttgaaaaaataaaatctgtgtagaccactcacaagattaaccaagagaagaagagagaagatccaaataaactcaattagaaatgaaactggagatattcatccaccaccacagaaatacaaaagatcatttaagactactacgaacatgtatgtgcacaaacaaaacccagaggaaactggtaaattcctggaaacacacaactctcctagattaaatcaggaagaaatagaaaccctgaatagaccaataacaagtagcgagattgaatccataatttaaaaattgccaacaaaaaaaaagcccaaaagcagatggattcacagctgaattctaccagacattcaaagaagaattggtaccaatcctactaaaactattccaaaatattgagaaagaagagatcctcatagaatgaagccagtatcaccctgataccaaaaccaggaaaggacacgagcaaaaaa

SEQ ID NO: 231781 - DNA, 632 bp, Homo sapiens
ctcattatcatgcatttcttggagtttccattattccagccagagagagaacatttaccattcagcagatggctgcatatgcacatttaagacttttttgagaggatacagtgcaccagggagactactgttgtggctaatgactatgaggatgataataccaagagtttggagtatgccccttagccagggtccccatgaaccaaaccaactgaaatcatttagatcaaataatgagccagatggggaatctacctgttttagccaagcagcctgtttgttcggtttatccatgtgcaacaagaagcattagcaactgtgcagattatttcctgttcggctagaaggtggcatttctgttacctaccatcccatgactaggtttggcatgacagatccgtttttttcatcaagtctctgtagaagctactgattgtgcaattccggcaatgtagcattatcctgccaagtgaaaaaggtaggcataagcaaggatcaagaggagtcagagcctcattatgatgaatcttgttctgatgtcttgggcctgtgattataacgtccggtgtttgggtgaactctctgtggcccacatatcaggtatgagacctgtccctcattatacatgggtt

SEQ ID NO: 231782 - DNA, 528 bp, Homo sapiens
agtgttctacgtgtcctctctggagggaggctgagctggagatgggagggagtctttgctgccagcgccctgcagggtaatccaaccatccttggtgacatcatgttttctgagtggatgtttgcttcagaagctgcaaaataatctcaactttcagccccaacttctccccaggagggcagcatcctgtgaatttggccaaaacggaactcacaccacagctcattaagggagcaatcagcgagggtaccaaaatgctgcctccctcacactttccaccctgcatcccccatcaaaactctcatagcctgtgtctctctgggtgccagagggagagaaaatgcatgttccaatggggtattgaggaagggagaggagaaagaggggcaggtcgaaggagcctggtagagaaagggggtgaccccacctggctccctccagggctggggtctcttgtgacaggcactgggctgatggaaagcagctgcgggaccttggcagacccaagtggggccagctggagagaga

SEQ ID NO: 231783 - DNA, 414 bp, Homo sapiens
tcatggggtgggggatgtggggcctgcctgctcatctgagcactgctccctgagggtgtgatctgcaggcttcctgaaggagggctgtgagctcttctgcgaggccctgagcctgtggaacatagctgaggccaagcccatggggatttgtgtctacttgcacctccttgctcatctcagtacactacaggtgactgtgccgaggtgggccttgagcatcccctgggctgtgtcagcaaacggctctgggcctggcctggcattgagggatggcaaaaaaggagcctggggttgcattgtcatcccctatggtagcataaaatgagagagtccagacctgcaggactggaaccctaacaaaggggttaggagactgctcactttccctcaggaacccatgtggaggagctgagg

SEQ ID NO: 231784 - DNA, 632 bp, Homo sapiens
attaaatgaatttagaaaaatcacagagttcaaggtcaatatgaaaaatctctgtttatataccaataagtgattaaaaatgatattttaaaaattatatcattaacaattatatcaaaagaccaaatatctagaaataaattaacaaatgtgcaaaactctacacaaaaaatatgaaacattatttaaaaaaatttcaaaagacctaaataaaaggaagacattcaataccataaacatgtatattatttttaaattattctataaagagtatctccaatactgaaggaaataatgtatacaatggcccatggtccatttccaagacgaagtgccttaaatagacttacgttagcaaactacagaagaaacagaacatactaggcccctgcttggatagcccatgcctgcttgttggcctccccctcccccactccgcctccacaaccctgtttccttgccttcaccagaaccaaagaagtttagtctaagataaaagtttactagcctgcaaaatagttcgttttgtctgtttttattagcctgcccagctacttagctcataagtaaatacttgaagagcccctgagctaactaggattgcaatgcattgtgggctgcaacaaaatgcc

SEQ ID NO: 231785 - DNA, 340 bp, Homo sapiens
actgttcatggtggggggacaaacgtgggggctttcagagaggaacacagtctctgtggtctttttaatgtgtggccttgtcagggtgctaattggtgccaatttcactggcagtaatggaggaatctgttagcagaaggaagactttgaagtctaaaagcattacagattagttccctagaattttcctacgggaagccttatgagccaagtccactcgaaggtaccacaggtttgtaaggtagactttccttctgaggagaaattcccagctattcaggtgttcagcctgtaccaagagaaccaaaccagaaactctaaaacatcactgtttttctga

SEQ ID NO: 231786 - DNA, 478 bp, Homo sapiens
caggctggcacgatcatggctcactgcgcactgacgtcctggcctcatggaatcctctcacctcagccttgtgctttcctttatatgtaaggatgacaccacacagcatgcttaattatctacttattgctgttggcttttatttggggtttagggagtagatcaatcaatcacattctgtagattaagttttggttttctgttgttgggtatttgttctttggggtctttgtgtttgtttatttccacaaagaggcctgtcagtagggattggagtcatttcaccaactgatataaccaattctgatggaatttttttaataggattgaacttaaatattctgattcattgcattataactactgacttacaaggttacaatttttattcatgaggaattgaatggataaactattgctctgctctagatacttgccagtgaagtattaaatcttttcattaaaaaaaaataaagat

SEQ ID NO: 231787 - DNA, 388 bp, Homo sapiens
tagagacagggtcttactatgttgcccaagctggtctcaaactcctgggatcaagtgatctacccacctccgccttccaaagtgctgggattacaagtgtgagtcacctcacctggccgataatgtcgggtccaatctccaagaagactttaattactagaaagccatcaggtttacaatggcagatacaagttttctaaaattccaattttcaccccaaagctcaaattttatccttagcaacaaatactgttcgttttttctttgagacatcactcgttttggacaaaacgcctgccacatgctgagtctgaaaactgtcctccgtctgttgttctgtcagggacagacagcgtttccgagaccactcggctcccagctcaatccc

SEQ ID NO: 231788 - DNA, 384 bp, Homo sapiens
agaaacacttggaaaagtgaatgatacggactgtgactccttagtgttgaagtctagcattggtggattagtctggagggtagagaagacaggctccacctcatttctgtgagttgtagccacaacagctctttgcctttctttcatatcctaatatttacagtccctttcctggctggaaggcaggtggtcaggtttgaattctttcaacaggtatgtttcttatgtggatgactggtgaaagtgtaagctgcgtgtaatgtagtcacagattcacctattccatgcaagatgttcaaagaaaatataagttcattatttcctgtaattgatctgatattctttgtgaaatacatcaccagcgtgggttggtttcacttttaa

SEQ ID NO: 231789 - DNA, 484 bp, Homo sapiens
tatgcaaacaaatggatgtggctgtgttccaataaaaccttatttacaaacagatttgaatttcatctaattttcagatatttgtgaaatattcttttgatttttttcaactctacatgaaagtttaaaaatttctcaacaggctgtaccaaaacaaaactcaactaaaaaagcagcaggcaggatttggcccatgggccatagtttgccgacactcgtcaattgaaagggtattctccaaagtccttcccagaaatatccactaatagaaaaccatggataggagcccctctgcttattcttctgctacgttgggtcctattcctagaggaaattcatgaattctattgattaaacttttctttgtttagatcctggattctgctccctgggatacagatgaatgcttagagcctgcagtgccattcgactgtaactctggatttaaagtttttaataaaaagaactgggcatagagaaatct

SEQ ID NO: 231790 - DNA, 411 bp, Homo sapiens
ttccatagcatcctagataggtgatcattcagcctccactgggatgctcagagtgactgctaatcaccttacaaagctacttgctccatttttacccagctgtgttggagagagcttcctcctttaatcattaacatagtcatttattctaaatcagagcttgtgttgccctctgtgtctccttctagagatgttcttcttcaggtggagcctcacctttggaaataaacactctgcctggccccatcccactctccaccccccagttttgggagagaatcgttttcttagagaaatctagggaagcagcagcattagggcaaaggtgtggtaaaattcactcattcattcagcacatgttactaggcacctagtcagtgctaggaactgggcgtagagagtttaaaaaca

SEQ ID NO: 231791 - DNA, 454 bp, Homo sapiens
cagcacccagaattaatgccaggggtcagtgacttggggattgcatttctagagttagcaaatgctgacgaaccattcctgggactttgacctcctcaggctctaccaacagcagacggtcagcaagacgccacatggagcatggaggacagcgggtcatcagctggcagagcgagccccgaggcccaggccacaaaaccacactgggagtttacagagaatactgcctccactgtcagcggcttccagaatcaacgtggagtcagcttgtttactagaatttcaataatgaactctcaaactccacatctgactatcagagagagtagatcagaaatatctaaaatcaatcatctaagcttccaccttaggaaactagaaaaggaaaagcagttaaatccaaagtaatcagaagaaagaaaacaataaaaattagagcagaaacaataacatt

SEQ ID NO: 231792 - DNA, 464 bp, Homo sapiens
atagagtgtaatcccatttcaagtctgtcagcattcctttgatgattacaaatgagtcccttttcccctgcaatgtgggggaataatctggataaaataatcctttttgtctgcaaaggcccatgcgatgcgtactcgtgacagctttcagagtagtgtttcagagtctgagagaagagcacactgtcctaccaagttatctcctttctttctcttgacttagaagatttttcactcttttcatgttcagtggcttccgaaattctcaggcttagaaatcataaatcatcgtactgtactgaggaacaagagaaacccaggtcaccagctccttttccctccctgcctgctcaacaggagatgacaggtggaaatgggaatgtatgatcttatctagaagtccaatttgtacagctttggagggatatacttgaagaaattcacataattttacagtctcaagt

SEQ ID NO: 231793 - DNA, 227 bp, Homo sapiens
tcccaaagtgctgggattacaggagtacgccacagcgcccagccaccaaattaatttttaaagatcactatgatcgctgtgtggaaaatgagctgggagtggtggtggatacagtttttgtttttgtttcagtctttccctactccatgaaacatttgcgctatatatgcggccaaatggaatgtttctcttttctcccctcctcttcctcttgggaagtcaccaaa

SEQ ID NO: 231794 - DNA, 426 bp, Homo sapiens
atttcttttactccccattatcctgaatattagctttcaatgcagtcactatttgacatttccaaaggctttgccgcattgtcactgcccaaagacaaacaaccactggaaatgatggctttcctgcttgaaacgaagggggccaggtgcagtggctcaagcctgtaacccctgcactttggaaggctgaggcaggcggatcacttgaggtcaggagtttcagaccaacctggccaacatggcaaaacctcgtctctactaaaaatacaaaaaacattagcagggcatggtggtgcgtgcctgtagtcccagctacttgggaggctgaggcaagagaattgcttgagcccgggaggcgaaggttgcagtgagctgagatggtgccactgcactccagcctgggcaacagagcaagactgtgtctca

SEQ ID NO: 231795 - DNA, 304 bp, Homo sapiens
gtggaccattccctagctctggggagcatatctgcctggacaaaagataaccagtaggtaaatcttgtgactctgcatgcctagaattaagaaatttcttaattctaagctaacacaattgagagcttgactgttaatagttcttgagggtgaaaatcatgatggtatcatggatggtattactgtcttcaagctttcactgtcactgtttagaaatttaatgtcattctgattctacatcatttaaatgtgacatgctttttttttgagatggagtctcgctctgtcacccaggctggagtat

SEQ ID NO: 231796 - DNA, 209 bp, Homo sapiens
agtgtaatctgatttcacatatgaatcaagaaacattattttagtgtcatgattttaaaagtgtgagcacatttatccttacatcttttgctactgctgttttgaatgcagcagtgcgtaatagctttatgaaaggaacctgattttgatctcttcgctttcacattcacaaatgtgaaaagtgagagtcaggtgtaaactaaagtttt

SEQ ID NO: 231797 - DNA, 344 bp, Homo sapiens
ccaaggaacagcagtcaggctgaactaaataacctgaaacatcctggaaccaagcacctaaaactgggtgctgtgtgaaatacagcaaagtgtaatgctctgcacaaaagtaagagggaattcccaggcatctgaagaagagaagagagctgaaaatgaaggtgctaaccattgtgagcctctgtgtggcagcataaggacttgagcaaggtaggctggccggtaggggtcacacagaaaaggaaacaaagccttacacctggctgggaggggctgagagctgacgtttccatggaaacctggaagacagaagcctaaatacccttaagtgtataggtgaactg

SEQ ID NO: 231798 - DNA, 373 bp, Homo sapiens
attcagaagcctgaagtacatgtgaggagagaagatctgtgccaaaacacagcatcatgaaatttctgaacactggaggcaaaaatcctacagaatagcaaagaaaaaccaaggttacactcaatcaggcaccaacaaggtaccccaattctcagcaacagtggtggaagctggaaagccattgagcaaacacccgaatattctggggggaaataactgctctctagaattctgtatccagacaaccatcaacgaagtgtgcgtgcagaataaaatgttttcagacatggaaaatctcaaaattgtgacttttccatactctcccaggtggttactgaagaaaatcccccgccaaaaccagagtaaacgagga

SEQ ID NO: 231799 - DNA, 419 bp, Homo sapiens
actaaaaataatttaaccattttttattgaatttaatttcaataataagaggaaactaagatgtttaacatattttctttcacttcccccccaatgactcataataatgtttaagtcgaaataattattatctgagcatgcagagacccctttgcagagctgctgttaggagagaaggccaaaggataaatgtatgccttagggctgaaggagaaccattgcctactcccccttagctgctaccatcactgcatcaatacaaggaatacaccagtcctaggagtgcccagacataatctataaaaagatttatcagctaatcaaaaggctttattaattaaggttgtatctacttacttaaaacatggatactgcctaaatgtagcatgtccagatcaaatggcccagggtagaaagaa

SEQ ID NO: 231800 - DNA, 493 bp, Homo sapiens
cttcgccgtgggaaggtgggaaagaaaaataaatcaggagtcagaaacgtaaaaggcagcctgcatgtctgtacagtctagagttgtaagctgatttattttcttactcattttgagtaaactgccaccactgccttccaatgtaagcagctaggggcaaatactgagtttgagtttctgttctgcatacaaactagcacattttaaatgtatatgaagtttaaatagcaacatcctattcttatttcattggaaaaatccttttatattagtttccaccatatcttagactctgccagatcttgccctaagaaaaggtaaagtaaatgtgaattgaaaaatagcaatttgcggcctggcacggtggctcatgcctgtaatcccagcactttgggaggccgaggcagtcagatcacctggtatcaggagttcgagactagactgaccaacatgatgaaaccctgtctctaataaaaatacaaaattagccaga

SEQ ID NO: 231801 - DNA, 324 bp, Homo sapiens
gggctagggaatcagggcaataggatgttattgcttaatgtgtacagagtttctgtttggggtgatgaaaagcttttggagacagtggtgatagttgcacaactttgggaatgtaatcagtgcccctgtagtctacatttaaaaatggtcaagatggcaaacttttaaatacatattttaccactataagaataatgaggttggctggatgtggtggcttacccctgtaatctcagcatttgtgggaggccaaggtaaaaagactgcttgatgtcagtagttcaggaccagcctgggcaacatagcaaacctcatctctactaa

SEQ ID NO: 231802 - DNA, 761 bp, Homo sapiens
actttgtaagaaacaagaacaccattctccaaagtagttgtaccattttacattctagctgctccatatatccttaccaatatttggtatggtcacactttcagacattctaatagccgtgcagttgtttgttacgtgggttgaagtttgcgtttttagatatggatatttaattgctccagaacgacttgtcaaaaagactgttttcttcctccatgaaaaagcctctgaaacattgttgaaaaataaatttaggtctatttctggacgttcccttctgttccattgactatttgtctatcattacaccaatgccacattgtctggattactgtagctttgtaataagtcttcaaatcatgtaaaggtcttctgatttggtttttaaaatccacgttggtttggctactctagtccagtgcttttccatataaatattagaatcaacttgactttaaaaaaaacttctgaaattctgactgaattacactaaactatagattattttgagtagaatttatatttaacaatacagagtcttctaatctatgaacatgatatatctcccatttgggtcttcttaaattttttcaacaatgttttgtagtgttcagtgtatacatctttggtctggtttatcccaaagtaaatactttgttatactttttgatggtattggaaatcgtatttttaaatttctggttgtttcttgctaatatagaaaaatacatttgagatttaaattttttattctgtatgct

SEQ ID NO: 231803 - DNA, 493 bp, Homo sapiens
aaacccaaatccacctgaccccaaacttcatgtatcttgaactacaggctccatctcactgttcacactctcacccacctccacccatcaaaggtgcctctagacctttgcttgtgttgtttgttctctgcctgacatgcctccccctcagtcgctctcagttgaaacctggcttagtcatcaagtgcctgctcagcagcaagacctcttctcttcacagagcctttgttgagccccaccactggaattaacctcttccttccagaccagtttggtggtgcccctaatccacagtttcccaacctcagccctactgacactggggctggataatctttgtcgtgggggctgtcgtgtgcactgcaggatatggagcagtacccctgctttccacccacgagatgccatggcaccctcctcaagttgcaacaaccaaaatatgtcttcagacattgccactgtcccctagggtactaaatcacctctatggaga

SEQ ID NO: 231804 - DNA, 544 bp, Homo sapiens
gtttttatactcttggtaaaagatgaagtattgaaaattttaaaatgcccccaaaatagctccaaatattagcttatctctttagtttatggtaaaacgatgttattatgagcactaggggaactgaagctttccacagtggcttctgtctggtaggactgagccagccaggcaagcaaccctgagaagaggaaggagtaaattaaggtcaaacattaaactggaggaatgagtggaactgtaaaaactagctatacgcagcatttccaacagaaaactgttgacaaggcgtttaattccactgaaatttaataatctattgattcatatttgtacctcttttagataattttgaaatcaaatttttcatatatatgaatgtaaatttatttcattcccttttaaaaatatttaaaaataatttataaagattgactatattcagagtataaaatgtgattatttgatatacattgtattatgactaccacaatcaaattaattaatacatccaccatcactcatgatgtagttaagatccctg

SEQ ID NO: 231805 - DNA, 198 bp, Homo sapiens
taaatatgacttttttttctctccttaaagcacagctggtagatttctccattactccctcagctaagatgagcctagacaagtatgttttaatcatttctttaactgacaacaagaaagatgatttgataatttgcctaaaatgagcagatgctcaggaggacacgtctccatcctatgtcccttctgtctaatttc

SEQ ID NO: 231806 - DNA, 405 bp, Homo sapiens
cgcctcaaaaaaaaaaaaaaaaaaaaaagaaaagataactttgtgttatgttaaatcacaaaatttgtggtcatttgtcacagtagacatagaaaactaatacagctatattggattatgtctgcttccagtcaaataaccaccatctttgattcatatgctagttttttttgttgaagtgattgaaatagcttgctttggtgtttaggccagactttaatttagaaatttatgataggcattttaattaatattctttgatttttataaaggaacttcctattttgttttgtgacattaagggccacctcagtaccagatactaattgttgtaagtgagagatcccctagaatcacctgtcaaactctttcattttttgaagtgaaatagcacatctccagaaa

SEQ ID NO: 231807 - DNA, 260 bp, Homo sapiens
cttctccatgcagcgcaatcccaggctctgcagcttcaggttggactctccttgccaccttgccaccacttcagagaatccattaaatgtcttcatgaccaaccgccacctcttgccaagcacaaagctctccatgttagccagatgttttgacgtgctgatttgccaagcatggcaaagcttgacaaatcttcctctgaacaccccaacttctactctttcgctatgtaccacaaataaagtgctaagagttatgaaac

SEQ ID NO: 231808 - DNA, 901 bp, Homo sapiens
aaattccttgctgctgcaaaagaaaaaaaaatcaatttctggttgcttcctgtctttaaaaaaaaattgttctttcatttacttttctctaccctattcctccttccccactttgccatactcagtacgaagaaaaatctagagatgactcaaaccccttaaagaacacagaacaaaggcaccactcaccccatttgggggtgttctgttttctttgtggagtttcaagagtcatgggcagattcttcttaggtctaaagttctgctttcctgtattacattacctcacctctttggcttttgtgagtagcagagattaccttgtactgtgagaggattttaccttgatgtgtgtactggcggatgagagctacaaagttaaagctgactgaggacagtctacaggaagcagtcttcactgttttgttttttccacctaggaagttgtttaggatcctaattctaattcagaggtgcattctacagagtcttctccattgcctttcctctcaaaattaatcttgattggcttctctgggcatttgcgtgaggaactgaaactcattttcatagataaatgagagaatgagtttcctcagctccctaaagggcattttgcttctcccagctgaaaggctcccctggattactaggggctaagtgggagtgtctagtgggttgacccccagcaacgtgcagcagccctacagggaatccccaacaaaattagttttaaaaggcttgtccaagaaatgaatataggagctggtcattccatgctttgagccctcctggaggtgctagacctctggagacaaaaatgactcagtggataacacgctatggagtcctgccaataaccagcacacttcaacccattccactaaaccctaggccttta

SEQ ID NO: 231809 - DNA, 539 bp, Homo sapiens
tgagagtgcatattcttcctgatacaggaactgtctgcggactcgtttctaaagcaatggcccagacacactcccttgtctacagagtaggaaatttaggtctgacaaggttctctgtctttcataagagagacagaactggcagcctggcttcagagctgaagatacagatttcagtagtgacccaggtcagcaggaaagcaagatttgcttggttatgttgtgatgtgcagctcagcatcacagtctgcctgggggcatataggatgctagtctctgcttttccacttagtggcaggatgctccccagccaggttgcttaacctgcaaacatccctgtttcttaagctacaggatggtgtagagattatatcctctacctcccaggaatgttgtgggaaattcatgagatagaaaagtaccagcgttcaggaagggtgagtccccacagctccgtgaggccagagatactgcccttctgcgggactttgttacaatcaccctatgacaatgcacaaataaatggtcattcaattaca

SEQ ID NO: 231810 - DNA, 589 bp, Homo sapiens
tccacctcagactcaaaaatcttttttatttctcccattccttaagttccttcaatgtagatggattgcttttggtcaattgcatcaattgcattaatctgtcacagagggtctatcatgcatggccattgtcatggataaagtacgttaattactttgctcagtgccttgcccttagaaagtgctcaggatatcttagttccctcctcccagttcattcctacttttcctgaggcttccgtcttgcaatttacgttacaccacaggagggaatagagtaagggtctatcacctccatgtaagtgagtttgttggttggttccttgaacaaatatttatggagtgactaccctgtgccaggcactgggactatgttcctgaatgaagtccctgcctttatggagcttacaacaacgtaggggacagagagacagaaaataagtcaacaacccataaaataatcacagactgtgataacactaggatggaaacaaggtggggggctgagactgggcagctggggaaccctgtatgactgatgatagctgcgaatgaggaggagggaagggaaggctggagaggaatgaga

SEQ ID NO: 231811 - DNA, 589 bp, Homo sapiens
ggcactagcaagatcctgcccgggctgtgcataggcaacttcaaagatgccagagacgcggaacaattgagcaagaacaaggtgacacatattctgtctgtccacgatagtgccaggcctatgttggaggacaagacatttcaaagaaagtattaaattcattcacgagtgccggctccgcggtgagagctgccttgtacactgcctggccggggtctccaggagcgtgacactggtgatcgcatacatcatgaccgtcactgactttggctgggaggatgccctgcacaccgtgcgtgctgggagatcctgtgccaaccccaacgtgggcttccagagacagctccaggagtttgagaagcatgaggtccatcagtatcggcagtggctgaaggaagaatatggagagagccctttgcaggatgcagaagaagccaaaaacattctggccgctccaggaattatgaagttctgggcctttctcagaagactgtaatgtacctgaagtttttgaaatattgcaaacccacagagtttaggctggtgctgccaaaaagaaaagcaacatagagtttaagtatccagtagt

SEQ ID NO: 231812 - DNA, 2311 bp, Homo sapiens
  misc_feature (2149)..(2149): n is a, c, g, or t
ggcactagcaagatcctgcccgggctgtgcataggcaacttcaaagatgccagagacgcggaacaattgagcaagaacaaggtgacacatattctgtctgtccacgatagtgccaggcctatgttggaggacaagacatttcaaagaaagtattaaattcattcacgagtgccggctccgcggtgagagctgccttgtacactgcctggccggggtctccaggagcgtgacactggtgatcgcatacatcatgaccgtcactgactttggctgggaggatgccctgcacaccgtgcgtgctgggagatcctgtgccaaccccaacgtgggcttccagagacagctccaggagtttgagaagcatgaggtccatcagtatcggcagtggctgaaggaagaatatggagagagccctttgcaggatgcagaagaagccaaaaacattctgggtaaatataaggagcaagggcgcacagagccccagcccggcgccaggcggtggagcagttttccggcactggctccgctgacctacgataattatacgacggagacctaacgcaagcgacctgctgccttccttcccactgcttgtcttcagtgtgcccggctgggcaggggtgcggtggtggtggccgatgaggacaggaaagggagatagccagggcgaggtggggcgagggctccttcccccaagcaacaccgcccagccctgctccaggcccctgcactccgcccacccctaccctggctgcacctgagcttgctgcccccggggatgttgcccagtggctgtgcactgctctgtgcacgtgcgtgtgtgtgagtgcacttgtgtgtgggtgactaagtggatgcatgtgtgtgcctgtgtgagtgagggtatgtgcacctaagtgtgtacatgtgtgtatgttgtgaaagtgtctgtgcacatgaatgtttgtgtgtgtgtgaactctttcttactgctggaagtcacagaattcatattgctgcccgggttggtgtggccacctttccctttgtccaagactccacatggaaggcatttgagctcgacctccgaaaagctacccagcaaagagcagtctgtgcctctgagcagaccgtgagaactcaggggacgagtggctaagagcatggcctctcccagaacccacccagggtggtgtggtgggggcaacaggggccagactcctctagagggagggtggctctggggccctggaaaacgtgagagactgccctgagctggtccagtgggccagcactttataccaactcagcatttaagggaagtatcttagattgcctccatctcaatgtgaatgcaccaggctgagggttccctagcgccttgagtcaaggccacttttcagcccatcgagccctgagttctacttggtgtttgttctctggagctgattgcacttgagctctgtggtgggcaggcgcactttagcctaagttgggtgccccagggcaccccctcctctctgctccttgccagcttcattcactcccagcctctcgctgtcctcactttgcaggggctcctcctcaacatttgcatgcacctgcaagaattgggaagaaagagcatttattaggcactgtagcaatttgcattttaaaatgcctgagcatttattaagcttcttggtattcacttgggtttgataattgatctgagctacctcattgaatgtttttggaaaggtgttttttggtatgcaagtcagctttgcctcacagttgaaaatgttcggtcatgattgcttttgaaaccaaaggggaaggtaccgatatcattgagctatttaaagttgccagtttgggctccagtaatgctttctggtgggtaaaattccacattcaggccacgagagcatctacagtttgtactctggggctgcaggcatcctgggacgctgtacgcaattcagtggtctagtcctttataccgactcagattccttaagcatgcagagtcactcgaatgaaaaaacatactcgacctctccctaaaaagatgttgcaacccagtttctctgaattccaccacaaaaagagaccctgaataagaagagcagttttcctgtgcatatagagggtgtgtcaaaggtgagctttttggggaccgggnaaaacaaagttgcctgattccgcgcaggtgcacaggccccggatgtacacccggaaaggggagtgtggctgtagaatcatccatccgtctacagctaaaacaatttgccaataaagtacatgtttttcctaagccaaaaataaatacgttaacagaaaaatg

SEQ ID NO: 231813 - DNA, 668 bp, Homo sapiens
gagagagagaatttgaactttgtgtatgtttgtacaatgtgtttttatactccctgctgcagaaatctcaaatcctggccagaaactttgattcttaacacatctggaatgggttccttcaagatgaaccagagtgggattaaaaaaaaaatagccacataagaggatagtcacattgcttcattactaaggagcatactgatttaatctgtttgattttgttatgtttatttggtgtccatcttcctgctgaattcctcaccctcctgcctcgtcttttcacctgctgtgggtcagctgacagccacttttctccgaagtaaatatattgtcaagactgactgtccccagacttcctgtgcactgctcttcctctccagagaggatgggctgttcaacaccaaagggcctaatcataactgacttggaatgtcaacttaatgtagtcaaatggtgtgagggaggtagagaatttcagcagcaaattctctgaggttggtagctcaatatttccctcccactgcaatacttctttttgacatttcctatggtacttgaaccaaaattggggcaaatctaaagtaattcaagaactaaagttttaagagcaagtctaaaccttctacacagcaattcatataagaagatgccccttgactttggattga

SEQ ID NO: 231814 - DNA, 615 bp, Homo sapiens
gagagagagaatttgaactttgtgtatgtttgtacaatgtgtttttatactccctgctgcagaaatctcaaatcctggccagaaactttgattcttaacacatctggaatgggttccttcaagatgaaccagagtgggattaaaaaaaaaatagccacataagaggatagtcacattgcttcattactaaggagcatactgatttaatctgtttgattttgttatgtttatttggtgtccatcttcctgctgaattcctcaccctcctgcctcgtcttttcacctgctgtgggtcagctgacagccacttttctccgaagtaaatatattgtcaagactgactgtccccagacttcctgtgcactgctcttcctctccagagaggatgggctgttcaacaccaaagggcctaatcataactgacttggaatgtcaacttaatgtagtcaaatggtgtgagggaggtagagaatttcagcagcaaattctctgaggttggtagctcaatatttccctcccactgcaatacttctttttgacatttcctatggtacttgaaccaaaatcttctacacagcaattcatataagaagatgccccttgactttggattga

SEQ ID NO: 231815 - DNA, 628 bp, Homo sapiens
aggaaaatgggctgtagggtccatgcgcccaccctcctgtttctagctccttgttctttaaaccaagagaaacagctgttttgaaccacccccactgcctcttcctccacacaggactgctgcctgggcctgaggaatgctcctgacttagcttggggaaggacaggaagtattcctgggacagcctgggtgggaccagttagggtggatgcagacatgattctgcccttgcaaggctgagggagggtggagaacagggcaggaggtagatactcattcaacaaacatttattgtgtgtcaactggttgccagatgccaagcattgggaagatacaaacaggacaaggtccttcacctgaaggggatgcggaattacatactggttgaaagcacagggattgaaatcagcagaattaggaggtttaaatccagttcttctacctttagctatgaggttcccattaagttagtttgttaacttcttaaaaatggaaataatgattgtgattacctcataaggttgtggtgaggattaaatgaaataatgcacattaggtacctaacaccctgctgagcacatattgctgagtgctagcttctgttcttaagttcacagttgagtatatc

SEQ ID NO: 231816 - DNA, 452 bp, Homo sapiens
ctacctaaagaaagtgtaagcacctgtgcacattttataaatctaggtctctgtctcttagctattattttggagaatgaaaaaaacactcgagccttccttggaaaatgtctggcattagcactgtaagctgtcgctgaatgagaggaattatgtttctaaatactgtgtcatacagcatttcccttgtgaagatgcagccttggtttcacatgacataatcttaatacaagtgaggtactagaattttacattgcaattacaaacatgtcttctttagataattttcatttaactcacagattgttcttgaatcaagactggtactattaagaacccaggagaaatatctggtattctgcagtcacaaatctgttatcaaagaaaaaaaaaggactttggttgaaattatccaaattatgtatttttataaataaaattcactaaataac

SEQ ID NO: 231817 - DNA, 755 bp, Homo sapiens
agccagaaaaggacggggcaagggggggagatgtgtatgtgtcgggggtggagtaggggaagtgaggaggagggagggagatggagagaggaaggaggagtgtgagaagaggaagagtggggcttaaaaggacagtttattccctcatggttctggggccaggagcctgaggtcaagcgtggggaggcagtggctctggggatccgccctgcacctccctcctgtcacagtcctgcccttctcagcccatggacgtgccctccacctctgctggtctccctccaggacacgccactggactcagggcccaggcaggcaacctggggtgaccttatcttgaatcttgagatccttaactcgatcacatctgcaaaggccttcccgaggttccaggtggacgcgtcccttcccgaggttccaggcggacgcatcccttcccgaggttccaggcggacgcatcccttcccgaggttccaggcggacgcgtcccttcccgaggttccaggcggacgcgtcccttcccgaggttccaggcggacgcgtcccttcccgaggttccaggcggacgcgtcccttcccgaggttccaggcggacgcgtcgcttcccgaggttccaggcggacgcgtcccttcccgaggttccaggcggacgtgtcccttcccgaggttctaggtggacatgtcttttgagagggcctcaggttaacccactactgtgtctgaatctgtcccttccccaagcagcagctctgtgt

SEQ ID NO: 231818 - DNA, 445 bp, Homo sapiens
aagtttcataatattttccctttataaaaggatttgttggccaggtgcagtggttcatgcctgtaatcccagcagtttgggaggctgaggtgggtggatcacctgaggtcaggagttcgagaccaacctgaccaacatggtgagacccccgtctctactaaaaataaaaaaaaaaattagctgggagtggtggtgggcacctgtaatcctagctacttgggaggctgaaccaggagaatctcttgaacctgggaggcagaggttgcagtgagccgagatcgtgccattgcactccaaccagggcaacaagagtgaaactccatcttaaaaaaaaaaaaaaaaagatttgttatgggttccttttaaatgtgaacttttttagtgtgtttgtaatatgatcaaatttaataaatatttatttatgactgttcagcaatcacatctc

SEQ ID NO: 231819 - DNA, 129 bp, Homo sapiens
agtactaatgtttgaatgaaagataaaaatgtaaactttcgatactaaggcacaaaattatcctatgtctttgtgttatttgaactcacaaaacatatttgagttcatcatttgaattcacaaaaatca

SEQ ID NO: 231820 - DNA, 388 bp, Homo sapiens
gcggtggccgggctggcggcgggcggggactgcggaggaggcagcttgcgccggggctggggcctgcttcgggggactagcggcccgggaggtatggaggtgccgctccgggggggcgaaagaaacgtggaaaggtcgcccaggagggagcctgtcccccagggtttccaggggcaacggtggcccgtgtccctggaggacatgcgccagggcagcagggagtggtccccgcaggctcccaggctggggccggctgccttctggggcgctcagacctgtctgctgcagtttgcaaacagtacgcccgaattcttttcattgtaaaaaatttctattaaaaataactcgtaaagcctatcatctcttttaaataaaggggaagaaagag

SEQ ID NO: 231821 - DNA, 453 bp, Homo sapiens
tcatgctgctcaggtgggtctcaaacccctggcctcaagcaatcctcccacctcgacctacaaaaatgttgggattgcagacataagccacagtgtccggccattaaagtaaaaaacaattaatggaactctcttcatctggtagtttaccatctgtatctccttttaagaaaataataccataatgggtacaaatatacagttagatagaagaaataagtttagtctttgagagcagagtaaggtgactgtagttaacaacaatgtattgtgtatgtcaaaatagctagaaaagaggacttacagtgttcccgacacatagaaatggtaaatactcaaggtgatgataccccaaataccctgccttgatcgttatacactctgtgcatgtaacaaaataccacgtgcaccccataaatatgtacaaatatctatcaataaaaataaatacct

SEQ ID NO: 231822 - DNA, 458 bp, Homo sapiens
gactggaccacagatggacactgtaccatgcagattacttcttccaggaacttggattgagaccaagagactcatggcatcctcttctggctgcaagacttatatttttatatttaggcaatagaagaggggcagcagatgcctaccttgtggaacagaggaaggcaggcagttcacagagaaagaggactagacagtcggacagaggggagcaggcttgggagcttcgtggagccaatgtccatctctgtccttcctttccactcgatgctcctgagtccctgccttcaacccccgcttgtttgcttaaactggtttgagtttgtttctgctgtttgaaaaacaacaacaacaaaaccccaaacaaaacaaacatcaaacaaaaaccaaaacaaaaccattaactcactcatccctgtgattgtattttgagaaataaaggtgatttccttcagaaa

SEQ ID NO: 231823 - DNA, 830 bp, Homo sapiens
gtcccctgtctgaggagggaggaggcctctgtctgaggggggaggatgccgctgtctgagagggtaggaggaggcctctgtctgttgggagaggaggcccctgccaccacgttgacgcgcggcgatctcgatccccatgacagcaccgcctgagagacaccgccacgccaagcgatcctagctccccaagcacacatccgccatacctatccgtacagcaccagacgccccaccgccatagcgcatccctctcacccagctccccaccgagtcccaacacacccctactcctcatctcccaagcctctccaccccgctaccccactccaccacagcctgacccactccacatctcctgcacctctactactcctcctcatccccatctctcactcttctacttcccccccctacgtctccccttccacctacctctcgacccaccccctccaccaccctcttctccccccgcgcctcatccacttcacacttactcaccccacatcaccaatctcctcccctcctctctcccaccccctccaccactactcatccgtcaccccccaactcctccttccccaccctctcttactctcctccactcatccgtcccgccacactaccctctcgtcaacctcctcctatcgtcacactctcccctcgcctcctctcctccacacccttcccacggtccgtcaccacttcacgctccttctcctctccctccctatcccagctccccctcgtctccccctctccctcctcctctctcctctcattcctccttccccccactcacccgctccccactcctccccttctccccccct

SEQ ID NO: 231824 - DNA, 512 bp, Homo sapiens
gtcccctgtctgaggagggaggaggcctctgtctgaggggggaggatgccgctgtctgagagggtaggaggaggcctctgtctgttgggagaggaggcccctgtctgagggtgatgccgatgaggtgatgccctgccagcgtgaggtagagaagacccaggtctgaagaggggaggatcaagtcagagaagcgtagatgcccatctgagatggaggaggctcccgtccgaggggaggggacactcctgtctggaagggacagaggccttcagatgaggagccaggaggcccaggcctgagggaggagaagggcctagtctgatggggagaagggcccttgcctgaaggcagagcagtttcctgcctgggaaggtcatcccagccccacccatcagtctgaattggacatcaccagtgcccaggacattggaggtctgagggaaaagtctagaaagatgatggggctggtcacacactaattaccaatgggaaagctaaggtgagttccaagt

SEQ ID NO: 231825 - DNA, 447 bp, Homo sapiens
  misc_feature (430)..(430): n is a, c, g, or t
cacagatttggattcttcagagaatatgggggatgaagttggttagagccataagcaggcatttgagaattaacctggctcttatggtttcatctaactatttaaagctcttcattcacttctttttcttcattcataatctatattagaaaatcacaatctatttttatcagaaatagcacacctctgctaatgaactaacttgaaagtgtatgagatatgagaggaatgctgcttataccttcttcctcctattagggcaggagagtcagagcccaaatatggccccaaatagttattatatgctttatgagccatttgttggtctttggtcccaccactttacacatcaggtaaagagaacaaggacatttactgagcaatatagtttttttttttttttttgagcctgggtgacagagccagaccntgtttcaaaacaacccg

SEQ ID NO: 231826 - DNA, 378 bp, Homo sapiens
gcctaggcaacatagcaaacccttgtctctataaaaaatacaaaaattagcttggcgtggtggcatacacctgaagttcctactcaggagctactcaggtggctgaggtgggataatcgcttgagcccaggaggtcgaggctgcagtaagctgagattatgccagtgcgctccagcccgggcaacagagtgagaccctatcttaaaaaaaaggaagtattagttactcatttaaatgtttgtgaagactatttaataagagaaaatacatcataaataaaatcaaggcataaatttaaacactacagcctcaaacatgtaaataaaatgcataaaaacaggtatgtactgcctttcaaaccatgagatacagttattt

SEQ ID NO: 231827 - DNA, 464 bp, Homo sapiens
ttcataaagtagtatggaaagttttcaaaacaatatagcagctctcatggtacagattgtacaatgaagcatacttaccaaagactagccctgggccttccttcaaaatactacctagagcaagcctcctacccaaacaattcctcatgttaaagctgccctcacatgctatccactgactcattttgtgacatgtcaaatttcaactgttatttagtagcaaaaacatactgcagatgagttaatgagagtgtctctttatctttttagagtgtatttaggatttatcggaagcagtgtgccagtaacaaggtttcaaggttgttggaaacgccttaaggaagaattgctttatgtgctttaatgaatacataagaatgatgtcattaccctgccaagcatacagtgtttgtttttatacagtctgaataaaacctagcctccccactctctacaatctaggc

SEQ ID NO: 231828 - DNA, 429 bp, Homo sapiens
accaggtaacacgcaggccctcccactcagggtctgagtctacgtgggtcctggacattccgttccgacctgcaggggtgccgagagggttggggaggaaggtggaagctggttcttgttccggcccagcacctggccccctggccaccccacccaccctggaaacccccctcctggctcccttctttcagagtgggacaggcctttcagggctaggaacggagggcctggatttccatgtcaatggcgaggcaggcccgcctggtaagctgcttaacaagcctccagccccattggggtgttaactcaggccccattctccgggcccagtctcgcggttgccatggtgccctgcgtggccctttgggccgcggctaatcccttctctgggcctctcatcccggctgtcccacccccgggctggtcgct

SEQ ID NO: 231829 - DNA, 367 bp, Homo sapiens
gtcttcagccctagaccttccctctgacagagcctacccaaatgagaaggaaacagaaaaccaaccctggtaatatgacaaaacaaggctcttcaacaccccccaaaaatcacactagctcaccagcaatggatccaaatccagaagaaatccctgattgacctgaaaaagaattcaggtgtttagttactaagctaattagggagggaccagagaaaggcaaagtccaatgcaaggaaatccaaaaaaaaatgatacaagaagtgaagggagaaatattcaaggaaatagatagcaaaaagaaaaaacaatccttcaggaaacattggacacgcttacagaacgccagagctcatagcggtctttg

SEQ ID NO: 231830 - DNA, 383 bp, Homo sapiens
ttggagtgtatctaataaagatacagttgagatcacaacacccacatcctttcaaatacctggaaagccttcccaagggtgggtacaaacaagcccaggctgagaagatggtggcagcttgaaatcagccatggaagatttgcaccatggaaatggcaaacactacagaacagacttctgttccctccccgacagagagccccttgtgtaacaacagcactccactgccccatccctgagcagagcgctgtgtgttgcagcagagtgggggcaggtgtcttctcccttgggctacagaatacacattttttttccctcagcacatggatcattctcaaggatagaccatatcttaggtcacacaacatgtcttaaaacattag

SEQ ID NO: 231831 - DNA, 402 bp, Homo sapiens
aaaaaataaagaaataaagcaaaacaatagaacagaacatttcagttgttgtcacagattcctccatgaaatagagatacccatcgtttctgttcttgataaatacaaatagaacattttatctgtccaaagttttatcattattattatatatttattaattacaataacagcatccaatctatgaaaactcctacttagacctgcaatagaaccatgtgtatgttggcaacgtggctagcatctcagtgaagttgtacattgctcttaactaaggtagaataaactttaatttaacaaagaagtttagcaaaataaataactgtttctctaaatattccaataattctaatgtacatatatattttttctttctaataaactggatttttttctcattac

SEQ ID NO: 231832 - DNA, 405 bp, Homo sapiens
aggactcgacaagaatggcattagtctctccagtcttacttcttcccataccctatacttcaagcaaaaggactctattgctggaacatgcttcgtgttttagctcattctgtttcttctgtttgcactgtctctccccacacatagttgtaaaaatttctatccgttggtggattccaacactatttatttcatatcacttccttggtgttgcccattgagcaatctccctcccctttgtacctctcatagtacagaaaatattctgccttatgccatggttatctggatacttggcttatctctccaccccgataggctacaaactttttgaaggtaagaactaagctaccggcctgggcaatatagtgagtgagaccttgtccccacaaaaaattagccagg

SEQ ID NO: 231833 - DNA, 439 bp, Homo sapiens
gtaagattgttttttggctgaattctaccttagaccatgataagaactgctaagcattagaggaggtacttaaattatgacctgctgtcatggtcaatataccacacggtcctttacgttcaacagggactctgaaccctcaacttgctgctacctgacttgagtgcacaatattgggacctctgataccagtttctcacatttaatatctatattgtttctgctgaaccttaaaaagcactttccacccatttccactgtcacccacactagtaaaatatccctgcttccactctttttaatcctctattattgtatcttaaacagtgatgtcacatcaatcatccttttttcactctgtcacccaggcggaggttgcagtgagccgagattgcaccactgcactccagcctgggcgacagaatgagactctgtcttt

SEQ ID NO: 231834 - DNA, 476 bp, Homo sapiens
ctcccaggttcaaccagttctcctgcctcagcctcctgagtagctgagactacaggtgctcgccaccacgcccagctaatttttgtatttttagtagagatggggtttcaccatgttggccaggatggtctcgaacctgacttcaagttcttaaagactgaagaccccagacagcagacagagctggatggagctgtcatgcctgaggatgggggtgtgggcaggctcacctgtggccacctcaggagctatggccagggcaggaccagactccagcatacccactcctgctcccaccttcctctgcctggcactgccacatctctgacagtgttctctgcatggtccccaaccctcagctgagactgcatggccagctccacccccaggattgctgctctgcggggaaatgtgggagctgccttggggagcctgcctggccctctacaccccacccagggtacctggcccaggtg

SEQ ID NO: 231835 - DNA, 384 bp, Homo sapiens
cgggttcacgccattctcctgcctcagcctcccaagtagctgggactacaggcgcccgccactacgcccggctaatattttgtatttttagtagagacggggtttcaccgttttagccgggatggtctcgatctcctgacctcgtgatccgcccgcctcggcctcccaaagtgcgccttttctttttttaattgccacttaaccctgcctccttcttgcaataaaacatattcattcatgtgttagtgaataattggggaaaggaaatcccatacatctgtcaagagatacattttcaataatatttttatttttctatttgatatctatttataaaagtgtttcaatttttgtgataaattttataaaattataaaatagtaa

SEQ ID NO: 231836 - DNA, 470 bp, Homo sapiens
ttagtcctgacctccaacataaagccagtcctttcatttaaagatggaattggttggaacacaaaggaaacaccagtacaattcataactacggaaacctccacagagcaatggaacacagctacattcctgcacctggaatgtctggtttcatgagcatccagaaggaagcgggtgtgaaactgatcaccaacatgtacattctaattaaattcagtcacattgctaaagctgaggactcacagaatggttataatgtacttatttaaaaaataaaattttattctaaaataattcaaatgagaaggaaaccaggcatatgactgtaagttagtacttagcaatctaatgagtgaagagttcttaaatataacaatagtcaaaacagaaacaatgaaaaacttagacttttttgttcatatttgtcaattaaaactgatcataaaccattttaatcttctaaccagtgt

SEQ ID NO: 231837 - DNA, 354 bp, Homo sapiens
ggaacatatgctcactcctgttaaggcataaaacatttctaccatccagaaagtttctttctcagtctatcccccccagagccaaccacttttctggttttgtttcactatagatagttttgtcttgtgtagaacttcatataaatagactcatataatatgcactttttcataattggcttcttttgctcagcataatgtctatgagactcatctattacatagaagcagatttttcccgtttgttgctaagtagtattccatattataaatgtaccacagtttgtttatccttttccctggatttgagttgtctccagtttgactgttataaataaagctgctataaatatt

SEQ ID NO: 231838 - DNA, 301 bp, Homo sapiens
atggggttgtattggtgtagtagggtcccctaatgcaatttgaccagtatacttacaaaaaggggaaggaaggtccagacccccacacagggaggacaccacgggaaggtgaaggcagaggggctgatgcttcttcaagccagcggagggcaagggttgccaacaaaacactggaggctgggagagacgtggaagagattctctctcacagcccctgaaggaaccagccctgctcccaccttgatcttggacatctggcctccggagcggagagagaataaagtttggctgctttaagtca

SEQ ID NO: 231839 - DNA, 349 bp, Homo sapiens
tgggagagaaatagttcagaaggaaaaagaaaaataggttttactagcggggaggttgcattagttggagttatgatctcctgtgagaaggactcccacaggtcctgatttgtacctctgtaatacggcctctcagaaatgccctggtattcccattaattgtgtgcctgatagtcgccctttctctgttctgggtaaattgggacagagactatatcttgtctttatatcactccccaatagcatcttccaaatgggtcactggagttcaatacacatttgttcaattaaacaccacatttattgaattagagtcctatatgcagaagtgtaaattttgttgttgttg

SEQ ID NO: 231840 - DNA, 885 bp, Homo sapiens
catcttccttctacattcttttttatttattttctattgaaagactctctcttctccagctttcttttttctacccatatttccgtgttagcatgcagattaatatttaaatttaaatgcttggtgttctttcccttgtgtagggcctctacaatgaaggtgatttttgttgtgcttgaatatgtgtcttttaattgtattggaaggatgggaagatgtacttccttgagtatgtccaaagtgttagggccctcttaacagagcatataaaataagcaagccagggctgatgctggaagacacacacccaggttgtggggaaaatgtcagggcccaggtgctctcgttatgctggagatcagtctttccagcccaagagtctttgctcatgagtctgaatcatgtgtttcctctcttcctaacactgacattgactttacaatctgattttgaactctgctcatgttagggtgcaaccatttcacacagacaacattttttaactgcaaatgcttaggcccatttcccagattctggtttaccactggagatttggtgaatcagcacgtgaccctgtgagcattactttactcattcaataagcagatgttgtgcatcttctaagtgccaggctgtgctctaggaactgggaatacctcaatgaaaaaaaagaaatgaaaatccctgcccttagagagttgcatcttttgaagagagaaagacaataaatagaaccattgaataaaatagatagcatgtaagaagtaataagagctggccagacgtggtggttcatgcctgtaatcccagcacttagggctgaggcaggcagattacctaaggtcaggagttcaacatggtgaaaccctgtctctactaaaaata

SEQ ID NO: 231841 - DNA, 528 bp, Homo sapiens
ttaggccaaccaggccatctctgtgtttttttttaatatcatgatttattcctttcagaagaatacgaacaaatgcgaaaatgaattacattcttttaagttttgtactggcaatggtagcatgtttctttgtcgagagacaattagaagagcagaaaaactgggagggaggggaaatgcaggtatttcatttatttatggctcatgaattcagaatttttttgttggaaattgaagtcaggtcaaattaaactattatttataagaaaattgtcagcctgggaaacatggtgagaccatgtatctacagaaattttaaaagttagctgagcatgatggtgtgctcctgtggtcacagctgcttgggaggttgaggtgggaagattgcttgagcccaggaggttgaggctgcagtgagctgtgttcatgccaccacactctagcctgggtgacagagtgagaccctaactctttttctaatttcctctctttcccctggccggatgaaccatccctttgcctccccaa

SEQ ID NO: 231842 - DNA, 1173 bp, Homo sapiens
atcccatcgttggagcatcctcttactttctggcatagcaatatgttccaggctctgaatagtgttttgaggggagaagtggatgagaaagaatgggttcattaagagcttgtatgagaaaaactttttacgtctcttcctgagtctgtatgtagtactttcaggtaatcaaagctgtgaggacttaccagtttcttatccaaactattggctagggtggttaccactgtaatacaactgcttaggacacttgaactacagttgatatgttatttaagctactcagaaagacttttctgacggaagatttctctatttctcattctcaactttagctcctctgagtgttcctccaaatctgtcttttggagtagacctagaaatcatctgttactaaggtgtactatgcatgtggaaccattgatttaagagttgagtactcttaagtattctaaatatttggtaattctgtctcccactgtaaaacgaaacaaagtacacagaaactctatccaagaaaatgtggaaaacttactgttgccataatcctgtaccagaataaagctcttggtatctctgcaataattaacacacgtttaagcacaattctttttatacaaagttacaaggtatgtgaacaaagtatattttaaaattgtagctcactgtgtttttttttaatatcatgatttattcctttcagaagaatacgaacaaatgcgaaaatgaattacattcttttaagttttgtactggcaatggtagcatgtttctttgtcgagagacaattagaagagcagaaaaactgggagggaggggaaatgcaggtatttcatttatttatggctcatgaattcagaatttttttgttggaaattgaagtcaggtcaaattaaactattatttataagaaaattgtcagcctgggaaacatggtgagaccatgtatctacagaaattttaaaagttagctgagcatgatggtgtgctcctgtggtcacagctgcttgggaggttgaggtgggaagattgcttgagcccaggaggttgaggctgcagtgagctgtgttcatgccaccacactctagcctgggtgacagagtgagaccctaactctttttctaatttcctctctttcccctggccggatgaaccatccctttgcctccccaa

SEQ ID NO: 231843 - DNA, 190 bp, Homo sapiens
ggcaacatggtgaaaccctgtctctacaaaaatataaaaattagccaagtgtggtggcacgtacctgtagtcccagctacttgggaggctgagacacaagaattgcttgaagttgaagttgaacttgagttgaagttgaaatcgcttgaggttgcagtgaactgagattgtgccactacactccagcctg

SEQ ID NO: 231844 - DNA, 533 bp, Homo sapiens
gagttggagggatttgtctagaagagcaagcatggtttcccttgaagctgggtagaaacacaggagcagggacatcattcatcaacttgtcagagctcctcatgaggcaagggaagaaaaagggggccacaagtgtaggagattggtcagagtggtgggagaagctatagggaaaggagcaggccttctgaaaggttggaaggctctgcatagctttggaggagaatagctaaagacagctgttctataaccctgaggcagagggcaaggagtaggtacgagggagtgtgggggaatttatcttaaacaggcttgtttacttctgttgaccaggaactgacctttgatcatctacgcccatgaccttccctgaaaggggaacaataaatgttaattacctccagtgtttgctccaggcttttggcattgtgcctgcactgaataaaagcaagcagctccagcttctcagggctgcactttggccacttgagctgggcagtcccctagctgctcttacactgcatacctgtgtc

SEQ ID NO: 231845 - DNA, 583 bp, Homo sapiens
ctgaacaacgtggagaccttgaagtgcgccctccagctggctctggaccggcaccaggctcgggagagggcaggggcctgaccaaggcaggaagcggaggactgtgacagagaggagacacactgctcatggtcagggcttgtagagggaggagcgatggggactctgtgcaggatctgcttcccttctctccaggacctgcctcgaggtgccccaggccccggaaagctcttgcagaattgcagcttggactggggcagggctctccttgtgtgtttttggagaagatgggcagtagatcgctccagggactcttggggattaggtacgagggagtgtgggggaatttatcttaaacaggcttgtttacttctgttgaccaggaactgacctttgatcatctacgcccatgaccttccctgaaaggggaacaataaatgttaattacctccagtgtttgctccaggcttttggcattgtgcctgcactgaataaaagcaagcagctccagcttctcagggctgcactttggccacttgagctgggcagtcccctagctgctcttacactgcatacctgtgtc

SEQ ID NO: 231846 - DNA, 813 bp, Homo sapiens
aaatgtgatactaagggaagggacccactactctttatgtggactgagaccaagactgttgatacttgggaccaattgagtggaagctccttgaaggcagaactctctttcattaattttagtaaccttctaagtagtatagtgtccaccatttactaagtgcttaataaaggttttctttgaattgaactcttactgtgtttaatttagacataaatacagtaatatgaacaaaaattgcatagatgagaaattacatttactgttttagtggcactggcttatatttaccttttttattttcccataagtatttattcaccccatcctttacttttgtgtttgatttttttgtgcctaaatgtaagatttatatttatgctagttaatttagacccattgtttctgtctacacagattttttttttaatcctgtatgtaaaccaatgataaaaatgttgaacaaaagaaaaccctttgatatttttgcaggttatgttgtttattgaacaagtttgtatatagaaattttacagttgaggctgggcgcgttggctcacgcttgtaatcccagcactttgggaggccgaggtgggcgaatcacaaggtcaggagatcaagaccatcctggctaccacggtgaaaccccgtctctactagaaaatacaaaaaattagctgggcgtggtggtgggcgcctgtagtcccggctactcaggaggctgaggcaggagaatggcatgaacccgggaggcggagcttgcagtgagccgagaccgtgccactgcattccagcctgggtgacagagcaaga

SEQ ID NO: 231847 - DNA, 349 bp, Homo sapiens
ggaatagctcctttatctgtaatgtggtttgtagtcttaagagatgtgttaaaaattctttcatagtatggcctccagatacttgaaggttccatatgataataatcacaaaataaacttctgtgttcctctaagatgtcagtagagataccggagcacggtttgatgaaatatgtaaagaggcttattttgggcagggattggtttggcttggttgggtcaggggtgaaggcgctacttttcttttttctgagggattatctgagaagggctctcgaggagtgaagcctttcgcctggacagcagggccggctgtgtgaggagccctggaggggagctgggaatcctt

SEQ ID NO: 231848 - DNA, 336 bp, Homo sapiens
actgttacagaaacaaactataagctccagccctgtcaacaaaaatcactcttggtttgttttggggaaatccacagaacgggatgaagggtaaagagatccctctgtgtgctgcacagtccatttcctaagtgtcatacgttgtaaattagaaaatggcccatgtccctcctgcatcattcctactattaacagacacttaaaagctgactgtagtaagatttttatgaaagaagctcatgcttctatggtagataaaacttttttactccttgattttgtgagcttgaccgttggctcctgattttctttaaaaaaacaaaacaaaacaaaaca

SEQ ID NO: 231849 - DNA, 486 bp, Homo sapiens
ccagtgggagtgaaagctctagtgcccactggtgttgtctgacaccaccccgcaggggactcgggggtccttgttacaggctggcgagggtggggggtccttgctgacatggtgggtggagccgaggtctggtgtttgcggggagcagggcgattcctgtcgaaaggtctttcctcatgttgggctgacccttccctgggtcttaggccagagagagctgcttccatgggctcttttttctgcatctgttgtcttttccagcctgctgccttcttcagtttcaaaatatctgaggtgaaaagaaaagcccccagggagctctgcgtggcacagtctgtccttgcgtggcacagctccccagaccccgagggcccggccagtctgcccttgtgtggcacagctccccagaccccgagggcctggtcagtctgtcctcctcgctcctgctttcagagtcttcccaggtgtttatctcagtgtcttggg

SEQ ID NO: 231850 - DNA, 599 bp, Homo sapiens
atgggccctggggcagaacaatgggagacaattcaaggtgtggtaacaacaaccaagttgccctcagtctgggcagaaactgaactctacccctctcccaccccaatcttgcccgccatcccaccagattccagacctaaagggatcaaggatgagagcgaagggagaagggaggggccccaagaaaaccgcacccaagcgagcactgtctgaagagaaaaactagctccagttctccgaattctggcagagcgtctgggaaggcgatcagtgcttctttccatggcgcaaggcctgggttctgggtgtgcttgaagaaagccactggggtgtggggtgacatcgccatggctgagaaggggctagggggtccggagggaaggagccaggaccggaactgcaagggcgttgctgcccaggggtgtggatgattgctcatgtccagctcagaccagttcaagaaactaacctccatttattttcttggtgagtcctttttttttttttcagactgttaacagaaaaaaaattttaaaaagcagaaaactgaaaaaaaaaatcctggtacatgaaataaagattttttttttttatagctt

SEQ ID NO: 231851 - DNA, 435 bp, Homo sapiens
gcctacatcatgtaggttaaactataaagtatatataaagtatattaaaagcttgttttcgcaaaacaaatacggttctttctgaaaaacatgtcagcaaataataggagagatacaaatgaacaaaggaatttagcccattgttctccctttggatgccctcaagacattttggtatgggtatgctcttagtacacaagccagtagagcagatgaatggttaggaatggggagatctgtttactaagtgcctttaatgtacatttgttattcactttatctcttatcccttacctgtcaattgtggaaaatgccacctatctctctatggactgttagaaatattgagggatataggttatttagcaaagggcagaaaggagacaacagggaatagtaagagttgaaatataagtaaaattgatatgatcacta

SEQ ID NO: 231852 - DNA, 443 bp, Homo sapiens
ttaagcaagtttatttaaatctttcaagatatgtgtcctcatatacaagacagagataatgagataatatttgaaaaaattcacacacactgcctattagaaaatttatatacttaacatgtagtaaatttatcttctacgagtatatcaacacgtgtttctactacttttaatgttccatagtacttgtattctgttttagttatgtcagtgaacttctcattcctttcttcatgtattatccaacttaaaagcagaaaattaatattgagatcagatgcagtggtttgcacctgtaatcccagcactttgggaggccaaggcaagaggactgcttgagcccaggagttcaagaccagcttgggcaacacagtgagacttttgtctctacaaaaaatagatcaggccactgcactccagtctgggtgacagagacactgtct

SEQ ID NO: 231853 - DNA, 458 bp, Homo sapiens
gaaacagaactaaatcagagaactaacaataccagatttcaataattattataaaactacagtaatcaagacaatgtggtattgatgcaaagacagacagatagatcaacaaaatgaaatagtctggaaatcaacccacacaacctacagatgtttggtttttgataaacatttaaatgactttcaggaaagtgaggacagtcttttcagctttgtaacagttgatcatccttatacacacacacaaaaaaggatgtttattcatactgcatactatatacaaaaatccactcaaaatagaatgcagacctaaatgtaacactgaaaactatgaaacttatggtagaaaacctaggagaaaatttatgtaaccttgggtcagcagagatttctaagatacaacatcaaagcatgatctgtaaaacaaaaaattagtaaactgaattcgtcaaagttta

SEQ ID NO: 231854 - DNA, 439 bp, Homo sapiens
aataatctaattaaaaattttaaatataaaattgtattgaataaataagtcggaaggggaaaaagtcatcatcctcaatgctaataagggagttttgaagcaaacagtctgcatgtagaaatgtaaaaccacagggatcttggaaaagcagtctacagttttatgagaatccagacctatgaggatgctcagatattctgcccaggattcccactctagggtatgcgtctcagagtaataatctggagtatggagagtgacaaatacacacgggcccaaaaaaccagaatccagttaatcttcagtgttaaattaggtcaattaatagtagtgaatactctcaaccacatagaatgcagggcaaaaaaggaaagaagctgtgaagatcacataggcatttagaatacaaaatgtgaaccacagcatgtgagacaatttg

SEQ ID NO: 231855 - DNA, 416 bp, Homo sapiens
ctaaaatcgttgtaagaataggtcagttatgatcagacttcttatacagagcctgttggaactgagtaccccccttttgaagtggaatatcagtaaaatgcttgaagttgatgtgcatcatatcagtttgcctgggagatgtgatgaatgatggtccattttatttgggagacctctctcaatattgcctgagtccatgcactaatagttggttagaccagatgaaatactgattgagcatcttgcagtgaatgggttcccctaatgcattgcctcctcccttgctgatggtatatacggtgcatatgtgtctaaagaactgacttgtaaaggactttgattgtgaaccaccatgagaaatacattttacatcctgacatagtatgcacatataaacacacacaacattttcatgt

SEQ ID NO: 231856 - DNA, 414 bp, Homo sapiens
gttatttatttttgtgtggatcatgagtctgcagcaaattgagaggtgggcagagacctgccaatgtccaaatcacctgcccctgcaaagaaaaccacacttctgtaaagaagagaagcacaccacaccaaaaaacagacatctcccagtgtttcattgtcctgtgtcccacccagaaagaaacactagcagtcctctgcagaaacccctgaatttacatcgaatttggctcccagctgagcggttcttcatgtcatgatggggcactcctcctttgtcttgggatatcatcctgggacatagaatatgagcagggagaaattcagatatgggtgaggatacaatctggtgaggagtggatggggctctgcaaattcatctgcaaaaaaaaaataaatacaaatgacaaagatc

SEQ ID NO: 231857 - DNA, 232 bp, Homo sapiens
tcttttttgaaaatttactctaagaaataaggctgaccttgagcacactgctgtgtcaaaactctgtcagaaatacacataaacttacataacactccatactttttttgtggtgaccctttccacatgacttttccttcttaatagtactgtgaggttcttgaaaaaaaagctgggtctaattcgtacatcgagtaatcaataaaagcattccagctgtgacccaaaaaaa

SEQ ID NO: 231858 - DNA, 539 bp, Homo sapiens
tgaaaaatgtggcaggtattattactaataaagaagtacccaactatgggaatgattgttccttccttatgaatgagagcagctctctgttcaatacgattcatactcaagttctaataaactttctttagcaagagagcaaagagtatggtacagtcagtccacccaggttgcctgttaacctggtgcttgaaggaaaaaaagtaagaatttgccctcatctaattcctcacttgccctcaaacatgtcatactacttgacaatggggctttcccacatttgtcccacatttgcatggtctgccttatctcttacctggcgaactcctacactccttcaagacttgctccaaaatgcacttgctagatcttctgacatcaactgccaccttgggctataagttacgtgtgtctcttcccccactagacaattacctgatggaagaatattgttcttaagatgttaagatggtgtatgtgtggcatagtatttgttcctaaatgtaaaagttattaaacaagttttctgaaaaaaaaaa

SEQ ID NO: 231859 - DNA, 550 bp, Homo sapiens
ctaggtggacacacaacttggatatcaacagggagcagaaaacaaacccactagcaggaccaaaaggcagacccatcagcagaacacaggcggcagcttccacaactttgaggtacatcaacatcaataacagatcaatggacccacttaatggagctcttaattgagtagaaaaaaatatttaagagttttgccgctctacggcaggaaagctaattttcctaaactgaaatatccttcacttcccttggggaaaaattttcatgaggactaaggtaatgggaaaacctgttgcttagaacttttaacttggccttgaagatggaaactcatccaggatggagaataatgtagggagactagttaaaaatagacatggaccagtttactttcctgcttatttacaagatgccttatttaaatgacactttgatccaacatcttactaaacaagtgacaacaggaaaaaataagaggcagttggtgcacctggagatgtgatattgagcccagtcaggaggcctgaggttctaataaaatttccttagat

SEQ ID NO: 231860 - DNA, 511 bp, Homo sapiens
gggtatggggagtgtttccaattgttacagtgagataagtctcgcattagattgcactttgatttcttttctttgagctccctagttgccaactttattttgtgtcctaggagtaaggaatcctttttaggactcctttgataatctaactaaatttgaaaatgcatttatccttggtaaaaatctgtcttattaccaataacactactatttgtctctgtctgtccttgtcattttttgttgtatctctgtaaggggtacgttcataaggaaaaacatagacataggcctcagtaagtattttgcaagctggccctgaaaaccaagtttcaggtttcttgtaagactggtgtcctttagataaactttaccctggtcattgatcaacctatgagaaccttccttgttctctttctgttttgttagtgagagtcttgctatggaagaattataataggcaccctgaggaatttttgatatgaacaaaattgtttatttaaaaggagcctga

SEQ ID NO: 231861 - DNA, 547 bp, Homo sapiens
gtgcagtcctgctgcccagcttgttgctcctgcctgtctccttggccctgcctggaagaccctcactttcccatgccctgtgcagagcctaccacctcctctgccatctcttccacagagaggccagggcttgagcacataggccagaggttgtcctctggcaatgcccccaggtgggcgctgtttggccagcccaggcttttaaaaataacattggatttcacataaaaattctacattttgcttccctgaaaaaaaaaatcaggtcggcattgcagggccacacacccacagggcactatcggcagagctaccatgggactgccaccttctgagtcacctggttccctgcagttcccactcatgtgccagctgggccctggcactctggagcttgccaccctgcttagacctgggttcctgccctggcatcctggctttccctgatccgaggcagattctatctttgaagctcatctagtaaatgtcaaaactgagaaactgattccaaactgggtcttagtgttttctgagaattctccaggcc

SEQ ID NO: 231862 - DNA, 2274 bp, Homo sapiens
agggcaatacagtttttgtaaaattttacaaaaattggactccccccattgaaacactgtactttgaaagaaacttcaaattcagcatattttttaaaaatctggatgatgactcgttttctttctttcaaaccttttaatttcgacaacatttagcttaaggcaaattttatctttgttatagctatttcagaacagcttttaaaatgcaatttaaaaaatggcatttagcaagcaattgccttttcaaccttaaccatagagcctcttccatggattccattatattttattaacataagttaaaataggagtgttctgggtttcacaaggattaaagttcctatctaatgtgcatgtaactaaacgcacgtttacgtacataatagctattggtcacagtttgtatgatggtctttcagccagaaaacagggctgcagttcttacagtagtccttgaataatgacgttacattcaacgtcttttcattattgggttatgagaaaaaaatttgattccaggtgggtgcccctgtctgtgtggaatttgcacattctcctcaagtctgtttgggttttctctggatactacagttttctcccacatcccaaacacacgcatcgcatgttaggtttatcggcttgtttaaatggtcctacttttgagcaagtgcgctgtgtgtgtgtgtgtgtgtgtgtgtgtgtgtgtgtgtgtgtgtgtgttagtgcaccctgcgatgggatggcatcctggccagggttggttcctcctttgtgccctgagcttctgggatgggctctggcaacccataagcctgaactggaataagcaagtaaataattattttgctttgtttatttttcttaaatgtatgtatagctcacatgcttacatgtacttcattgtttgatattagaagtgtttttgcctttatttagaagttcggtgatatttctgtaactagaaataagccataagaacttaactcttgtttattatatcaattagcctatggtaaaattgattttattatactacatcatttctcttaaagtcacagtttccaagaacctatcaaggatgttaggtaaggacttactgtatactagttcaaataccactgggctggtattaagactaccccctcactcagcagtgtggggctactcaggtgcagctgtcagcaagccttgctgattggttccttcaattggctgcttcagattccatgcaattgacaagtttgtcttcagagaggaaggccttttaactgaaaactgcaatcaaaattgttccttacattgcacaaaaacagcattttaagagtgcaatagtcattcaaattgaggactacatcctgtaaccttttccagctggactgaattaaatatgtaacatccccaggagtaatttttgagaacagcactcggctttaccttgactactgaatcattaaaacacatgtggaaacattccacattccttccatctgaccctttggcgataaatggccacctcctggcaatttatattgaagtctatttctaaaaaaataatgtacgcccacttggtcagcccttaggcattttgctgtgtgcttgaaaacattgtcatgtgttcctggatttatagaatatccacattctcctttgagtctgctgataccaatttcttattctttcatctgcataatagcttaatgttaataacttgaaaagttcagttctgtggatttaaagagggcaatataagttgattgccctttaattattgaacttttaaatattcgtcttttgtctgtttcctaaatgagcagagaatcaaaatggcatagttttcaatagtcctggcttagaggaaaactaattgcagacattcctttctttctagaaaccttctttattacttagagtgtagaattccatatttaatatgtatttataaacatatactcctcaaaatgaacaaagcagtcatgtaaatactggacttggatcaataaaatgctatgaatgtcgtatatatggatttcagcctagtttttgataaagtctctgatgatatttctgttgtaagaaggtgaaatatggcctatcagtaaggacagcaaaatgcactggacctcttggtggtggtgaacagcctcctattccttgtctaggttattgtcaggttgattctgtaataatctctggtctcctgctctcccaccgactccttatttttagactcttattgtcttatttcaaacaatttcttacttaaagtattac

SEQ ID NO: 231863 - DNA, 308 bp, Homo sapiens
attaatgctcttgcgtgccctcagatggctgcgagggtggagataggctagaacaaacaatgacaaatcaatgacattgcaagggggcggggctttcaacagagaagagttcaggcgacaagccgaggtcctgtgtccctagtagctcgccgtgatcgtatagtggttagtactctgcgttgtggccgcagcaacctcggttcgaatccgagtcacggcattgtgaggacaatggcacggcaaggggagtttgttttattgtaccaatccgtttttaatcctgagttcacaacattgtggaaaatgga

SEQ ID NO: 231864 - DNA, 509 bp, Homo sapiens
gaaaacatggaaacaatgtttcatcttaggttatatacctttctaagcaaaacccaaaacctttcaaagaaaacttgatgaaatacctaaaaattaaaatctgttgcctcacctcgtcccctgcaaaaattataatgagagtcaaaataaaaagttaacatgaagaagggggagatattgatatgtaaagaccaattttcttaatttataatgggatctttaaaaatcagtagggattggccgggcgtggtggctcattcctgtaatcccagcactttgggaggccaaggtgggtggctctctcaaggtcaggagttcgagactagccgggccaacatggtgaaaccccatctctaccaaaaaatacaaaaaaaagtagccgggcatggtgccacacacctgtagtcccagctactcaggaggctgaggcgggagaattggatgaacctgggagacaaaggttgcagtgagccaaggtcacacctgggcaacagtgagactctgtctca

SEQ ID NO: 231865 - DNA, 491 bp, Homo sapiens
caatggtaaagttaggcttttttttccccaaccaaaactttacttaggcagcaataccagatgctaccaaaaacctccagaaacacatttaaaattttgaacttccaatttataatctattaattatttctgaccattcaaaagccaatgactactaattcttgatactgccacagaattcagagctttcactggacaagttactgataccagcctcttttttggtgagcaaaaagtttttaaaaatgtgattttagctgaattggaaaaagaaagttagcaccttttttccctagtacagtgcttataaataaagaaaatactctaaattctaagtttttgcataagctaaaagataagttggcttagacatgtgacaatttttccaagaagctttcactaactctcaaactggattagaaaacctctccatggttctccggcacatggtacttatctcatggtaattagctgtgtgtactataaatgtc

SEQ ID NO: 231866 - DNA, 480 bp, Homo sapiens
agccatggaatattgctagctgagagcacatctttcctcatctggccagaaccctgcctactcacccagggcaacaatccctgcctatatacactgggctcccagtcagcctgtctactgtttcattcctaaacatgaaaggaaaacaaaggattaccagatattaggaggaaagtctgagataataaaagagaggccaagataaacaacaggaacacacgacctagaaggaacacagaattcagggaatagaagaaaaaagaatttttaaaataaaagaacaaaaatcctcgaattggtatttctagcaacatttaagaaaatatgcataaaaccagaacagaatactctgagaaagaatacttggaaatttacaaaaataatagtatataaaaatccaacagaagcactggaagaagagggtatggcaaggtctcagaatataacacacacacacacacacacaaaacaaagaaaccg

SEQ ID NO: 231867 - DNA, 479 bp, Homo sapiens
ctgtttatagtgaataatcctgaagaaggaatagctttcaagaagggaacgatcatcagagacaaacactgtagacagagggtttttctcttgtactcatgtctacagacaagatgttattctcttggaacagaagaaaaatggaacagaagacatgtgtagagagcagggaaatttgagctacagaatattatacaagcagtgaaatgcatgtcattttctaattgcttcgtgatgtcaacacctcttcacaataccttgcaaagaaagtctgcaaatttcaaaccacctctttgcaaagtgatttctttatgtcactaggctgcacatactcacagcccacgctctttcagttgctaagtgcactggattgccacagtatgttccagaggctccagattgctctcaaatgtgaaagatgtgcttctaatcggaagcaaagttcttgcctttcaaatacaatattatctaaaaacaaa

SEQ ID NO: 231868 - DNA, 220 bp, Homo sapiens
tataaggtgtatatgaaacataaatgaattttatgggtcccatcccgaagatatctcataatatatatgcaagtattccaaaatccaaaacacttccggtcccaaggatctggttaagggatatattcaacctatactctccataaaatgctaattaatgatttcttctattaataaccattgtgagctttctttgcagtttaatttgctttgatgttgg

SEQ ID NO: 231869 - DNA, 151 bp, Homo sapiens
tttttgctcttagagttctatgagttccttatatattttagatactaacttcttattgaatatgtggtttgcaaatattttctaccattccacaggttgccttttcattttcttgattgtctcttttgctgtgcagaaactttttagtcga

SEQ ID NO: 231870 - DNA, 486 bp, Homo sapiens
tttaagacagcctggctgtctgagagccaccggagtcgagactggatgcccggcctggtgcccgtgggccagcaccgcctgaggaggaggggtctctggaggccacaggcagagccactgagagggatctttaagcagagggccccacacacctcctgggacccacgggtgtggctgccatgcagggtctgggagctacagagagtcgggaaccaagggcggtggctcacgcctgtaatcccagcactttgggaggccaaggatcacgaggtcaggagatcgagaccatcctggctcatacggtgaaaccccatctccactaaaaatacaaaaaattagccgggcgtggtggcgggcgcctgtggtcctagctactcgggaggctgaggcaggagaatggagtgaacccgggaggcggaggttgcagtgaacccagattgcccactgcactccagcctgggcaacagagcgagactccgtctcaaa

SEQ ID NO: 231871 - DNA, 445 bp, Homo sapiens
tcggcctcccaaagtgctaggattacaggcatgagccaccacacctggccaccttatcccctctttagggccatcacaggccattttcccactgtattgactcagtttaaactctattcagttgatacttagacgctgacaccatgtagcctttttccaggcacttaacgctaactttttctttttttggacacagggtctcagtcccctaatccaagctggagtgcagtggtacaatcatggcgcacttgtgcagcctttacttccccaggctcaatcaattctcccacctcagccacccaagtagctaggacttcaggtgtgtgccactacacctggctaattttttgtatttttagtagagaagaggtttttgccatgttacccaggctggtcttgaacccctaaactcaagcgatccacccactttggcttctcaaagtgc

SEQ ID NO: 231872 - DNA, 355 bp, Homo sapiens
ttattaattccgtaagtcggaagtcattagtcctgattgatgccttgtggggaggagggaaacacacactacttgtaacataataggaagatggagcttttcctgggctgtgtctctagagagttatttttaaaagggtgtttttgttcttccagtcttgggatcaaaacttcataaaactattttattataatgtaggtattaatgtggaaaatgaaaattccctctgctaaagaagctttttattccatccttttcctgaaaaatccaaaagataatatgatgtcagtaacattaagtggcaggaagaaggcaatgttattatactaagaatcttttcagatgaatgacaatt

SEQ ID NO: 231873 - DNA, 269 bp, Homo sapiens
agggcagaggaacactttgaactgcatcttgactatgcaagcagctaaatccaaactgagggaaactctacaacccagattcttcaacagataaattgtaagaaaaagaaaagtgagaggccgggttcagtggctcgagcctgtaatcccagcactttgggagggcaaggcaggaggatcgcctgagcccaggagttcgaggttgcagtgagccatgatcgctccattgtattccagcctaggagatacaggaagaccctgtgtcttaa

SEQ ID NO: 231874 - DNA, 513 bp, Homo sapiens
aagacccatgctcagagaatggtaacatattttccagtctatgttatgcaccatggatgttaggcaatgtgtgctattgccaacacatggtatttgttgaaatacatgttgctttgaccttacctaatggtgcttttacctaacttgaagtgctttttgtgttcccaccagcaaatcattctaacagcaggctaacaatggtgaagtaaaatgaacatttttgggccgggcgcagtggctcacgcctgtaatcccagcactttgggaggccaaggctggtggatcacctgaggtcgggagttcgacaccagcctgaccaacacggagaaaccccgtctttactaaaaatacaaaatgattcaggtgtggtggcgcatgtctgtaatcccagctacccaggaggctgaggcagaatcgcttgaacctgggaggcagaggttatggtgagctgagattgcaccattgcactccagcctgggcaacaggagttaaattttgcctcaaaaaaaaaaa

SEQ ID NO: 231875 - DNA, 444 bp, Homo sapiens
tgggtaaagtattttccaaaataatgtatcccttgtcttcatctttggtgagtatgtgttctatttcctcagggaaactcttcactgaattttatgtaatggacagtcatttttaaccccataaatcccaaatacatcatttagacaaatggccatagtatcttctaggaattaatctcagggtttaagaaggaaaagaggaggccaagacagggtggaccacttgaggtcaggagttcaagaccagcctggccatcatggtgaaatcccatctctactaaaaaatacaaaagttagccagacatggtggcatgcacctgtagtcccagctactcgggaggctgaggcaggagaatcgcttgaacccaggaggcggaggttgcagcgagctgagatcgtgccactgcactccagtctgggtgacagagcaagactctgtctcaa

SEQ ID NO: 231876 - DNA, 355 bp, Homo sapiens
aggtgcatgcaccccaagagatggagaaacagagaccagagcgagagacacgcacgcggacagaccagaaggctgcagagagggcgagggagaaaaaagtgtcgaggcggggagtggcgggaagcggccgggagcggggcgggcgcagcagagcgggcgcggcgccgggagctggctcgtaaaagccgcgtcgagcggggaaattaccgccagaatcgctgagctccacaaaacgccgcccgcgcggcccgccgccgagcccgctccaatctccagcctcatcgccgcgcgggctggttatgcatttaaatgttatttaattggattgcggaggagctgggggccagagcggccg

SEQ ID NO: 231877 - DNA, 530 bp, Homo sapiens
ataagtatctccttttttatattgtcttacctattcactaattataacacatagaaacaatataaaacgatgaagtttaagcagtaattgttttgagaaaccattctgttgataatttacatttatgtttattaggaaatattgttattattacttagaccaaagttgactgaaaattgaaaactgtgggctacccgtaaggttttttgctttgaaatattcaatacctaaaagccattttgattttaaaaatgaagttgaccagtcatcttgtatgatgacctcataatattttataagtttgaacttaaaatagttagaagtagacagttttagtaagcttttgtttttatttggtctagcctaaaagacattgatttatctcaaagatttttagcagtgtgcaagggacaaatgagtatgacatagcttcctagacaagcagtgttcactcaatgccaagtaaacttttctaagttcaaaaatatttttatattaaaacacataccaatgtattgatgaacaaaatt

SEQ ID NO: 231878 - DNA, 481 bp, Homo sapiens
cggtgagcacttgggccatgtctccttccagctgtttgcaaagttccaaagacagcagaaaatgttcattttgtgagcactggagagaaaggatttggctataagtgttcctgttttcacagaattattccagggtttatatgccagagtggtgacttcacatgtcatgatgacactggcacaagtccaactactgggagaagtctgatgatgataactccatcctgaagcatacaagacctggcaccttgtccatggcaaatactggacgctacacaaatggtttccagtttttcatctgcactgccaaaactgtgtggttgggtggcaagagtgcagtctttggcaagacaaaagagggcttgaatatcttggaagccatggcgcactttgctttctggaatggcaaaaccagaaagaagaccacgattgacaactgtggacaactccaataaatttaacttatgttttgttttaaaaa

SEQ ID NO: 231879 - DNA, 356 bp, Homo sapiens
ccattctcctgcctcagcctccctagtagctggtactacaggcgcccaccaccacgcccggttaattttttgtatttttagtagagatggggtttcaccgtgttagccaggatggtctcgatctcctgacattgtgatccgcctgtctcggcctcccaaagtgctgggattacaggcgtgagccaccgcacccagcctagcctggttccgtttatccacagcactgaggttccttacctggctgatgcctttgtgtgcctggtcatagtctttctcccctgcagagagggttgcctgcgtgggaaccttctgtgctgtttaccctgcatctcagcgcctagctctgtgcccccact

SEQ ID NO: 231880 - DNA, 273 bp, Homo sapiens
ttctgtgttctcttgaaagtagctttacatgtattaagcaatcctggctttagatattagggacaataaaaatatctgcaattttcccagttttatatagccattgtttgcaagtatgaaaacctgtcttttgttactgaaatattatcttttattttggcttttttgataacttttatgtttgccttgagcaagtcacttatcttttctatttgtgttttctatttcagtttatttatgaaagacagtaataatgattgtgatgtaccttac

SEQ ID NO: 231881 - DNA, 318 bp, Homo sapiens
aagcaaaggagtgttttgatcatgtggggccttaagaagaccaacttgggcctgggcacggtgactcacacctgtaattccagctacttgggaggctgagggaggagaattgcttgaacttggaggttcaactccttgagccgagatcgcaccactgcactccagcctgggcggagacagagtgagactttgtctcaaaaagcaacaacaacaacaacaaaaacaaaaaaaaaactagcttgggagaaactgaggcagaaaatccaaagaggaagtgagacgataactataaaacagcgatccccttcaccacctccc

SEQ ID NO: 231882 - DNA, 495 bp, Homo sapiens
ttagctcggcagtatctaataagccatactactgccacctaaaatttccaaagagaaattaaaaatatgtcagtaacagtatataatcattgcatttgaagaatcttaatgatgccttcccataaatgctatctaaaacagaaatccatacattgttttcagaaatgtagttcttttccattctggatttaaaaaaaggccactgacctaggaatgctatattctaaaaataaataggaaaaatgttaccaataaatttcaagttattttcacacttcttaaatctttaatcattactgtattttttatgttactttactacaaagcagactttgacatattaagtaagccaagtcttaaatctaacctatataaagtgaattagatcctaatttctaaaagaggctttaataataaggtttcaccatattcacaacatggacctggaggataaaaatattaacaacaattaataccttgaccatatttctattg

SEQ ID NO: 231883 - DNA, 683 bp, Homo sapiens
cctgtactcagcctctctgtccccacacgtgactgtccttagaatagcaactgggtcctcggattccagtaccccaccatgactgccgccagccactcctatgtcagtcttggctgtctgccaggcactgctgatgattgcccccagaaccgtactattaatcccattacacagatgagcaaactgagacccacagaggctgagtaacctgctatagtagtaagggtcagagcaaggctttcaacctgggcaacttgcattccaggccttcctcatagacagagtctgtgtctattaggaaaggctacaaggagcaggtggcatgtgagccgccacggagcttggcttggggctttctaagtggctagggcagaggggtgcagtccaggcagatggagggttggggcagaagggacctgtgaagaagtcctcctgtactatgggatcctcccctccttatcagggctctggcctggagctcagttcaaaggcttatctatgcaggaatgaaggcaacattcttgatgtagagtctaagagtctgaaggtcagggaacctttcttggataccctcctttctgcctaccagaaccctgtgtttcctgcctgctgggaggcaagtggaacacagtagaaccagatcccaagaggaggagaggctggagggggacccacagttgcat

SEQ ID NO: 231884 - DNA, 406 bp, Homo sapiens
gcagaagcccagaaacagaaacagaaacagaaacttctggggagccagtaccagggtaggaaaacttaaagtgtaattgactcatagctggaggcttagggtggacaaatttgagagctaaaaaatctatagtggccaggcatggtggctcatgcctgtaatcccagcactttgtgaggctgaggcacgcagatcactgagctcaagggttcgagaccagcttgggcaccatggcaaaaccccatctctacaaaaaagacaaaaagtagccgggtgtggtggcacatgcctgtaatgccagctacttgggaggctgaggtggatcacctgagcctggggaggttgaggctgcagtaagccgagatcacgacactgcactgcagcctgggcgacagtgagactgtct

SEQ ID NO: 231885 - DNA, 352 bp, Homo sapiens
caaaaatgtgttgattgtaattgttcccattttgattaataaagatgtgtttcagtctagttacaatgacttaaaagtcaccgtccaaagctgcaattacgtttgcatcaacctagtagaataattataccatagacaagattacaaagcaaatgaattatttctctaactgaatgcaaatttattcatgaagagagtaaagtaacatttgcaccagaaaatcatagctgaagccagcaattttccagagggaaatttgttaatgaacctttagctattcagagaataatctttttcaaagcttgataacatctataaccctctccctaagacaaaatttactaaggttttt

SEQ ID NO: 231886 - DNA, 236 bp, Homo sapiens
tatgctgcacctccttgaggtccaccgttttttagctcccacataagagagaggacatgtgatatttgtctttctctgcctggtttatttcacttaacagaacgtcttccagttccatccatgttgctgtaaaagacaagatgtcatttttttatggtgtgttattttttaagaaacaaaagacagtaaacgcagtgctgtcttgagaaacacagtggcccctggggcctggattc

SEQ ID NO: 231887 - DNA, 482 bp, Homo sapiens
ggttttgataaacggggggcgtggggggaatgtgaaccttgaaagagccaatccctcggatgaatcctgagtggctaatagcctaatttcaaaagagccaagtggccatttgcttactagaggtcgcacacatacttggagttcctggaaaacctgcatgtctgcttaggggctttcatagctgcctgttcatgtttgtgctgcctgagccaaccaatagactgtgacctatgtcaaccaatcagaactcagcaagtgttgaccaatcagaactcaccaaacatcaaccggtcagaactaagcaagtttgaatcctttatttgactaagtggacctgagtggaacctggatgggatctttcactataaaagaaaaaccttccctttgctctctggaacgtaccttcattttacactgaaggctgtgtctcttcggtttgccaactgttactggaataaagtctctttcctctaaaaactctt

SEQ ID NO: 231888 - DNA, 413 bp, Homo sapiens
ccttgatctaaatatgaagtgtttttactctgtgagcagaaagtttttgaaactagttcatgaaggtgagtccagtggtatttttcttttttacttctcagccttctacgaaaggcaaatataagacagcaaaatccaaagaatggagttattaaggctgcaagtggagtccgaggccagttccatgccaggcatggtgcgtgcactgagagacagggatcctctgctccaggagccgaaggcacatgctgttttgcttactactgaactctactacacatttaaagaagaaccattaccaatcctactcaaactcttccaaaaaactaaagaggagggaacacttccaaactcactttacaaggccaccattaccctgatacccaaaccagacaagaacacaacaacaaaaa

SEQ ID NO: 231889 - DNA, 1014 bp, Homo sapiens
cttagtacagccctccaactctcagaaataatctgattggaagaggtgactggctttatccctacctgcattgatggtgtctctctcctccctcagggcaggcagcctagaattttaaaaaattactctcttctccttgggggaaggcctgaagacttgtatttgttgtgaagcctgaagaaaaaagcgccaccagttctcagggctcctctccactgtgactgggagctttgatgtgcccttttgatgttcctgccttgaggcagctggagaagattatcaaaagtagccttaacagttcagggtggagttgggggtgcagcaccataacacgtgggactgcacatccctcacagtaactcactgagatggggttgccgtagtgcaggtgggattgccaggtgccaggtgcccctactgcagcctgcacggaggggaccgtcattttcagactgtccttttagcaggacttcaatgtcaggcctccaaagaagtctacaaattccatcagtcagtaacggcttggagttccaaagcttatgactcaaaggtgatcagagcatggacctggggctagtctggattggtaactgctaaacttggatacatggcttctgatggccctgctggggagaccatgtggagagatggcatagagccagagattcacgttccaggagccctgactgtctcatctcagggaattgaatctccttgtgctccagaccctatgagaggatgccatcccctgctaccatctgactgcaacctcaggagacaccccaagccagaactgagcagccaagccactctcatattcttgacccatagacattgggagataaaaactgattgttgtcaattttagtcagtacattttagggcaatttgatgtcctagcaatagactagtatatttatccattgctgcatcttcttctgcttagattatgatgcatgttttttagctccaactagtatctaaacttgtcatggtctttgcttgaaagtttga

SEQ ID NO: 231890 - DNA, 706 bp, Homo sapiens
ggacagggcatgagtttttaatcctgggccacaagaggccctgacacttcctctgttgctctcttgaaaccttcacgaaaggaagccaacctaggcagcatccaacactgactgccagacatgtaagtgagaccatcttggatttccccgcccagacgaccatctggctgaataagtgaaatcaagtgaaggcagaagaggagctgcccagcaacccacagaatggcctccaaagaagtctacaaattccatcagtcagtaacggcttggagttccaaagcttatgactcaaaggatacatggcttctgatggccctgctggggagaccatgtggagagatggcatagagccagagattcacgttccaggagccctgactgtctcatctcagggaattgaatctccttgtgctccagaccctatgagaggatgccatcccctgctaccatctgactgcaacctcaggagacaccccaagccagaactgagcagccaagccactctcatattcttgacccatagacattgggagataaaaactgattgttgtcaattttagtcagtacattttagggcaatttgatgtcctagcaatagactagtatatttatccattgctgcatcttcttctgcttagattatgatgcatgttttttagctccaactagtatctaaacttgtcatggtctttgcttgaaagtttga

SEQ ID NO: 231891 - DNA, 537 bp, Homo sapiens
  misc_feature (36)..(36): n is a, c, g, or t
  misc_feature (49)..(49): n is a, c, g, or t
  misc_feature (58)..(58): n is a, c, g, or t
  misc_feature (73)..(73): n is a, c, g, or t
  misc_feature (99)..(99): n is a, c, g, or t
  misc_feature (102)..(102): n is a, c, g, or t
  misc_feature (140)..(140): n is a, c, g, or t
tgcaagatgcctttttcaatttggacttccagcctncaagaagtggaancaataaatntctgagggtctgttntagcatttcctttgaagcagtggaanttntgtgcaggcggcaacatgacaccggcctcttatacatnaaggtgaaatacttcctgcctcagtgaaatccggctcccagtgaatttctttggtttagagagcaacttgaggattttgcatttggcaccattcaatttccttggcatctctccatagtcaccatttagaaggctcctggtcagtaggatttctctccctcttacactctgtagagattaaaaaaggattgtattacaggggcttggaaatgtgatggaaaatgaaatttgctttagcaaaaatggaagcttttgaaactcaagttgttctaacaggacccttagacaagaatagtttttaggggagcaaaatggcagatacggtttaagttccttatttagattgccactaagaaatattatgatgtgtaaaatcactcactcaaataaagcggat

SEQ ID NO: 231892 - DNA, 357 bp, Homo sapiens
catttaggggatgagatgagacagagaggcatggcgggagaggggtgacagcttggatcccagctgaggaggtcaggccttaccctgcagccttttccaggtttcaaggccaaactctcagactgctgttaaagggaaatcattctgggggtgttatggacacagcagggtgaggtagcaggggtgggtgaggggccatagatggagctgctggggcctgcggtgggcagaggactccagagcagagatcagggactcctagggtgcttgggagcacagaggactgtgcctcggacctcttcctagggtaagcaaatgccaacaatacctggtgtcactgaaaaaataggacaatag

SEQ ID NO: 231893 - DNA, 410 bp, Homo sapiens
ccattaggtgcttttatattcatctcaaaaacaaaattctgaactcaggacttggcaaattcaatacagaggagctcctaggattccagttatcctgccaacttctccaggaagaaagaaacaacttgcatgggtcttctgctgttggcttaattataaagacatcattttgcaagctgaaggctgagtttcattttaaacaggtgcttaggtggtggtattcgtgaatacttttcattccaagcaagaagactaaataagtagcaagtatggatgacttcagggtttaaaaaaaaatgtcttccagtttcagccactaccatgataagcacagtagagactgcagcagtaaattccaaatatgtgtttctaatttgacgtgaaagatactaaaaaattatatatttaaa

SEQ ID NO: 231894 - DNA, 477 bp, Homo sapiens
atggtaagttagctgcttgagtccaaactgtggtttacttttttagtaacctgggacaagtgacttcgactctcattatctcaatcataattacctcacttataaaatggatagacaaatcctgtaacactgaaactcacctgtgcatgtgtggatgaaatatgattacgtgtgtgaaatttgtagcacaaagaaagcccttcctttgggattgccttttttaccttgccaaccaagggcatttgtctccattattttttagttttttctgcccctctgaagccgaatcatttccccccacatagacactctcgcctttgaagtatggattacatatgtctgtgggtctcacttgcatgcctgtctttccctctaaattgtgaactcctgtgtccttactgaatctgaatcctcacaccaggcacttaacacacattaggtgagttgtgttaagctgaatgatactttaaaaaaaaa

SEQ ID NO: 231895 - DNA, 611 bp, Homo sapiens
aagtgggaaagtgaagtggtaccactggcatctaatagggattagggatgtcactaaacatcctacaatgcacaggatggtctcctacgacaaagagttatctggcctaaagtgtcaatggtgtcaaggtcgagaagccttgtttcaaattattcatttactctgttttgcccaaatatttggtggcacttaggaattcaaaagaatgtagtttctgaattttctctggtaggctattccagttttttgttattgttgttgttattttagaggattaaaaaaataaaaagacaaaggtggttctttaaatatgggccatagatcattggtcattagtaagggttctctgtgtctaaaatgctgtttgcatgaaaagactgagctttataaatgcatcttaaataatatttaagtattgaccaaaagtataaaaaggaacatctggataaatgattctaaaaattatatctagaaaagagatgaataaatttcattttccactaacaagttgtcacaagataggatgtcattcatggggtgggtcttttgtttaaggatcacttttttttttttttgaagagcatgtgatgttcatatccatcaatcttacc

SEQ ID NO: 231896 - DNA, 819 bp, Homo sapiens
caggtagagtgcttctcaggaccaggatgaactcttggtgctggtgttttgggcagaaagagcccctgggtggaggttgaggccattcttgaagaaagacaaggataaagaaggattttggaggggaaggttcttctggaaggggagggtggaagctttattcagcttctacagagatgtcctgccagcagagccagcagcagtgccagcctcctcccaaatgtacccctaaatgccctcccaagtgtactcctaagtgtcctcccaagtgtcccccaaaatgccctccccagtgttcagccccatgcccacctccagtctcttcctgctgtggttccagctctgggggctgctgcagctctgagggtggtggctgctgcctgagccaccacaggccccgccagtccctccgacgccgacctcagagttccagctgctgtggcagtggcagtggccagcagtctgggggctccagctgctgccacagctctgggggctctggctgctgccacagctctggaggctgctgctgacctgggccatgaggagcacggaggagaaggactggcagatcccaggtgctgaagatgtgtgtcagcctgaggcttcttttctctcatttcccatggaaggacttcggaaatgccttaagttcccctctttatcctgcccatgttcactccattgtagggttgaagtctagcttgtgatattttctggcctggctttccctctcagacatagctctttggagaactaggtgttgtaattcagttatgaagctattttctctgtaacaataaagctttttattcctga

SEQ ID NO: 231897 - DNA, 5428 bp, Homo sapiens
  misc_feature (1086)..(1086): n is a, c, g, or t
  misc_feature (4623)..(4623): n is a, c, g, or t
ggcaaagggcctcagccccgccctactgactgtgaattctacaacatatggagcgcctaccttgtgcaaggcattgtggcccttcagagacttgaagacagtgtgtgactctcctgtgagttaagagcactggctgagtcagacagacccgagtgacaagcccagcttcgctccctctcagcggtgagagccaagattttcttgcctcctgggctccctccacactatcctgtggctgtggcagatatgtcaatacccttacattcactgcgattcaacaatacaatgagggaggaaaatgttgagccccaaaacaagcagatggccttctgtagaccaatgacagagaccagagcagacgtacagattctgcattctcatgtacagttgcctatagtctcaacttcagcctcagaccctggagggacatccacacagttgatgacatctccagtctttgacaccatgtctgcacctctaatgggagtaccaaactctggagcattgtccccacccctaatgccagcctcagactctggggcactttccccattgctaatgccagcctcagactctggggcactgtccccattgctaatgccagccttagattctggaacattgtccccattgctgtccacttcagagtatggggtaatgtccccagggatgatgacaattcctgattttggaacgatgtccgcaacgctaatggtagcaccagattctgcagagatatcaccattggcaatgccagctccatcctctggagtggtgtgtacacctataatgagcacttcatcctctgaggcaatgtccacaccattaatgctagccccagattctggagagttatccccaattctaatgcaagatatgaatcctggagtgatgtctacacagccagtgccagctcccagctctgaggcaatgtccccattgcaaattacagatgaagacaccgaagcaatgtccaaagtgctaatgactgctctagcctctggagagatatcttcgctgctaatgtcaggcacggactctgaagcaatatcctcactgataatgtcagctgtagcttctggaggnacatcaccccagccaacaagcacccaaaactctgggggaatacctaccccgctcatgtcagatctagactctggaataatgtcatcgcttttaatgtcatctccaggctctgaagtaatgtccacaccgctactgtcagtcccagatgctggagaaatgtccacattaccaaagccagctccagatgctgaagcaatgtccccagcactaatgacggccctaccctctggagtgatgcccacccaaacgatgccagccccaggctctggggcgatgtccccatggtcaacacaaaatgtagactctgaaatgatgtctaatccgccagtgagagcaacagcctctggggtgatgtctgcaccaccagtaagagctttagattctggagcaatgtccacaccgctaatgggagccccagcctctggaaatatgtctacattgcaaaagacagttccagcctctggagccatgaccacctcactgatgacagtcccaagctctggagtgatgtccacagagcaaatgtcagccacagcctctagagtaatgtccgcacagttaacaatggccaaaacttctggagcaatgcccacaggctctatgaaagccgtggcaaaacaatacaagagagccacagcctctggaaagatgtccacgccactgaggagagctccaacttctggagcaatgtccacccaaccagttacggcaacagcctctgaaacaatgtccatgccacaattgacagtcccagcctctggatcaatgtccatgctgcaaatgagagcccctgtctctgaagcaatgtccatgccacaaatgagaaccatggcctcaggattgacatctgcagcacagatgaaagccatgacttctggagcaatgtccaccccactaatgacagcccaaacctctggatcaacatccacgctgttaatgagagacacagcctcaggagtgatgtcctgtccacaaatgagatctctggcctctggagcattgtccaagccactaatgacacccaaagcctcaggaacgatgttcacggagaaaatgacaaccacagcttctgaagcaatgcccacactgctaatgagagacacagtttctggagctctgtccatgccgcaaatgacagacacagcctctggagggttgtctgcatcgctaatgagagacacagcttctggagcaatgtccacatcacaaatgacagccacagtctctggagggatgtccatgccactaatgagagctcaagacccaggagtaatgcctgcctcactaatgagagccaaagtgtctggaaagatgctcagtcagccaatgagcacccaagatcctggagggatgtccatgtcgcccatgaagtccatgaccgctggagggatgcagatgaattccccaacctctgatgtgatgtccacaccaacagtgagagcctggacctctgaaacaatgtccacaccactaatgagaacctcagaccctggagagaggccctcactgctcacaagagcttcatcctctggagagatgtccctaccactaatgagagctccagcttctggagagatagccacgcctctgagatccccagcttatggagccatgtctgctccacaaatgacagccacagcctctggaatgatgtcatccatgccacaagtgaaggctcccatctctggagcaatgtccatgccactaacaagatccacagcctctggagggatgtccatgccactgatgagagccccagactctagagtgacatccacatcacaaatgatgcccacagcttctggagacatgtgcacactaccagtgcgagccccagcctctggaggggtgtcctcaccactagtaagagctccagcctctggaactatgtccacaccactaaggagaccctcagcctgtgagactgtgtccacagagttaatgagagcttcagcctctggacatatgtccactgcacaaacaacagccatggtctctggagggatgtccaagccattaatgagagccccggcctctggaacaatgcccatgcctttaatgtcagccatggcttctggagagatgtctatgccgctaatggaaaccatggcctctggagcaacgtccacattgcaaaccagtgttgcgaactctagatctatgtccttgtcacaaacaacatataccgtgtctggaaggatggccacagcgccaattagagcctctgcttctggagcaaggtccacatcatttatgagagcctcagtttctggatcgatgcccatgccactaccaagagccacagcctctggatgtggcatgggtatgtccatgccacaaatgacagccacagactctagagggatgtccacaccactaatgagggcctcaggccctggaacaatgtccacaccacagacagcctttggagtgatgtccactccggaaatcaaagccacagactctggagaggcatccacctctcacattaacatcacagcctctggatcaaagcccacatcgcacatgactgccacaactcctgaaactgcgaaaccaccaccaaaggaagtgccatccttcggaatgttgaccccagcactctgctacctcttagaagagcaggaagcagcccggggctcatgctctgtggaggaagagatggagattgatgaggagaagcaaatgaaggggtttttggacgattcagagagaatggcatttctggtatctcttcatctgggagcagcagagaggtggttcatcttgcaaatggaggtaggagaacctctctcacatgaaaataaatctttcctgagaagatcccagggcatatatgactccctatctgagatagacatcctcagtgctgttctttgccatcccaaacagggccaaaagtcagtcaggcagtatgccactgacttcctgctgctggcccgacatttgtcttggtctgatgccattctacggaccaggtttctggaaggactctcagaagctgttaccaccaaaatgggtcggatcttcctgaaggtggctggcagcctaaaggagctgatagacaggtctctgtacaccgagtgccagctggctgaagagaaggattccccaggcaactcaagccaggttctgccaacagcctgtaagcggaataatgaggaggccatggggaatgaactgagctctcagcagcagactgaggagcaccagcatgtttccaaacgctgttactacctgaaagagcatggagacccccaagaaggtcttcatgatcaccttggacagagcacaggccatcatcagaaggcccataccaacaagtaaaactccatggaatcttctcctgtgatatctgactcgaccgctaactggaggactggttcctggacccattccattaaactacattataaaccttgttgccttcacccttcagcctcccgctccaggcacatcccaccttacctctcacttggctgatttgaccttctctttcacccacatgcctaagacctgccctgacaatcagagtanggactacaagagtgtatggtgtatgaggttctgaactcccatcaccaccgaggccagtcctagttcttggtccagggagaagtctaggcaggataaatcatatcttacctcaaaaaacccttagcgtatcttgccatgtgtcagcaggcaaacttgaggaagccctggttctatttcacctggcaggggagcctataaggagagcgatgcccactcctataccacccttgtaacccagtagacttgccccatatgccccaactcatagcacctaaaatgggtctccagggtccttgccctgtttatagtatccatcctgaaccattcgttttgacccataataatagtgatagtataatggctaccagttattgataatgtatcatgtgacaggcattgggctaaactcttgacaagcaccatctcactacattcttacagtaacacaacttgttcttgtgttgtcagcttctgacctcttgatctgttgtttatggcctttgtcttgtccctcagtgggggttctctagctctgacctctgggtgaccccctcagttgttgattgctctcactccccttggctgttgtgcttcatggccagcactcttgatgagggtcttggtctataaacaggcatagatagctagaacataatgtgagcagtgtttgccttcaggtggtggggttatgggtagtttttattttcttccttctacttctctatacatttcagattctctacagtaagcatgtgttacatttgtaattataaaagtaagtaaacttcatttatgaaaaaagaaa

SEQ ID NO: 231898 - DNA, 317 bp, Homo sapiens
ctaaaacaattagatgaaaggttgatggggatggcttgtgctgatatgactgaacccagtgatcaatcttaatatcattcaaagtgggacaaccagatgttttgtctcataatacactataatactctgaggtattcgtggcaaaaaaatttttgaacttgaatctaataaatcctctgtatctaaactactagttacaggaaatacaatatataagagttaaaagacacaaaaaggataccatcagccaagtccaaaatgtaggaaattccatagaacaaatgacctggtttcttcaataaataaatgacattaaa

SEQ ID NO: 231899 - DNA, 467 bp, Homo sapiens
tatgttcaatatccattgacatttaccgtgttagaaagtaaaacagaaatttgtaaaaatatgcattatttcctttaaaatagcattaataaaccatatgctgtacatgttatcataaataacagttgaaaaataattgtattttccaaaacaaaagaattagtgagaagagtgacattgttttgcatttttgctgtcaaatgtctggctgagtagaagatagctgcattctcttacctgcttctacttacattcaatgtgttgagatatgttgttttggttcaaatatatgaaaaaagtctgtcttcacacagatacgtggttgaaaaaaggaagactatcttaatagccttttcaaataattgtggatatttttcttagattacataccaaaactggacaagtatagtttcttaaaggttaattgcaatgtggaacctgaaaccataaacttttcaattggtcta

SEQ ID NO: 231900 - DNA, 480 bp, Homo sapiens
aaaactatagtgctactatataaagttatataaaacacaccagaaatagaatttttaaaatatgaagtgggttctagtattttttccctacatcccgttgagtcattgtgatgtattcccaccacttggtatagttcaaatttctcccttccttgtttttactgcagaactctttactgtcccaagtagagtgagactgaaaccaaaatttgagcactgggtccattcattcaattgttcattcatttacacgttaagtatgaagcatctataatgtgaaatgcttgctgaattttcaggaggccataagaacggtatcaggcttggcctctcccctctcaaacataaaggctaattctagtgtttttcagttttatctggttggaaccctagaattcctgcatactgtaatgaagctaaactttacatctaaactggctatatgtattgcactacagtgcataagacaagaaaagttac

SEQ ID NO: 231901 - DNA, 404 bp, Homo sapiens
gggcagcagagtctatgacctggaaggcttttgccctttgggaggggaccctggcagcagcacatggtggagggtacagagggaaggggagcctccgaaggacctgccccagaccctcctctgcagatgggtggccttcaccaggttctggatattcccagcctgtgccttcctgtcttccagcaccagaaacctcctcccaggacagaagggagtacggggggtcattgctgtggaccccccatcttcctcatcccaaacacatctatgcttactgtgtatccatcagggccagttatgcctgcaggtttcactctcagccccagtgacaccaggtgggtgagcaggggctgtgggtcactaagatgagcttcctggcagctggactcagagcccctgaggta

SEQ ID NO: 231902 - DNA, 1053 bp, Homo sapiens
ctccacaccaaatggctaagcatttggttctgacattgttttgccggttagtgaaatcacatttgcgattcagaagcacattttaagaatacagaaaacagtgaaaagaggatgaagaatgttaacattttttcctaaatgccatgaatagagcacgcatcagtaaattaaatgtctttcccattcttttataaaacagtgattatttttctcttgtttcattttagcatttataagaattctatttttccatttttaataactgatggaaacaagcatcattgtctgataaatttattttcatgctgtacacgtaactaccactttcatcatccactgttccaaacagatactgaaagtctcttttgtaattttctccttcccagtaattttctccatctacttgcagtgtatttgggatcctgacacctttccattctaggaggatgaagtgctttgggcagctatattttcttgtctgcctacagagactattcaatcacagcaagtgaagggttttgcagtgctagtacaaacagacaaggaaaaaaacatataatttctagttatttatagcctgtgcagctatgtggtcttatttatagcaaactgcacatttgatttgaaaaagtcatggtcatctggaggtcaaattcagatggcagactcaattcagagaaaaggagctgaactagaaggtaagcaagcctgttagactgggcaacttggacttgactttgctccttcaacaatctagagccagttggatgatatttctgcacaaaggtggttggttttacaggttgctcagtctaagctgcttctagtcaaataacaaatgtgaaaggagatagaaaaagctcttcagttgaactgataaaagattacacttagggagaaaatgtatgatggtttgcattataaaaacaataatttgccataaatcaggcatttctaggtttcaaacttttgtcataaaaaccaattttgagcattgcaattttagggacatattttattgttgttattttaaataaaaatctaaaccacaaa

SEQ ID NO: 231903 - DNA, 303 bp, Homo sapiens
gagggagaagaacggggaatcaatcagtggttcattttgcagagaaccaattcatgatgtaaacatgggggaaagagcatcagtaaatttgtgtcacacagcattaatgagaatgtaatcctgccttcatggaattctgcctgggccacacctccgctcctcagaacaagtggagttgagagccttggttgacaggctcaacaggtggatgcttccctctgttaagatgatcagtcttgatctgggggtgtattagttcattcttgcatggctataaagaaatccctgaaactgggtaatttg

SEQ ID NO: 231904 - DNA, 379 bp, Homo sapiens
atgccccatggatggagttctggtgggaaagcccagagcactttgattccagcctcagtctttggcagccaagttcccttgacatccagggcactgaaaggaaaagtcagtacaagacaaatgggcagacgttgaatggtctaaggtaaagtttgagactaaagcctgcttcgctagtaatgaaaaagtatcttttaggtcatgcttttgcaccatatctgaaggttaaaagactaggttggttatttgttgttttaagctggctttatctttacatatgtccagaaaatgaatagcggtagtttccattagtaaatttaattttcttttgaattgattatcaaaatagcagtgcttctccatttccctaacatattca

SEQ ID NO: 231905 - DNA, 334 bp, Homo sapiens
aagagcgaaactccgtctcaaaaaaaaagaaagaaagaaattatgaatcttattgtttccctttttttacctcttccttttctccatgccctcttgacctggagccaggaaggggtcttccatgtccttggaacaaggttacaagctgtagggtcccatgatatcaaattctgtaaactcattcactagaatagtagcttcactgctctgcatcgcatctttcctctggctcagggattgtcaaactatggcccattgaccagatctagcctgctgcctgcttttgaactcccacgagcaaagaatgatttttccaatatttaaatggttgaaa

SEQ ID NO: 231906 - DNA, 813 bp, Homo sapiens
gtaagcctgataatcaaagtcttgggcatcgtggccgtcgtccaagtggccctgatggggcagcgagagaacatatccttaggcagcttccaattacttatccatctgcagaagaagacttggcttctcatgaagattctgtgccatctgctatgacaactcgtctgcgcaggcagagcgagcgggaaagagaacgtgagcttcgggatgtgagaattcggaaaatgcctgagaacagtgacttgctaccagttgcacaaacagagccatctatatggacagttgatgatgtctgggccttcatccattctttgcctggctgccaggatatcgcagatgaattcagagcacaggagattgatggacaggcccttctcttgctgaaagaagaccatctcatgagtgcaatgaatatcaagctaggcccagccctgaagatctgtgcacgcatcaactctctgaaggaatcttaacaggaacatgaagccttgataaaacagcagttttacttttctcacaaaaacttgtaaggtaaaggcctaacttggtctagaatatgacacttattgtggtggatagccaagcacattgggatctccacatcaaatactgacatttcttctacaggtataataattcatcatgcattttcataattaataaacattggtaaaattaattttacaggttacatgaaacattgaaagacttgttacagagggccatgatatttttcaaagaaatgtgttatactagataatttttttaaaggtgatgtttatcattaatataaagaatccttttaaaagtaat

SEQ ID NO: 231907 - DNA, 467 bp, Homo sapiens
gtaagcctgataatcaaagtcttgggcatcgtggccgtcgtccaagtggccctgatggggcagcgagagaacatatccttaggcagcttccaattacttatccatctgcagaagaagacttggcttctcatgaagattctgtgccatctgctatgacaactcgtctgcgcaggcagagcgagcgggaaagagaacgtgagcttcgggatgtgagaattcggaaaatgcctgagaacagtgacttgctaccagttgcacaaacagagccatctatatggacagttgatgatgtctgggccttcatccattctttgcctggtatgtaattcatcactttggccttaatatttttcttgtgcattcacacacagcaatgttagatacatccacaccttttgcacaaaagggctagagaagtactgtgtatatgtataaataaaatgacatttgttattgaaaaaaaaaaa

SEQ ID NO: 231908 - DNA, 431 bp, Homo sapiens
agtattatattgagagatatattatggtatacacagagcctgttttttgacctttagcataagtaaatccattgaacagtgtagttactttatgaggtcttacattcattaatgatgtattgtggtacttactgattcacagttgcactttaaagtcacaattaaatactaaatggattgtcccatatatcattaaatattttttctttcttgaatttcttaggtacaatgttagctgttctaaaaaatttgcacttagtcgttggaatcgtaagcctgataatcaaagtcttgggcatcgtggccgtcgtccaagtggccctgatggggcagcgagagaacatatccttaggcaggtctgtataaaccttgcttcaatgtaaaatacccttttcagaaatgcaaggaaagtgcaatgctgtattttgctt

SEQ ID NO: 231909 - DNA, 516 bp, Homo sapiens
tgtgtgtgtgtacaagaggcctaaccctaactagtctgaaatctcagtttaataccaagaagatgatcgcctctgaaaaggggacatctgatctggtgaaccatttgttttcaaatacaatttaggtggccttgtatacctaacatagggtgaaggtagacagcgaccttggacaaaaaccaccgttttgtatacacacaaagaaaaactaagggggtggaaggtaggattggtgggagtgcctgatgaaggaggtgcaagagacggagtcagaatgaaatgaaggggggaggacgtgcagcagcagtcagtttcctacattcagagtgtagattaagctctcaggctagccgatgtgtacttttgcatttatggatttcttggggagtggggaggagaacagaactttttaaaagtggcacaagtatttcggttttcaggcagatcattgcactgtttagctaaaaattaagttttaaagctgaataagaaagcattgaaacataagcacaaaaa

SEQ ID NO: 231910 - DNA, 399 bp, Homo sapiens
gaagagatgtgatgcttcctttgtgattgtgttacataaggttgtaactttcatattgctgggtgcttctctccctcactggcactggagaaatcagctaccatatttcagaggcccacatggcaaggaagggaggccatctttgccaacagccagcaggaaactgaggccttcagtccttcacttcacaaggaattgaattctgccaaaaatgttgcaagcttggaagtggatccttctccggttgagccacagataagaccacagcactggctaacactttgattgctggtggcagtcttgtgagaccctgaagcagaaaatctacacaagccatacccagattcctgatccacagaaaccatgagataataaatgtgggctggtttaaaccactaa

SEQ ID NO: 231911 - DNA, 447 bp, Homo sapiens
gcaggtagaggtcaaagggttgggagatgggcacctgtcaaatttgccaccatgtacagcgtaaccagatgccgaaatgcaggctctggggacagcatctatgggattcagaaagagccagtgacaattccagcacccacttccaatgagcatgctaatgtcacaggcgtggtattcagcaggtgtgacgagaaagagctggaagcggggcaggcagaggctcacctgtctgggtctcctccggggtgccagtctcccttggtggtttctagatgctgtcttcaccgattcacacagactccccccgtggggtaaggataatttgctgatattacaaagcaggaagccaaagcccagagaggtttggtgattttcccgagggcacccagcttctaaccagcggagcaaagcgttgaagcctgggtgacagagcgagattccatgtca

SEQ ID NO: 231912 - DNA, 578 bp, Homo sapiens
ccagccccaattgaacagtgagtgaaccatgattggttcccactccttctgccaatgactgctttaaaaattggcatgtgacacaactctggccaatgaaatgtgaggggagatctgctggaggggcttctggaaaacttgagtttatctttaaaaatctgcagaagagacgttcccttcatcatgaggtttagatacctggaactactatggcctctgccagacccagtggagagctagtagaggacaactagaggacgctaagggtggaagtgcagtttctgcacttggaggaccaggtggaggacaagtagggcacactaagggtgtcagcagtaagatgacaagagccggaatcaaatgagtctccacgtgaactctggagccctcctaccttatgacttcttgttaatagaaaaggtccttatctcttaaggctattttagttgttctgtgttacttacagttgactaagtgatgtgttaagggctcaaaaaatggtgtctattatttattcccttgattctaagaccaatgtataatctttaacatttctgaagttaaaatgtgttttccta

SEQ ID NO: 231913 - DNA, 288 bp, Homo sapiens
tgggcacggtggcctgaggctgtagtctcatctgcttgtggggctgaggtgggaggatcatctgagcctaggaagtcaaggctggagtgagccataattgcaccactgcactccagcctggacaacaacaacaacaacaaaaaggaaaatttaggagaaaatttggatatagctacatgttagataatagtaatgaaccaatgttaagtattccaaatttatgtgaagatcttttcaaaatacttaattctgtagtggttctaaaattctattggcagtcagtaaaaa

SEQ ID NO: 231914 - DNA, 523 bp, Homo sapiens
aatgcacacaaatatatgacaagaggggaacaggcctgtgcctcagtttcccctcttctcccctgtcgctggtctttgcaccccaccactcaatgagcgcattttgttggaaaccacctaagatgctgctgttcttccactaagtttcagaatcactttggtttctgccactggctggccgcccactagcaggccgtgcgagagtccccaggtcgcctgtgcctgccaggccagcaacaacagtctcctctcactggggcttttactgcctcagcctgcaagtttcccttctagtgaaaaccttcgtctttctttccctacccaacctctctcaccacgataacaacaacgaataaaaaaggaatctcttggccagcctttgtaataaaagaatacgactgactgaaaacacttcataattttatcttttttttgtcattgttcgtggttcctcattaacacacttattcccatttttggtggatttttttacttctattatttgggtcacttgcatataaaa

SEQ ID NO: 231915 - DNA, 339 bp, Homo sapiens
caccctgacccctccagcttttgaccagatcggtggttacgggcagctggaggcagcctacgcccaggccattccctccaggaccattgccaacaccacctgccacctgccacgtacagacgccatgcacatgtttcgagacccccacacaggggacctgccgtggaccgggatgacctttggcctgaccatcatggccacctggtactggtgcaccgaccaggtcatcgtgcagcgatcactgtcagcccgggacctgaaccatgccaaggcgggctccatcctggccagctacctcaagatgctccccatgggcctgatcataatgccgggcatgat

SEQ ID NO: 231916 - DNA, 365 bp, Homo sapiens
acacacacactggggattgtgggcctttcatgtcttcatttccagtgggatacaggaataatgaagtttctaaggcagaataagggtcacagattttatttaggtcattttgctacaattctaatttgtctttctttttacatgtattatcatgccattaataacaaaactttttaaattgtatttttagaagttctcctgggttctagatagactgtgatagcagggtaacctttagcaggttacttacctttcctctttaggtcccgggttctttaccaataaaatgagaatgaaaactgtatctagtagtgtagtttgaggattgtgggtatttgtatttagcacagtgcctggaatacgtt

SEQ ID NO: 231917 - DNA, 574 bp, Homo sapiens
gtaatacagaaagccatgcgcggtagctcacgcctgtattcccaacactctgggaggcagaggttgcagtgagccaaaatgacgccactgcactccaacctgagtagcagagcaagactgtctcaaaaaaaagtaatatacataaataacaaaatattatatagatatagtaaggattttaaagtagcatatcagttcttaaaagggaaggtgaatatgtaagtatattaaatgctgataattattattgcttctggatacatttcaaagtttctttagcatccatttcaaaggtggctagctttgtcgcttttaaagagaattagaattgagattttgcaaaatcacatcccatttggttcttggtattagcttattttaaatgtattttaaacattaagaaaatactaaaattcctatgtgagatagttaagaaatattaacattgaacacaatggaaattaaggaagaactaattaagaaagaatagcttataaaatattagtactttgtaattctgtacattaaacattttccttgcccaagggaaaaggctcatgtattatccctagcc

SEQ ID NO: 231918 - DNA, 299 bp, Homo sapiens
gtagtgctagcggcttcgctgttcggtcctcggaccggcagccgccactggtgttgagctgctaggaagcccctatcggcgagctcgttggagctcgaacccattgtcacccctctgactcaccggcaaaaatggttgaagcagatcgcccaggaaacctcttcattggtgggcttaatacggaaacaaatgagaaagctcttgaagcagtatttggcaaatatggacgaatagtggaagtgctcttgatgaaagaccgtgaaaccaacaaatcaagaggatttgcttttgtcaccttt

SEQ ID NO: 231919 - DNA, 190 bp, Homo sapiens
taaaagggttgcaacttagccaccccaccctaaatgaaacctatcatgtataacatcacattacctggaacaggtttgacttgatttagtaaaaccgaatatacaaaaacgtgtactaaaaggtcaagagatagagaaataatgtttcagtttgagaaataaacatttttttaactttaaatattgactt

SEQ ID NO: 231920 - DNA, 412 bp, Homo sapiens
ggactgcctgaactcagggcttgggatttcagctatccttcagacaccatcaccaaccctgatgttgcaaaaacaatgagagctccccacaagagctgccatgtgagagaagcctctccaccctctctgtgtgtgacaagaggtcacaagcagatggaaacctgccttgcttggcccaggctgggggagtggaaggactgactgctcccatcctggtttgacaattactgccaaggagccaaggacattctggccacaagagtgtaattcagagtaaacagctgagaacgtcattcattgttaagccctttaccactgttcattttctcaaaagaaattattctgataatattaattactgccattcatgcagtgtttgttttatattagatgctgaattgagcacttgaca

SEQ ID NO: 231921 - DNA, 184 bp, Homo sapiens
caatgactacaggactggggacaaacatcaatttaatgattatctgagcaaaagtttctttattcacaactaacattctttattcatataaaatacgttaacagtctagccttctttaaccttagatacacaactgacccaaatattggtttttagaaatacattatgacaattaggtttaaga

SEQ ID NO: 231922 - DNA, 589 bp, Homo sapiens
caagaaaataaattgttaatagacacattcctttgttccaaactgcagtttcctgaacttaagtcaagcatgagctagggctggggagaagatttaaatctgaagtgatgttgatattttgaaactagttcctaggttaagcttcatataaactaaaagagtaagctcataaggtccacagtggtggacatttttgatgcactaaaatgctcctcaagcaataaagtgagttttcagaaccatgagctttatagcaatcatactgtagccttttcaaagaaaggagcattccagaagaatggctctaacactgttgacttaaggactaactggagcaagccctgcttgttaaaagctgaaaatcttgagctcgtaaacaagtttgaagtcaagtgaacttttaagcagagtgctatgggttgaattatgttccctaaaaattcatgtgttgacagcctaaccacctgttcctaatactgtccttacagaaataatcaagttaaaatgagatattagagtgggccctaattcaatatgttgtgatgttcttataaagatggccatctgtaagccaagcagagaggcctag

SEQ ID NO: 231923 - DNA, 619 bp, Homo sapiens
aatcagagccatcacactggatagttgtttttttcttatttgactgtgctgggtagtatatccaacagttaatgcagatagtgggtatccttgtcttggttcctgacctaagtgagaattcctctagtgtttccccatatgcaagacgtgttagctatgctgatgttaggactgaaatcatcatgttaagaaatatacatcattcttattattttaaaaatcaggagcacatattgaattttgatgattatcaacatcaatgcaagaatcatccttgcattcttggaataaaatctatttggtcatgattttacatatatgtacatttgtgcttgtatatgtgcactcaaaacttaggcatcatccttgatttcatttctatatcatacgtcacactcaattcatcagaaaagcttgctggtgttgccttttgtgtacaaccctaatttgatcattttctacatttttcagctgcagcattctattgcaaatctgtattgtttttatctgaactaacacaagagtctcctaaatggttcctctatttcttgtcttctacccttacagtcttttttgcacaaaaatcccttcagtagtttcttatcctgcttaaaataaa

SEQ ID NO: 231924 - DNA, 265 bp, Homo sapiens
gtttgttccctgctcctttctgggagctcctcatgtgctggatggcatctggacactggtggataaatgagtggagctactttttgagaggcttttgctaatttaagcccataagtatgtattactggttaaggataaatgagcattatttactatgaaaacacacaaatggacaatagaaatgttgatttattgtcattattctgaaccctatgtaaacgctttttttaaaaaaagattaaatacatacttgtaaaatcctaat

SEQ ID NO: 231925 - DNA, 326 bp, Homo sapiens
accatgcctggctaatttttgtattttagtagagatagagtttcaccatgttggccagactggtcttgaactcctgacctcaaatgatccacccgccttcgcctcccaaagtgctgagactacaggtgtgggccaccacgcctgaccatatatttacctttatgtgaatttaaaatgtgtgggcgtgaccaagtcgtctgccggctgttatataaaggagactttatcatcaacatgctcatcatcagtcacaaactgcctatttggaactcccttcagttctcagaggatggaaacattctttaagcggccttgtagaaatccta

SEQ ID NO: 231926 - DNA, 424 bp, Homo sapiens
cctcccatccacctcgacctcccaaagtgctgggactacagacgtgaagcactgcgcctggccaccctcttttctgacttttatctcctttgtgtctatgctgcactaacttagtaatggtcatatattgttttgtgtgtgtgttttactggttggtatgaggcttcttttaccctcattttattaaatggcaccagcacctacataggtgttttaagccacatactgagcagttatcctcaattcttcgcttttctgctgggaacatgtgttctaagagtgaatcctatcttttcctcctccatacttatgttcttgttttttcacatttctccatctccattgtaattattcctgatcaagccatctgaattctgccataacctccagcatattcccttctataatttcatcttttcaattc

SEQ ID NO: 231927 - DNA, 398 bp, Homo sapiens
taatcccaaattcttcctcaaataaaatgaaaaactccattccagtaaatggtaaatacataaaagttacagtaagccagagacttaaaaggacagccaagaagtcttccaacagtttattagaaagaatgtagacatgaaaaaaaaaccccactgtcatgaacataaattgaggttacacacacatgtatgtttgtacatatctaaacgttattctcacaattctacaaagcagctagctccattttacagaggaatattttaataaacataccccaggccgggtgcagtggctcatgcctgtaatcccaacactttgggaggctgaggcgggcagatcacttgaagtcaggagtttgagagcagcctggccaacatggcgaaaccctgtctctact

SEQ ID NO: 231928 - DNA, 505 bp, Homo sapiens
ccctttgattttataaattggatgaaaatactgattatgggaattaacttgtccttttgaaggatctttcttcatatatatacatacataatattttcctactgtagtgcttgttgaatttattacccatgtactatatttaaggcattctaaaaatgcttgtcccaaaggcagtcaaagatggctttttagaggatgcaatgcctaagctaagtctttttttgtttctctgaaggatctaatcaaaagaatacaaaactaccatcatttcaccatttacaaagttcttctgttaatagagccaatacatcagcagatatcatttccacttttgtatgtacataagaaaatttggtctgaaacctgagcaaaattaatgaaaaatattaatttgaactaaatggaaatcattgcttttataatgatatgcaaacctgtcttctttagttatatttgttaaatttttgtctttggcacagtcatctatgaactgactctgtctcaa

SEQ ID NO: 231929 - DNA, 371 bp, Homo sapiens
tctgaaatagttgctctattgtgttatgtgctcaaagaaagcatgtgcttgtaaaggttaaaaaaaagctcaaagctgaatagaaataagtttgctgagactgtcacttaagctgattggacaggcccttaactggggagcatacaacatatacttctaatcaatgtgacttgctctgtgactctggaaaatctactaagcctctctgtgcctgcacttcttagttacacaatgaggaggatatgcagaaggcagtctgctgcagagatcagaagtgtgggttctagggtcagactgcctgggtcccaattccagtcatctcagctacttaccacagtgctaccatcattaaagctgctacaatcatgaaa

SEQ ID NO: 231930 - DNA, 684 bp, Homo sapiens
atggcggaggaactcataagagttcatcaaagacatccctgaaattaccgtccctgaattctgctcaaggagtgcagcaatacactcactctagggccaaaagtaaagacgtttcatgacctcaaagcagatgctgctttaggacagatatttccagaagttattctattttgctgagggtgttaggcttttctgccctctttttttacaagtaagaaaatgagtgaaattgtgtccctgtcactgaaggacttgatccctctgattctcagttcccatctgacttacatcttggtcctggagctctctgactggttccttcaaattcaatagaagaggttctcaaaacatagagcaaatatacacccttgagaagcgcacatactctgttgtatacaaatgctttaccaaacactaggaaaggaagaagtacatccagaaaaaggtgggcttccaggctgcaactgctctgaccaatctcgggtgactgtcatcccagccctggggctcctgtacacctgtgcaggtctcagggcagcaggagtcctggggcagacagatgactctggaaaccctcagccccatccctcagcaccgcctccatccacccctcctgtccctccgcttctccacggagtcccccggggtagtgagggacagggatgcaggggcctcccctcccag

SEQ ID NO: 231931 - DNA, 456 bp, Homo sapiens
aaatggagttgggtaaggactggctgtcaaggtaggaggaaaaccagtgaaaaaccagggcctgggaaggagtgctgactctgcagaatgatgctggggctggaaccagccctggtgatgtagatgtagttgatgtagagcctcgtgggaaagaggttgggatttagtagtattttcctgggaagccactgtaacattttaggggtgggagataaatctttagatagtttatgaaaatctttttttttttttgtctgctaaagagaatggactggtggcagagcaagaatagaagtagaaagctaatttggacacttgtagtaatctaggcaagagatgactgtggtcaggagaaaggtagcagcattaggtattaagagagagggtagatgtaagctttattttggatgcaggagttgctgatggattaggtaagtgtgggtaagggcagtgagg

SEQ ID NO: 231932 - DNA, 241 bp, Homo sapiens
gcttgtgacctcatggttgggaatggtggttttagtcaattaactgtgtcagccacaaattaatcaattttatttagcatgaataagatgaaatgtcactggtgaagactctactaatttttattcgattagttaaattttcactctaactcctctaatatttaacagaaagatttaaaacatgcatgaaagcttagaaactacaatctaatgacagattaaaagaagcttattaaagaaa

SEQ ID NO: 231933 - DNA, 453 bp, Homo sapiens
tatttgacatgcaaagggcttgggttttgccattaattccaccatttatattattaggcaactttgagaaaaacctatacaactctatagtttagtctcacagtgtataaaatgggattagtatctcactcaccagtaacggttataaaaatgtaagttacaggccgggcgcggtggctcacgcctgtaatcccagcactttgggaggccgaggcgggcggatcacgaggtcaggagatcgagaccatcccggctaaaacggtgaaaccccgtctctactaaaaatacaaaaaattagccgggcgtagtggcgggcgcctgtagtcccagctacttgggaggctgaggcaggagaatggcgggaacccgggaggcggagcttgcagtgagccgagatcccgccactgcactccagcctgggcgacagagcgagactccgtctcaaaaaaaaaa

SEQ ID NO: 231934 - DNA, 440 bp, Homo sapiens
cgccccacaggcccgcgttgctgcttgagggactctcattgtcgtaggccgcctcggcatccactctgaatctaggctggactttctctgaccggaagcggggctgccacccgggacagtttccaattcacatcccccgtcctcgagctgatccacccagacgcccgccctacgcactgtcccctggtgaccaccccctgtgtccccacagaccccacgccccacatggactgtgcagctgcaccacggagtccccccacagtcagcgtggccccacggggctcgtgccgcttgccttaaacccaccagttaaaactcccccaccaggcatggtggctcacgcctgtaatcccagcactttgggaggccaaggcaggtggatcacctgaggtcaggaattcaagaccagcctggccaatatgaaaaaccccatctgtact

SEQ ID NO: 231935 - DNA, 307 bp, Homo sapiens
atttgcattgagctagccctgctaccttcagggatttcagaatttttttctcatgtaatggaaggaaaccagcaaaccaaatccagaaataaagcaaaaccctaactaggagagtgttttcaagggagagattgctatagcatcagcctcttgggtttggagaatgagcttaaccatgagatttaggtttgagcatgtttactataagtaaaaagcattttcctggagtctggcaaatattgtggaagatgtactgaaatgtaattgaaatgtagctgcctcttaattttatacttaacaaatgcca

SEQ ID NO: 231936 - DNA, 386 bp, Homo sapiens
ttctgctattcctgccgcataactctctcttccccaggcttttcccatctccatcctattctctcgcaggtgctgggggaaaagattacttcccagatgcagtatttacatctcctccgccctactcttccaaccctgcctgaaataagcgtggttctcctgtctgtcagactatgaagagttctcaaatatgtctttcccagcgagggagaggagaaaacttcagcctccacgatcgatgtttctcaagtgtcaaggaaaatggagcctaggagggcagccccacaagcagcgtgatgggcatttaagccgacgcatgtgccaggtcctagaacagagtaacttccccatctcaacacaataaaatggtgatatgagaatacctg

SEQ ID NO: 231937 - DNA, 472 bp, Homo sapiens
ttctgctattcctgccgcataactctctcttccccaggcttttcccatctccatcctattctctcgcaggcaggtttttcttccgcctctctggggattttcgcgttggttctccctgcccccaggagtgaggcgggtaacgcccacgcctacctccggtgctgggggaaaagattacttcccagatgcagtatttacatctcctccgccctactcttccaaccctgcctgaaataagcgtggttctcctgtctgtcagactatgaagagttctcaaatatgtctttcccagcgagggagaggagagtgagtatccaggaactttaatgcgataggacatcaatatgagtgtttatagggaaagccagtgatcctattgttagacgcgaaatcaagacatatgatctgattttttgttttactttttgtttttgaggtataacattcagtaaagcgcacaaatcaaaagtgt

SEQ ID NO: 231938 - DNA, 610 bp, Homo sapiens
aaaaaatggccagcgaaggagaacttgttcatattagcaggtgttctagaaagaccctctaatctccctacccagctgggattttgaagagatgttgtagtgaagttattattttcagagacatgggccaggttaagggaaccaagaggggaagttgaagcttgtgcaacagcaggactccattagcaccccagacagttcggagggtcggccacacccaagttacagccctagggctgcagtcactgccagaaccacagcaaagcagggagggagcaggacaaatacataccccctcccctcctgtcacctgtcccccttgctgttgcctcttgatggctgaaccttattcaaagtaccaggggaagttaagtgattcaatgcttagggctggctcagtctccgggggcacagagaaaggtaggggaggctgcaaagagtatctggggacacagagattaatcaggacatgcggtaagtccaccttgggacacttttctaagaaaatcatctgccatatgctgaaatactttttacaagtatatggactgcaatattacgttctgtttcaaacaagccaacttaaatgttcaacagcagaagattcatt

SEQ ID NO: 231939 - DNA, 279 bp, Homo sapiens
cttaatctatttttaacttctatttttgtacagaatgtgttactaaagtagtcctggaatatgtacgtttcaatacataactactgcatatattggcaatgcatactcaatttttactgacagcagtaacaactggagagggtgaagaccatttgtccctgtgacaatcgtccacatgaagaaactaaggtggctcttgggtcagaccaaactgatcggggaatctggaggcaggggatgaaccagataatttccagcccttcttggtagctcttcgta

SEQ ID NO: 231940 - DNA, 358 bp, Homo sapiens
gacattgtgttcatacctcttgagccgatccaaggactggagttgctgggtcctatggtaactctgtgttaatgtttttgcgaaactgccagagtgttttccaaaatgtccgcagcattttccattcccaccagcagtgtaggagggttccagtttcttcctatccttgtcagcacttgttattggctatttctttgactgcagccacccacaaaataactttaatagactgattttatttatcctcacattcacttcgtgagcctttgttttggttccaccactgagggaaactgaggctcagggtgatcgagtcagtggttgaagaccccatggagagatacctggatcagatacc

SEQ ID NO: 231941 - DNA, 484 bp, Homo sapiens
agcacttcacttccattatattttttctccaaaacccatagcatcagtctaatcatgagataaacatcagacaagcccaaactgaggggtgtgctacaaaatatctgaccagggtgtcccaaaactctcaaggacataaagagcaaggaaagtctgggaaactgttacagaccagaggaacttaagaagacacaaggcttttttgcaaggtgaaacctgaattggatcctggaacagaaaagggacgttggaaaaactggtgaaatctgaaggaaaaaaaagctaattgtagccaatcaatgctggtttcttagttttgatgaatatattgtggaaatgctggtttcttagttttgatgaatatattgtggaaatgtaagaatattaacaacagggaacattggcaaactccatgtactacctttgcgctttttctgtaagtttaaagttatctcaaaataaaaacatttattaaaaacacaaa

SEQ ID NO: 231942 - DNA, 429 bp, Homo sapiens
agagcgagactccatctcaaaaaataaataaataaataaacttaaggtccagttatgtctcaggtacaaaaaccacttttccagtccttgaccctgtagggcacagacttgaaccttggctatggtctgcacttgcagccctgactctttgatatgagaaagggagtgtatgggatgggaggagggaatgagggtcctagggtgagatgggtggcagacaaactttataatctatatcaggccctctcctttatatcatgacatacagaaaataatcatttttgtacagcatagtagggtaaactagaagatatttggaggcatctaagtggtggtaatgttttcttttaagcatctgattttgataaaatacaaagtattaggaatgatattaaatattgaatttgcataaaactttcaaattaaaat

SEQ ID NO: 231943 - DNA, 536 bp, Homo sapiens
catgaaatagttctcatgaatagttctcatggggctcagtggaaaagctttaataatggggactctgagaatgcaccccattgttctgggtagcagtgattcaaatgaaacaaagttttcagctatcgctaggaagccaggcctctcctgaaatgctcccttgggcagctacgcttctaacccaaccaggaaataaatgcatcaagaggctgtagtgtctccgcttcatcacagagtcattccctgctcctggctgtttgtagaataggctcctgctaaacatgacccttagaaatcctggcactgacccaagaaggaagcccttaccaggaagacgagggccctatgctgtcatgaatgaagaggactccctcgtgagaggcagtattgcagagcgggtgcagctcctcttaaaccctccctccccactgttcagctacagaaccttgaagaaataaacgcatctgtctgtgcctcagttgtgtcatctgtaaactgagaataactataagagtgccccccatccactgggtgtg

SEQ ID NO: 231944 - DNA, 758 bp, Homo sapiens
ataatttatccactcatgggcaatcatgtttcactgtgtccccactcactttctcctatccttgattattatgaaacaaattctagatatatcatttcattcggcaacctaagtaacgaacagagggaggctgtctaagagaaaaagatatttatgcgggaatagagcattgcaatgggaatatgtgtaccatagtaaactatgaggtattcagggaggtaaaggaagacacatgttttcaaaggaaaaaatgagaaggattacatgattctttgaaaataattatcattggctacaaagatcaataataagggtgacaccagtccaaggttgaacaggcagttgctgggcagaagtccttgcagaaatattttttgtataaggttgtgatggcctttgtgcaaggttgtggttttcataggatcttttgtgataattcttatcaggcaaataagcatgagaatgctcttttcatagccttccctggctctattatcagagatttttttttaacactagtgactccattttgattccaacaacattgacacatctataaaaatttcattatcaggccgggtgcagtggctcacgcctataatcccagcactttgggaggccgaggcgggcagatcacctgaggtcaggagttcgagaccagcctggccaacatggtaaaaccccatctctactaaaaatgaagcaggagaattgcttgaacctgggaggcggaagttgcagtgagccaagatcgcacc

SEQ ID NO: 231945 - DNA, 123 bp, Homo sapiens
tctgcttcgttagactgtattccctactttttatagtatttattagcaccagaactctgtgactgtttcccaaagaacaagagagaaagataaaggaaagtgagaagcaacaaaactagattt

SEQ ID NO: 231946 - DNA, 537 bp, Homo sapiens
ggttgcatatcaactgaatttcaccaccctcctcctactcagagttttacagaagccacagagtagtgacacggggagccgggcagtggagggagattcggtcatcagaaacctggcccaggttggcctctgatactgtgacatgtcaccattgccatcaagggcccgtgggtgctggggcgtgaccacttcccaccctccacaatggtgcccctccccataggccgcacagcgcatggagtccttgcttctgcctagataataattcacaaggaagaaaacaactctggctgctgcctcggggtggctgccagacaagggtgttttattaggacacatcttccgattttatctgcgggcccaggtaattgtcatagagcagtttgtctcccctttagaagctataaacgattgtatttgatgaaaatatgcctttcatttccttggatgagatattaaagtagtgtataaatcagggctaataggtgactagccactttggtgtatttttcttcttccatttggctcagaaaaaaa

SEQ ID NO: 231947 - DNA, 382 bp, Homo sapiens
tgccaacattttattgtgcatattttccaacatacagtaaagtcagagaaattttacagcaaacacttttatgcccagcacctagatcttaccaataatattttcttatattttatcacacagctttatcacgcagctatctatccaaccctctatccatctaccaatcttattttttgttttaaactttttactttacaaaagtgttagtaattctagcactttgggagccaccgcgccctacctgtcatggcttcttaaggctcctctgggctgagacaacttctcagactttccttcttcctagacattccttgatgaccttgacagtttttaggagggagtgttggtcaggtattctgtagaatgtcccttaatttgg

SEQ ID NO: 231948 - DNA, 500 bp, Homo sapiens
atgcacatggaaaacccacaaaaattgactgaatatatatataaaaaattagtagtttcccaagaatggaagcattgaaaataaacacctgaatattaaataaaatctttctattgggtgaatggggaaatacaaggaaaaattacagaatttctgaaaaatagtgacagtaaaagcaacacatataaagatttatgggatacatttagagcagttatcagaagtatatttataacattaaacaactctattaatatgaatgaaaataaatgcaccacattcccaattcaaaaagctagaaaaagaatagctaaaccaacaagtaaagatttttgcataactttttatataactaggaggagaataaaaataaaagctgaaattaatgatgtaagaacagaaaaacagattaatttttttgaaaaaaacagagaagccagcagctcatttaatcaagaaacaagagagcaagcacaaatacacaaaacaagaaatgacaa

SEQ ID NO: 231949 - DNA, 411 bp, Homo sapiens
aaactgggtaattgtacacagtgtccctgtccatggcccacatagcttttctacttttcctggatttagttgtgggttacttggcaaattgagtgatttttaagtggcatctagaactactcaggcctgttgtgctagctggaatacacagcaatgcgactcctactctgtctttcccaaggttgtataaacaaagttgtacttattgaaacatgtgaacatgaaactgaatgttgctttctttatctgaataactaaaacgtgtacttgatgatgataagtaatttctgtcataaaatctactaatcttgttgataaagtattgcttttccaaataggcatataaaaatgatacaattttgttttctttaacccgtgaaaataaagatgaagactcactaaatgtagcca

SEQ ID NO: 231950 - DNA, 372 bp, Homo sapiens
ataagtattttgtgctgtgacctttgtggggaggggcaactgaccatatacttctctattctaggaatagatataaaagaaacattttagcctttttatatttcgatctctgattactccaggccattgcctttctgttgtgccacgtgattctgctaatcaagtccctgtaataacaggataaggactgttccattactgtggcttttgggagcccccagaaataatatcatttgtgtttaggacaatatataattataaaatctttctgctcctccctgtagcctctcttcaaaaactatcttttattttttttccagatttccttagtgataatatggaaattaatcaaggcactggaaaaagccatgg

SEQ ID NO: 231951 - DNA, 796 bp, Homo sapiens
cttggaacctagcagactgccttacacatagtagtgactgaaaggttgaatgatttaaggcgacacatgtacctagatccaggtaatcaattaggctctaatctatgcaagaacattcatgatttcattttagctaataagcagcgagcaatttgttaagttgcttttttttatttggaaagctttaaaagtagattttaagctctgaataacatacttacattttaaatgtatttgaaagtatgatagtgagacattttaaaaaatacatcaagataaaaaatgattgggttcactgtgaactagacagtgttggcagggtgaacacaaagtgggtgctaaagtctataaaatgttaacatgacaagaacaccacaaagtgagttaaaagtggccctacaattctcactggaaaagtattaacgggcaagcaggaaaaatgtagggtactgccatctccactaagggtctgtagggtggggagcctgttgtccactcctgaggaacaattatttccattcctcatggtgctgctgaaaagtgaagtacggaggagctggttcagtctgtgaactcatttcccatcacccaaagaaaatgacggaatcccaagctgactgggccccttctagactcttgatagttcaagctctatcaactctctaaagcgccagtctagggcagaggtaaagtaaggcaaactacagccctcaggccaaatccaaccaccacttttttttttggagatggattctcactctgtcgcccaggctggagtgcagtggcacgacctcag

SEQ ID NO: 231952 - DNA, 521 bp, Homo sapiens
  misc_feature (517)..(517): n is a, c, g, or t
gtggcagggggggagatttctacgcagacacacatgcctgctgccatgtggtctagagacacaagcttgtttgtgatcaaggcaggggatattgggactggactgaagggctgagaggtctcttggggtgaagtgacaccccaaatgcagtgactgaacagacatctcacttccccacccaactcctcctctcacctcctagagccaggacccttcaggtcagccacccacccctagtcagcctgggagtgctgctggtgggacttcaaccatgctgaactctgacctgagtcctaagcagtttggacccaagtagagaaaaattgagagggaacttgatgtaggcagagctttggaagtgctgaggaagcctgggcccacgtttggctccatcctttccacacagcctctcacaaacctgcccagtcactcagagcctgactgtcttccatccctggtgtcccttggccaccccctcccaggaaaagtgctgtaaaaagaaaaaaggagaatgttnggga

SEQ ID NO: 231953 - DNA, 382 bp, Homo sapiens
cgtccctgcacacccgcacctgcgcctcgagaactcctggccagttgaatacccggtctgccgccgagcttcgctgcaggtcacaggaaaggggtgcagggttgcgtacccggcgggggaagccgcgcggagaggaccaggtgctgctactggcctccgagaagacaggcctagagtagctgattttgacctgcagggccaaagtctaacggcggcctaaaaccctaacgtctgggcgagccgcgggtagcgagttgaagcgatctctatgccttgcttgtcgtttgccaaaattcagaccaagaaagagaatagttgtgtggatcaaagtctgcaattaaccaaaaaagaaacatgatcctgtgttagcttacttaggaaa

SEQ ID NO: 231954 - DNA, 475 bp, Homo sapiens
ctttccactccagcccttccaggaatgagccaggctcatccctcagggccttcactccagtcttctcatccttgggtcgggagcggtgagctcttccccagcccgcgtccccgaaagtctcccctggaatgacccttccttcctccgagaggctgcaggcctggcccccccatcctgtggcactgtcccttctagcactccatgagaatcacgtgctgtccaccctaatccagggggcaggcctgcagcacccaggatgtggctggcctgtggcaggctctgccactctgcgtgaaagatagcagctctcggctgggcgcagtgactcacgcctgtaatcccagcactttgggaagccgaggcaggtggatcatgaggtcaggagaccgagacctcagccgaggtggatcatctgaagtcacgagttaaagactagcctggccaacatggtgaaactccatctctactaaaaata

SEQ ID NO: 231955 - DNA, 395 bp, Homo sapiens
  misc_feature (324)..(324): n is a, c, g, or t
tggtctcaaggcaggcttggtaacgaccccatgtgaccttgggcagggcccgccatccaggccacccagaaagccatgtggcctgcacgatcaggcagaccccactgactggagcggggcactttactttggaggggcagctaccagagggctctatggatcccagcccagccgtcaggccggacgggtcccccctactggcctgcagtgacccttatgccaggctcggctggctcagcggtgggtcctggggtgacctggccacgtgggacagaagggcctgtgccgctccctccagtgaggtgccaaatgtgggccacactnacttggcccagcgggggccttccgggcagtggcgcagagccattggaggtgcccgggccctggggcagggg

SEQ ID NO: 231956 - DNA, 212 bp, Homo sapiens
aatgtgtttcttgattgccactgtgtgatgacgtcatcataagatgacgtgtgactatttgaaacaccctttggggtctcactggaagccagggtgcccccgtcccctacccatgttcctgttagcgtcagaacatatctgtacgggtctgcagcaacctcaatggttcttgccttctcagaacgaatttgactgtggggcagaaggcagga

SEQ ID NO: 231957 - DNA, 357 bp, Homo sapiens
cagaggccagctgacccacggactgacagatagctgtgcagatgttgaataattacttcctacgagccctggtcaggactcacacttgcacgatccaagcagcagaaccactggcattagagtgcctggaaacagacctgcaggcgcaccaggaggaatccccctgcccgccacagagggcacctttccaggtaagagtctgcagctctgatgaatagtacttgtcaattaacacaccagtcacccatcaccactataatgaccccagcctcagcctccgtgccagacggtgcagggattctttggacttatctaccgcaaaatcacactgtaatgtttgtccattgctttgaagat

SEQ ID NO: 231958 - DNA, 1318 bp, Homo sapiens
atgactctgggtgacaaagatgtagaaacgtagttcatcaattgtaacaaatgtaccgctatgctggaaaacgttactaatggtggaggctatgtatgtggcggtaagatgtgtttagaaaatctccgtatcttatgctcaaatttgctgtgaacctacaattgctctaaaaaaaaatcaagtctattaaaaaatttatcatgtagtagatcttgtataaagtctcaacaaatatcaaagaattaacatcatacaaactctctaagcacaagcaacttaagtaaaaaattaacagaaaaaaattttttgagtcaataggagttattttgggaacaaaacacaaagtaaagacttgaggggattgaaaccatcaggatgaatgtaagccagacgggggcaaattgcagaatgtcaattgccttaacctaggaaaggtaaatttctaaaaatgataccaaatggttaaaaatcactaaatgaggaattgaagagaatttcaggttagaaggttgtaaaaagtgaaataattgtccaaagtcaccaaactagttcacgagaaagctggaactagaaactcatgcctctcaatccagtgttctttccactgtaacagattggcaccatagaacatgtttgactcaaggcagtaaattaagtacactgaagaaaaagataagaaaaaagtgataaaatgtaaagtctttgattcagacccaagtattacagctgctatggcaaaaaatagccacaatttctaagtgactttaaccaggaaaaaaagaaagagatgagatttgaaaaggaattaaatttcaagaatcaacaggaagtgatgacagccttccctatttggtagtttcaggcctgaacttttgtcattaaggtaataattcaaagtgctttaatgcctggactgaccacactaaataacaaaattataacccgttgagctacggtcagttttataaactgtgcctaaaatttcctgagttcaaatctgattataaatgggcaataaattcatctgttcattgggctgatttactttattttctgggtgcatttaaaatcttttttattgtggaaactttcaaacatacaaaaagagtacataataaatgattcccttgtacccatcattcaatttcaataagtcacattttgcctttcaaattttacctattgccactaacatcctttttttttctggagtagctgaactgatttaagatgaaggaggaaaaataaaggatgaaaggaatattttcaatctgttattcattgatactctagccaaaaagattccagattatgaggc

SEQ ID NO: 231959 - DNA, 246 bp, Homo sapiens
ggtcaactgctaaatattagagtgcttcaggcctagacgattggcgtcttgtcttctgcatctctagtttctcaagcaaaacaagatactgtttaatattatctggattttatttccttatttattggtttatttttcatctcctcataccagtgtataaacttcatgagtcacaacagataggaagtgttttctaagtgtctgttggataaataaatggaaggaaggaaggtaggtaggtaggta

SEQ ID NO: 231960 - DNA, 396 bp, Homo sapiens
caagccaggtgtggagtgaccaggggtgcataagcgggcacctgcagggtctggccactgcacacagccaggcacgccagctgctgtgcagggcagggagctctaggcacagggacaggggccagctctgtgcaagcctgcagctggatcatatgcaccagcaggttccgctgcagggactcttgtctggacaaggggaatatggtggcacctggcagctcagagatgccagaaactgtgaagccccaaagagggtgtcacagccctggctcagggagcccctaggtgtgggctccccaaaggaccacagctcttctctccttcttgtcacctgcaacgtggcaagctttgggtgtgggcatttcagccctgtttatgttactagctctttcagtc

SEQ ID NO: 231961 - DNA, 279 bp, Homo sapiens
acggaatcccagaagggggcagtgacccaactaaggtcaaagggctgcccccgggaaaccagccgcttctcatccccaaggcagcctgcccgccctggagagcccgggatccccagatactgtcgacgaaaggggcagggcctgtgagcgacgctggccttaggcctggactgcaaggggtggccctggctagagatgggactgcacacccttccaggcaccatcctgggtaatggagacactctgggaacacgtatgtgcacatgcacatgcttacac

SEQ ID NO: 231962 - DNA, 606 bp, Homo sapiens
agcattttggtgcctagcatagggccaggcacttcctaggtgcttagccagtgcttataccagaagtctatgtttgggaattcatgttccctgatctcttaagatttccagatggaatcattcaaatagtgactgagccaaatttataataccaaggacacaggatgtgcaaactgacacaggcttttctaaatctgaagccttgtaagaccctacgtactggttacccatgtttcacattgaatttctatgcccagctcaaccctcgttatgtcccatgaccacagattccttctattccatattgcctgtttgcacagcatatgcatcctaactgcattcaaatatactcagtgttactaggaagggatgagggctgttacctaggagagcaagagtcacggcatctttgccagtgtaactgtggaagccttcatatgctatttggtggcccacttccctttctgagcctcgcagttagatgataaataacatatgccattttattttattcttctttaggcatttaaaaaatcaacaggccaggagttgaagaccggcttggccaatatggcaaaaccctgtctctactaaaaatacaaaaat

SEQ ID NO: 231963 - DNA, 436 bp, Homo sapiens
aactatgcaaaataaatgaaatataatgatctaagtgtttttccatatactgttgtgatttacatgtggttataaaatctaacatagaagtctctttttgagatatttttggttaaattgctcattcttttaataagtggctctttattgatgtgcactttgctggttattatttgtcaaataaagcatggaaattccccaagttaggagaaggagaagatgactttctgatagcttcaagctgggctgctactggctctattggaaaacagtcttccagagggcaggagcacataactaacatagcaaagtgacttctttgcacatagtatatgttgaatttgtggttgttcaagtaaattaagacagaagtcattcatggattcaacaaatatttattgacttcctgttatgtgcaaggcactacgcatgatgc

SEQ ID NO: 231964 - DNA, 155 bp, Homo sapiens
cacacaaccacaaaaaggaatgagagaaaactcttacattgaatttggtggcaacttttttaatgctgcaaaatgtaatttttgtgtagtaaatcagaataatggcaacactagtattacccatactgtttccattaattgcaaacagggaaaca

SEQ ID NO: 231965 - DNA, 941 bp, Homo sapiens
aatttagctcctaagatgatttagtaaatatttgcattatcttctcaaaggagcatcacagtgtactaaatagataagctgtgcaatatgtcataggtccttattactcccacttttaggtgagcaaactaaggtacagtttataattgcctgagctttcgtggctgatgtgtatgatttgagatttgaattccagacaggtatgcaaagctaagcctatgccagttgccaattaggtgaagaacgtgacagtcccctcctcacctcccctcacacgattgactctgtttcctcctttagaaagtaactgaactcgagatgaaggtcatctgagcagtggcatagcgaatccagcctgcttggagttgaacacacatgtctgccacttgtcccccttatgaccaggggcaaattaaccgtactatgcctcctctgtaaaatgaggatagtagcagcatccatctcacggagtggttagtgaggattaagtgagataatatatgtgaagtgtttatctacaataataagttgtctacatcatctagtttcttgccatttgtgtatctgctaaataaatatgtaatcctactgtcagagtctaccttcgagattaacatgggttgtatccacctattagtggtgctgttttgggcattttataactatgacatcatcaggctcttcctgggaaggactgagaatggaaaataggagactcctcaacagtctagtgctggtgttgcagcctctggccacgttctcttttgtgtggccagaggcactttacaccctggcagaggcatttgccacagtggactgggaaagtggtgtcaaagccagcggcttccaacatggcctttccttgtggcctgaatttatttgaaaaaatccaggactagaaagaggcactgtgccttgggcctgtgggtgcattccattga

SEQ ID NO: 231966 - DNA, 484 bp, Homo sapiens
caggctttcgatggattggacgaggcgcgtccaccctggggagggccatcattttattcagtctactgatgcaaatgcttatctcttctggaaacaccttcacagacagacccagaatatagttgaaccaaatactgggcacctcatggctccaacaggttgacacaaaaaatgaaccattgcagaaaacgaagaacagtcaccaactcccacccatgcagctggctcatttgctgggctgccctccccagcaggtggcacaggaatccctgccttggcagggaggaggcctggggtgtgtgcaggtacccatgggaagtttctttgccatggggaaagccagagtcaccccttgcttgaacacaagagttggaggtttcagtgagctgagattacgctattgcactccagcctgggcggcagagtgagactctgtctctagataaataaattaaataaataaataaatataatttaatataaa

SEQ ID NO: 231967 - DNA, 597 bp, Homo sapiens
aaaggagttatatgaatacacccacatagtcacccaactctacacagttttaggggtttgtaacataaaactccaatggaactgaaggagttctagaaagtatttaattttaccccctcccttttatagatgaaaaaacaaacctagtcccacagagccttgagtaatattgtggtaaaccgattaagactaattgcggtatgggagggggtttggcctaggacactgggtcgtttccatagggcagacccatgattggagaccatttgctttagagaacttgaaagtcctgtaggtctagctccttctcaaggctttgggctctttattttaaaaagtgataatgtaccaccttctcccattatgtatgcactttggaacttagtactaagtttcaccagtgggaaaatatctcaaatgggaagacctgaaggcaatgcccactgcgcaacagaggtgggattccgatgcagttttactctgctgtgcctgagtggtactagacctttccattagcaatgcacatggttgagaatacattcacgctctcaagcaacttcactccgaggagtgacgtgccctattcctcatataagc

SEQ ID NO: 231968 - DNA, 490 bp, Homo sapiens
aataagtggtttatgtaaacccagagttgaccaatgggatgccagtctcaaccataaaaacaaacaaaacattgtgagtaacaacaccagaagtctcaaagtgtcagggaaaccaatttcacagaagcagttcagccaagtcactaaacaaacaaacgactaagcaaaaaacaagaatgagtctcagaaagggtcaagtcagtatccagagttgttacaatatagtatctaaaatattgttttgaactaaaaattttgaggcatgcaaagaatgaggaaagtatgactcatacatggtattatatgaaaaaatcaacaaaaaactatccatgaggaaacaaagatgttgaaattcactagggaaagactttaaaaaccagctatttaaatatattcaaagaactgaaggaactatgtctaaaatactaaaataaagtataataacaatttcttgtcaagtagagaatgccaataaagagatagaagttat

SEQ ID NO: 231969 - DNA, 414 bp, Homo sapiens
ataaaccacagggcaaagggactcctttttcctcctgaagagagagtatcacctcatctgaatggcttcttgacccagaaaaatctaaagaacagcatgcctcctgttttacggcaggtcttgttcttggaattttggtctgcatttctgctcacccaatattgcatggctcccatgttaatgaccctttcctacatccatccacttaaagttgtaatgcagtcctgcatccagtgccctcagctgtgtccctgagctgttaagctgaatttctgtgccaactgacaaataccgagtgcctactctggggaagcctctgtggctgttccagacagaagatgacaaagttctaagtgcatagtgtacaaaaaaccactaacttcatgcccgctggcttgatctcaacagttaagc

SEQ ID NO: 231970 - DNA, 490 bp, Homo sapiens
ctgtcttttggtggaagtttaggttcaggtgggtcccctatcagatgagcagctgccgggcctctgggacaatctaatgttagtaagtcccaggcgactgtgcaccctcgatttggccttcagtgtttgtgggatgggggcaagattgaaaataagttaagccctagagcatgatagagaatttcaggagtttgttttttggactggaatttgaaaagtagttatttgaggacatttttctgtctttcagtgaaaccagttatctgagacctattagggaaatgaaagttctattgaatatatttttcgaggcgctagcattatgtattttaagaaatgaaacatgggttgggcacagtggctcgcccctgtaatcccaggagtttgggaggccgaagtgggaggattgcttgagcccaggagtttgagaccagcctgggcaacatagcgagaccctgcctcttaaaaaaaaaattaaattgacaaaaaa

SEQ ID NO: 231971 - DNA, 289 bp, Homo sapiens
gcttatttattcaaacatatattttatgactatacatgttatgaatgccattgtattaacagtacttctgtttaattgaccttaccaactaggtcggccagtaggccaaagtcttcaaagcctctagatcctaagaccgtgatttttagacttttggagggtcatagaaccctttgagaatctaatgaaacctataatcttgtacccaggaaaatccgcatacacccaaacaccgtgcccatagtttccaaaggctgatgaactttacggacccttctgtcaggaacgc

SEQ ID NO: 231972 - DNA, 461 bp, Homo sapiens
tttttttaagaagtagatatattttaccatggagctcactaagaaatccttaaatagacaactgagaatggtatacattgggttgtaagagacaattctacctcctgatcactcaggaagtaatgaaaaccagttcattatcagttagtttgagttctgatgtgttcaggtttctcttctagagttgctcaagattggcgacgccttccctgtgggtgggctgcctgcccttgcatcttgccagtctgagattctgcttcttgcctccaacacgccgcaccatgctagctgccagctgggtctccacctctcatttgaagattagcttctcgtacaccctctctttgccttgagagctggttgggcagtattttctggctcaataagcactttgttccatgcttcacactctaacttcatcttgtacaatgcaacataccagctccgcgagctcgcggccg

SEQ ID NO: 231973 - DNA, 802 bp, Homo sapiens
  misc_feature (105)..(105): n is a, c, g, or t
gttttagtgatggcttcaggaactgagatgatggtttgagctgggtctgggaaaataagggacccaggaataggaaagggggagaacatactagggtatgggagngctgattggaactacaaagtacaaggccagtgggtccattccaaggtatggaatggctcatctcatggctggcacctgggcttgaggtggctctaaggctgagttcagttgtgttaggttctctcatccaaagagccagggttccaacagtattaggcagaaacagcatggctttttctgacccagcctaggtcacatggtgtcaccccaggacagtctatcctttacaagccagtcactaaggccagccggattcagtgggaagggggttaaactccatctcttgaagggagagtaccaaggttaagaaaggcaggagagtgtggtggccaactctggttaaaaaggtctacaagtatgccagcatttacctttaaatactgtgtatccccacctgtgcttgcaagacaggaagaggaaggcagggagagaggctgcacatgtgggagctgacccactagacacaattattagatgtagtttaaatcctggctctgctcctcactgggtctgtgattgtcagaaagaagattaatgcctggagggtccacgttccatatatccagtacaccagtgaaaaggtacatgacgctgggcacagtggctcacgcctgtaatcccagaactctgggaggatcatctgaggccaggagttagagatcagcctggggaacatggcaagatcctgtctggaaaa

SEQ ID NO: 231974 - DNA, 287 bp, Homo sapiens
tgtgtattcataattttgtattcttcttaaggagttactcctccaattgtataagcttcaggtctcccaaaatctagatcttctggtgggacctggagttgggtaggaacagttcaggtaagagataatgaagacctaaactaaaacaagttcagtggggagggatgcgtttcttaatagaaaagtgctatcatttactggcctgtagctcttacagatgaagatgtttgattcttttcttcttttctgtatccatagtgctgtgaatagtccttgaaggataaata

SEQ ID NO: 231975 - DNA, 456 bp, Homo sapiens
aaattcagctagagttaggggctttccagctttataacagtcacccactttaagaaatatgttttacatcaaactccagaagctacacatgcattgggatgttgtgtatgtgcaaacaaagttgcatgaataaagacttcactgtatgtgatgcattctgatattttctgtcttttttaaaccctagtttagtctagtctagttgatttgactctgttccactctattccattgttgttctttaacattctgggcataacccctcaaattaactccaggacttatgaatgcttttccattagcaatttaaaaaatacaagctagagctacttcatcttcaagcccaacaacccccatgctatcgctcaatgcccattttgcccattttagacggctgaaatttaaagggtctctagccagaaatgtatgactgggcaactcaacacactagacctg

SEQ ID NO: 231976 - DNA, 253 bp, Homo sapiens
ctgggagcattccgcctccgactgcaccaggtccactttgtagtttgggaattcctgttccacgcccccagatgggaggcgggatccagccgcaaggaacagaaaggcctgggactctggtcctgtcaaaggtcaccaggtgctttattgggttctcctcagacccatgtgcagcagtgggaggtttctttttgtccattcttctgcctgcccttcccctgccaccttctccatcctcacaggtggaaaggcc

SEQ ID NO: 231977 - DNA, 474 bp, Homo sapiens
gcactcggctccagggacaatatttgctcggggaaagaatcaaacatttatcctcgcatttattcaggggagcagttgtcaaacacgcgtgtcctcactgcttggatgtttcccaggcctggcctcagcctgggcctttctcctgccaggatttgtgcccactcagccgctccctgtgccctccaggaggttgaggtcctgctctgggcagacggcgggagcacgggtcggggccagtgctgggcagggcagaggggtccctgaggccgagtgatgccgcaccctggtccttctccttccagcctcagagcaaggccaagttgccccagagaccccagcaaggctctctgggcccacgttctgggcctggggcgccaggaaaagctggtgtttggggtgggggaggtaggacaattctaggtgggaggcggcgggattcccagggcctgccatttgcgtcacccgcgcggccgc

SEQ ID NO: 231978 - DNA, 493 bp, Homo sapiens
aaattgaaatcactaaaaatgaagccatgctttcctgaaagccctatgaactgaagctagaccacttaatctttagaagaaagtaacagcaacctatttatatacataaatcatttttatagctgcctactcatgtatggacttcatttggggagctggggagactgagggaaagggtaaaaagtcaggaagtttacaggaaccagaacacacacatccagcttcctaagcacagaaaactggagaagaagcatgctgcttccattatgaaaccactctgttggtaatccgtactgttatttgatggtctattatttcgatgtctaaacttaaagcttaagaaacttagagaaatctttaaaaactactgaactaaattttttattactactttatttatttacttatttgtaagtttattattagtgatcacttccataatatctttatatcttatgtaacaataaatccagatgtaagaaatttaaataag

SEQ ID NO: 231979 - DNA, 228 bp, Homo sapiens
tcaggacggcacggccgacatgttcattcatctcgggacagcatggcccaggtgttcgttcatctcaggacagcatggcccgggtgttcgttcatctcaggacagcatggcccgggtgtttgttcatctcaggacagcatggccgatgtgttcattcatctcaggacggcatggccgacgtgttcattcatttcaggacggcatggcccaggtgttcattcatctcag

SEQ ID NO: 231980 - DNA, 329 bp, Homo sapiens
tcttcttgtccccacatgtgcctagcaacatggccatccccacatatccccacatgtgtagaacattgtggcaccctacattcgcatattaaaaggctagggtgggagggccactttttttgcaggctacgtgaatgacatacctggtcaaaccaattccctgggtcatatgcaaattagtcaccacctcctccagcctcataatataactggctcttgtctgctgcacccaaggttccctctttcatctgggagccctcttccctctggttctgtatgagggagcctcttctttcttgcctattaaattctccgctccttaaaacaat

SEQ ID NO: 231981 - DNA, 950 bp, Homo sapiens
gactcacccaaggcccaatggctgtgagcgggaagccaggactcctcacagcgccagcttcttccatgcatgccagcccatctgcagagcccggtcaagctcaggggaacgccaccactgaaccagagaggcagccaggaggagggggtctagatagagaaatgtggaaaaagcagctgattccagaaatttcctgcttggcctggattaggccatgctggggactggctgccccttgcccagtgggtgctggggcattcaggcttggggtcttttaggtcagccctaaaagttgatgatttgatgctgatcgctggtacttacttcagctttccttctggttggaagccttaattagtggaggttgctgacactgtttatgcgcatcggtatttttttagaatgtggagtggaagaggtgggctttgggggactggctaaaccccaagaatttaactggccgtgtattttggccactgttgcgcctgttaagatcttggagtgtgggtttgcacctgtatttagaggtgcacaaacccacacaaattcaaggataaataactgcaaggcccgaagagaacacgctctcccgctgcacgcaggctgctcaactgtgatgaatggagtaacaggtaccacagggcgagcaggacgccttcatcaatggtggtaatagccaccaatgcatcatctgtggaggcaacaggagggacggctggggcagaatcaacagaacgtgaaaatgaattgtttgtaaatacaatcaacagtgttatgttcgtgagaaagccattcatcattcagaaaccacctttagtaaaagatgcacctggcttcccggtgagacggggccatcaatccctccccagtcacagggtcagctcggggctgcctaaacccccagagaacagacacacatatttattcttatttgaaaataagagttgtta

SEQ ID NO: 231982 - DNA, 762 bp, Homo sapiens
aaaaagttggcaactagatctagttgcctgccaggatgaccagcgttatgctggtgtgtgcgtgtccatgcctccgggatttttccagggttatcaatgtcagtgtaagatctgatggaatttaccgttgactcaattttcttcaccaatcaaggctcattccttgaggcatgagttatgcgaaaagcttttctgcaccaagtactttcattctggtctttggaattgtcataattctgacagagaacacagaccattactgaatgctcttcaggttaccctatttgcctgtcacattgcttctaccggccacatcctgcatttcctgtgggacagcattttcaaacggattctagtgtttgagctggaaccaaaagaatgaaactgtttttacataagtgcatattgctgtctctgcaaataaagtacaacaatatgactgacttgtaaatatcttccaggacaatgctgtgattttccagttgattctgcaactttaaagatataaccaagtataattaggccgttcaaggatgaatgggtcccacagaagctagaaatagtttacttcctgcttccatttctagatgcagaagactaatattcacagaaaaattacgtagacaaattttgtttactagatctaaaacattcctgcttctcagaaaaacaaaaccaaaggagtatttaagataaagtaacagtgaacgtgttgagactaaaaagtttccatcaactagtcccatatgcaccctctaccct

SEQ ID NO: 231983 - DNA, 796 bp, Homo sapiens
taccacagagggagatcttctgtcccactaggaaactgcgaattgtaccacagagggagatcttctatgcaacatggagaccatgaatggtacacacagagagagatcttctatccacatggacaccatgaattgtaccacagaggcagatgttctatccaacatggaaaccatgaactgtacacacagagggggatattccatccaacataggaaccatgaactgtacacacagagggagatcttctatccaacatggagaccatgaattttaccacaaaggaagatgttctatccaaaatggaaaccatgagttgtatgcctagagggagatcttctatccaatatgtaagccacgagttggacacacagagagagatattttatccaacttggaaaccatgaattgtacacacagagagatcttctatccaacacggaaacaacgagttatacccacagggggagatcttctatccaattcaggtgttccttatgtgatagcatactctgcatctacaactagctaaagtttcgtgatgtcattattgttattgttgttgtagaggtgaggtcttgctatgttgcccaggctggtcttgaatccctggcctccagcaatcctcctgcctttgtttcccaatgtgttgggattacaggcaaaagctggtcttattctttctaaagctgaagtttgagaagtaaaaatcactttcaagggtagaatgcattttatattttctctgaaaaatgaattggcacaaatgtccagttaaatttgtgcaattttctttaa

SEQ ID NO: 231984 - DNA, 408 bp, Homo sapiens
gcccacccattccactgtcccgctgctctgttgctggggctgaaagctccatccctgtggaccaaggtcagctgtatttcttgggtttagtgacgggttaaaagaaaaacaggtctgggccaggtgtggtggcttacgcctgtaatcccagcactttggaaggctgaggcaagcagatcacctgaggtcaggagtttgagaccagcctggccaacatggtaaaactttgtctctgctaaaaacacacacacaaaaatagccaggcttggtggagcacacctgtagtcccagctactcaggcggctgaagcagatagaaatcacttgagcccaggagacggaggttgcagtgagccgagattgcaccattgcattccggcctgggccacagggcgagactccgtctcaa

SEQ ID NO: 231985 - DNA, 430 bp, Homo sapiens
gtggtggtctgcaccactatctgtgtctccaagccgcagcccactccatggggtcctgatggttcccttctgaatctagggaggacagcaggcagcagggaccctccatcgctgttgccacttaatccctttagcatcctcaagataagcccagtctgtacaaattcaggttcattttatttctaaagtcccaggaacaatgtcagaagggaattacagtgaagaaagaaagagttcaagttccagcttacctagacttcctgcagagcctcgaaagagaaggcagggttgcagacatctttgtttcatctgtccagcatcctctcccgtgccttggtactgggctttgaagccaggctgcctgggtttgcaacttgccacttattaacagtgtgaccttgggataaaggcccacctttcagagccacta

SEQ ID NO: 231986 - DNA, 373 bp, Homo sapiens
tgaattctgcattgtttactctcatacacagggattctaaacacaatttattattgttcagaccaatacccaggtaagagaactcctcgatgttcacaattcatgcatctttattcttcatttaaataagcacaatcaacaactcctctcatgaggaaatgccagggcagaagcatttcagtttcctaaaagaagtctctaaaatcctggacataccatattttagatgtcttacccaaaagtcccacagaaaaaagagttgtgtatgaaaataatattattggccgggcacagtagctcacatctataatcccagcactttgggaggccaaggtgggtggatcacctgaggtcaggagttcaagaccagcct

SEQ ID NO: 231987 - DNA, 736 bp, Homo sapiens
tgcatctgggaagagctacaaatgaatgttgggtttgggtttttgtaaaaatagtgactggtgcattcttttcattttatggctgtgggaaaatggtagagtcatgtgtgccctatatgaagatgatgccgctgaactgtcattggtcctcctgatggtcagtgccagggattggaatacagtcagtacttgcaggagccacgttctggctagttacctcgctgtccaaagacgatttttcctttttgtctatattttcatcatagggatgaacatattccatgttctgctagagcctttatgactcagtaggggagagatcaagaacttctgcaagtccctggatacagcatcagcgcttggcttagggaacaaagtaactgacaagtctgtattttacagtctgggtatttataggctatgttacgatgcctgcaaaaatgggagcaaacaagcaatcaagtaactccaataagcttcacttaatccatttcttcatgaacaagcttttagtcctaacagcatttgggagttctcatgaaagaaatacaggagaccaatgagccaggagatagatagagctcttcatcacagaagagacatgtttttaaaagggttacgtgatttttaaaataaaacaacccaagttccagtcactgtagaggctgaggcaggagaaccccttgagcctgggagtttgagtccagcctgggcaacatagcaagatctcatctct

SEQ ID NO: 231988 - DNA, 678 bp, Homo sapiens
tgcatctgggaagagctacaaatgaatgttgggtttgggtttttgtaaaaatagtgactggtgcattcttttcattttatggctgtgggaaaatggtagagtcatgtgtgccctatatgaagatgatgccgctgaactgtcattggtcctcctgatggtcagtgccagggattggaatacagtcattttgtctatattttcatcatagggatgaacatattccatgttctgctagagcctttatgactcagtaggggagagatcaagaacttctgcaagtccctggatacagcatcagcgcttggcttagggaacaaagtaactgacaagtctgtattttacagtctgggtatttataggctatgttacgatgcctgcaaaaatgggagcaaacaagcaatcaagtaactccaataagcttcacttaatccatttcttcatgaacaagcttttagtcctaacagcatttgggagttctcatgaaagaaatacaggagaccaatgagccaggagatagatagagctcttcatcacagaagagacatgtttttaaaagggttacgtgatttttaaaataaaacaacccaagttccagtcactgtagaggctgaggcaggagaaccccttgagcctgggagtttgagtccagcctgggcaacatagcaagatctcatctct

SEQ ID NO: 231989 - DNA, 534 bp, Homo sapiens
ctttgcgctctccgcacagctaccccagggcaaaagacaaatcccccttcactgacccctccagtaactgtccggacagttacaggatgcggtcaacatatctgttcacctcgcataacaaagctggcaaaaaaacatctccaggatgcggacaagtcacttgcacccctgactcactcagctccccgaccctgacccagttctcctgcacccccaactcagctccccaaccccgacctggttctggccctataaaagcctgctattttctgtaagcgggtctgcctccttcaactgtggtagagcagccaagcagctcagtaaagcttgcttgcctgactttgggtctcctcatcctttctctcggctgaccttacacctgcattataggaagagggaaacattttgaattttataaattaatagttttaccagtattttgttaaggtaatataccataaattttgaaatgctttttaagattctatgtgaacttcatttgtttttaattaaacacaactgtgttaaacgtga

SEQ ID NO: 231990 - DNA, 372 bp, Homo sapiens
catttgatagataaaagttaaaagaactgcttattgtgttttacaaaaaaggagaagctcttatatagttggaaattacttttgttactatttaatttagataatatattgtaggaaatggttattcgatgagaaagcagaaaatggaactcaacaattaaggcttcctggaaaaaaaagttctctattctttagcggagaatgaagatttaacattaagaatggcctgtcctcacaagtaaaattgaagttaaagtaacctcgaatttttttaaatttctatcaagtgatcttgttccaggaattaatattacacttagacttgatgattaccaggtaaagaacattcattagaactttaacaaaaaaaaa

SEQ ID NO: 231991 - DNA, 325 bp, Homo sapiens
acatacttgcaaccagagtcatcaattttgaagacagcaaccaagccaagcaatgtgaggttacagctatgaaatagaacagagatgtctagactatagacacagcctgccgttttgtgctgattggtaaagtgttccagccaactggaagcaaatatttctcagaagcagtttcctgctctcatcctctcctcgccatgcccactgtgcccaacatggctccagctgggtcacagaagactttgtcctggaatacagcatttccctatttaaatctctaactttgtatgtactcttttcaataaaagcatatttttcattacca

SEQ ID NO: 231992 - DNA, 323 bp, Homo sapiens
tgattagttgtgactttatctgcctaccagaaaataggactagccctctctggaagatgatagcattatccagaacctcatacacaaaatttacccaggacactcatgaagaggaggaagaaaagacaacataaacagacatacaggtcacctacttattggagttaacagatggatgttcaaatctgtattattcttatattcaagagaatgaatgacaaagagtagaattccactggagaactagttaaccaaggctagatggcttcattgaaagactttgtcaagcatgaataaagccactataaatattcttgcacaag

SEQ ID NO: 231993 - DNA, 328 bp, Homo sapiens
agagcctcttttgtgttcctaaactgaacattgcagtgaagtgaacgttcctcctcaggttaaatgtctacatagagactttagtctctgcgagcagataaatgtatattctttccaggacattatttaaagaagagtttgcaaactggtggcctgcaaatgtgttttgtttggctcatatgtgtattaaaattttttttgaggccaggcatggtggctcatgcctgtaatcctagcactttgggaggctgaggcgggagggtcacttgagcccaggagttcaagaccagcctgggtaatatagtgagaccttgtctcttaaaaaaaa

SEQ ID NO: 231994 - DNA, 138 bp, Homo sapiens
caacacctagacttcaaaaacagactctgcagttttctcacaatctgctgtaaattattgttccttttcattccctgtataaagcccacttcctgtcacttgttattgtttactgaaccaatgctgaaaacacattta

SEQ ID NO: 231995 - DNA, 440 bp, Homo sapiens
ctccccagcccagggcatgcagacggcccatgaacgctcatcttcctgaacctgcttccagcacactccctttctgctcttgggctgagctgagcttggagatgagcaggctgctgttggtgcaggggatgggttgaagcacagcctgcctggagggctcatggcctggcccacatagatgacaaccgggactgcaggaatggggaggccaggcagacggcactcctggggatacaagagcttccggagaccagcaacggcttcctcagtagcagcacctgacaggcacatcagcgcctctccgtgtgctggagttgcttctggagctctgggaagtcatcatcgactgcatatttattgtcagcgttgtttaaattctggtgcatttttctgtgataatgtaacaataacataaacatttgctgggtgctaaaaacgct

SEQ ID NO: 231996 - DNA, 561 bp, Homo sapiens
ccttggtatttgtaaatcattttccaaaatttttcacaatatctatataaataagatttttaaaattgtatgtataacactatagttggcaagtttcattcctggttccacaataacactgattagtggttggatggaaagccggcaggaatgtgttgtgtctgttcctgtttaacatttctgtaagtgatttggtgaggatacagaaggcatgttattgaatgtgtagatggacaaagtttagggtaaaagttaatgtgtttgaaaaaagaggttatattaaaaataccttcattgactggaacaattggaaaggacatacttgtctgcctacagggacagaaaactcattaccatggtggctttttcattgggtttgctagggccagaatccagaactcattgagtacttcttcttatagcatatatagcaattcattaacattggggaataataataatacaatagtcattgtccagaaaggactaactttaatggtaaaaggcttttttttgtcatcattttcttcaaaagaataaaaatataaaatattaaagtag

SEQ ID NO: 231997 - DNA, 511 bp, Homo sapiens
gccaattggaattagtttagcctgtgcagtctaaccctagtcagtaggggaagaacacagcagcagggaccacgtgtgtcagggataagaaccctttcccctcccttgtccaaatgtgcgcttgccattgttccatctgtaagggtgcacccttctatatagaagtaacttgccttgctgagaattaaaaggaaaattttatattcgagtgctacttcttttgcggcaccaaaactttatatataacaccaagaggagggggatgacaggaatttaatccaccaaagttagaaaaggaaagaatattctaggcagaagagcaatgggcgcccaatggccctgaggtggaaaagaatttatgtgttcaattcagcataacttcagccctatccagtaataccatacaggaaacatacttctgcagtgttccttttctccacttaaaacatgaagtaataacccctcgctctctcaactgctcctgaccatcacagaggatgggctctccagc

SEQ ID NO: 231998 - DNA, 446 bp, Homo sapiens
caaggggaccaggaccagcgcctcaaaaaggtaaagtgggaatgaagaaagccatgacatgggataaccaccgtcagtggcaggtctccggcctccctacgcagcatggtgacccccaggcttatcaagatataaaagtccatcctggagggcacattcggctccgcaggcttctcccagtctctctacagcttatgagtggttgaaccagattcagaactgctctccagaggacttttggaaatttggggatggagaaggaaatttgttgtcagaatgattaaggaatgtcgtcaatatttcacaactaggcccagaagttttaacaccttgcaacgtataggacatccctgcctaaagaaaaaatgcttttccccaaatgccagtagatacctgtattagtcagggttctccaaggaaacagaactaatgggaaattcatattc

SEQ ID NO: 231999 - DNA, 539 bp, Homo sapiens
attggttggacttcctctgtgttctcatagcatcagtctgtactgatactagttttcttaggcaaaaataatccagagatggttcttttggtaattgctgcattgtcacttctcaataataactgaaaatgggaactttcatgtcgcagagactttatttttaatgtattacatcctttttaaactacgtgacactggataagttatttattcagcttgagcttctcttcctttatgtacaaaatagagaggacagcacctagcttcagagttacaagggttaaagtacacagtgtacatgaagcccctgcctcagtgtctgcacgtggaaatcactctatgaatgagtgatcctactcattccagtaacagtagctgacactttcagaaaggagaatggccctctttggtgaatgttattaattctcttggtaaaaataaatgcctgacacatgctaggtactgagttatttaatatgaatccactaggaacatattgaatgcattatgaagcagaaaaacatagctatgaagatagg

SEQ ID NO: 232000 - DNA, 454 bp, Homo sapiens
caggcctaaagaaggaggtggaagatggtgggaggtggaagatggtgggagggggaagtctcactgtcaggcctctgagcccaagccaagccatcgcatctcctgtgacttgcacctatacgcccagatggcctgaagtaactgaagaatcacaaaagaagtgaaaaggccctgccccgccttaactgatgacattccaccattgtgatttgttcctgccccaacttaactgaatgattaaccctgggaatttccttctcctggctcagaagctcccccactgagcaccttgtgacccccgcccctgcccaccagagaacaaccccctttgactgtaattttccattaccttcccaaatcctataaaacggccccacccctatctccctttgctgactctcttttcggactcagcccacctgcacccaggtgaaataaacaaccatgttgctca

SEQ ID NO: 232001 - DNA, 288 bp, Homo sapiens
cctgaattacttcttttggatttagactgtaattgataagtgaggcatatagtatcttaattctagcaagggataaaattaaaaggggggaaacaggacacaagactttcctctaattacctgtactcaccaattcctacctctcccaactactgatcagtgaccacctacctgggtatcaagttcccccagggttgccactaaaatcagaactatataaccccagtccgggtgtgatggagatgaaagtgatgggccagaactagctctatcttctaaatccctgct

SEQ ID NO: 232002 - DNA, 459 bp, Homo sapiens
ccatttgccacactcagtctttttcataatctttgtatcatggacttcaaagctttaataaataaagtcaagttacctaattctctggctacttataaaaggtcaacatgtcccatcccatctgataccttgatttgcatgtctttgactcttaagacatacacagattttctatctaacccctaagacctttgaagttgatgggataacagtaggtctaatattttttatctaaatataaagacctggaacttgataggattctaagataaatacataattttccccactgattgagtcttgcattattttgtcttcatattcaatttcaatcagttgttcaaccaattgaatttgggctcttacataatgcttcagactcatggttgcaccatgaagtctttcaatgtttctgattttcttcttttgcaaccaagattgtgaaatgcagatcaaaga

SEQ ID NO: 232003 - DNA, 293 bp, Homo sapiens
gaacaactctgagcaggattccacatctaggaggcctcggaactgagcggtattttctgagacacactgaatggctgctccctttccgccgctgttgagggtcgttatcttgattatccagatcacctagaaagtatccgtatccagaatcaataagatctactctctgctcctctgacagcagaagcagcaggaccacaatgaaccaaagagcgtggaaggaaacgatgtgaccggaaagctcagagaacggccacagggagtcgtaagcaggccttccaaactgaatcatg

SEQ ID NO: 232004 - DNA, 226 bp, Homo sapiens
atctgtcatattagatctaaactctaaaagaaaaggactttgggccttatatctgccacccattctttcaatggaggtgacacccctcatttctatatttccagtcatctctcaatgaaaaggaacatgcaggctggctcgcctttggagagcaccccacacagttttgaggagctctgcagctctgcttgccctttctgcatcacagcagatccaaaaggtgaaa

SEQ ID NO: 232005 - DNA, 482 bp, Homo sapiens
tttcacagagccaggggctgtgtgtgtgccagacactgagccagattcccctcggcaaggtgggtgcaaagtcttattaagactcagagaggctctggtcacgtcactggtaagtggcggcgatgccatcagaacacaggtctgtctggtgcccaacaccatggttctgtctgcacccctctgttaaatactgcaataagtaaaggaccagttattttaaaacaaacagtttgaagttcaagctgtaagttaaagttaaaaggcaacatcttaacgttccctgaaattggctagaccctgctgtgtttcaaccccattttcattctaaacctgggttttgtagtcaaatggacctgagttcagagcctgcccctgctatacttattattaatagctgactttaagtaaactacttaaccttcatgagtttcagtttatatatctgcaaaatgggggcaaacctggcaggggagagagttgga

SEQ ID NO: 232006 - DNA, 475 bp, Homo sapiens
ccagaccaggaaaaagggaacagacatctattctgggccaggcactgccctcacaactcctgagaggcccatatgattatcctcctttgcagataaggacataacctgccaggggtaacatcccccaaggtcacccatctcatatggccaggcctgccaggcacacgagcctcagctcttcgctttcccacccctcaagtctactacacctgttcttgctggatgctaggctcccttgccaggagcaaggaaggcagagtgggttctctttctccccaccatgactcagttgagccaacctcaaagcaggtgagggaccagaggtcatgggattgctcacatagaagcagccagggggccggacgcggtggctcacacctgtaatcccagcactttgggaggccaaggtgggcagatcagttgaggtcaggaattcaagaccagcctggccaacatagcgaaaccccatctctac

SEQ ID NO: 232007 - DNA, 202 bp, Homo sapiens
atagacaacttaacaaaacaagaaaaataaaaattcacaaaattaaaatatcaacaaggagctaaaaattatgaagaaccaaacaaattttggaatacgataactgaaaaattcactagaggtcttcaacagcagacttggacaagtagatgaattggcaaacttgtagacggatcatttgaaattatctaatcagaggatt

SEQ ID NO: 232008 - DNA, 131 bp, Homo sapiens
acgcgctgctccgctaaaactggctcttcccactggacgggatcctccaacactccctcacccggggacaaaccacgctatttttcctccttactatggacagatgatcaaaagtatcggagtaactttct

SEQ ID NO: 232009 - DNA, 893 bp, Homo sapiens
gaagaactgtatctccacttcctcggttctctggaataaattacaaccttatgactcatgagtccaaacaggacagtctttacgtctacccatcttatgactgatgtggctctcaaggaacaataaaacctaagcaaattatgggaacaagcatttatcaaccacgcaaatgaagccattctttgtatgtattatgcatctcaatctccatatatggttatcaacgtaataattcaagtaaagagtttttctacacccaggagttccaaaatcaagctacattcaaagagagaaacaacacattggatactcaagttatgaaccgtgagaagagtcagaaattccttataggatagaacatgtgcaattgaaatctaatattaagttttctgtggaaaaacacatatatgtgtactatatggctatctgatcattttaaaaacatactcagaatactttaataaaacactgtgagtatgaattatctatgctttaaacactttacttctctttctgcatttatgccatcacttcttatctcttcataccttgaactttttcttttccccctctctcactctatgactcctgaacaaaactgtcatttccaatatctaacttcattaactaagtagggatggcagatgtttattatcaccaaaatgcagcataacatttgcaaactggtttatgacatgcatctttataaagtgctcagtgaaatgcataaacgattgattgaaaattggtcaaagagaatattgagtactttattagttactggctaaagctaaggagttacagaaaagcatcatatctaaataaggagttttatttgaaatatgtaatttcattatgaataaattccataaaataaactaagaattgctaaa

SEQ ID NO: 232010 - DNA, 245 bp, Homo sapiens
gaaaaacccctaacctaccagccttcaatgagattgatttgagtaataactccatctccagtgtggagtggccagcctcacatcaattaaactctttctttactgcaatgctatggtctttgtttgtgcagcaggcaggaagaactcctcaggcagttacacttcgagccttaagacaccttgatgtcagacttccagtgccctgaattgtgacagaataaatttctgttgttttaaaactccca

SEQ ID NO: 232011 - DNA, 968 bp, Homo sapiens
ctggagtgcagtggcgtgatcttggctcactgcaagctttgcctcctggattcacgccattctcctgcctcagcctcccgagtagctgggactacaggtgcccaccaccatgcacagctaatttttgaatttttagtagagatggggtttcaccgtgttagccaggatggtctcgatctggatccacacgcctcggcctcccaaagtgctgggattacaggtgtgagccactgtgcccggcccaggctcattttaataaaccaggttttcactcagctctagaactctctggaggtgtccttacacacacacacacacacacacacactttaggtttttagagattgatttgataagaaaaaaaatttttcctttacagccaatgacttctctctacatctttaataaggctgtgattgttgatgacgatgatgatagatgtggcatctgttgagtgtttactatgtgcccaagaactgtgcaaagtgcttcaaatacattatattacttaatcctaacagtacccaaacaaggttgctatttccattttatagtaaaggggccaagtcctaggatgactctgcaacttgcccaaggtgtcacacagcaaagaagcagtagagctataatttgaaaatagggggtcagactccagaacctattcggcaataaaaggtaaaagccctgtcccctctgcaaaaagccactgcttctagctactcgcaatgactttcacagaaataactttctgtatttgtctttcgtttgggggatatttaattaaatggtataattaaaacaacaagtccatctggcattcccaggtttggcaagaaacaagaatgactcttggaaagcccaggcctcagctggtgggagcagaagtgtgctggtgtcctaggaaccaggctgccagctaagaatgttcagcctccccccgtactttaccgagggggtgcggagttaac

SEQ ID NO: 232012 - DNA, 397 bp, Homo sapiens
ccccagcaattaggaattcatcaggcaacaggtgggaggggagcctcccccctcctccttcttaccaaacttgggaggctggggaggcagatgggtgagcctgtacgcagacagaagcagcaaggcctccaggaacagctatgtccggcattcccctgctgtagcctgcaaactagttagcgggcagcctgcaacttattaaggatttaaaaatagtatccatgtgtctccagtgggctcagaggggctgggtcttcattgtgggaatgtcagcaatgctggagcctcacttactgttgagtcgacagttgttatgggagggacattaccctcccctctgctccttaaccaatgtaattttagtagtttttagatctcacttgagctttaaagaaca

SEQ ID NO: 232013 - DNA, 394 bp, Homo sapiens
agaggatgcaagggcgccacgggattggtctcctcctttggcactcattagtcaccaggtgcactttgtcagcatcgcgataacccagaagagaacacgtgtagatggcctctatgaagctcttttgcttgttagcagctggtcaaagttagcagaaatggaaggaagtgaactcaaccaacaaaagagaactgagcaattcatcccgggactctgctctctctgtttttccccctgttgaactgaaagcaacgctagtcctgaacggatgaatgagcagaagtaaaaggaagagaaggaggaaaaccagaaggaggaaaagaaaaagaagaatgtgagaaaagtccagaatccatataaatcaagatatagaaaagagtttttctaaatctca

SEQ ID NO: 232014 - DNA, 299 bp, Homo sapiens
gccacacagcttaaaaagattaggaactgtttggttgggcatagtggctcatacctgtaatcctagcactttgggaggccaaggcaggaagattacttgagaccaggagttcaaaaccagtcttgccaacataacaagaatctgtctctatataagaagattaaaaattagctgggcatggtggcatgtgcttgtagccctagctacttgggaggttggggtggaaggatcacttgggcccaggcattccagcttatgatttcagtgagttatgatcacaacactgaattccaacctaa

SEQ ID NO: 232015 - DNA, 452 bp, Homo sapiens
tcttgatatcttactaattattaaataaggaggggaggaataaaacattttaacaaatttttaaaagtcaaatcaaattgattttctatttgcaaataaagcaaagatattatagatcagaaaacagaatgtatgaatgaaaaaaatgacattttacaaatatttattttggccaggaatgttggctcacacctgtaattccaacactttgggaggccttggccgggtagacggcttgaccccaggagttcaagaccagcttaggtaacacggcaaaactccatctctacaaaaaatacaaaaattagcgaggtatggtggcatgtgcctgtagttccagctacttgggaggctcagcggggaggattgcttgagcctgggaggtcggggctgcagtgagccatggctgcgccactgcaccccagcttaggcaacagagtgagaccctattt

SEQ ID NO: 232016 - DNA, 598 bp, Homo sapiens
actttataaatattatctcatggatatgtgtgcaggggtgggcagtagatctacaggaaattatctcatgccctttaaaattatgctgttattttatccattttaggtgaggaaactgaggctcagagaggttaagcaacttgccaagatcacagagctaaaaacaggcaaatgccagtatttgaaccaaagataatgctcttacctggtacaccatatttcagagttgggatctccaaagcagatctgaggatggcaccggggcagcctgagcccagcccttccacttccaccccaaccctgcagacgcctgatgtatttacaagcatctgccctgggcggcagccatggagtgagcctcttggagaatcccaaggctctacattgaggaaaggtcccatctggcttcccctccccagtctagctcagctggagagacaggaaggaggggtggcctccctcctggccaggcctcatgtatagacccttgtcatggctggcagacttgaatgactttctttatcctcccttctcttccctacttcccccactgccagctgtggccatttaataaaattagcttaatgcttgttccttc

SEQ ID NO: 232017 - DNA, 574 bp, Homo sapiens
acactaatcatgtgcttattgaaaaggacttccaaacatttcaatgctgtcttctttgttttctggttgaatttcgccttcatcctccttgtgttgagttggatctttttcagcaacctggtctttggtttggggttcatgtgtagaaacaggatctaaaactacaactggttcggcttgtttttcaccgtcaatgtattttttcctgcatccaatgctactgggaggcctatgagatgaagagttagacaaaaaaagtaaaaagcagagagagaaaatacttgtctctgatattctggattcagactaacataaaacccaaaatgttctaagtctaatcaacatgcatatagtagtctttgagatgccagccatttaaaagaaaaaatgaagctatcagattacacagctgatactaggagcacaaggccagaagaaagaaggcagagaaagagcgattaactacagaagtgttaaaaagccaaatgcacctacctgcttaattgcattctcttctcaggaagcgtaaagctcatggacaaactgtgaacttctcacagcctgctgcccagac

SEQ ID NO: 232018 - DNA, 346 bp, Homo sapiens
gatactcaacaagggaggaggccataaggcagaatcagaagggtttaaggaatacactgtgacttccagcataataaactccacagggttcatggatagtcagcagagaatactaaagatattagtggtaacatctatacatatagcaattatcattaatatttctaaggcaacttaagtcccagggttaataacaacagaaaatgcccatgtatgtagtagataaggtcacggctaagttcaacgtctaactaatgagtccagatagtgattcactacgtatatacaggataagatatatgaagttaaaaagtcactaggatatatacttcaaaataaaagctat

SEQ ID NO: 232019 - DNA, 337 bp, Homo sapiens
gagacaaggtcccgctctgtctcccaggctggactgcagtagcacaatcatggctcactgcagcctccacctcccaggctcaaatgatccttccacctcagcctcctgaatagccgtgacgacaggtaagcaccaccatacccagctaatttttgtaatttcttttactagaggtaaggttttgccatgttgcccagactggtctccaacccctgggctcaagggatccgcctacctcagcctcccaaagtgctgggataacaggaataagtaagccaccagatccagcctgaaacctatttttcaattttcaaacatatgctttccaaatacgtaa

SEQ ID NO: 232020 - DNA, 758 bp, Homo sapiens
ggaggcagaggttgtggtgagctgagatcgtggcactgcactccagcctgggagacagagtgagactccatctcaaaaaaacaggaaagaaagatagattgtaaaaccttcagtgagtacgttggatgttgtgaaatttgccaaagagaagaaagatgatttttaaaggatataaaatatggaaataaaaaccactgacaacactgccacccgggggcaatgattgttaaggctcgggtgtgtgtgtgtgtgtatgtgtgcgcgcgcgcgcacacgtgcacctgccgtgtttgaaaaaaatggactgtcatgcattgtgagactttatagcatactctttcacatacacgtggagcatccctaatctgaaaatccaaatcttaaactggaaatgctccaaaatccgaaatgttttgagtgcagacatggcacacaagtgctcacgcagaatttcggattccaggttttcagtttagggatgctcagcctgcaaatattccacaaaacacaccacaacaagcaaaaaaagaacaagaggtgtggcgcccacgagccccagagaaagctgagagaacaatgcgaggagcacggagccccagaggcaacgtgacacgggcgacaagaggagtaacacgagacgaaacggggcaaagaagcaaagggcgagactctcacagcaaaaaaaacacctcgggggaacacacaaggtgagaaaaagcctaagagggaaaagaggggacacgaggggcatacaaagg

SEQ ID NO: 232021 - DNA, 629 bp, Homo sapiens
ggtggaccctgccggatcttgcgaagttgccaaggggtcaatgcccaggcgcgagtaattactgcattaatcccagaccccatcccgattcttgtcggggactgaagggtctccgcctggggctccgaagtcgatcatttcacattcacgcttcccaaaacgagacacaataaattccgctctggcctggagccttgaattcccgttacggtcccgccccgccgaggcccgtcgccttgtttctctgagtcagtttccccaacggtgaaagggaggacgctgacacctgcctgcccctccctatctgccgaggccgtggagatcagcagcagcgaaagcgctctgggcttagaagaggaaaagggctgcgtgagcccaagagcttgcatcggaaggctccaggaagagcatctgcaaaaaagaggattccacgggatgacccccgacaactcttggaattctaaaatcctatacccttgcccgcacccattcgtgtagtgaaggggcgcgcgttaggcgcagaggccacacgctccgcaagtgaacccgggcacctctctgaacctattccgggctgagggcggggagcgggtggctgcccgatttaaaaacatgtatatgtatgtgta

SEQ ID NO: 232022 - DNA, 702 bp, Homo sapiens
tgcaaagcacttccacagaccaatatgatttccagtaagagctaaataaattttgttagttgttaaggcataaaacattaatataggatattacagtcctaggcttacattacttaatttggattttttgcaaaaattaactttaatgtgaaaaattaggagacaatatagagaaaattcaagagcctctccagataaattcttagaactaatgagaaagttcactaaagtttctggatataaaatgcccagggcaccggagggggaaatactttcttgtatattaatagcaaacaattagaataatttttaaaataccatttataatagtaccaaaatctatgaagtatctaagaataagtctattaaaatatggccaaaacattcatggagaaaacttatagcctttatttaaagacataaaataattcttaaacaaatggagacattattaaatatgtttatggataagagagactcaatgtagtaaagatgtaatcttctccatctttcacttcctttgcttcctaattaagacttatatcgctcttggctgcgcacagtggctcacacctgtaatctcagcactttgggagaccaaggctggcagatcatatgaggccaggagttcaagaccagcctggccaataaggcgaaaccttatctctactaaaaaataaaaaataataataaaaaaaaata

SEQ ID NO: 232023 - DNA, 496 bp, Homo sapiens
ctttctttaacaatatggagtacatagacatttatttactttgaatattttagcacttaacatgtgttgaatatattcccacatcaagcagatttagctctttcttattaaatgctgccccacacaccacagtcaagaggttgcacatgtgttcaaacactctcttcttggtagatagtcagactatttggtgttccttctgcgaaccgccctactgtcatttaagtaacaaactctgttgatacaggagtggcctctaactcatttagtctcctgtggatcaaaataaaatcctggtctcctaaatgggtgcggctgggagatcacttgcttttcagagagtagtttccatttcctgtacatcagatggtcagccctttaagcatgccaatctctgctggtgctggaatagctctgtctgcgcaccggggcaggcggctcgctcttgcgggcggattcctggttcagcggggtctccctggagccggcggccgca

SEQ ID NO: 232024 - DNA, 365 bp, Homo sapiens
gagagagagatacatagtagaaatataatacacataagaattataatcagaaagaaatgtgtatgccagaacagaagaaaacaattcaatttatgagtgaactaaaaacatcataaagaaaattaaaacccagaccttctttaaagacttgttgtagccaggaaataattaaggattgcaggaaaataacaaaaactcagaaacaatcatcagggctggaatctatcaataggtataaaatcgttttcttctgaaacataatttttctctctcagattccccatttctaccaaagataaatcttagtgggaccaagttacttgtaaaataagttttagcattatattcagcttcattatttgcat

SEQ ID NO: 232025 - DNA, 1622 bp, Homo sapiens
ttcccagcctcagaaaggcagaaaccaggaaagctaagacaaacaaaactacaatggaagaagaaaacgtcctcaactagacatctgccaaaaatatcatccagaatgccctggcaagttcacttccatttagtgaagtgagataatttggcaattcacgcaagagactgagaaccaagcctcaagccctgcctctgattctgcaggtatggaacatgagcagctgacctactcttccacaaggtccaaagcccccagtgtcatcatcacaggtcttaagccagccaccaaatatgtatttcacatccgagtgagaactgcgacaggatacagtggctacagtcagaaatttgaatttgaaacaggagatgaaagactctccatttcaagtgacaaaactgtactggcttaatgaaaagtgggactttattgcctcagcttctgacatggcagcagaacaaggacagattctcgtgatagccaccgccgctgttggcggattcactctcctcgtcatcctcactttattcttcttgatcactgggagatgtcagtggtacataaaagccaagatgaagtcagaagagaagagaagaaaccacttacagaatgggcatttgcgcttcccgggaattaaaacttacattgatccagatacatatgaagacccatccctagcagtccatgaatttgcaaaggagattgatccctcaagaattcgtattgagagagtcattggggcaggtgaatttggagaagtctgtagtgggcgtttgaagacaccagggaaaagagagatcccagttgccattaaaactttgaaaggtggccacatggatcggcaaagaagagattttctaagagaagctagtatcatgggccagtttgaccatccaaacatcattcgcctagaaggggttgtcaccaaaagatccttcccggccattggggtggaggcgttttgccccagcttcctgagggcagggtttttaaatagcatccaggccccgcatccagtgccagggggaggatctttgccccccaggattcctgctggcagaccagtaatgattgtggtggaatatatggagaatggatccctagactcctttttgcggaagcatgatggccacttcacagtcatccagttggtcggaatgctccgaggcattgcatcaggcatgaagtatctttctgatatgggttatgttcatcgagacctagcggctcggaatatactggtcaatagcaacttagtatgcaaagtttctgattttggtctctccagagtgctggaagatgatccagaagctgcttatacaacaactgacctcttccaaactctaacacttaacctctgctattctgcataaattctgagaaaagccaaattttctgtcggtctaagaagacatagcctacacccaactggagataattataaaaaataatgaagcagcatgaggggaaggtatttaatgtgtattttaaagttgggagagattctccttcacctaatttaggtgtttgtgaattggcttgactttttgaagttaatttttaagccttgaacatgtccaactttaagaactttaagaataaatattttaacacaaaaaaga

SEQ ID NO: 232026 - DNA, 1506 bp, Homo sapiens
ttcccagcctcagaaaggcagaaaccaggaaagctaagacaaacaaaactacaatggaagaagaaaacgtcctcaactagacatctgccaaaaatgaacatgagcagctgacctactcttccacaaggtccaaagcccccagtgtcatcatcacaggtcttaagccagccaccaaatatgtatttcacatccgagtgagaactgcgacaggatacagtggctacagtcagaaatttgaatttgaaacaggagatgaaagactctccatttcaagtgacaaaactgtactggcttaatgaaaagtgggactttattgcctcagcttctgacatggcagcagaacaaggacagattctcgtgatagccaccgccgctgttggcggattcactctcctcgtcatcctcactttattcttcttgatcactgggagatgtcagtggtacataaaagccaagatgaagtcagaagagaagagaagaaaccacttacagaatgggcatttgcgcttcccgggaattaaaacttacattgatccagatacatatgaagacccatccctagcagtccatgaatttgcaaaggagattgatccctcaagaattcgtattgagagagtcattggggcaggtgaatttggagaagtctgtagtgggcgtttgaagacaccagggaaaagagagatcccagttgccattaaaactttgaaaggtggccacatggatcggcaaagaagagattttctaagagaagctagtatcatgggccagtttgaccatccaaacatcattcgcctagaaggggttgtcaccaaaagatccttcccggccattggggtggaggcgttttgccccagcttcctgagggcagggtttttaaatagcatccaggccccgcatccagtgccagggggaggatctttgccccccaggattcctgctggcagaccagtaatgattgtggtggaatatatggagaatggatccctagactcctttttgcggaagcatgatggccacttcacagtcatccagttggtcggaatgctccgaggcattgcatcaggcatgaagtatctttctgatatgggttatgttcatcgagacctagcggctcggaatatactggtcaatagcaacttagtatgcaaagtttctgattttggtctctccagagtgctggaagatgatccagaagctgcttatacaacaactgacctcttccaaactctaacacttaacctctgctattctgcataaattctgagaaaagccaaattttctgtcggtctaagaagacatagcctacacccaactggagataattataaaaaataatgaagcagcatgaggggaaggtatttaatgtgtattttaaagttgggagagattctccttcacctaatttaggtgtttgtgaattggcttgactttttgaagttaatttttaagccttgaacatgtccaactttaagaactttaagaataaatattttaacacaaaaaaga

SEQ ID NO: 232027 - DNA, 245 bp, Homo sapiens
atagctgaccagtaaaagcagatatttggggccatttcgtaatgagatgctaattcattatttcatctggaaagttactctcctatacacgcaccctagtccactatagtatacacatcataaataccagtttgtaccatctctaaatgtatgtcttttcattgtaaaaatatagggtttcttgttggcttaggcaataggagagcaaacatccctctgatcccatcagctctttctacagaacc

SEQ ID NO: 232028 - DNA, 370 bp, Homo sapiens
atttttgaataaaatggtggcataactgaaaagtcatggggagagaaagaacttggctccttatttattttgcaactagtgtgtatgctatttgcacatgtaccctaaaacttaaagtataataataataaaattaaaataaataaataatggttaaaaaaagaaaataaattcatactgttttttttattctattgaaaaaaaagatgatgtttttagagctagtggttttgtggttttagcaaggtatcacatgaggaaacaaatactaaacaaagttatgttgaaaaaatctccatgttacctctttttagtagaatggtaaagttttgccctaaaataattcctttcactccaagcaactctttct

SEQ ID NO: 232029 - DNA, 359 bp, Homo sapiens
taactcatgcaaccatatgttgatgatctgggggaggaaagcttataagcattgcaaattgctaccaggctattgcagcttcaacggcaatgtggagacttattcttcccacatttttgttccctaaagcagagtatatttcaaacttttgaatctttcatttccatttctctaccacaagaagatataaagccgctcagacacttgccggttaaagtacttgagctccaggataaatacttaggaatagagccagtcagatttgtctcccagcttttgtcccttttctcttctagtgaggaaattgcacctcattagctttgtgactttagaaagccacttcacctttctaaatctca

SEQ ID NO: 232030 - DNA, 169 bp, Homo sapiens
gaattcacagataaaataattttagctttactttataggtactgctgaagttgtagcaggaactactagtccttcactgatgcatgtagctgccttgccgtacagtctgtggtaacttttaggcattccttcatcaatcacagcctccatcccaactgtttcagatctt

SEQ ID NO: 232031 - DNA, 424 bp, Homo sapiens
agtatttccataaatcctggtcttagaatcttaacttgcaattttgtcaatgattctgatgtatctgaaatctatttctaaaaatctttttctgatttcaaatatgatacatcttacaacaaattctaacataatagaattctataaaggaagtggtagccctctgtatattcatctctcacaaatcaccacttttaacagtttgatatatatactttgacttttcttctgcacatctgcctctgtgtgtatacacatttttttcctaaatgggattatttcacaactccttttccctacgtgtcaatacctatagatagatcttgttctttttaatggttgtgtagaatttctctgtggatacacaactccatatggattgtttataatttttagataaaataaataatgctgtgattcattc

SEQ ID NO: 232032 - DNA, 773 bp, Homo sapiens
tactgtttccacaggatcagaaaatcttttgactgagcttccggaggaaattcaaaaggaaccccatacatcaattcattctcaggaagatgaattatttgggatgaaggtagcacttcatgggagaaattattctttacagctttttatataggacccttggagctttgtgtataccaccctatcacagccttactgctgacattgctatagtgacttcttgctctctgtgcttgaccattaaagatgcaaaacatttaggaaaacaaaataatttccctatgaacaagatgcaggaagctgtgctcctgctgcattgataacccagtggatgtgcttacagagcaccagagaccacaggaaagcataaagcacatcagtgtatttattaggaattatactttcagttcatactctggacatttttaaatcttagcctgttcactcaatccattgctctttcactgccttatttggagtatgcgcaggtacttgcaaactaattttaaaactaacctacctcaaagtgagtatggggaacagatgtgtgaaggatattctaaagataagtgacttgtatgttacctgtttttatttttaactctatggcactgcttcttttcatttaaatctaaaaactagacggtgaacttttttgtagattgggcctgtgttcagatactacctggcacatagtaaacattcagtcattgtttgattaggcattgagcatttgccatatttggctttttatatcccatgaatccttatgc

SEQ ID NO: 232033 - DNA, 381 bp, Homo sapiens
ggaggttgcagtgagccgagatcaatgccactgcactctccagcctgggcaacaagaaggagactttgtctccaaaaaaaaaaaaaaaaaataggcaaaggatctgaatagacatttctccaaagaagatatacaaatggccaagaagcaccatgaaaagacagtcaaggtcaggcacggtggctctcgcctataatcccagcactttgggaagctgaggtgggaggaacacttgagcccatgagttcgagactagcctaggcaaccaggcaaaaccccatctctacaaaaattacaaagtattagccgggcataatggcgtatgcctgtggtcccagctacttgggaggctgaggtgagaagatcgtttaagcccaggag

SEQ ID NO: 232034 - DNA, 430 bp, Homo sapiens
tccttggggctcacacaaggctggaaaaatttgttcccaccagctggagtggaaaaatttcataatacatgagcatcaagcaaagtactcagaagaccattttctcattactaacaagcaaaatgagctctagattaattaagcttaaaagtaagcctcaaatggatcaaactgtatttaagttacttaagtctatcccaggattaaatttaagaatatttaaaggaatacagaaatatccagtacacagcaaggtcaaattcatgatatttgacatataattaaaaaattagcagcatgcaaagaagccaaaaaatgtgactcataatgaagataaaaataaattagtagaaacagatcccaaaataagttactgtaattattttctgtatgttcaagaaggtaaaggaaaggacagctatgggaaata

SEQ ID NO: 232035 - DNA, 488 bp, Homo sapiens
tccttggggctcacacaaggctggaaaaatttgttcccaccagctggagtggaaaaatttcataatacatgagcatcaagcaaagtactcagaagaccattttctcattactaacaagcaaaatgagctctagattaattaagcttaaaagtaagcctcaaatggatcaaactgtatttaagttacttaagtctatcccaggattaaatttaagaatatttaaaggaatacagaaatatccagtacacagcaaggtcaaattcatgatatttgacatataattaaaaaattagcagcatgcaaagaagccaaaaaatgtgactcataatgaagataaaaataaattagtagaaacagatcccaaaataagttactgtaattattttctgtatgtttacacaagcgtacagcgaacgcccgtctatacgaaactctggggtatgggcgtgggggttgggcagtcgcactggcagcccagccgggctcac

SEQ ID NO: 232036 - DNA, 655 bp, Homo sapiens
gaagggagacagggaagtgctgggaggagaagggtgggtccctggcgagggctccacccccgggcctgtgcccacagacctaggtgaagacaggcactccagccttcacgtccaaatgttgcatttcccaagaccactttgacccgccacgcccccattctgtgcctataaaaaccccaagaccctagcaggaagacacacaagctggatgccgagagaaacacattggcgaaggaatacacaggtggatggacgtcgagaggaatgcactggtgtaggagcacactgggatgccagcaggccatcgactggtggaatgacacaaagtttggctggggcagttggagaagagttgggccaccaagcggccagactccaggggaaaaccatttcccttctggctgccccatctgctgagagctgcttccactcaataaaacctcgcactcattctccaagcccacatgtgatcctattcttctggtatgccaaagccaggatacagaaagccctctgtccttgccataaggcaggggtctaattgagctggttaacagaagccgcctatggacggctaaactaaaagagcatcctgtaacatatgcccactggggcttcagctgtaaacatttacccctagacactgccgtggggt

SEQ ID NO: 232037 - DNA, 417 bp, Homo sapiens
ttactacgtctcaagtgttctgctagcacttcacgtgtactaattcattcaatcctcaccactaccccatgaggtaggcatttttaataatatgactcctatgttagaagtgagacccaggttaagccagctgtccaaaatcacgaagccagttattggcagagtgctggctagaacccagttctcctgatgcccactcctattctctttctgctgtatgtatatacattataacaacagatatcttatattgaaacaccttctgcattccactgcactaaaggctttgcctcggcggggcgcagtggctcatgcctataatcccagcacattgggaggccaaggcaggtggatcacctgaggtcaggagtttgagaccagcctgaccaaatggagaaaccctgtatctactaaaaa

SEQ ID NO: 232038 - DNA, 423 bp, Homo sapiens
actccagcctgggcaacagagtgagactccatctcaaaaaaaaaaaaaaaaaaaaaagaattctatgatttcttggctgggtgtgctcacacctgtgatcccaacactttgggaggccagggtgggggaatcccttgagcttgggagtttgagaccagcctggccaacatagtgaaaccctgtctcaaaaaaaaaagaaaaaaggtaaagggagagaaggggaggggatgggaaggggaagagacagaaagggaggggaagggaaatctaccaggcttggtggcatgtgcctgtagtcccagatactcaggaggctgaggcgggaggatcacctgagcctggggaggttgagtctgcagtaagccgtgatcatgccaccacactccagcctgggccacagagtgagagcttgtcgccaaaaaa

SEQ ID NO: 232039 - DNA, 134 bp, Homo sapiens
cccagcagttccccaccaggcatttcaccttggctcacattgtccgttcccctgctctctcacgctttcattccagagtgggagatagagagttctggaagccctggcttcctggtctgcttgcatcctctgtt

SEQ ID NO: 232040 - DNA, 325 bp, Homo sapiens
aggaagggcagatcgatggaaccattcgaatacacataggtatcaattaagctcattgtcttttggaccatggcttgtgatgccccaaaacaatgacaatagtaatatcaatgatcactgataacagatcaccataacagatataataataacaaaacatttgaaatactacaagaattacaaagatgtaacacagaggtgcaaaataagcacatgctaccagaaaagtggcactggtagacttgcttggtgcacggttgctacaaaccttcaacctgtaaaaactgcaatatctgagaagcataataaagtgaagtgcaataaa

SEQ ID NO: 232041 - DNA, 407 bp, Homo sapiens
cagtggattgtgttacaggaaagaacgctgagcttagatgatctaccacttctatagcaagtagtaagcaaatctgctaaacctgctcttggtcctgaagggaaacagtaactcattcttcaaggttgctcaccagaaccctgaaaaatggcccacataaagaatgatcagggccttacatgtatggctcatgtagcaagatgtctgggagcacaagaagcccaaggaggactgtctgtctctgtagcaatctattacattttccctctcttgtgagactactgtcttttgttcctaagccgcactaaggtctgattgtcattttccaaaaggatctcttttgcacattgcaagaacataatacgtaatgcttataaagtttctataaaaaatttttctttgaaaaa

SEQ ID NO: 232042 - DNA, 159 bp, Homo sapiens
tgacagtttatattttaatcactcaaacttctacatatatatttatgtaaagaacatagacaaaaaatgttccatttttatttcaattttaaaggaattatggaaaaagccttaataaaaaaagactgaacttttggttaactgaaaaaaaggtaggag

SEQ ID NO: 232043 - DNA, 405 bp, Homo sapiens
cctgctcgcagtcatctggaggactaaacccctccctgtggtgctgtgcttcagtggccacgctcctttccactttcatgttctgcctgtacacctggttcctcttttaagttcctagaagatagcagtagcagaattagtgaaagtattaaagtctttgatctctctgataagtgcatagaaaaaatgctgacatatgtggtcctctctctgcttctgctaccacaaagaagacccccatgtgatttgcttgaccttatcaatcacttgggatgactcactctccttaccctgcccccttgccttgtatacaataaatagcagcaccttcaggcattcggggccactactggactccgtgcattgatggtagtggccccctgggcccagctgtctttcctacta

SEQ ID NO: 232044 - DNA, 349 bp, Homo sapiens
agtcttgccagtgtaggagtaaatggggacccttccttgggtggcaacaggaagaattctccaggatgtccacactgatacctacttctgatgtcatgggtggggacatgcatctgtatatgtatatttatgtagctatgctgcatgaacatataatttcagtggaaaaatagcacttatgaaatttatttgtttctaacattctccacagttagatctcagacatcagcctctaaaaaatattgttgtggagctctcatgttacatttgacattttcgaaactgtgaggtggaaagatggtagtagaataacagaaagaacatttttagatataagatcataagctaa

SEQ ID NO: 232045 - DNA, 136 bp, Homo sapiens
catgcttgtgtgggttattttatctcatgtgagccatgttatgtggacagggaaaagaggaggatgatggaggaggaggaaagaatcgacttgttccaactgctctccataataaaacttcattcaagtgcatata

SEQ ID NO: 232046 - DNA, 216 bp, Homo sapiens
cttctcactaatgtttcttgcagctctttcaaataggatatttccatatatgagccctttttcttgtggctttctattctattctattgtcttaattactaaaagctttatatcagggtatccaatctcttggcttccctgggccacattgaaaaaagaagaagtgtcttgggccacacataaaatacactaacactaagaatagctgacgagcta

SEQ ID NO: 232047 - DNA, 500 bp, Homo sapiens
agtgtatttaaataaacagtagtttatggaaggctttggaaatccactatattaatctggaattttatgaaattttaccagaacttaaattattaatagttgaggacaaagaccaaccattttccccaaaacttagtcactagttttgtccttaacaactaattaataaatatttgtgaatatagtgagtgactaaagtaatgcattaatggttgaatggctggccaccgtgcctcatgcctgtaatcccagcactttgagaggccaaggcaggcagattacttgaggtcaggagttcgagatcagcctgggcaatatggtgaagccccgtctctactaaaaatagagaagttagccaggtgtggtggtgggcgcctgtagtcccagctacatgggaggccgaggcaggagaattgcttgaacccaggagggagaggttgcagtgagacaagatgatgccattgcactccagcctgggtcacagagcaagacttcatctg

SEQ ID NO: 232048 - DNA, 423 bp, Homo sapiens
  misc_feature (6)..(6): n is a, c, g, or t
  misc_feature (30)..(30): n is a, c, g, or t
  misc_feature (48)..(48): n is a, c, g, or t
  misc_feature (69)..(69): n is a, c, g, or t
ctcctntatgccttcccctgaacgcagtgngccctcactaataaattntgagggctgacactgcctganccggctggtctttgccctcaatttcattgagatgggccgtgagtgactaaagtaatgcattaatggttgaatggctggccaccgtgcctcatgcctgtaatcccagcactttgagaggccaaggcaggcagattacttgaggtcaggagttcgagatcagcctgggcaatatggtgaagccccgtctctactaaaaatagagaagttagccaggtgtggtggtgggcgcctgtagtcccagctacatgggaggccgaggcaggagaattgcttgaacccaggagggagaggttgcagtgagacaagatgatgccattgcactccagcctgggtcacagagcaagacttcatctg

SEQ ID NO: 232049 - DNA, 473 bp, Homo sapiens
tggcttggctgccacacacagagctgtcatacacacagtggggtagagctcgcccactgcccggccacacacgggtgctcatcacgcttgcagtgttctcatgctgtttctactgtgtgcactcctgtttcactctgtaaagacgtgggtctcagcctacaggagcaatttagtgaccacagacagtctgaaaaccatggtctgcgtcaccacctgtggggctccagggaaggcccggacctcgctgaccgctgctgtgtgggacgcgcggggccctgctctttgggctctgtgacctttcactccgtctcctccccttccttagcagagacagacggagagagagatagagacggagagagagagatggagagagacagagacagacggagagagatggagagagagatcgagacggagagagagagagagagacagagagatagagacagggagagagagacggagagaga

SEQ ID NO: 232050 - DNA, 593 bp, Homo sapiens
ggcagtctcatccaatccctgggaaagacctttgcatccctctgagcaaagtcgtcctaattgccctttatcataccattatcaaaacttgaaattcatttttatgtattcaaagaggatgcaaacctgagggctccaatcaatttggttgctaagtctaaggttaaatttggatgtaatgttgtaaatgttaatgaacaacctttcctggacctacataaaagttcagctgtagagaaggtataagcacaaataattagaaaagctgaagacagaagggaggctcttaagaggcatctattctgaacctcagctctcgggcagaagtacactgcaaacatctgagaaagacccatttgtccacccttgcatgcttgccatttaattccctcactcgctgcaaaggcaaaggggtaaccaagagcactggcatggttcacagaaaggtacagcagctaaatatacatcagggtggatgtcaactttctgcaaatccccttaagtgaatctctttaacttggagctattcttgccttccattctctattggggtcctttgaaaagcacaacatagtcatactaaaacctcacat

SEQ ID NO: 232051 - DNA, 378 bp, Homo sapiens
gctacttgggaggccgaggtgggaagatcactttagcccaggagttcgaggctgcagtgagccaggatggtgccaccgcattctagtctgggcaacagagcaagaccctgttcaaaaaaaaaaaagaaaaaagaaaaaagaaagaaagggaaattattgatatagtgctaaatttcttatgttaatatcctagcccccatagtgatacttttacgacgtgggccttttgggaggtgattaggtcacaagggcagaatccttgtgaatgggattagtgcccttgtaaaagaggcctaaaggagctcatttttgccttccttaaaagcttgaaacagcgtatttcttaagcatcttatctaaattgttggacattttacc

SEQ ID NO: 232052 - DNA, 119 bp, Homo sapiens
ggtagcaggatgggatgggaggtacagcacgggaatcagctgctggtcccagagcagtggaggggccaaaactccgcttagggcacgagtaagaggagtgataggaagaggcagctttt

SEQ ID NO: 232053 - DNA, 441 bp, Homo sapiens
gtgcaagaatcattgctgttggaagcgaagttcctctttgttgaagttaataccttgaaaatgactatctcaagaacttagctggcatccctccagatgttctatcagatgtacctaaccatgctgctctcacaaaagtcatgatgtgacaaagtgatgaggcaacggtttactcagtttctctaaaaggaataacccttctccatccgtactgcatccaataattctataaacctgaattaattttctattggtcaatcaatctttccattgagatggataaatgtgtcagagtttactacaactacctgttttcatatccgaatttaccatgactataagctcctcaagtctaggagtcttttatttcctttaatttgcagtaccaagcaaacgttccacagaggtcatctgaaataaaggcttagtgcataattaatt

SEQ ID NO: 232054 - DNA, 365 bp, Homo sapiens
aatataaggcaggcacatttataagtattaaaagctgtaaggaagcattttactttcgtttaggtggcttgatgtccttcacattctcggcatcagcttgatatttcagtgtaacatacagtactgcaaacaacatatttggtgtactatatgcattcagttttcacttacacaaaacaccagttatggaacacttcctgaaacagaatggtggcttaaatcaaggcacagctgtatagctggtacttccctggaagaatctggctttgaactaagagaaaaccacaaccagaatggctcatgagaattataacaggtagggtagaccctatagtaatcaaaatcataataaagacactagagta

SEQ ID NO: 232055 - DNA, 595 bp, Homo sapiens
taagggtttaaggactggttttaaactattataacttaagctttatgtccacataattaacaaatttgtaccaacagtagttttctcataatacacaatctaatgtttgcaaaagcatcatgatcacacatgtataacacacttccacttctgtgtactggaacagcttttaaaggtatttctgtattacaacttaatctcaagctaattaattcaaaggtgagaccatcattacagtttgacttgttcctctatcttatcactctgataaaaatcatctggtatgatagagcattctataaaatttgagtattagatatattttatttgatatcattcacaaggtgtattgaaatgcccttcattaatgataaagcaccatgttaattatagataattagaatttgatttcttaatttcaggacccccgcttcggtcttcactttctgacaaagctgatgtactttggccaatgaacatgaattcaaatattggttagtcttgttctatcttgtgaaataacggagtagatgttccagtatttaaatatagtcccagtttataactagatacatgaacaaaacaaaaacaaaaa

SEQ ID NO: 232056 - DNA, 356 bp, Homo sapiens
aactgttaccaaggagatggattgccttccaaaggcaaatatgatgatgaagaattcccacccctcccccagcccccgcctttggctgctcttgtgttcaaagaatgtcactgtacccaactgttttccttgcaaggaatagggacgaaagtaccttgtcttaaacttttgtggttagagaagcccacagcccttagggaaacattgcatttttaaaaaatgactttaaatccgtgctgttgatacttatgtctaatgccagtcattggtctgggatctgtgtgcagagttgccttctgtctggtgagactggagtgggtgcgggtcagattccgtaacctcgtggagagaggata

SEQ ID NO: 232057 - DNA, 226 bp, Homo sapiens
cgtggtcagatgatgatgacaatgatgatgatgaaggcaatgtttaagtgtagtggttgttagagcgaagctagggagtagtagtggaaagaatactaacccaggtatcaaaacttgatgtctgcgcctgggttttgccctgctttatccagtacaagaccctaaattcacaattgatttagttctttatcactagaaagactacctgatcttgtttttccacctc

SEQ ID NO: 232058 - DNA, 432 bp, Homo sapiens
agcctgaaatgaatttaagtgtatcccactacaaagcctgacaatatttaaaggaatacaacaaaatccagatcccaacagtgtaacattaataatgttgaatattcattagagcatcatcacacatacaaaagctggaaaattcaacccagaaataggagaaaatgtaaccaatagaaaaggggttagaaatgaaagggatgatagaattggttaacaagttcattcaaacaactactattagtatacttcgtttgttcaaggaggtaaaaaaaacatgaacacaagaggattcataaaggactcagattcaacttctagtgatgaaaatgcaatatctgaaatgaaaatactctgaatgggattaacagatactacagaagtaaagaaaagtcaatttgaagacacagaatttaaaaatacacaatataa

SEQ ID NO: 232059 - DNA, 388 bp, Homo sapiens
gagagatttggtatatgattgagatgggggctagtttttgtcatgtgagtaagaagcaggccggatgtcagaggggtgccttgggttaacctctgggactcagaagtgaaagggccatttcaaagaactcaaatgagcgagtcttcacacaccctcctcaggggactgcggttcctgcttacaaagcagagcggtccttgtactttaaaaaaacaaaaacaaaaaaaaattctttcaccctttcctaatgagatccgcaaacatgatgcagacaagaaatgcaccggttcagaggagggaaggtcaggccgcctggggggagtccacgaaaaagatggacgtgccagatgctgtgcctggtgctgggaaagagtattaaagcgcggcc

SEQ ID NO: 232060 - DNA, 384 bp, Homo sapiens
caatgtgacagcaggaccaagggacccatttcaaagaactcaaatgagcgagtcttcacacaccctcctcaggggactgcggttcctgcttacaaagcagagcggtccttgtactttaaaaaaacaaaaacaaaaaaaaattctttcaccctttcctacctgaatgcagcaatgcagtcgcctggcatggagggttaactaccacgcggtaccaaacactccacaaacggaaaacccccatgaggggccggcggcgacgccaagtgccgctccagccaaccagtgaaggccggcgccgggcaagctggactccaacgactgtctggcttggaaggcgagacccacactgaggtcgcccagctcaggagctcgcgcagaacagtc

SEQ ID NO: 232061 - DNA, 1671 bp, Homo sapiens
  misc_feature (24)..(24): n is a, c, g, or t
  misc_feature (39)..(39): n is a, c, g, or t
  misc_feature (42)..(42): n is a, c, g, or t
  misc_feature (46)..(46): n is a, c, g, or t
  misc_feature (48)..(49): n is a, c, g, or t
  misc_feature (53)..(54): n is a, c, g, or t
  misc_feature (74)..(75): n is a, c, g, or t
  misc_feature (88)..(88): n is a, c, g, or t
  misc_feature (93)..(93): n is a, c, g, or t
  misc_feature (102)..(102): n is a, c, g, or t
  misc_feature (104)..(104): n is a, c, g, or t
  misc_feature (108)..(108): n is a, c, g, or t
  misc_feature (123)..(123): n is a, c, g, or t
  misc_feature (144)..(144): n is a, c, g, or t
  misc_feature (153)..(153): n is a, c, g, or t
  misc_feature (159)..(159): n is a, c, g, or t
  misc_feature (168)..(168): n is a, c, g, or t
  misc_feature (181)..(182): n is a, c, g, or t
  misc_feature (185)..(185): n is a, c, g, or t
  misc_feature (188)..(188): n is a, c, g, or t
  misc_feature (198)..(198): n is a, c, g, or t
  misc_feature (200)..(200): n is a, c, g, or t
  misc_feature (240)..(240): n is a, c, g, or t
  misc_feature (254)..(254): n is a, c, g, or t
  misc_feature (291)..(291): n is a, c, g, or t
  misc_feature (303)..(303): n is a, c, g, or t
  misc_feature (311)..(311): n is a, c, g, or t
  misc_feature (327)..(327): n is a, c, g, or t
  misc_feature (394)..(394): n is a, c, g, or t
  misc_feature (409)..(409): n is a, c, g, or t
  misc_feature (412)..(412): n is a, c, g, or t
gccaggcggagacccggaggaccnaagcttccggacgangangaancnnccannatggcctcggagagtgggannctttggggtggcnggttngtgggtgcngnggancccatcatgaaagtncaacgcgtccattgctacgancggcacctntgggangtggatgtnaaggcagtaaagnntanagnaggggcctgnanaaggcagggctcctaaccaaggccgagatggaccagatantccatggcctaganaaggtggctgaggagtgggcccagggcaccttcaaantgaactccaatnatgagganatccacacagccaatnagcgccgcctgaaggagctcattggtgcaaggcagggaagctgcacacgggacggagctggaatgancaggtggtcacaganctnaggctgtggatgcggcagacctgctccacgctctcgggcctcctctgggagctcattaggaccatggtggatcgggcagaggcggaacgtgatgttctcttcccggggtacacccatttgcagagggcccagcccatccgctggagccactggattctgagccacgccgtggcactgacccgagactctgagcggctgctggaggtgcggaagcggatcaatgtcctgcccctggggagtggggccattgcaggcaatcccctgggtgtggaccgagagctgctccgagcagaactcaactttggggccatcactctcaacagcatggatgccactagtgagcgggactttgtggccgagttcctgttctgggcttcgctgtgcatgacccatctcagcaggatggccgaggacctcatcctctactgcaccaaggaattcagcttcgtgcagctctcagatgcctacagcacgggaagcagcctgatgccccagaagagtgtgccgggctcctgatgaccctcaagggacttcccagcacctacaacaaagacttacaggaagacaaggctgtgtttgagtgtcagacactatgagtgccgtgctccaggtggccactggcgtcatctctacgctgcagattcacaagagaacatgggacaggctctcagccccgacatgctggccactgaccttgcctattacctggtccgcaaagggcacccagatgccattccgccaggcccacgaggcctccgggaaagctgtgttcatggccgagaccaagggggtcgccctcaaccagctgtcactgcaggagctgcagaccatcagccccctgttctcgggcgacgtgatctgcgtgtgggactacgggcacagtgtggagcagtatggtgccctgggcggcactgcgcgctccagcgtcgactggcagatccgccaggtgcgggcgctactgcaggcacagcaggcctaggtcctcccacacctgccccctaataaagtgggcgcgagaggaggctgctgtgtgtttcctgccccagcctggctccctcgttgctgggctttcggggctggccagtggggacagtcagggactggagaggcagggcagggtggcctgtaatcccagcactttggaagggcaaggtgcgaggatgcttgaggccaggagtttgacacagcctgggcaacacagggagacccccatctctactcaataataaaacaaatagcctggtgtcgtggcccatgca

SEQ ID NO: 232062 - DNA, 1421 bp, Homo sapiens
  misc_feature (24)..(24): n is a, c, g, or t
  misc_feature (39)..(39): n is a, c, g, or t
  misc_feature (42)..(42): n is a, c, g, or t
  misc_feature (46)..(46): n is a, c, g, or t
  misc_feature (48)..(49): n is a, c, g, or t
  misc_feature (53)..(54): n is a, c, g, or t
  misc_feature (74)..(75): n is a, c, g, or t
  misc_feature (88)..(88): n is a, c, g, or t
  misc_feature (93)..(93): n is a, c, g, or t
  misc_feature (102)..(102): n is a, c, g, or t
  misc_feature (104)..(104): n is a, c, g, or t
  misc_feature (108)..(108): n is a, c, g, or t
  misc_feature (123)..(123): n is a, c, g, or t
  misc_feature (144)..(144): n is a, c, g, or t
  misc_feature (153)..(153): n is a, c, g, or t
  misc_feature (159)..(159): n is a, c, g, or t
  misc_feature (168)..(168): n is a, c, g, or t
  misc_feature (181)..(182): n is a, c, g, or t
  misc_feature (185)..(185): n is a, c, g, or t
  misc_feature (188)..(188): n is a, c, g, or t
  misc_feature (198)..(198): n is a, c, g, or t
  misc_feature (200)..(200): n is a, c, g, or t
  misc_feature (240)..(240): n is a, c, g, or t
  misc_feature (254)..(254): n is a, c, g, or t
  misc_feature (291)..(291): n is a, c, g, or t
  misc_feature (303)..(303): n is a, c, g, or t
  misc_feature (311)..(311): n is a, c, g, or t
  misc_feature (327)..(327): n is a, c, g, or t
  misc_feature (394)..(394): n is a, c, g, or t
  misc_feature (409)..(409): n is a, c, g, or t
  misc_feature (412)..(412): n is a, c, g, or t
gccaggcggagacccggaggaccnaagcttccggacgangangaancnnccannatggcctcggagagtgggannctttggggtggcnggttngtgggtgcngnggancccatcatgaaagtncaacgcgtccattgctacgancggcacctntgggangtggatgtnaaggcagtaaagnntanagnaggggcctgnanaaggcagggctcctaaccaaggccgagatggaccagatantccatggcctaganaaggtggctgaggagtgggcccagggcaccttcaaantgaactccaatnatgagganatccacacagccaatnagcgccgcctgaaggagctcattggtgcaaggcagggaagctgcacacgggacggagctggaatgancaggtggtcacaganctnaggctgtggatgcggcagacctgctccacgctctcgggcctcctctgggagctcattaggaccatggtggatcgggcagaggcggaacgtgatgttctcttcccggggtacacccatttgcagagggcccagcccatccgctggagccactggattctgagccacgccgtggcactgacccgagactctgagcggctgctggaggtgcggaagcggatcaatgtcctgcccctggggagtggggccattgcaggcaatcccctgggtgtggaccgagagctgctccgagcagaactcaactttggggccatcactctcaacagcatggatgccactagtgagcgggactttgtggccgagttcctgttctgggcttcgctgtgcatgacccatctcagcaggatggccgaggacctcatcctctactgcaccaaggaattcagcttcgtgcagctctcagatgcctacagcacccagatgccattccgccaggcccacgaggcctccgggaaagctgtgttcatggccgagaccaagggggtcgccctcaaccagctgtcactgcaggagctgcagaccatcagccccctgttctcgggcgacgtgatctgcgtgtgggactacgggcacagtgtggagcagtatggtgccctgggcggcactgcgcgctccagcgtcgactggcagatccgccaggtgcgggcgctactgcaggcacagcaggcctaggtcctcccacacctgccccctaataaagtgggcgcgagaggaggctgctgtgtgtttcctgccccagcctggctccctcgttgctgggctttcggggctggccagtggggacagtcagggactggagaggcagggcagggtggcctgtaatcccagcactttggaagggcaaggtgcgaggatgcttgaggccaggagtttgacacagcctgggcaacacagggagacccccatctctactcaataataaaacaaatagcctggtgtcgtggcccatgca

SEQ ID NO: 232063 - DNA, 221 bp, Homo sapiens
ggctgatggtgggtggccaggggggcaggatcccgggtccagcccctgtgcctccctcttcccgcagtgtgccgggctcctgatgaccctcaagggacttcccagcacctacaacaaagacttacaggtgcgaggccgggggaggcctggctagtatgtgccagttctcagggctctggcacactcaggcagggccccaccccgggattgccatacatcct

SEQ ID NO: 232064 - DNA, 1536 bp, Homo sapiens
  misc_feature (24)..(24): n is a, c, g, or t
  misc_feature (39)..(39): n is a, c, g, or t
  misc_feature (42)..(42): n is a, c, g, or t
  misc_feature (46)..(46): n is a, c, g, or t
  misc_feature (48)..(49): n is a, c, g, or t
  misc_feature (53)..(54): n is a, c, g, or t
  misc_feature (74)..(75): n is a, c, g, or t
  misc_feature (88)..(88): n is a, c, g, or t
  misc_feature (93)..(93): n is a, c, g, or t
  misc_feature (102)..(102): n is a, c, g, or t
  misc_feature (104)..(104): n is a, c, g, or t
  misc_feature (108)..(108): n is a, c, g, or t
  misc_feature (123)..(123): n is a, c, g, or t
  misc_feature (144)..(144): n is a, c, g, or t
  misc_feature (153)..(153): n is a, c, g, or t
  misc_feature (159)..(159): n is a, c, g, or t
  misc_feature (168)..(168): n is a, c, g, or t
  misc_feature (181)..(182): n is a, c, g, or t
  misc_feature (185)..(185): n is a, c, g, or t
  misc_feature (188)..(188): n is a, c, g, or t
  misc_feature (198)..(198): n is a, c, g, or t
  misc_feature (200)..(200): n is a, c, g, or t
  misc_feature (240)..(240): n is a, c, g, or t
  misc_feature (254)..(254): n is a, c, g, or t
  misc_feature (291)..(291): n is a, c, g, or t
  misc_feature (303)..(303): n is a, c, g, or t
  misc_feature (311)..(311): n is a, c, g, or t
  misc_feature (327)..(327): n is a, c, g, or t
  misc_feature (394)..(394): n is a, c, g, or t
  misc_feature (409)..(409): n is a, c, g, or t
  misc_feature (412)..(412): n is a, c, g, or t
gccaggcggagacccggaggaccnaagcttccggacgangangaancnnccannatggcctcggagagtgggannctttggggtggcnggttngtgggtgcngnggancccatcatgaaagtncaacgcgtccattgctacgancggcacctntgggangtggatgtnaaggcagtaaagnntanagnaggggcctgnanaaggcagggctcctaaccaaggccgagatggaccagatantccatggcctaganaaggtggctgaggagtgggcccagggcaccttcaaantgaactccaatnatgagganatccacacagccaatnagcgccgcctgaaggagctcattggtgcaaggcagggaagctgcacacgggacggagctggaatgancaggtggtcacaganctnaggctgtggatgcggcagacctgctccacgctctcgggcctcctctgggagctcattaggaccatggtggatcgggcagaggcggaacgtgatgttctcttcccggggtacacccatttgcagagggcccagcccatccgctggagccactggattctgagccacgccgtggcactgacccgagactctgagcggctgctggaggtgcggaagcggatcaatgtcctgcccctggggagtggggccattgcaggcaatcccctgggtgtggaccgagagctgctccgagcagaactcaactttggggccatcactctcaacagcatggatgccactagtgagcgggactttgtggccgagttcctgttctgggcttcgctgtgcatgacccatctcagcaggatggccgaggacctcatcctctactgcaccaaggaattcagcttcgtgcagctctcagatgcctacagcacgggaagcagcctgatgccccagaagaaaaaccccgacagtttggagctgatccggagcaaggctgggcgtgtgtttgggcgggtgtgccgggctcctgatgaccctcaagggacttcccagcacctacaacaaagacttacaggcctccgggaaagctgtgttcatggccgagaccaagggggtcgccctcaaccagctgtcactgcaggagctgcagaccatcagccccctgttctcgggcgacgtgatctgcgtgtgggactacgggcacagtgtggagcagtatggtgccctgggcggcactgcgcgctccagcgtcgactggcagatccgccaggtgcgggcgctactgcaggcacagcaggcctaggtcctcccacacctgccccctaataaagtgggcgcgagaggaggctgctgtgtgtttcctgccccagcctggctccctcgttgctgggctttcggggctggccagtggggacagtcagggactggagaggcagggcagggtggcctgtaatcccagcactttggaagggcaaggtgcgaggatgcttgaggccaggagtttgacacagcctgggcaacacagggagacccccatctctactcaataataaaacaaatagcctggtgtcgtggcccatgca

SEQ ID NO: 232065 - DNA, 529 bp, Homo sapiens
atctgctcagcgggggaccctgcatggagccccagctctcgctaaggtgacgaccaagccattgaatgtgtctgagcagggccagagccctccagcaaggctcctggcaagcccagcctgctgccctcagcctgacatgtgggaacatgtgtcaggagacaagtgtcctgcacccagggtgacttagtgcttggggacaagtgttttgtggacacttggggacaagtattctgtacccaaggagactgggccagggaagaggctaagcgccaggtggttgccctggcaaccaggacttggttctctgtgtgtgcgttcgtgtgtgtgtgtgtgtgtgtgtgtgtgtgtgtgtgtgtcagggctgcctgccaggagccctggtcaccatgaatccctgtccctgcagtggggccattgcaggcaatcccctgggtgtggaccgagagctgctccgagcaggtgagacgtcctgcccctcctccccagggagaatcaccctcagcacccgccaagacctgcagacacacct

SEQ ID NO: 232066 - DNA, 296 bp, Homo sapiens
acactactgtggaaaactagaaatttaggatataattttagacaaagaatttctgcaaattctattttttattcatattgccaacttgctgttaagattctaccaatttcttcttcctaccacagtgtaacaaagggttattttttcactctttcactgcattttgtggcaaaagtatcttcaactaacaaccatggccacagcaatattaaaaaactaagagtaggttgggcacagtggctcacacctgtaatcccagcactttgggaggccaaggcaggcggatccacttgagt

SEQ ID NO: 232067 - DNA, 522 bp, Homo sapiens
ttttttcaaaatgtattaattagagtcttattttcagagtcttattatgggagccatttattgactcaggcccaaataattcaatatgatgcccctaaaacttctctgcaaattatggagaatgatagtgggttaaaggaataagagactttgtgctaaaggggtaacttagagccattttaaggaggaaagccatgaaacagtcataggaaaacagaagtctaagatcaagtccaaatgttgtgtggcaaagatgatgaaagtaaaggatgtatttttgtgaattctggtggttttaactttgtttttaattttctgagtaatccaagggtctgtattttatgaatctacaacagtataggtaacattttattgcaactgaatttatttcaaaaattattagttttggctgggcgcggtggctcacgtctgtaatctcagcactttgggaggccgaggcgagtggatcatgaggtcaggagatcgagagcatcctggctaacacggtgaaaccccatctac

SEQ ID NO: 232068 - DNA, 257 bp, Homo sapiens
tttggaagagacatggtcccattctgtcgcccagactggggagcagtggcatgataatagctcactgcagcctcaaatttctgggctcaaatgaccttcccacatcagctttctaagtagctaggtccacaggtgtgcaccaccatggctagctaagggggtttttttttttttttttttttttgagagatgcggggtcttgctatgttgctcaggctgttctcaaactcctgacctcaagcagtcctttccccttc

SEQ ID NO: 232069 - DNA, 235 bp, Homo sapiens
cattatggttttaatttgcctttccctgataattagtgattccaagcatcttttcatattcctgttggccatatgcatatcttcttttgagaaatgtccattcaggtcctttacccattttttaatcgagttatttttcttgctgtttagtttgagtttttgacatattttggatattaaccccaagagctactcttcaccctaacaatttcacaagataaagtgactctgccga

SEQ ID NO: 232070 - DNA, 347 bp, Homo sapiens
taatcgaataaccccgatcaacctcaccaccttttgctcagcctatataccgccatcttcagcaaaccctgatgttggctacaatgtctgcgacttgatatcaattcgctgactaagctatcagagtatctaaataatacgttatccacccattttttaatcgagttatttttcttgctgtttagtttgagtttttgacatattttggatattaaccccaagagctactcttcaccctaactatggcacactatcagcagtccagtctttcatcagttattctgcatttacctatttgaggaccatgcatggtatctggggatgacatagatgattctgtcctcaga

SEQ ID NO: 232071 - DNA, 230 bp, Homo sapiens
caaagcatttaactgaaaaggcatcagggacagcatgttaaaggcatgatttaaagttacaatttgacttcagttttgagccccgttatgctgcctgtacaacctgtattgttccatagcctctttcatcttctgtcacccacataacttgcggtgtttgttgttttacttgttccttcttccccatgctagaatgtaaactccacaatggcaggatgtcttttaatctg

SEQ ID NO: 232072 - DNA, 776 bp, Homo sapiens
ggaggcggaggttgcagtgagccgagattacaccactgcactccagcctaggcaacaagagtgaaactccatctccaagaaaaaaaaaaaaagtacttggcatgatatttgaagctacctaaagtcatttgcctaagttcataattaatattcctaaaatttatatgttctcatctatacatgtccctaaaattactatataatagaaggaaaatgtacatttatgcttaaaatcactaggatcagcaacactgattaatggagagataagcatggaatgtatttgaacagcagcaaggcacagtgaaaggaacctttgtcccagccagacctaggtttgcatctttgctccaccatttactagctgtgtggctttggatggggtaggtcttagttttcctactatattaagtggagggtaataactaccttggatgattgttgtgaggaaatagacataaaatgtttagcacagcaccatgaacatgccagacattaattcaaatgatagctgccattatatttggtctttacttacaaatacagtagtacatggaccataattctaaaatgttttacctttattgaaggtatggaatttaaagtccttaggtgtggcaaaccaccatggcacacatttacctaggtaacaaacctgcatcctgcacctgtatcctagaacttaaaatagaataaaataggacaaaattaaatttaaaaaaattaaagtgtttgggtttttttttttttttttgagacggattcttgctctgtcg

SEQ ID NO: 232073 - DNA, 402 bp, Homo sapiens
ggctcttatttaaattttgtttttgttgtctttgaattgtttcctttgtacaagtcatttccctaaataatctccagatttcttcatgagtggaatagttaggtacttcctttgaatacctttgccaacagccttttttcctccttccccataattatcataactattacccacaaatggataaatttggttcctatctttcagtgcttttcatgaggttatcatctataattttctgccccaaagtctccttttaaaaaaagtattttttctatatagtcatgaaggctatcattcaaatcccagaagttgtagttttaccctttttgtttagtactgttaaaactcagctttggaatgatgagaattcagctcatttatcttacatcttttctttccaaa

SEQ ID NO: 232074 - DNA, 288 bp, Homo sapiens
gcgcacaaacctgaggacctaggcgggtgaggggtctgcaggtccagacgcctgaggggaagcatgccagggtgcccagtgccccccaaggtggtgggcgaggtttctggagaggtcccggaggagcgggcttgggcagcaggggtcaggttcaggaccctctgtgcatgagtccaggttgactctgcaggacggcatttcgagccacctggcatggcgttccaggcctgtgacggggcagtgcaggggtccgaactggcaggcacccaggtcctgaggacttcatgg

SEQ ID NO: 232075 - DNA, 494 bp, Homo sapiens
tgctcggtgccatcacagttttggctttctccaggatttatttgtaatcagcttgtcccgatttgggggtggggtgggtgagtagagaattagagacgacactggctagtgtgtgtgtgtgtgtgaagtagagggtagtaaatggagattggtcctggtgtcacaggcagctctgccccctccctccacttccagatgtcccactgctcctcatcaagcttcctggccagggcacacacatgtagacttgaaccccagctcctagttagtgctatgtccattaccacatagccaactaacaaaaggcacctcccacacctgcctgaccctccagggccccctctagaagctcacccgtctggctttattcaggctgggtgcggtggctcatgcctgtaatcccagcactttgggaggcccacgagggccaatcacttgatgtcaggagttcaagaccaggctggccaacatagtgaaaccccttctctactaaa

SEQ ID NO: 232076 - DNA, 907 bp, Homo sapiens
agagtttatgccgatggaatatttgacttatttcactctggtcacgcccgagctctgatgcaagcgaagaaccttttccctaatacgtacctcattgtgggagtttgcagtgatgagctcacacacaacttcaaaggcttcacggtgatgaacgagaatgagcgctatgacgcagtccagcactgccgctacgtggatgaggtggtgaggaatgcgccctggacgctgacacccgagttcctggccgaacaccggattgattttgtagcccatgatgatattccttattcatctgctggcagtgatgatgtttataagcacatcaaggaggcaggcatgtttgctccaacacagaggacagaaggtatctccacatcagacatcatcacccgaattgtgcgggattatgatgtgtatgcgaggcggaacctgcagaggggctacacagcaaaggagctcaatgtcagctttatcaacgagaagaaataccacttgcaggagagggttgacaaagtaaagaagaaagtgaaagatgtggaggaaaagtcaaaagaatttgttcagaaggtggaggaaaaagcattgactcattcagaagtgggaggagaacgtcccgagaattcatgggaaagttttctggaaatgttggtcccggaaaggagcacttgaaacatattgctgaaagagggggaaggggccggattgcttgcaggccatcaggcgaagaagaagcccagaagaggcctaatcggaggggtccccttcccctcttttcggggggctctccgggaagaagtcccacacttggcccaggaaatttccgggcaaggggggcatattacggggggggaagaaatgttcccttcggccctttgccgacaagaacttgttcatgggcccaacaggg

SEQ ID NO: 232077 - DNA, 720 bp, Homo sapiens
agagtttatgccgatggaatatttgacttatttcactctggtcacgcccgagctctgatgcaagcgaagaaccttttccctaatacgtacctcattgtgggagtttgcagtgatgagctcacacacaacttcaaaggcttcacggtgatgaacgagaatgagcgctatgacgcagtccagcactgccgctacgtggatgaggtggtgaggaatgcgccctggacgctgacacccgagttcctggccgaacaccggattgattttgtagcccatgatgatattccttattcatctgctggcagtgatgatgtttataagcacatcaaggaggcaggcatgtttgctccaacacagaggacagaaggtatctccacatcagacatcatcacccgaattgtgcgggattatgatgtgtatgcgaggcggaacctgcagaggggctacacagcaaaggagctcaatgtcagctttatcaacgtgagttccagccttaccccagagttccctgactctgtaggagacatatcacctcccactccatctcagctgaactggctttgcagttggctttgatgatcactcccaaaagttcagtgaatgaattaccactatgttaactgttcacaaaaagaatgaaacagacagtttctgccgttacggtctggtaccaacacattcgtataaagccatacagccaactaaataaatgagtaatttata

SEQ ID NO: 232078 - DNA, 606 bp, Homo sapiens
ccctcactctcatgtaaatgtaacttggggcgatgcaggatagtgtccagcattcaggaaacagggccttggtggaaagagcggccagccaggagaatcaagtctctaggccttttcagagccgaaatgcagccaagcaggaaggcggacaggcgcccagggctcctggggcaaggagctgccccttccctcctcctgcgaagagcggtcgccaaccgctcccgtgcctcctcttctagcccaaggagttcgcccgggccatccctaagcccaacagcagcccccagggctcttcacaggtcataagcccctctgagcggcgacagtcctcgcatccagcccgggtcagggagcgggggtgactgtccccagcacggcggccagaagaccccaaatgcggagcctgcccaagatggcggccacgactacgccgcgacaagacggccccgagctcggtgtgcccgagcttggagcccgccggaccgcaccaacacggggacctcccctctgccagtcccaagacggcgccaccgcctccaaaggccatgcccgccgtcgggatggcggccgcacgcccctcgataccgcccgcttccagatcactta

SEQ ID NO: 232079 - DNA, 483 bp, Homo sapiens
gcccatggaggggaaaaggacagaagggaacagtggtatccagtatcccaaacccttgcaggtgttcactctgtgtgtgcgtgtgtgtgtctgtgtctgtgttttagttatgctctaaattgtggtttctctgtctgaagttacaaatgaaaggtgaatacaatatattgtatttagtaacaatgatatggactggtacatccagacagataatgtgcagttgtaattagactcaatagacaggcagtcatttttaaattctttgacacatgcataaaatagtcatataataagataagatgacaattttatgttaggttgataaagtgtcccgatacatgcatttaaatgtctgtaagcctttttaaaaaaatccagacagattaattccagtttccagtatttgcaattagtcactaaatttttaaatcccactaaacaatggctatcaatatttttcccctgtttctggattttctttaa

SEQ ID NO: 232080 - DNA, 425 bp, Homo sapiens
gggtaaaagtatgtatatgtttgtcaggctcctacattttactttgaattggtaaaatagtaacttgaagtagactgtaaaacactaggaatgcatattgcaatatctagaacagtcactatacacacacacacacacacaaagagatattgccaaaaaaggcaacagatacattaaaatgaaatactaaaaactttaagtaattcaaaagaaggcaggaacaatggaacagaaccaaaacacacagaggacaaacagaaaccacataatacaataatagacataaattcaaccataccaataattacattaaatgtaaatgagctaaacataccactaaaaaaacagagattgtcagattggataaaaaagaagactcaaatataagctgtctacaaaaagctaatttaaatatgacataggtt

SEQ ID NO: 232081 - DNA, 246 bp, Homo sapiens
gaagacaagatctcactctgttgcctaggctagatggagcatagtggcgccatcccagctcactgcccccttgacttcctgggctccagtgatcctcccacctccttctggtactccaattacacatatattagtgtaacaatattggctaataggtcttttatatattcatttttttcagttttttctttatactgaaaaatttctattactatgtcttcaagttccttaatctgttaattccgc

SEQ ID NO: 232082 - DNA, 657 bp, Homo sapiens
ttaacttatttgatagacagataccagttaccaccttggatttatttcaagtagaaagaaaatttgtaagtgtgaatttttcacaaaaatgtgaaatagtaaaactattaaatcagttttactttggtttaaaaggatcctttgggaatctggaagtcccaacccctttagttatagtgattaaaaatcaaaccacctacttaaccaaatatttaacaaaaatattcttttcaccctttagcaaattcttccagaattactaaagatctgataatgtgagatctcaacaaacaaacaattcaagaagaggatttaaattttagaaatttaaattggggcattttagttaatcttacttttaaacaccaaacagtggcatcaatattttgtcaactttggtcaaataagatcagatgttcacatcaatcatctacttttcttggccttttctctatttggcctcttagtatgagcacactttgtaaaatgtaataaaaacatgtggtgtgcttcttgacatctaatccacttgcagtaatttctaggctttttgctcctgttaggtcctataaaataatgacattagtcattctcccaagaggctataaaaggaagcactgaattgcatcctgtttttcaaagataactcttcagatt

SEQ ID NO: 232083 - DNA, 806 bp, Homo sapiens
aagatctgtgtgtaggcacctactatatttgttctgtttctagtgctgtgtaggttttaagagttcaatgtgttccagtgttctgagtgtctacattttcactcctcatagctacttggaaagatttggcaagtaaacttgctaccatggttgggggaggataaatgcctttatcctttagtgctcccaacaacaggaccttttatggccaagcacacataaaagtccatgtgattacttaggctcatagagcctagtgccatggagaaaatgttggagaaatagatgttgtgtttgctatatgcacatgccaagtaatttaataagctaacgtatctgtactaatgattgtttatgattcttcatgaaaaatttttaaaaatcacattgaataaagtgaattttaaaaataatttgactttggagaatcaaaaaaattcttgaatcttaatgtactgtgcttatgttctacttcattcaagaaaaaaggagtaaaataaacatccataattattgctaatcatattttaaaggatactaagatctgctatgaaataatcaaaaatatctttagatctaatttaatcgtttattgatgaacttctctgggactagttcagtgatcaagctttgtttcctaactaagctctgttagttaggcttacttagaaattttaacttcctaatccttctctgcagttggtcagaaaatcaagaagtctcagccatttcagtgttgaaccctgtaactctactttaaaatacgacccactaggattttttaaaaaagaagaaagaaagaaata

SEQ ID NO: 232084 - DNA, 166 bp, Homo sapiens
gctccagggacctacctgacttcctattcatgctgatcccactgagacccttatcaaccctgacctgttccccatgtgcctcttggatctgccttatgttccaggaactaacgttccctacagagaacttcaggttgcatcagggaacatatatacccaccagtca

SEQ ID NO: 232085 - DNA, 354 bp, Homo sapiens
ctcagtagccaggcacagctgttgctcagtgataatagttgaattaacaaatgaaagacttggctatcattaagatcccttccagatctcaaattctttggccagtttaacacataagagctctcaatctttcactcctctctcacttttattcctttcagcgactttttggtgatactgttcaatatggaaatggcacattgagtgcttaaactcagcttggattgaaattccatctccatcatttaataactgacctggagcaagatacttgacctctttatgcctcagtttctgtgcctgtaagatgaatatgatcatattaacaacctcatagagttgtcttgactttgt

SEQ ID NO: 232086 - DNA, 463 bp, Homo sapiens
aaaaacattcccgctaaaagagactaggacttctggaaacaaaatggctgaagccaggtctggacaggaaatgtacaagaggagtgtggaatatgttgaaagcaagggaactattgaaagactaccagtctttgatataacatgcaaacataaatgtacacatatccatacctatttctatatctgtgtgagtatgtgtatgtatatgtgtgtatatatacatatacacctaaccatgagttcatactgataccttcagtccattcaaatactgcagagttgattctcgtcttccttttttccacatttgactaggtcatgttgaaggaactcaggagccaacttagagaggctcccatgagccaaatgtgaacagcaataagaataataactgcagtgcagtaaaacatggcagatatatttaagtgcatgccttcattgtatcccataaagaagtaataaa

SEQ ID NO: 232087 - DNA, 501 bp, Homo sapiens
ccctgcacacttagggtgtctggggactgataatgctaactttagttctttgctcctgatttcacctatctgtgacattctttgtcttgatacaagtgtctgtagtactacattcacttgcttaatggtttaggggcagccacagccagtggaatgctttccagaggtagctgggcaacttgggagagagaaggaggaggatgaggccaggcatggtgactcatgcctgtaatcccagcactttgggatgctgaaatgggaggatcacttgaggctaggactttgagaccagcctgggcaacatagtgagaccttgtctctacaaaaataaaaataaatttaaaaattagccaggcatggtggtgtaggcctgtagtcccaactactcgggaggctgaggtaggaggattgtttgagcccaggaattcgaggctacagtgagctataattgtgccactgccctactactgcagcctgggtgacagagcaagaccctgtctc

SEQ ID NO: 232088 - DNA, 483 bp, Homo sapiens
gagtgtgtatagccaatgtgggggaggaaacacccatggcctaatgtcatatcatttcattaactcagtaagacttaccctagctgtatcccaaataaccaactctcataactgtattggacaattcatcaaatgcttatgggtgacattgaatggttgtgactgtgcactgtatataaaacccattactgatgaaggaagtgactattactaaagcaagtgggaatagcaatcagcaattggacaaattcaaccatgaatttcatagacaaagcaactgtgggttcaagcatgtcatgggaaacaattgcttggcttaacacaattcatgagcaaaatcaacttgctaaaatgcaggccatttggccctgagggctggagagaaccattatattgctgatgatatttgttgttgaacttggatctctttcacacggcatttgacaatgggctcagagtccatgggtccctagttgacttttc

SEQ ID NO: 232089 - DNA, 224 bp, Homo sapiens
cccagctaatttttgtatttttagtagagatggggtttcagcatgttggccaggctggtctcgaactcctggcctcaagtgatccaccctcctcagcctcccaaagtattgggattataggtgtgagccaccgcgcctgaccagtaatgttactttcttctcctgcctggtctctgctcacagagacctaacatcaaggtgatgtgactcttatttttcttagg

SEQ ID NO: 232090 - DNA, 448 bp, Homo sapiens
aatcatacagccctgtaatcatattctcttacttgattgtatgtcattaaatgctgatgtgtagtttctgaaatctgcatcctgaatgaacacacagcagtaagccttgtgctttgcttttcctgctgtttccagcctggcattatcatgaataaggctgaaattatctatttgtgcatctatggtcttttttttttcagtttttttcttacattaaatttccagaaattgagaaaatgaggaaaacaaattaagtatgaaaattattatgcagatgataaagcattggaaaaaaatttgaaaatgtatatgcagaaataagaaattgaaatgctctaaatttttccacctagtcataaattagaaaataaattaactagcaaataagtgaaataagtaatttcaaatccaaaattaaatttaagtagtaaaaattttggaaagtaca

SEQ ID NO: 232091 - DNA, 201 bp, Homo sapiens
attactcttagtctttgagttaattgagttaaggaaggtcagtcagaaataaagtacatataccattattataggaaattcttttcccttgataaagagtagtaatttgtaacaaagaaagcaggtatgcagcatcatctttgtagaatgaagcttaagaagtcatctgtatatgtacgtatttttttcctttttagcttg

SEQ ID NO: 232092 - DNA, 260 bp, Homo sapiens
cggggaaggaagcaccatggggcgggagggaaagggtctccgcttcaaaccgtgcataaaaccaacgttttaaaaaatacttgattgacttgcagatctccatcctggacatggagggcttctgggcccagctctttaatattcaaatgactttgaaaaatatttctcctcctggaaagcagagggaagaggaaatgctttgaagccttgctagttatttaattagttttttcaaaggtaaggcagtatatttttatcca

SEQ ID NO: 232093 - DNA, 720 bp, Homo sapiens
tgcttgctcccttagaatgggattcaccccttagcatgttttggtttcctccatcatcagattgctaactcccacccctaccgcttgcagagtgtctgagtccagtgtcatctctaggcttgttttacttgctgcacaaaacctctcctgagcagagaagctgggtaaccagtcttcctgacataaggagtgtgtacttgccagtcatcccatgggcagcctccctggtgacactgcccaagcagatgccatccctagccttggcccagaccactcaggagacatgctctgagtcacacactggagagctagaaagaacttaaaggtgcctggccactggggatttattttttaatctggggaacaagacacatacaaatgtatccacacaatgccataaatatcagatgatgctctccacagatccccaactcacgaggctctgagaggtaacttacaaatggacccaagtattcaggtggagaggaaaggtagggctcatggagttttcctgaaggttttattaggaaaggaaagtggacatctccagtgtatatatgtacatatacactgttgtttgacagcgcacaaattgctgggctttggtttcctggggataatcacggtctccatcccatagggttatggtcaggattaaatggaaaaaaatatagtgtctggcaagtagtcaataaatgttagctaatgctactattacta

SEQ ID NO: 232094 - DNA, 416 bp, Homo sapiens
caactggcctggtttcaaggaaaaaaatcatgtgaatttgattgaagtgctctctgtggggtgcaccacacagacggggacatatgtgcagcctggctgtgtgtttgctaataggaaagaggactgaggccaagaaagagaggctggaggtgagatgactcattctctcaaacagaagagggagcactgaatttgaacatgatgcagacaaaggaaggcaaaccagctgaagaaagaggtgccaggagacttgcaaggagacatgaatcctgggattatctgaataataaatgccatcacattctacttttaatacatacttcatctctttcacctagtgcactatgagttactacggggaagaatctgtgtgcctatctttctgttttcagtgatgatatactgaaagaatggtg

SEQ ID NO: 232095 - DNA, 554 bp, Homo sapiens
  misc_feature (7)..(7): n is a, c, g, or t
  misc_feature (32)..(32): n is a, c, g, or t
  misc_feature (36)..(36): n is a, c, g, or t
  misc_feature (59)..(59): n is a, c, g, or t
  misc_feature (71)..(71): n is a, c, g, or t
  misc_feature (135)..(135): n is a, c, g, or t
aaaaaanttgtcttttttgaaaaatatgtacngccnccttgaaatctgggcttttaaanatggctcctgcnttttcacatgggacccaatgaagtgtttagaaattgctgcaagccaagtaatactccagtgggncagtcagtaggagagcattttcagagggaagagctgtctcaacagaattacaccttactgtattttcaggatgaatttattatttctgccgtcttttggaataaattatttttctgctttctatgggggggaaaaaagaatttgggccaggaactgtggctcatgcctataatcccgacactttgggagactgaggtaggcagatcacctgaggccaggagttccagaccatcctgggcagcatggtgaaaccttgtctctacaaaaaaaaaaaaaaatcacacaaaaattagccaagcatggtggcacgtgcctgtagttcctgttacttgggaggctgaggtgggaggattgcttgagtccaggaagtggaggttgcagtgagctgagatcatgcccctgcactccagcctggtttt

SEQ ID NO: 232096 - DNA, 546 bp, Homo sapiens
aaaaacatagggtatggtactacctgtggtttcaggcatcctcctggagtcttggaatgtatcccccgtggaaaaggggggactatcgtaccatactgatgacttaatattcttaagagaattggtgactattgatagcacaaaagatcccttgtttttaattttttgagaatttgaaaatgtatttgaattaactgcctgtcgtagtgaataatggaaccatgaatgcatgcttcatgtgtatggaatagttgttgatagccagagctggaaatgccacccagtgtgaataacagtcacattcacacttccctgcccccttgtttaatgtttccctctttgtagttttcctggaattttttagtcaacctcatgaatgatgtataaagtgctgtgtgacctttcaagatattttaatattcatgtgaggtatgcaacctccatttgagtaaccagagagctatctctagtcatgtgatagaaacctgcccttgctgcttcctttccagactttgtcccactcctgctcctctcccacatcaccga

SEQ ID NO: 232097 - DNA, 318 bp, Homo sapiens
ttgggtcaaagaaaaaggtctcagtacattttaaaggataaagttatacaatggatgttccaagactgcaatagaattaaattagaaatgaataacagaaaaatccttagaaaatcccaaaatatttaggaactaaatatcgtacttctagataactcatggatcaaagaagatattagaaagtagtttgaggctggacatagtggctcatgcctgtcatcttagcactttgggagactgaggcaggcaaatcacttgagctcaggagttggagaccagcctggccaatgtggcaaaaccctgtctctactaaaaata

SEQ ID NO: 232098 - DNA, 807 bp, Homo sapiens
cagaagagtaggagaaaatctaagaaaatacagtattatgggagttaaaacaagtgtatcaagtagcgttttttttttttttttttttttgagacagggtcttgctctgttgcccaggctggaatgcagtggcacgatcacaactcactgcagcctcgaccttcctgggctcaggttattctccctcctcagcctcctgactagctgagactacaggtgtgggctacctcacctggctaatttttaaatttttttgtagagacatggtttcgccatgttgttcaggctggtcttcaacacctgggctcaagtgatccacttgccttggcctcccaaagtgctagagttttaggcatgagccaccacacctggccaagtggattttaaaggaaagaaatgagtggtcagagaagtaagggaaggcaaagacagaaatatccatttgagttagaaataagtgtgttgaggttgaccttgtagagagcagtttgagtagagcaatagggcagaagaagcaaagttgcagggcataggtggtgagtgaggagggtggaacaactctttcaagaagtttggtggtagaagaaagaagatatatatagcttaaggtaagtatagggtcaggttaagatgggagaggcttgctcacatttaaatgttggtgaactgaagccactacagagacagatgttgaaaatgtggtagagagataggataattgatagtagtggaaggatgtgagaagatttgtgttctacaacatgtggagggcttaggaggagggaactctcttctgttatgacagaa

SEQ ID NO: 232099 - DNA, 425 bp, Homo sapiens
ggattaatgtgtacttctttctaataggaattccaatgacagttgtcttgttggatttttttctacctacatgatcattttcctttttagagccaccatagttttatcctatttaaaatactttgtactttgaaccatggacacccacctcccaaaaattaaaccatttataacatgacccttgagcctgaagattgcatttcaaaatatagacaataaatagagtgatttttaaagcacctgtctaatcagcattaagcagtcaccagcacctccccataattgaaattccaaagagtgactctaaagcgtggacgtgttcagaatcaaagatggaacggtttttagggtaaatgttacatactgaaatcaagcaacatgtaaagtttttaatacatagatgatcgttatacagactaataatc

SEQ ID NO: 232100 - DNA, 207 bp, Homo sapiens
agaggcaaggtcttgctccgtcatgtaagctggagtgcagtggcacaatcatagcccactgaagccttgaactcccaagccatcctcctgcctcagcctcccgagtagatgggattacaggcatgagccaacatgaccagccctcattgctatacatttttgataattgtcctcttcctgacatatactttcctgtggcagaattta

SEQ ID NO: 232101 - DNA, 378 bp, Homo sapiens
cgatctcatgaccttatgatctgcccgccttggcctcccaaagtgctgggattacaagcgcctgggggcgatttctatgcctgcctcctgatgcagggcctgtgctctgagctgcgcctttcaggagagctctgcggggcttcatttcctttctaagctcatggcaagaaatgtagggtggaaaagacaggctctggaactccctggccacacaggagctctgccatttacacgctgtgcgacctcaattgagcaagtttcttaacctctctgggcttcaggaagggcttcatgtttgctttaaaggtagcccttcccaaggatcttttaaggggcacttgaattttcagtaaggagaaggaagcccaggactaagcc

SEQ ID NO: 232102 - DNA, 489 bp, Homo sapiens
tctccagcaagtgccactgacagaattcagacctactgcccatctctcttatttcagttttagaaatggctgtggctactcttcggcagtcagtggaggaagtgaaaaaaaacacggggtcacaggtacataatttttgtcccctggacctatttaaagagtagatgagaggctgggtgcagtggttcacacctataagtacgtgggaagatcgcttgagctgtagcttttagatgggcattcgaggctgcagtgagctgtgattgtgccactgcactccatcctgggtgacagactgagactctgtttcaaaacaaaagagtagattactgaatttggcctcccagagggcttagcagcactctctggaatccaagaggggccacaagagctaaattcagtacatttaaaggtgagaggatcatttgaggccaggagttcaagaccaggctggacaatatagtggaaccccatctctacaagaaattt

SEQ ID NO: 232103 - DNA, 375 bp, Homo sapiens
cttgaatttagttttaggaaaaaagttttttgcagatcaacttgtatttcctggaagaaaatttcctattttacctcagcttcctatttaatgtattatttatttatttacttaacatttatttgttttttatttcacctgaactgttagtaaacttagtaaaatttggtgcctacatgtggtaactgtcctgtcccttatactcagaaacgttttccacctttgtgtcctttaggtcattgttgtgttatattccatttattttattttgtccattgttctctcagaaattgagggtcatacattttaagaaaacaatgatatgctatttaagagaatgtatcataaattgatttgtaaggaaaagtatcccca

SEQ ID NO: 232104 - DNA, 296 bp, Homo sapiens
atgagcacacgctgggattcctcacagccttcatctcctccatggtgtggaggggacccaggatcctcatgtgttcccaaagcaggtatagagtggctgggcaccaagtcctggctgggagccagtggatgccaagagcccacttttgccaggatgggttgggaatcccactagatcttggggggatcaccatggtggacttgctcacacatgagagcccccaagagcaggacctcaggatcttctgcggggacatcaactggattcgcaaagagcccacccgtgctgggtggaca

SEQ ID NO: 232105 - DNA, 381 bp, Homo sapiens
gtgattgtttcctgccatgtggcgtctaacaggagtccacttgccaatctccgggaaatgtgagaagttgcaagcagacaggcatcatctcattccactggaagcctttttcaccaccagttggggagagcaccccgaggcctccatctgcgcagaacctctgataggtctgcaaatcaaaaacaatgggcagcatagcattgctgtgtaagatcacacaactcccggctttgctgtcataatttgctgggatgagcagaaacatgcaccttgaatttgagtagaatctggacccccaaacaatgccatttttgtccttaaaactttatctgtcatgaatacacgatttaatataagatcatagattggctcctgaaccag

SEQ ID NO: 232106 - DNA, 495 bp, Homo sapiens
accatctgtactagttgattctcacgctgctataaaggactacccgagactgggtaatgtataaaggaaagaggtttaattgactcagagttctgcatggctgggaggccccaggaaacttataatcatggcagaaggggaagcaaacacatccttcacatggtggcaggagagagaagtgcagagcgaagcggggaaaagccccttataaaaccatcagatctcgtgggaactcactcattatcaggagaacagcactgggggactgcccccgtgatctgatcacctcccacaaggttccaccccagcacctgggaatcacaacttggtttacaattcaagatgagattttgggtggggacacagccagaccatatcatcatttctaatttctgtgaaaatcgtaaaattaagagatatcctttagatttatttttactatctgaatttttacattcaaaaataaaggtcattggaaatcttatatgtgcctca

SEQ ID NO: 232107 - DNA, 505 bp, Homo sapiens
tctgattgagtctgtccctgtccctgggttgaggcattgggggtgacgactggatgatgtttctgtgatacgcgcggctctgagcgctcccacacgttgcagaggacacattgacgttcccggcttctccttcccgcgcctcgacacttcataattacctgacacaatgcgatatgggggtgtccattgttccactgcatgttactgtggagtgttcgttatgacagtggtggaacttaaaattacacaatttttttaagttcctaaaagaatgaattccgtgtggggatatgagtaagctttccattaaatctcagtttggcctgtcaaacgaggctcattctgggtattacatcgcctaatttgcattttagcattgttttgtttcttaaatgtcacattagagatacatgggcgtgtacgcaggagagctgagtacctccacgttgcctattttgcattttagcatcattttgtttttaataaacgccaacttaaaaacatc

SEQ ID NO: 232108 - DNA, 363 bp, Homo sapiens
gttttatggaccttgtagatcaggggtcagcaaactatatcttgcaggccagctgcctgtttttataaataaggatttattgcaacacagccatacccgttcatttacctttatctgtggtggttttcttgctagagtgacagagatgagtagttgagacagagattttaatggccttacaagccatgaaatcagtacttttctaggttttagtaaattcagagggctggagtgtttgaatgcctgctaggtggcaatatgtggttacacctccataaggggcagttgttagaacattgtacttaggtagactggctgtagctgttgtctttttgttttgttttaggttttcttagctgtggt

SEQ ID NO: 232109 - DNA, 626 bp, Homo sapiens
gttggccagggtggtcttgatctcttgaccttgtgatccacctgccttggcctcccaaagtgctgggattacaggcgtgagccaccacgcctggccaaaaacatgtatttttaagcccagtaaggataatgatcacattcttcaattgatatcttggttttaatttaatatgaaggatgtataagtaaactcttgttcctttatggtaaggcagtatatgaaagtattgatttgcatttttcactgccttacaaagtacaatttgtgccattaaaacattatctttcatcacaaaccctaggtgaagtatgctggggaagccttgctctgtgtttttgaaattgtaggtggcagcccattactgggtcatatggttcatggccagcatttgagaaacagaataaattaggaaatattatttagatgggaaacagaaacatggccagaagaatattaggaaatgagagtaaagtgatactgacagccttatggctctgaaactcaatatgaaatgagaagcaagtaggaacttttacattttgataggtgatgagcagaaagatatctcaagcaattaacacacatccaggtcaggttggctaacttttcccataaagggccagata

SEQ ID NO: 232110 - DNA, 587 bp, Homo sapiens
acattcaattaaaagagatactttataaattattcacggaaaaagataaacagaccacaagtaaacccaatctgcataaggggcccaatatctttgtttttactatacaacagtaaccacgacccaaatctagggtagaggagagctgctaatttctaccccaatgctcgaaatcttgtcaggttttgtgtcagggtagaacacatttatgctacaactaggttatcagagcaatacacacacaaaaaaacataatggtgggttgatttggactattttatttttgtccttccccaaaccatctggcgtgttagtgtaggggtattgatcagggatctgtgagctgcagaccccatgccaatccatagcgtttctggcaatcagcgtcgcccatgaattgcagctgtctgtgcagctcctcaacagaaatcttcaaaaaaaaaaaaaaatttccctcccttatcaaacacatcatccgttcgggggtaagtcaatatcatttctttgtcattctgagggcgaggattatgcggtagaaagtttttgttatctgttatagctgctgctgcgcctgccttttttttaaa

SEQ ID NO: 232111 - DNA, 436 bp, Homo sapiens
catggacccaacactcctttggccaagttgatgattctccaccatttatttgcctgcctcactatacacttctagcaagccactgcaaggctgcattgcagctaagaggaagccctccttgaaggctgcacagcaaggagtgttggcagagtagctgggtttccactgggagagcacgagtcagcatcatgctgggctcaagcatggatatgcactgctgctgccagagcatcataatttgcaagcatttatcgagtacccttcatctaattttcatcctgcggaaactagaaattgctacacttgcacacaataaacttctggcagttagccttctaaactgggacactaccatttgggagggaaaagacctttctggtggttaaagatggggcttccagttactgcatttgttttaatacagtctattccatag

SEQ ID NO: 232112 - DNA, 227 bp, Homo sapiens
ctattcttagcagaaaaaaaaaaatcccagacaatattgtctatatttctcaaaaaagcccttgcgttttgaatggatattattatgtcacaccttaaattaacagggaaccatttcaaatccccatttgaagttttactttacatcaaattctcactagactgaaagatccccgagagtggggagacattgtttgcttctgtttatagaggctcagtacagtccct

SEQ ID NO: 232113 - DNA, 439 bp, Homo sapiens
agccaaaatgctgaattcctcgttgttctttatttgagatatgtggccttgttctgagtattcagccaaaataaaacttacttaagcaagtgtcagtcagaagtttagttatgataagttgtatttatttttgtccaaacatttcagaaagtttcctctgaaaggtagttatggagaaatagtatttgggaaaaaaccttacaatctatgtgttctctattttgtctttaattttgaacaaaaaaggtatgtaaagcaggtgatgaaaagtttgagatcaagaccaaatatatgtgttccagaaaaatccagttaaagatgttgaaagacacatattggacattcgtagattccattcgcaagaaatgtattttcataatatacaacatttatggcgaggtgttattcagatactatagattatttttttaaattttcc

SEQ ID NO: 232114 - DNA, 431 bp, Homo sapiens
ggaattacctgaattatatgggatgaagttatgctgtgcctgaattttcagtcagttttcctaatgtttaaaataaactttacaatctgatttttaaactatgttctatgtataaatacattgaaaaatttgaggggggataagaagtaagttgtgtttttatgaacttgtgaaaatgcataaaaattgtctctcttttttttttcatctcttgaatgtgggtgaatgttcctgcaaacaaatcttgggtgaacatgtagattcctttggtatgctcatttcctttagaatgcaatgtgatagactatttaaatcatacaaacagaaaaaatatataattgaaaatgtatacttttgggaataaattaattttttgtgtgtcctcttttttgtagtatctactttgttcaattatttaccagtagagaata

SEQ ID NO: 232115 - DNA, 181 bp, Homo sapiens
gttcagaatacaaaatcattcaattatggaatatccaaagaggtatttttaatatgtaatctcccttcaaggccctgacacaaaatgaaagggagtttactaaaattctatttgagtccttttaagcaacaggggcaacataatgtcctctgtgttgcatcagttcactctgcatttctgg

SEQ ID NO: 232116 - DNA, 350 bp, Homo sapiens
ccatgtccctagtctctggcttgcggctgatttttaaattttttgtagaggccggatcttgctctgttgcccaggctggtctcgaacttgtggcctcaagcgatcctccctcctgggtctcccgaagtgcggggattacagacagagccactgcgcacggccgtggtcagctttgaaagctgggtagatccctttggcttatacgcctttctgctagcttaccctgattctgcttctggttcagatagtattttaatatttctagtgtgtctttttgtaagatacctgaaatctttttgtggaatgaagtggcatgaaaaataaaccaataatcattagtaagtatgttt

SEQ ID NO: 232117 - DNA, 348 bp, Homo sapiens
ctagttctagatcgcgagcggcgcccttttttttttttgggagtaaagatggggtttcaccgtgttagacaggctggtctcgaacttgtggcctcaagcgatcctccctcctgggtctcccgaagtgcggggattacagacagagccactgcgcacggccgtggtcagctttgaaagctgggtagatccctttggcttatacgcctttctgctagcttaccctgattctgcttctggttcagatagtattttaatatttctagtgtgtctttttgtaagatacctgaaatctttttgtggaatgaagtggcatgaaaaataaaccaataatcattagtaagtatgttt

SEQ ID NO: 232118 - DNA, 216 bp, Homo sapiens
gagattgacactggcaatgctttattcagcagaagtacccagtggggctcctctttgtttttgcagtcgatgagtgtcagagtttggatttaagtcatcctgattgcaaagcccatatggtttgcacagaatgatgctcctgctgggtttgcctctcacgtggagcctatgtggatttgtacatgaactccaatcttaagtataacataaggacat

SEQ ID NO: 232119 - DNA, 369 bp, Homo sapiens
ctgtgctaatgtttcatgattcttttttagttcagaaaatagagtcactgggattctcagaaatactacctaaatataaatccatagagacagaaagcagattggtggttgtcaggggttggggagggaggactggggagtagtagcttaatgggtttggggttttctttctgggtgatgaaaatattttgcaactagacagaggtggtagttgtattatacaacatcgtgaaggtaataaatgccactgaattgttcactctaaaatggttcattttcttctatatgaattccaccacaaaacaaagatatgtcacctatataatactgaatagtttccaaaggtcctgagggacaaggcagcgttat

SEQ ID NO: 232120 - DNA, 451 bp, Homo sapiens
ggctgaattgcccccaggacttgcacctgatttttgtataacctgggaatgggccaggtgctgtggctcacacctgtaatcccaacgctttgggaggacaaagtgggaggatcgctcgagcccaggagttcaagaccggcctgggcaacatagagaagacttgtctctaaaaataaaaacgtggggatgactgggacccatcctgattaactcctctgagtgagaccctgcaggtcagagtctccatgatagtgtgaggctcagagctcgcgagccctgcatgtctgtcctccactgtgggtcctattaagtatcagtaatagtaattataaggccaggcacagtagttcatgcctgtaaacccagcactttgggaggccaaagtgggaggattgcttgagctcaggagttcaagaccagcctgaggaacatagagagaccccatctctac

SEQ ID NO: 232121 - DNA, 374 bp, Homo sapiens
gcgcatgctcacttgaggcattcttcctttaccagtcaaatgctcccaggtcatatgccagttaaactccaccatgttgcctcttagtgcacatgcttgagcccactcgcccagctcctgagatcttatcgggaagctgctgatcaccagttccaggtgctttctatctattgggaaacggcctttccctggtgttggttgcaaccaattattattttaagtgagaccccatctctaaaaaaaaaaaaaaaaaaaaaaaaaattagctgggatcagaggtgtgcaccaccatgcctggcactgtggatatttctaagtgattattcttctcaaatgaactacataaaaaacaaaagattcatgaatttactaat

SEQ ID NO: 232122 - DNA, 449 bp, Homo sapiens
atttacatgtaattggagcaccagaagtagacaaagaatgcctaaagagataatggctaagaattctctaaaaactgattcatacccatagatgcatgaatctcagccaatcacaagcaatatgaacataagcaaactaaaataggcacattatagcagctaaaggaataaaagatatattacaaatagtggagaaatacaatgataagaacgatggctgacttctcatcagaaccctgggaggctggaagatgatggggtgacatctttaatgtgcatgaagaaaaaagctatcaaccccagaattttatattaagacaaaccagacatttttatggaaaaaagcaggcagaattaatctggagaattcactacaagaaatattaaaagttcttcagactgaaaatatatgattttagatggaagcacaccctgactacttgggtgtg

SEQ ID NO: 232123 - DNA, 505 bp, Homo sapiens
gtttattcagaatgtcacacagcattatttattaatatttgaaaggtctacccctgagtaaggagggtggatatatatttttttaagtggaagaaaccaaacttcaactcctatagctctctgtgcttgaatcttgtaacaggctgctcttataagcagtgccccagatccttctaatgggggaacctcacctgcccttgtcaggaaagaagggggaagggcccaggaaccttccagtctgagaggctggtattctggttctttcatcatgtgacttatactagtgatccctatcttcttgggggcaagtggggaagccattctcctcttgaagccggttatcagagaactatgaactcatagcgaggtgacaggattttaggatgtgcatttgtcaattccaagttattgtccaggcgtgtgtgtgtgtgtagtatgaataatatattgcatcttgtaatacagtattacattttatattaaattgcattttctaataaataaa

SEQ ID NO: 232124 - DNA, 938 bp, Homo sapiens
gtccggcgcgcagaggaggaggagaaagctgaccgcttaggccggggtagtggtcgtcgtggttttccttgtagttcgtggtctgagaccaggcctcaagtggaaacggcgtcaccatgatcgcacggcggaacccagaacccttacggtttctgccggatgaggcccggagcctgcccccgcccaagctgaccgacccgcggctcctctacatcggcttcttgggctactgctccggcctgattgataacctaatccggcggaggccgatcgcgacggctggataccgaaaacatatggtgacacatcttccgaacaacttccatccaataccgtcgaagctcttcacaaatcgcttgcctcccagttccactgatacctgctgctccctgaactccgatgcgaaccatgctccctcactgacacgtcgaacccttcatgctacatctcgactgtccgacaccttgccaactcaaacatacgtaccacgaccacccccccccacccacacaccccacccaccgcccccccccacccaccacacagccaccaaaccccccgccgcccaccgcgccccaccgcccccaccaccggcacacaccccccccaacccaaccagcccccaccccccccccacccccccacccccaccgcccgcccccccacaccccccacaccacccccaccccaccaccacaccccggccacaccacccgccaaccacctccatctaataccaccaactctagacccccacacccaccacaccacccacccccaaccacacaccaaacccaccccacacaccccccacccccactccacccacaacacctacacccccacaccacaacccacacacacacacaccaccacaaccacccaaacccacaacccacacaacaccacccaccgcacacccactcacacaaccaccc

SEQ ID NO: 232125 - DNA, 476 bp, Homo sapiens
  misc_feature (311)..(311): n is a, c, g, or t
  misc_feature (424)..(424): n is a, c, g, or t
  misc_feature (451)..(451): n is a, c, g, or t
gtccggcgcgcagaggaggaggagaaagctgaccgcttaggccggggtagtggtcgtcgtggttttccttgtagttcgtggtctgagaccaggcctcaagtggaaacggcgtcaccatgatcgcacggcggaacccagaacccttacggtttctgccggatgaggcccggagcctgcccccgcccaagctgaccgacccgcggctcctctacatcggcttcttgggctactgctccggcctgattgataacctaatccggcggaggccgatcgcgacggctggttgcatccccagcttctatatatttacnggcctttttttttggctgggaatattatccttgttaaaactttaaaaactaacctgttttgctttgaagggaaccgtgaaatttttgggaatattttgaaatttccttcccanaaggaatttccctgaaaaaaaaataanaaaaccttttgttgaaattttttaa

SEQ ID NO: 232126 - DNA, 581 bp, Homo sapiens
cgtctcccattccaggcttcctcttcaagactgtgtggtggtgtggcttcatttcgcagagaagggcgtgaaaggtaaaaccatcttcttggacgtgggtctgctcctctctgccggacaatgtgctaccgtggggcttttgtcctgggctgcagtgtggtcctctcgatcctagaaaagaggccgctcaggatggggatgagacttccattgctccgggcccgatgcatcccctcacgttatcgaggcctgcacagacccaaagtggaaccgccgcgaagacgatggacagctggccgcaggacccagggagagacgcagaaagaggctcaccaaagaccggtccacataaaagacatccctttttgacgcacagggcacattcgtccaaagacacacacacacacacacacacacacacagagggaaagaagcacacagagggtgagagacagagagagaagggagaatgggagacacagccccacacacagtcctaccgcggtggccgagaaatacacgcccccaggcaaccctgcggctgccgggttctgctctggaggggaacaaccctcggctga

SEQ ID NO: 232127 - DNA, 421 bp, Homo sapiens
attgttgttgttgtcaatatcaatccattaaccccactgcaaccaatatctgctatttctataagcatagtagaaaatcaattaaaatgtgttagataaatgaaaaaatgcatctctgagatctgtatagcttttctgcagaagcctgaagttataaagttatagaagatgaattcagaatcaatgaaaaatatggatctggatacttatcattctatttcaggatgtttctgtctgtagcatttgttaccactatcctaatgcaactgttatttttctattactgccaatgacattctgtttctataatcactaaaaccatcgtcctggtgctgcttctctactgatagtgggaacactttgctgagctgctgcggggatgtagattgagaaatggtccctctccttatcattcctaggg

SEQ ID NO: 232128 - DNA, 441 bp, Homo sapiens
gatatcagcagtatccccagatttcccattgtggcccctttcttttccctagcctgaaaagatcaaggtattatgataaataatagctgtgagaggcctcagggatgatggagacgtttatttacatttgagatctcagagatagacaaagatatatagaaaaatagaagtggagaaaggagccacagggagaaacagaaattcagatacacaaagacagagggacatggtggctcacgactagaagagagccacctagacacaaggacatgtgcagacacaagtcttccaatcctgtgtctcgatgtccctctggatctagagacagaaaagagaggaagacagaggaacccacatcgagatacccacattcatagggagacagagacagagagatgcacggagaggataagagatgcattgggagatcgagagaaatgc

SEQ ID NO: 232129 - DNA, 189 bp, Homo sapiens
tgaattgaaatctgagattgaacagtgcttggtgaggttctattgtaatgaaccttgaaattttttgatatttagacatttacacagagagagtgagttcctagttcctttctaccttggtttgatggtttttggctcaggtgggcagccaggggaggagataagaccctggggttcacatgagcaaat

SEQ ID NO: 232130 - DNA, 512 bp, Homo sapiens
ctctttacactgggtgtcgcgccgtctgagttcctgacttgtttacccatcccgttggggctccggccgctgcaggctacctgctgtgcccgggattggggacctgtgactcccgagtggaagagatggtggcccaggaggaggaccccgacctattcagactgggagctggggtcagagtgtctccgtctccggagggggaccttccagaccccgggcgggaggggcccacagcagggtgccccggcggccccaggagggggtccgggcctcgggcgaaggctgcggcgccccggaaggagccgcgcacgcccctgcacgcggtgcccgctgcggaggccacggatccggaggtgagagcgcccccgccccgctccctgcccagcccgcgcgcggcccggtccggggctgggggcgggcgccaagaggggcgccgggcgcagtggggcggccccctcccttttccgcagcgcgggccccgctcctcctcccgcgtccaggcccgcggccgc

SEQ ID NO: 232131 - DNA, 389 bp, Homo sapiens
ctatatcagaacactctggagctgaaccatacttcagattagactttatcttcattcagcatcaggatctgtagggggagatggctttcctagtggccaaaggggtctgctgccctgagatcagagaccctgtgccctgagtctcctgccaccttaatttccattcacagctgaaggccaggccagtaccacctttgctgaagctcaagacctatgtatgttctcttgattgtgtgttgtctctctgtaaaaagaagatatgactcatctctttgaaaaccaatttatgctttctctttggggagagggattgatattaaaagtgaaactaggattttcattggacaaataatttaataaagttatatttttaactttagttagattct

SEQ ID NO: 232132 - DNA, 268 bp, Homo sapiens
gatgcttcctttctctaggactcaattttcttatctgtaaagtaaagggttcatcaacattctttggttgaatcttacctgaaacattttgtgagccttcaccaatctcatctaagcctttgtttccatagaacaaagccctttaagaaaggaggggaaagtgtcatggagtcttactgtcctgagtgcaaatatggtctctgtattgtccttatctgttcattttctgcctctcagtactagaatgaaaactctggaagaagaagga

SEQ ID NO: 232133 - DNA, 385 bp, Homo sapiens
agagtcttactctgtcacccaggctggagtgcaatggtgcgatctcggctcactgcagcctccacctcctgggttcaagcaattctcctgcctcagcctcctgagtagctgggactacaggtgcctgccaccatgcctggttaattttttgtatttttggtagagacgggatttcaccatgctggccaggctggtcctgaactcctgacctcaggtgatctacccgccttggcctcccaaagtgctgggattacaggtgtaaaccacctcactaggccactaatttccattttaaaataaatagccttgagctgattctttttaaaatgtaaaatattgcctgtaacctttttgtttttgttttttgtgttttttttttgagacg

SEQ ID NO: 232134 - DNA, 555 bp, Homo sapiens
gctcccttagcactgtgcaggcttcccggatggcactttacattgtagttgactgctaacaagtcagttccctctctgctcgagggcaaatgtgtatctcttgtctcttggactcccagctcctgactggggcctggcacagtgtggggccagacttgggttagggagtgagtcagggaagattccctggaggaagtgagccccgagctgctgacttaaagaaaaagcaccctttccctcttcttacttccttcctggtcctcgtgctgaaggaaaacagtcaaaactttttttttccttttctgtttttcctttgagataggatcttgctgtgtcatccagactggagtgcagtggcacgatcatagctcactgcagcctcgaagattttttgtggagatggggtctcactgtgttgctcaggctggtctcaaactcctgggctcaagagatccttctgcctcagcactttgggaggccgaggcaggcggatcacttgagcaccattgcactccagcctgggcaacaggagtgaatctccgtctcaaaaaaaaa

SEQ ID NO: 232135 - DNA, 417 bp, Homo sapiens
gctcccttagcactgtgcaggcttcccggatggcactttacattgtagttgactgctaacaagtcagttccctctctgctcgagggcaaatgtgtatctcttgtctcttggactcccagctcctgactggggcctggcacagtgtggggccagacttgggttagggagtgagtcagggaagattccctggaggaagtgagccccgagctgctgacttaaagaaaaagcaccctttccctcttcttacttccttcctggtcctcgtgctgaaggaaaacagtcaaaactttttttttccttttctgtttttcctttgagataggatcttgctgtgtcatccagactggagtgcagtgagctatgattgcacactgtactctagcctgggagacagagtgagacactgtctctaaaaaa

SEQ ID NO: 232136 - DNA, 625 bp, Homo sapiens
tatatcactttttaaataaagtataagtatttcaatgatacattcaaaatttccaataccctatttttagtgatatttgtagttttcaggatagttattatgcatagaggctcctgttttgttaattttgttgtcatgttctcattttttatcaaaaaaatgtatagtaaatttatgtacctaccatacagtcctttgttacaaatcagttactgtgttttgtgtaacttatgtagtatttaaacatatgtcataaagggccaatgttcatttttaatgtacgagattttttgtaaaaaattttacttgggaaaaactgatgtgagtttttaagattgaataatgggtgacatgatgtagggggaaaatgacattatttcatgttaaataaggtggattcttccaccgtaaactcttttacgtctataaatttattatgttcataattattgtttctgcctttgcctttttataattagcgtcttaatttgtgacgtaattttactatcacagactatggcttcaaaagaaatgtattattcttcagtaattcacagaatatttaatttacagaatactcatgttcattgtaataaatttgaaatgtagctcaaagtcttattaa

SEQ ID NO: 232137 - DNA, 797 bp, Homo sapiens
ttaattgattctaaaatgtacattatttctcatttttaaaaaaaaatctctaaaatcagggtacatcttaaaagcaatataatgccatggtttaattggcacatgatttagtgatacataaaataaaggcacctcttgcagtggcatcttcgatttgaagaagtataatattctacgaatatacaaatttctgtgtttttttgtccccccaacccctgcccttttaaagacatatagtaatatagtggggttataggtttatatactgctacttagctgtgcagagaaattacagcatttaaaaaaatcaccaatctgtcttcctcataagtcatcatctagaaatggggagaagcaaagagtggtattttggccagttaataaggtcttatattcttttggcttaaacagtatcttttgggtaaattctggattttttcatatatcctgccatcccccattaaaaaccagcatctggtcttgggggattgtgagatttttgtggaggtgagggaggccctggcctatgcttgctgcctttgctcatctagtctggtctggtctggtccctgggcctttcgcaggtatcccctgaagtgtggttggtggtcttgaatttttttcttttgtctccatcagggccaggaactgtccttgctttcctttgggtacattcaccctgcagcagatgtcatggcttccaagtggaacttcactctctttctactagtgagctacaggaggcttagagtgctaaaaccgagatgcttcccctgcataaggccatgcaacacggc

SEQ ID NO: 232138 - DNA, 491 bp, Homo sapiens
tcattttaaaattcttagctgagaagattttctcaaactttatgttctgctgtgtgtgttgggggtggtggttagtagctatagtaaataggtttttccagtggcatcctcctacccccagttgctgatctagaacaagtgtttctgtaagcatatttgtagaacactaatcccgcaagattttacacaaaaaaatggtcctgccaccagtcctgtataccactggcttgtaaagcacatcagcaaactaaaggacccaggtcatttggaacctctgaagtgctagtgtgtgcagctcccagacttccttgaccgcggagccgtttaccttaatacctgttaaccatggaccacacttgggcaaacagtggcatagagtctggaattgcttccatgatgactttgctgtgctctgttcctacttgttttgtgcccttatttatatcatgtcactactagaagaaaaagttcagtaagaacaagtatttctc

SEQ ID NO: 232139 - DNA, 437 bp, Homo sapiens
aagggacttcagattggtgatgtcatccagaggagactagaaaccaacagaatcctccgaaaacgctgtgcccacaatctttgccctctttacaaagtaacacagatactccttgccacccagagccgggtggtgataaaatgaagctctctttgtaaagtgtcgagcccatagtgggtgctccataaatgttcatttcccctccctgaagcatggctctgcactccgagctggaaagaaagacaaacgcaccccaattcagtgcgaatccaggcatgcacgccccaagtgaggcagccctcgctcacatccatttgcatttccttctgcgagtgctccaattttaaaagcttaatatttatttagatatttattttcactgtaaatacaacacatgtttacagagatatttatttttctctataaacacagtaaat

SEQ ID NO: 232140 - DNA, 485 bp, Homo sapiens
tttttaaacttgagtaaattttctttttagaattcgtaacaaaaaaatgtgagaatatggttttgttatgtattttatgaaacttcattgaacccctttaccttatataactgttacgtcattctaacttccttttatctttatcggtttgaaagcaagattttacagttaaattagtatgtttatgttatagtgtattcttttggcatttggtgttatttcctatatatttcccaggttttgatgtattccatacgtttttatcactaatgaccacgtatcattgtttgcattactatagtgaagtttttcctcactgttaggtattaaattacttacaattttttgttactaccaatgatgcagttgtctttatgcaataacgtgtgtgtgtgtgtgtgtgtgtgcatgtgcctgcgcacttctttggttacaagggtatgatgaattatgacttttgtggtttgttgtcagattgatctcca

SEQ ID NO: 232141 - DNA, 243 bp, Homo sapiens
cccgcctctgcatcgccgccggccccttcacgcctctaccttgggcgggtttggggtaagggccgcgcagaccctaagggaaggcccgaggtcgccggagctcctcctctcgcggctgagtgagggtctgggaggccagatgaagggagctgctcggctgagctgcggaccagcgcgagagcagcgggcagtggcggaccagcgccagggcagggcaggggtggacagagggctctccccacc

SEQ ID NO: 232142 - DNA, 200 bp, Homo sapiens
cccatttccaaagccacttccacacttattgttatttttacagttggcatcccactctcagtatcaaaatctgtattagattgctaaggctatcataacaaaaaacaaaataccatttcctggggggtttgaataacagagatttattttctaagagttctggaggcaaggagtctgagatcacagtgttagcagagttt

SEQ ID NO: 232143 - DNA, 310 bp, Homo sapiens
ggtaggaatgattgatgagaggggattttgatttgttgagcacttaggtaagttttagtatacacatttggggacagaagccagggcagaaataaactgctcagcataaaatgggaaagaggtgacaaggaggctaattctgggaagagaggagccacctccttgctggtatggacaatttgtaggtattgggcgttgagcatcacacacaatcccctttctctggctttgtaattgcctgatgtgttcttcctgtctgctgcacaaacaaagaccacagcatagcaataaagaaagagtttaggctggg

SEQ ID NO: 232144 - DNA, 474 bp, Homo sapiens
acatgtttgctgagttggcctgaatttcttgccccatatctgggctgaagggatagcaagggcagtggggctggctccacgccctggagagatcctcccaccagcctcccccgtcctctctctctctgccagattctcggggatgctcagcctttgagggcttgagacaaatgcatctcctggaatgttcctgccctcccttatcagagcaagggctgggccattgacagttctgtggtccacaggccaaagtgtcctagaaggtcacaggctttatcttgtttatgtctgtgacttttcctgaggctcctctcttcttgacagtgtcacggagcaggactgctgcctgggacgtgtctggaaagtggcccactccttcagggccagggaagagaaccaagtcattgatgctggtggggcattccaggacaatctgtggaagaacatggtttcttctttaaccgcctgtgatga

SEQ ID NO: 232145 - DNA, 406 bp, Homo sapiens
ttctcatatttctgtaggttctgccacaggcacgatttcttccacagtgttattctctgattacatctcacgtccagaagaccacaccagcatcctccactttgacaagaatgagacacagaagacctgccaggtcctgatcattgatgactccctttatgaagaggaggaatccttcagcgtttcacttaggctgccagtgggaggacagctgggagccagattccccaccactaaggtgactattctggctgatcgttatgatgatggagctgaggaattttattctattttgctggactccaggaaatgtttgcttccttaagcagagattgaatatccccctgtcaaatggatcacctgaagaaatacttttataaggacaactatcatggagtaagacaaa

SEQ ID NO: 232146 - DNA, 382 bp, Homo sapiens
tttggccaggcccaagccgattaatttaggtcaccgcacaggtttttgctaatcccgcccatgttaagccgcattcagttcatggtaatccctctcgctataggtcgttttttggtttcttggtttttccttgagtttttttttttttttttttttttttttttttttttttttttcggggctaagggatgtgaggtttccatttggggtgatgaaacagttctggaactagattggggtgatggtcgcacaacactgtgactactgagttatatactttaacactgttaaggtggccaggcacagtggtatgttcctgtcgtcccagctactaaggaggctaaggtgggaggatcacttgggcccaggaggcagaggttgc

SEQ ID NO: 232147 - DNA, 476 bp, Homo sapiens
agtctctagtagctcagagttaaagggtattcccagcaagtttaagagatgaggaagggccctgaatgtgagccagagctactaaagtaggatgtgccacaggccacctctctttctgctctggttcctgtgaaacatagtgcttgttccagtaacgtcacctctaggaatgtatcctcaggaaataatcgttcacatgtgcaaacctgtatgtgaataaggatgcttttctcagtgggtttataacagtgaaacaaggaaacaaggtaatgaatggctctaaagaggctggtttaataaatcatggatacaagtaaataattggatttaatgcagttatgaaaaataatctaaacaccttggacctcagttgcctggtttttaaatgaagaaagccaaagaagaattgtattcctcaactagttttaggaggccagcaaacctttgataccaaaatctcacaaagacattataca

SEQ ID NO: 232148 - DNA, 874 bp, Homo sapiens
agagaaaaggcatttgtgcctggtcagtgagcatcatggaatccaatcaagtgccttctttcattaaaccaaaacagcaggtaggttgtgtgcatttttaagaccttttagaaagtatgcttttatagattaggaatttcagagagaaaagattggacagcttccctaaaaactttgagctatctcattgcaagatttgccctaccaatccgtgcacgaaccctggcccccttcctgatagcaggaggcccaccggtggaagcaagcagctttttaaacgccttcgctgcactcctgcaatgtgcagagacctctggaccaaagaccagagcctactcagcagactcttggttgatgtggacaagctgcctgtgtttcacacggtcgacggtggggaggccaccagggaaaatggaatgtgcagggcttttaaatgtcacgtctggactgtgttggcaggcccatgcagcgctccacaataaacctgtcacaaatgcattgagtcactgggtcctttatttctcatcacggcattctgtggccttgtgttctcttgccagcaaagaatggaacgttcagccccctagacatgccggctgctggattttttaagcaatcatccagcttagataaggggcgtgggctgctggggaatgctgccccaaagcgctgtctccagagcagctgccccaggcatgcttaattccctccctgcccactgtgtgcacccccaagatgcctctcaatatccagacctgcagttccactctgtttgttaggccccccaggagagcgagcctgcagtccgccccagcagaggggaccaggccagggatgcctctttcctctctggagtgttaccttggagtcctga

SEQ ID NO: 232149 - DNA, 342 bp, Homo sapiens
cagttttgcctaaagctctctctttaagagtcagtaaagcatagtggttaggagtgcagtctctggaagcagactgcctcggttcaaatcttggctctgctgctaggatttaacagggtaataaatgtcattcacttagaacacagtctggctaacaataggccctcaataaacattagccattatcatgctgaacatttttcaattacatccatcaataaatttttttggcttaagccatttcgactgatatagatatgtacttttcaactagacatacatcttttgaccaacttgaaaattttattaaaaacaaaataaaatcattttctgttctcagta

SEQ ID NO: 232150 - DNA, 365 bp, Homo sapiens
cggtgagacaattctcacgctaaaatacgtaatgtttcaaggcagaaatccttgttataattctaaactatgtgcaaccaacgaaattaccttcaagatgcctactggactcagcacactaagccaggccaccctgcttcaggctatttccctcatataagcagaatataacgagctacagttcattagctttaaacatttggcctaagggattcataggtgaagcctttaaaaacaagaaaatcatacactgttgaattaaactcccatttaaatgctgaaagttgggaagtaggtatttctagattgccggtgtgattatattatagcattgacatattaagaaacagtaccttctggatata

SEQ ID NO: 232151 - DNA, 453 bp, Homo sapiens
actaagcgccaaaaaaggaagcctctttgcttcagcaatatgcaaattaatttggagcatgcaaatagttgcagcatgcaagtagtttagaattagactttcattaaaactaagtgccacacagagaagaggtgtaaaacagagtagtaatctgttgcgtgcacttgaagggttcttgaaagacgtgcataaaccgttaccgttgtagcacaagttgagcagcaaaagccaaagtcgcacatctgtgtcttgtcgccacctctccacttatccactcatgctggcttttctcccagcagctctttgccctcctccttttaacactgtgggctgaggtgaggatgttctagtcaagagtctttacgagccttatatcgccaggctttcagaaaatgtgaagcatggtagtgtgaatttagaaaaaataaaagtgtgtataaaagctcatctgtt

SEQ ID NO: 232152 - DNA, 669 bp, Homo sapiens
cacagtttgatgtgaaagcttagatctaaacaatgagaaagaaaccacaacctggacagcaaggagcatagcattcctcacattggaacagcatgtgcaaaggctctcccagcaaagggggaagtggaaaggatagcagtttaaaacaacattcatttattttttatttttattttttttaaaagacaaggtctctgttgcccatgctggagttcagtggtgcagtcatagctcgctgcaacctcaaattcctagtcttaatcagtcgtcctacttcagccttcctaagtaccgggaatacaggcatgagccatcgcccctagtccatagcactcatttattatctctttaagttctgtagattagaggtccaagcaggctccgctgggtattctgctgaggacctcaggaggtcagaattaagcatcggccagcctgggtttttatttggaggtgatagggagagtctccttccagactcactcatgttggcagaattcattttcatgtggtgaaggtctgaggtcctcatttctttgctggctgtcagccagaagtcattctcagcttctagaagccactcaaatttcttggcttttagtctcctccagcttcaaaaccataaatagtgctttgactctaacttcacattgtgtctcttctgttttt

SEQ ID NO: 232153 - DNA, 354 bp, Homo sapiens
cgaaattagccacactttaaaagtaaaaagaaataggtgaaaataattttaatatgctttaacacaatatatctcaaatataatttcaacatgcaatcaatattttaaacatttagtgagatattttacattttttcacactaagccttggaatctagtgtgtattttgcacttacagcatttctcaattcagccactaaattttcatcaaaaatgctcaataagtatttagatttcaaaaagtttacagttgaaaaggtagagtcacatacccaagttgctccaattatacctacaaatttttaaataactaagttgagtatcaatttttaaatttacattaattaaatggca

SEQ ID NO: 232154 - DNA, 471 bp, Homo sapiens
caccctctctccccagttgcaggaggaagtcgctctgcttcctctgttctcaccgccagcccgagcttgggcgcccggggctttctgggtggggttcttttttgtgtacacagtgtgtgtatgtgtgcgcgcgagagtgtgtgtgccaaacgctcatcgcatccttccgcctaggcggcctcaggtgctcgcgggaggggatcaggatctcgtcgtgcccttgtccccggctctttgtgccgagtccagagcagcgcgaggtcagctctttagctcacacccccggccccgaccctgggtgggagcctccgcctccgcctcctccgcagccgtccgagcccggcttttgcccgtctgcttccatcccggcgcacgcctccgccgtgccgggcggccggagagctgtcagccggcgcctgggactcggaccccggccggcggctgccggtgcgaaaacttactggagcggag

SEQ ID NO: 232155 - DNA, 310 bp, Homo sapiens
agaagaaaagaacaaaaaatagataattttacaaagattaatacatttaaggtatggaagaactattaatcagagatagaaaggaactgttgattgttagttctgtttcactcctgtgttacgtgagccagattgtaaagtctttgacattagggaacatgtctgatacttggcatccactgtgatgctggcatataaacaaacacgtgtctactgatatgcaagcttgctacattaaaatgtgttctgtgcacatgtaccctagaacttaaagtataattaaaataaaataaaataaataatatgtgtt

SEQ ID NO: 232156 - DNA, 549 bp, Homo sapiens
acatcagaaatcaaatagaaactccctcattctaagattcatagccatcctccgagatatgacatagcgacctctcctccgtgaacagggaaacagactgagaggataacctaactctcccaaggccagagtatccactgggatatgcagccaagtcagccagcagttgaaacaagggctctctgtgctatctcacatctgaattgaattgtttcctacagacttctcatagctctctaggcaaggaatacatcttctcaccttcccacactaagaaaggcctctgtctgagcctgggtgccgggtggccaggattcctgctgaacgttcaggagctttccatctccagaggtgagctcctagttcctgcttaccttagaactgtagaacatataatgttaccactgaaaagaacctctcgtatagttggatcacaccctttacctatttatttaaatgtactgttttaattatgtaacatttgatatgtgcaggataatatgtatgcaaattataaagcataataataaaacctgtgaacccaccact

SEQ ID NO: 232157 - DNA, 474 bp, Homo sapiens
agcacgctgggcacagtcgcagccccgcctcttccttctccgtcttgttccctccttcggtcccaggagaaagacgctcatctccccacatgagaggctcagtgtaggcgtctggacaggggccagtcccacaaggctactgactccggaccacaaagaagctggaagcagcagctccgcctctgcagccaattgcagagcttttttctctgtgttctgcccccacttccaactcaggaccaaccagaggacgccaaacacgtcctatcaccaaccaccggacacctgactctccatcagccgcccctgccttccccacagcatccccaccaccctaagcggagggacctgtgccccgccccctgcctgctgatctcagggtggggcgctcccaagctccgaactcagagcctgggcttgctgtcgtctgggtggtctttctttatctccacatgcatctgcttatgcagtaca

SEQ ID NO: 232158 - DNA, 536 bp, Homo sapiens
gaagaatgaaaggcaagactgttaatggaaagggattccaatccagaccccaagagagggttcttggatctcgtgcaagaaagaattcaaggtgaatccataaaatgagggcaagtttattagcaaagtaaaagaataaaagaatggttactccataggcagagcagcgcttgggctgctggattaaggatacccgtatcttgagccgacctcttatctcatcctgtgacttagaatgcctagcttcccgggaatgcagcccagtaggtctcagccttattttacccagcccctattcaagatggagccactctggttcaaacatctctgatgagaccaaatctggtccatttgattcagagcatcaagtacaagattaaacataagaaagggcctctcctctcggaaagtcagcctgttggggaggctgccttaactaacaggtggaagggccctgaaggccggtcagggaccattccgggtgggctggaacatcagaatcctgagggtgtcatccagcaagtctagattcttgt

SEQ ID NO: 232159 - DNA, 139 bp, Homo sapiens
ccttctcccgctctggccgcgctcctccccggacctccggaggttctcctcggcccctccccgggctccccaagagttctcccgcctccccctgggaccccgcccctggcccgcttctcctcagccggccctgcggccg

SEQ ID NO: 232160 - DNA, 319 bp, Homo sapiens
ttccaggagccacaagagcccttcaatccacccagggacccccgatgtgggcccaccagccatccttagctttcctcctctccagaggcaacagggaataggaaaaagtccagagcaaggccacaccatgatcttaacgcaaatggaaatgtgaggaaaacgatcaatttgcttcctgaaaatgacattttttttttctggtttctatgagactcgaggtggccttgctgaaactgaaatcggtatgagctttccctggcagacaatggccattgtcacatattaaattctcatgaaagggataactttgtgggcaaga

SEQ ID NO: 232161 - DNA, 416 bp, Homo sapiens
catgtaccaccctgtgaacatggacaagttacataagctctcttcacttcagttttctcatctgtaaaatggggatcccagccctacctcatgtggttgttgtggagatgagataagaaaatgtatgtaaggccgggcgcagtggctcatgcctgtaatcccagcactttgggaggctgaggcgggcggatcacctgaggtcgggagtttgagaccagcctgaccaacatggagaaaccccatctctactaaaaatacaaaattagctgggcatggtggcacatgcctgtaatcccagcttctagggaggctgaggcaggagaatcgcttgaacctgggaggtggaggttgcggtgagccaagatggcgccattgcactccagcctgggcaacaagagtgaaactcctgtctcaaa

SEQ ID NO: 232162 - DNA, 646 bp, Homo sapiens
gtatactctgaacaaaatatgagtcattaatccctctaatggagggacctagaacagtgaaatagggaggacaggaaggagaatgatgctgaattgaactgggatcttcttgtctgtcaagcccttgaacagctttccctttaagcaacaaagatgacaagtttttgctattttggattagtgagagtgtacgaaatggtttccctttccttccaggcaaaaataccaacagaatctggcttcggaatgaaagtgctaatttcatttggtgactttcagatttgaaatacgggcttgaacaggcattgtgcattagtcagctgaggcagtggaggttatttttacgatgctaattattatttcctgacagtgatttactttatgttgtctactgtttacgcccccaaactagccattgttttaggaacagaattggttgggttgtcatgctcttttcaaagacaaatcttactattttatgcatagaaatactttcctgtaataaagaagaaagctttattgaagagaatcttgcatatgaaatgtaatctggataaatattcaaaactaatagggttatattttagtcttgattttaaagtatatttttctgacatcctaaccaccttgctttatgtgcattaaa

SEQ ID NO: 232163 - DNA, 592 bp, Homo sapiens
gtatactctgaacaaaatatgagtcattaatccctctaatggagggacctagaacagtgaaatagggaggacaggaaggagaatgatgctgaattgaactgggatcttcttgtctgtcaagcccttgaacagctttccctttaagcaacaaagatgacaagtttttgctattttggattagtgagagtgtacgaaatggtttccctttccttccaggcatttcagatttgaaatacgggcttgaacaggcattgtgcattagtcagctgaggcagtggaggttatttttacgatgctaattattatttcctgacagtgatttactttatgttgtctactgtttacgcccccaaactagccattgttttaggaacagaattggttgggttgtcatgctcttttcaaagacaaatcttactattttatgcatagaaatactttcctgtaataaagaagaaagctttattgaagagaatcttgcatatgaaatgtaatctggataaatattcaaaactaatagggttatattttagtcttgattttaaagtatatttttctgacatcctaaccaccttgctttatgtgcattaaa

SEQ ID NO: 232164 - DNA, 546 bp, Homo sapiens
ttattgcctacgatatgccaagcaccttgaggtgattcacacagacacttacatcgaatgactgccatctctctgtggattgtctctaggtctacctcgctcccatctcacataggaggaaactggcatcccccttcttcctttgaccccataaataaacaatgcacagtgcctggtataggacatgcttggtgtaacagggaaaatcattcacccaggcaagcattgatgttcagagcacttagtggtggaatacgttatcaccagctcaagcatgcgatgttcagccactccggcccacgaaatgtaagcacgggacgaacgggtggttttcccacgcctcccttgccagctccaagggctgaggctctccagagctgggctgtgagtgcctctccttctctctggggagagctcacagcatggctgtctctacagagcacgaggataatgggcagatgaaggtcaaagctacaggccctaaccaaccactattgagcacttgttgtgtgcccagacctataaagcgttttcatgagcaaaaaa

SEQ ID NO: 232165 - DNA, 691 bp, Homo sapiens
ctgtaaaaatatggtgaatactactactgacatcacagaattgttattttcagaattaaatgagatgacatatttaagttgcttggcacattgtttcagtaaatgctgaatacatggtgctattatattgtcattattgctcacatttggtttatgtaggatggtgtcattaactagatgtacatttctggagaataagcagtaggtctgtgactttttgatatgaaagaaaggcagaagaaaagagagggaaggagagaaaaccactcaaaaccctcccactaacgggatgattcctggaattctgcctatggagttttatttcttcatttcaggtttctgatctcatgagtccatctgattttgcaaatatttctcccttaggatgaatgtaaaatctgagagtcatttttattcaagtttggagaaagagaaatgtgtgagagtaccaggtatatgggagggggcaaaatgaaagacaagaagagaagagggtgtctgtgctgcaaagtcaagtctagcacactgccgaagttctctgaactctcaccactcacagcaaactggaaaccactataggaaccaactcgtctcttgatcctgatatgggagtcccagaaagaaagcccgatcattctacattcatgttgcactcaatttgttcctgacctgatggacgagatctgggtcc

SEQ ID NO: 232166 - DNA, 960 bp, Homo sapiens
ctgtaaaaatatggtgaatactactactgacatcacagaattgttattttcagaattaaatgagatgacatatttaagttgcttggcacattgtttcagtaaatgctgaatacatggtgctattatattgtcattattgctcacatttggtttatgtaggatggtgtcattaactagatgtacatttctggagaataagcagtaggtctgtgactttttgatatgaaagaaaggcagaagaaaagagagggaaggagagaaaaccactcaaaaccctcccactaacgggatgattcctggaattctgcctatggagttttatttcttcatttcaggtttctgatctcatgagtccatctgattttgcaaatatttctcccttaggatgaatgtaaaatctgagagtcatttttattcaagtttggagaaagagaaatgtgtgagagtaccaggtatatgggagggggcaaaatgaaagacaagaagagaagagggtgtctgtgctgcaaagtcaagtctagcacactgccgaagttctctgaactctcaccactcacagcaaactggaaaccactataggaaccaactcgtctcttgatcctgatatgggagtcccagaaagaaagccaaaaagtgaaaattccttggttctctgatgggaagcacacctcaagcactgtctccagatacttatctctttcctgcatttagtttctaaccagagaaatcagaaaaggaaaggtagcccatggctactatttaatgtgtcatttgtatgtttggttttattttgattcatgtcattctgctttcacaggaccctctaactgctccaaaccctccccgggagaccagttggaaagtagccatatcttaactcttctatgtgactcttcaaaagtaagggtgattttaaaggacatttctgctgacagattctcatttgtttcaataaaccta

SEQ ID NO: 232167 - DNA, 436 bp, Homo sapiens
gcattaggtattactaatccaactatatttcaacttgaagggacttttttgttttgtttcaaaataatgcattacttttttctctttgcttctgtatgaacctttatagagcaaatgaatatatgtatatggagttctgggttctagtgtcaattacataatcaaatttcataaaaggatgttagttactggctatgttgtcctaaaatttacacacactaaaaaatgtctgtcaagttgtacctttaacctgttcatagctttagggaattaagtttcttaaaccaaattatgaaaaaataacttaatggaatcttctaaaaggaaaaagtataaaaagctttctgaatgatattaccccttatacctaaaggctcaagatgcttgaatatggttcaacttttccaaagttaataaacaagggatgatgaaagca

SEQ ID NO: 232168 - DNA, 873 bp, Homo sapiens
aggccaaaacctcacgtcagcccagattcccataaggtgggtctgattccagtgagcaaacacaagagggatgacagaagcaggtgtcaccctctgacaaccagagggcagcaactgcttcagggtggggccgtccagggtctataggcccgcgggggaaggcagcgggggcgtgttcacaggtgcctccaggctcagaggagcctgccctcagacgctccttgagtacacagccccagagggagcttccaagtggacagacagcacagacacgtgttccgggccagcgtgaagacgtctgttggctagaggtctgattttctggttgtttttttttttttttttttcctgagacggagtgtcgctcgtttccccagttggagcgcaatggcgcaacctcagctcactgcaacctccacctcctgggttcaagcgattctcctgcctcagcctcccaagtagctgggattacaggcgtgcgccaccatgcctgggtaataattttgtgtttttagtagagacggagttttggccatggtggtcaggctggtcttgaactcccgacctcaggtgatccacccacctcgagcttccaaagtgctgggattacaggcgtgagccattgcgcctggcctgattttccttttaaatagatttaagaattctacctaatgttgaaaaaatgcacacatttgtatgggacaaaaaagggcctaaaagaaggaaaactgcatgctggaaggttgctctacgttaacctagataatgagaggagggaagcgtgggtgcagctcactccctgcaagctgccagcctttcatcagtggaaacaggtttctgtaccacaacctgctcttcactaacagctcactt

SEQ ID NO: 232169 - DNA, 775 bp, Homo sapiens
tagccctgccctggtggagctggagggccgcagggccgcccggtggggtcaggaggttgtgaagaggatcctgatacaggctgggcctccctgcaggcgtgagccccggagcacggggtgagcagctccacccagaggggcttgcaggaccaagctgggacagcaaccaccaggccctggggcagatcagtgagcgtccaggagatgcagatgcagaagacagccaaattcattcacctctgcgtgggcctgtgagggcccacagagatgcattttcattcacgaccaggatttcctcggccggagcagccgcttttcccagccgaagctcactgtgtttactacataggatgtgagtgtatagaaagactctctctaacgttagctacgcgtgcagaaatgtggggcgcttacaagtgtgggcagccgcagcctgttcctcacccctgtcctaacgggacatactccgcgcatgcacatttaggatcaccgtgtcttctcgttggactgatctgtcgttaggaccctggacccaagtaattgtctttgctctgaagttttgacagtaacaaaggcattccagctctttctttttcactcctgtcggtgtaacgtgccgtttttcatcctttgacttttagcccgcctgtgccctgtctgaagggagttgtctgtggacagcacggagtggtgggtgtttgtaatccactctgccagcctcagtcttctaactgttgcgtatggaccaattacatctgccctttctcttcaaaaa

SEQ ID NO: 232170 - DNA, 164 bp, Homo sapiens
ctatacgtgctttgccaatttcatccactctgaaatttcagccatctgcaatgtctatacccgcaacccagacctctggctaaactctagtcctatacatccaaatgactaccagacatcccttcagaatggaccataaatacacccattaaacgtcgcatgtc

SEQ ID NO: 232171 - DNA, 406 bp, Homo sapiens
cagaagggggctgctggcagccaggaggggtcaggcaccaagggaaggagcctggactggcgtgtgtggagggagaccacgggctaggaggacaggatggcagaggggctgggctgcattctggaacaggagggggagggccaggtgtggatctggggagaaacgggactgaggggcatctgggaagatgaccagggggtgggggagccctggctcgccgcaggaggggctgtcgggtgccatgaaccaaggccagccggaggcctgcagggtagaggccgccctctgagatgtacccaacatacaggggcagggacagaactgggggcttccatgccccacccccaaggcctccccacctccggggggactcaccccagaccgaccttacccagctgcttccttg

SEQ ID NO: 232172 - DNA, 431 bp, Homo sapiens
atccctcccacaactccggaattctaaaatggtttctcttgcgccagttctggttttctcctccccatgcctcatgcccagggccagggtgcacggtaaatctctgagatcctcctttcttttggcctttcttggccactgaccccatgcagcatagccatactcatggcttccccctgccttcctgacttgtcctgtctccttggacaatcgttcttccacctttttaggttggtgcttagccctgtgcgctgatgtattatagcaggcgagcgctggctttcagcctcaatcccctgacgttgaattccaactctaaatttactaactaggattttggataagggctctttgagtttcttatctttaaactgagactgttaatacccaccagtaagggtcatttttaaaattaaatgaaattctattaa

SEQ ID NO: 232173 - DNA, 391 bp, Homo sapiens
ccagccgctccaccagtccgaggtccagaggagcagacacacagacccgggccggaggcccctcttctagccctgcgggaaccggacagttccccaactgggactctggaaccacagctcctaaatcatcaaattctcaagctttttttttccctctcttcgtcccagccatcccagtcttcttcttcttttttttttttttaacttattgtttttttcgctcctgtcattatgaaagtggtcacgccattcaatattaagacttggagggaattggggaaagaaaagaaagaatctaaaagaagagaagcgaccggtgcttttaagggtgtctaattttcaaaagagacgtctgggagtattttgctctgggcgtttgggtgagcaggac

SEQ ID NO: 232174 - DNA, 494 bp, Homo sapiens
tctactttatagtagtatggggacattggttaagtgatctcttttattcacaatcgtctcatctgcttaatggtgataataataaatgtaggtttttctggaacaattaaatggctaatgcatttgagaaaaagcatgtatttcattgtttggcataaaataaacactatatatttttagtaactgttactatgctattattctaagctatactatcagcaagatgtaagtaatgctcctatttcatcataaatatataaatacttatgtttttatgtatagattgttatgcttacataggtttcagtgcactttgttagtaattattcttcatatctttcagaatgcaaacttcttaaggtcaaagacatgtgttttatctttgatatagaatattttcaatgacaagatatgttcatctttatatccccaaaacctatcatgtttttgaaagacagtaagtgttaataaacagttattagtgttgaaataga

SEQ ID NO: 232175 - DNA, 370 bp, Homo sapiens
gaaataaaaattcagtggaagggttagatagcttactggacacagcagaagaaaaacctgaaactgaaagagatatgcaaagaaattaccagaatgaaagcaacagtgtcttaaagaatatgccctatccaggatctgctggaatttgaaggcttttagttcttgaaggattcataggatctttgaatattaaagaggtatgtcttcttcactgatcaatggaagagtaaagtgcagaactgttctcactaatgaactttagtgagaaatgtttgtttttacttttgccagtgtaattatatattttcatgttattttgcttctgttctgatttttactttggcaatcaatattagtgagtaagtagtga

SEQ ID NO: 232176 - DNA, 449 bp, Homo sapiens
ggcatagcctcaaagctgccatgggggaagccaggcactctggaagggaaggtaggaaagagaagacactgaggagcatgactgggtgctgcgctcagccagcctctcacccccacccactccgtgaggaccacttggagcactggttgaaaccccggcagagcttggtgacggcatttctgccacatactgacaccataactaactaaagaatgtccttgggctagaattgagaaggccttagagatgcccggaaacagcctgctgcttggacaaatgagaaacctgatggtcaaaaccccaaatcacaatttatccctgggcacctggtggattcttccatttcctggagaccggtaaattgatttcaggggtataattcatgtgcacttgagtggtttcaactccttatctaatgattttaagtttttgtttaaatatttttttcc

SEQ ID NO: 232177 - DNA, 403 bp, Homo sapiens
tccctcagaaccaggagtccagacccccagcttcttcctcctggacccttcctcttaggcattttgaggtcctctactattccctctccctctcttttacacaaacccctctctccctccactccccattctaggattgagaccaagggtgagtcacaagaagccctgaggccctgagtcacctcgccctccccccttggcccctccctgggctggaggcagctggctgaggagtgaagcagtttcctaggactgacccctgcatcccaggactgcagtttgaaggcaggtgcccttcccactgtaaccccatcactgccacccaggcatgtccatgcccatcctttgctgtttttctctttcagtcatggcctatttggagacaaaatttctctgtgctcta

SEQ ID NO: 232178 - DNA, 808 bp, Homo sapiens
ctagggtgctcaggcaaactgcacgtgtcaccgctcctcagctgctgcagctggtggccacgtggcagtgccagggtcacactcacagagatgaggagaagctgggccccctttgatcttcacagtagcctatgagatggtccccagatcctccgatgcttcaagaggagctgggcaccacagttaagtgaagtttcctaaattttaagtgttggtcatttgtgtttaaaaatgtgaaaacaaaagaaataaaagtgcagccagacaaagcctctctgcctgcacatggctgctgaaaggctgaaatggatggaggtggtctcacccaggggatcccagggactgacgttcctatcgcagggaaggtgtcacacacggagctacggaacagcagggccggagcaaacaaagccagcccagctgcctcggctattccaacaggggctacactggagacattttaaaaataaagggggtgaggggaaagaattctccagaaactttggttcttctgtaatggcaagtataattgcaaaaaacatcttgtcagcctgtaaaatgacactttcacaggttttcttagcaagggagctagatgggcaagaaccaagcgttcaagttcggggaccgttcgagcccagtttgctttgctgtgtttcgtagccattaatgtccccccgccaattaccaccagtcattttgcaaagttatcattactactgtttaaaagaaaaaaaaacattgctcattttagaaagctgtctgtcaaaaatgcttaaaataaaagcagtcttggcattcgaaggaa

SEQ ID NO: 232179 - DNA, 418 bp, Homo sapiens
taaatattcttcttattgtccagaagaacaacaacaaagaaaacttttattagcagagagaaaataagacggataatccttgccttcctggaggttctgtaagtcagactggcctgccctgtgaggacagcattctttcctctttatcttctttaatgactgctctgctaatcacacctgactcctgttatcaatcctgtggttgtatcttttcagggtttttactgtggtcagaggtttccagatactctattattattatgaaaaagaagcattgtcattatcggacctaacttgggacacagaacaatgaacaatttttcaaaaggaaggaatctagcagatattcagctcttgtatctttttactttgcatcctgagaaaaggcatctacctcggtgacaggaattcaagggaa

SEQ ID NO: 232180 - DNA, 896 bp, Homo sapiens
ctccgacatcactaagcctcagtcttctaacctgcagagtgggaagatgaatgtcttcagtgctgacataatatttaaaaagctgtcaatcacctaaacgcccagctgtaggggactgcagaaatgcatcgtatgaaactcatccactgcatgaactactcttgccatcagcagcattcaaaatacattttcagagaaaaagtaggatatgaaatgaaatctgtgtctataaaagaaaatggataggccaggcgcagtggcccacgcctgtaatcccagcactttaggaggccaaggtgggtagatcacttgaggtcaggagttcgagaccagcctggccaaaatggtgaagccatgtctctattaaaaatacaaaaattagctaggtgtggtggcgcatgcctgtaatcccagctacttgggaggttgaggcataagaattgcttgaaccctggaggcgaaggttgcagtgagctgagatggtgccattgtactccagcctgggcgacagagtgagactccatctcaaaaaaaaaaaaaaaaagggataaaggatttcgaggaaatgaacctaagtgtcatgtgactggctgtgataggaatggggagaaacattttttcccctgccaatttttcaaattttctttcttccattctttgtacaatgggtaaatatacataatgttccacaatcacaaaaacaaggaaacacaccctgccctgcacccagggcagttctagggatccagtgaaattgtggctgcaaatagggccttgtgagctgcagaattctgagcacccaggaggagctgttgtccacagtactgggatgcatgcattcacactgctcacacactcaccaaggctcactcatggtcaactccaacacaccaagt

SEQ ID NO: 232181 - DNA, 337 bp, Homo sapiens
agtttgtgtccattcacagttagaactaggtaagggcataccaagaggcacccaagtggatcatctgagtttcacatgtgtatttctccctgtccccaaggtgtaaaggtggccccacctcctcatactaatcaattatccttgcttgctggcccctggctgcaaagagccaaaagtgtcgtgctatacatagcttatagttcaatggattcccgctctacccctttgcaagagagaaaacctgtaattctactcaacccagagttggggaaagtgaagcacagagttctccagtgggttattaggagtgattttaaataaagccatttgtgatttc

SEQ ID NO: 232182 - DNA, 177 bp, Homo sapiens
aatatgcatgtaagttttctttatgctttctcatgacttgttagcccagttactttttgaatgaataagattccatggtctagatgtgctacactttatttatccatccacctattgaaagatatcttggttgtttctaagttttgacaattatgaataaagctgctataaaccttt

SEQ ID NO: 232183 - DNA, 526 bp, Homo sapiens
gaatgtgagccatgtcgctgatttcgaacaaaccccagatgtgtggaaactgacttattttgattgcaagagggtccttgtcccttgcagatgggcagcttccggggaccggcttgcacgatgccgtggccaccccagtggagaccctctgcccggctttgtgtcctggcgtccccaccagggtgcccagctctcctgcgcagatgtcgggagtatctggatgccccatgggcacttcgagggcccaatccggagttttttgttttgttttgttttaagagattgagactgtgaacctgaactcccttgatctcctcccgttgggcccaggagggagccgaatccaggcccaaccgggctcactgagaaggtgcaggaagcccccaacgactcctactcgtgtgcggcccatactgggccaggacgctgcagtggccgagccgctgggtgtctgcaacggggagctcccccgccgctgggggcaataaacggaatcggtttcacacgctttccctcttgatctaag

SEQ ID NO: 232184 - DNA, 527 bp, Homo sapiens
  misc_feature (11)..(11): n is a, c, g, or t
  misc_feature (152)..(152): n is a, c, g, or t
  misc_feature (296)..(296): n is a, c, g, or t
  misc_feature (354)..(354): n is a, c, g, or t
  misc_feature (358)..(358): n is a, c, g, or t
  misc_feature (366)..(366): n is a, c, g, or t
  misc_feature (381)..(381): n is a, c, g, or t
  misc_feature (387)..(387): n is a, c, g, or t
  misc_feature (396)..(396): n is a, c, g, or t
  misc_feature (406)..(406): n is a, c, g, or t
ctttctagcantcttgacctaattcacaaatgcaagaaaataaaagaaaaatgagggaaatgatgaatgtaggtagtctggtgttaaaaactaatgcaggaatgatgcgcattgtcacagaaagaagaggggaaattccccatcctgttttncgtgctatgagggtcatttttaaaatttttattataaacactattaaattcagaccgcttttttggtttttttttctttatctgaatatacaagaacattcattatcaaatgttcatcatcaatactacaaagaacgagacacnagtcgcaagaaacaatggaaaatgttaataaagctgaaagaatcgttgagtatttttntgtntcttttanagttttttttaaatntgagtntctgtagtntcatcttttntggtatcgaagtcaggttttgctgcagtggccgagccgctgggtgtctgcaacggggagctcccccgccgctgggggcaataaacggaatcggtttcacacgctttccctcttgatctaag

SEQ ID NO: 232185 - DNA, 1501 bp, Homo sapiens
cggaggcgccgccagctccgcgctccgccactgcccaggccggcgggcggcactcggacccgccgccctcggtccctcgcgaggccacggaggccaacacgcctcgcacggggggacagcgcgggggcagccgtccaaacaccaggcgtcctcggctggtcgtcccagggcgcccgcacctctccgcccgcgctctcctgccgccgcgcccccaagcccccaaactccgaggcgctgcggcggaggggccgggctgagcgcaggcagggtggcccgggcccaggagcctgacggcctgagtgcggatttctcatctgagtatctgggaatcgagaatgaattggaaggaaaccgaggcgctgccctggccaggttgctgccccgcacccttccggagcaccgaagtcctgcccggcaacgggacttggagctgccgcagagtcagcctgagcccgaggcaggggtcgcgcccgcgatgcggggtctctgcgccgccccgcgaggctcctggccttgccctccctgccctttgttgtgtaataagacctgtggcggctccactgagacccacacgtgcaactccgcgcctccgcgttaaaggaggtgaaacgcagcagccctgagaaaccccgagaccccggtgtcctagcagaggcgccccggatggggaggggcgcggggccggcgccaccccagaggaaaagcccagcggagccgggttgggcaggagctggcggcggcggtgcgctgggccttctgccttggatcctccgcggtcggcaccgcttccctgctcagattcgaacccagattcggctcccaaggctcccacggctccagggtgcccagtcttgcagccagctcgccgcccgagccccggatggaggaagcgctcactggccgctacctctgctgtttctggcaccagagattgagactgtgaacctgaactcccttgatctcctcccgttgggcccaggagggagccgaatccaggcccaaccgggctcactgagaaggtgcaggaagcccccaacgactcctactcgtgtgcggcccatactgggccaggacgctgcagtggccgagccgctgggtgtctgcaacggggagctcccccgccgctgggggcaataaacggaatcggtttcacacgctttccctcttgatctaagaacctttaaaaatccgccaacgaatgctgttgcctggatgcactgcctatgaccttcagccgtgtgttcacgcgcgcccgcagccgtggagtggcggtccctcctgccgcccgcaaccccggggccgccggtctgcgcacaccgggagcaacttcgttacccacagcgcccgcgtcctgcggctcgcgcggaactgcgcgcgggaaggtggcagagcgacgctccagaacgctgcttgcgtagacgctgccgctgccttcagatcccaattcggccgcgcgcgggcggggccctggcagcaacgaaaatggcgagcctcgtagcct

SEQ ID NO: 232186 - DNA, 852 bp, Homo sapiens
gaatgtgagccatgtcgctgatttcgaacaaaccccagatgtgtggaaactgacttattttgattgcaagagggtccttgtcccttgcagatgggcagcttccggggaccggcttgcacgatgccgtggccaccccagtggagaccctctgcccggctttgtgtcctggcgtccccaccagggtgcccagctctcctgcgcagatgtcgggagtatctggatgccccatgggcacttcgagggcccaatccggagttttttgttttgttttgttttaagagattgagactgtgaacctgaactcccttgatctcctcccgttgggcccaggagggagccgaatccaggcccaaccgggctcactgagaaggtgcaggaagcccccaacgactcctactcgtgtgcggcccatactgggccaggacgctgcagtggccgagccgctgggtgtctgcaacggggagctcccccgccgctgggggcaataaacggaatcggtttcacacgctttccctcttgatctaagaacctttaaaaatccgccaacgaatgctgttgcctggatgcactgcctatgaccttcagccgtgtgttcacgcgcgcccgcagccgtggagtggcggtccctcctgccgcccgcaaccccggggccgccggtctgcgcacaccgggagcaacttcgttacccacagcgcccgcgtcctgcggctcgcgcggaactgcgcgcgggaaggtggcagagcgacgctccagaacgctgcttgcgtagacgctgccgctgccttcagatcccaattcggccgcgcgcgggcggggccctggcagcaacgaaaatggcgagcctcgtagcct

SEQ ID NO: 232187 - DNA, 1345 bp, Homo sapiens
cggaggcgccgccagctccgcgctccgccactgcccaggccggcgggcggcactcggacccgccgccctcggtccctcgcgaggccacggaggccaacacgcctcgcacggggggacagcgcgggggcagccgtccaaacaccaggcgtcctcggctggtcgtcccagggcgcccgcacctctccgcccgcgctctcctgccgccgcgcccccaagcccccaaactccgaggcgctgcggcggaggggccgggctgagcgcaggcagggtggcccgggcccaggagcctgacggcctgagtgcggatttctcatctgagtatctgggaatcgagaatgaattggaaggaaaccgaggcgctgccctggccaggttgctgccccgcacccttccggagcaccgaagtcctgcccggcaacgggacttggagctgccgcagagtcagcctgagcccgaggcaggggtcgcgcccgcgatgcggggtctctgcgccgccccgcgaggctcctggccttgccctccctgccctttgttgtgtaataagacctgtggcggctccactgagacccacacgtgcaactccgcgcctccgcgttaaaggaggtgaaacgcagcagccctgagaaaccccgagaccccggtgtcctagcagaggcgccccggatggggaggggcgcggggccggcgccaccccagaggaaaagcccagcggagccgggttgggcaggagctggcggcggcggtgcgctgggccttctgccttggatcctccgcggtcggcaccgcttccctgctcagattcgaacccagattcggctcccaaggctcccacggctccagggtgcccagtcttgcagccagctcgccgcccgagccccggatggaggaagcgctcactggccgctacctctgctgtttctggcaccagagattgagactgtgaacctgaactcccttgatctcctcccgttgggcccaggagggagccgaatccaggcccaaccgggctcactgagaagaacctttaaaaatccgccaacgaatgctgttgcctggatgcactgcctatgaccttcagccgtgtgttcacgcgcgcccgcagccgtggagtggcggtccctcctgccgcccgcaaccccggggccgccggtctgcgcacaccgggagcaacttcgttacccacagcgcccgcgtcctgcggctcgcgcggaactgcgcgcgggaaggtggcagagcgacgctccagaacgctgcttgcgtagacgctgccgctgccttcagatcccaattcggccgcgcgcgggcggggccctggcagcaacgaaaatggcgagcctcgtagcct

SEQ ID NO: 232188 - DNA, 1175 bp, Homo sapiens
cggaggcgccgccagctccgcgctccgccactgcccaggccggcgggcggcactcggacccgccgccctcggtccctcgcgaggccacggaggccaacacgcctcgcacggggggacagcgcgggggcagccgtccaaacaccaggcgtcctcggctggtcgtcccagggcgcccgcacctctccgcccgcgctctcctgccgccgcgcccccaagcccccaaactccgaggcgctgcggcggaggggccgggctgagcgcaggcagggtggcccgggcccaggagcctgacggcctgagtgcggatttctcatctgagtatctgggaatcgagaatgaattggaaggaaaccgaggcgctgccctggccaggttgctgccccgcacccttccggagcaccgaagtcctgcccggcaacgggacttggagctgccgcagagtcagcctgagcccgaggcaggggtcgcgcccgcgatgcggggtctctgcgccgccccgcgaggctcctggccttgccctccctgccctttgttgtgtaataagacctgtggcggctccactgagacccacacgtgcaactccgcgcctccgcgttaaaggaggtgaaacgcagcagccctgagaaaccccgagaccccggtgtcctagcagaggcgccccggatggggaggggcgcggggccggcgccaccccagaggaaaagcccagcggagccgggttgggcaggagctggcggcggcggtgcgctgggccttctgccttggatcctccgcggtcggcaccgcttccctgctcagattcgaacccagattcggctcccaaggctcccacggctccagggtgcccagtcttgcagccagctcgccgcccgagccccggatggaggaagcgctcactggccgctacctctgctgtttctggcaccagagattgagactgtgaacctgaactcccttgatctcctcccgttgggcccaggagggagccgaatccaggcccaaccgggctcactgagaaggtgcaggaagcccccaacgactcctactcgtgtgcggcccatactgggccaggacgctgcagtggccgagccgctgggtgtctgcaacggggagctcccccgccgctgggggcaataaacggaatcggtttcacacgctttccctcttgatctaag

SEQ ID NO: 232189 - DNA, 372 bp, Homo sapiens
tagtggaaaactgaaaataaacttcgcacatatgtaacatgtagctttcaaaaatgtacaacattctgaaccttcccaaataaattaaactctataccatattggagataagatcatttaaggggaaattttattcagaatttaaatctgagaaaccgcatgcctcaccctcacactagggtgaaaagtgaaaatggcctaaaactgcctggattttccagtgcaatagaacccaactgttactctcctgctaggatgtcacattttacaatatgctacaacagactggcttggaagaggaacaggcagaaacgcagccaagtatatacaacctcaggagtggaaactatgtacatcagcagggccacctta

SEQ ID NO: 232190 - DNA, 159 bp, Homo sapiens
cctccatgtaatatacccatgtaacaaaactgcatttgtaccctctaaatctataaaaaatttaaactaaaaaagaatgtttaatagtaatcccaggagtcctggcatcaaggttattcatttatgaatagggcccaggccctcttgcctggctgtcaa

SEQ ID NO: 232191 - DNA, 476 bp, Homo sapiens
acaccatcccccacccgcctcctgtggcgagtcatgggttaatactattggtcttactcattccgataaagctttctctcctattcctcctgacaagtgctcagaaagctttaggagtagcttgtttccaccagagacttccttccagtgagggtgaagtggaggcttctggagtatcctcacctgagggcctaaggacctgcagctcagaaatagcccaggctggtcagcagccagacggcagtggtgtcgccagaagcgtatgcagaccctggcctggagacagcacagaaccagtctccaaaattggcaatggccactgaggtcctgagggctcacactattcacaaatacacttctgaataggttggttataatcaatgtagtaaatggaatcattgcttaaatgtatccaaagagcccactatgcaaagagagatattcattcaataaacacttattgtactgaaaaaaac

SEQ ID NO: 232192 - DNA, 438 bp, Homo sapiens
ggctcactttcaggaagtggtgcctgggctgtgcccctcagatgtggtcgcttctgtatatgtgatgaattttgagactctcagtggcccaggaccatcactacgtattaaatccataagatgtgagaagggtaattaacacttcctgttgttatttccccttctttgcatccagggaaaggggtacaatagggaagagcaggaggagggggagggaagatccacacgccagaaactgaagtggtctggaatgggaagagtgctgggcacacaggagctttctggagctgtgtctagagggaaaatgaaggttccctcctgtttaaaccagactcccagtctgtggctttcacactacatgcagagtgtggaacacgtcatctactgatgagccctattcacccaacacactcagaacttgggggtttagcctttcct

SEQ ID NO: 232193 - DNA, 220 bp, Homo sapiens
gagaataagtgcaaggttttattgagtaaagtagctctcagcagatgggggagccagaagggaaatggttttctcccggagtcgggcgctcggtgacctgggctctcctccaaccgtcccagccaaactccacgtcgttctgctggccgacggcctcccagcgtgctggcatctgttgctgtgctcttctgcctgcgtgctcccctttgtcaggcctctg

SEQ ID NO: 232194 - DNA, 331 bp, Homo sapiens
accccgtttcttcagtaaatcacgaggggaatctataaacgaaaagagacctaagagacatagtaaccaaactacatacagaccttgattaaatccttacaaacaggagaaaaaaaaaaaaagaatggaacaacaacaacaaaaaaattaggtggggcaacacagggagacctcatctctagaaaaattcaaaaaattggatgtggtgatgcacccctgtggtcccagctatatgggaggatcccttgagcctgggaagatgaggctgccatgagccactatcatgccgctgcactccagcctgggcaacagagaaagaccctatctcaaa

SEQ ID NO: 232195 - DNA, 392 bp, Homo sapiens
tccagggagaaggcaagggaggcatcatcatcatctgcattttatggtcaaagacgtccaggcaatgactgctcaaggtctcctaggcagggaggcaggtctttgacccagacacagcatcatctccactgcaccacaccctcttgacattggaggtgtacttccaggaaaagggactctggcgccaaggtataattggaagagagatgctgcattcctaagcacaagcgcatatttcaaggggaaaataggagcttcagcttgataattcatgccacagctttcatgagactgactctgtaaacaaagtgtattgagaacgggaaaccaggcgtggaatttgtggtggagaatactcccccttataaaaatatgtgaagcttaaaaaaaaa

SEQ ID NO: 232196 - DNA, 490 bp, Homo sapiens
actatttttatagaacagtaaaatcagctgggaaaagagaggctttgttttaagaacactagtattccttttgcatttccacatagctatagagtgagaagataaggggataatggcgttttgaaggaaggaggggagtaaatataactttaaagattttaattggatgggtgaaattgtttatatgttttaagtatagtcagtaattggccaggcacagtggttcatacctgtaatcccagcactttgggaggccgaggcgggtggatcacctgaggtcaggagtttgagaccagcctgaccaacatggagaaaccccatgtctactaaaaatacaaaattagctgggcgtggtggcacatgcctgtaatcgcagctactagggaggctgaggcaggagaatcgcttgtacccaggaggcagaggttgcagtgagccgagattgcgccattgcactccagtctgggcaacaaaagtgaaactctgtctc

SEQ ID NO: 232197 - DNA, 378 bp, Homo sapiens
tgcctccatcaagaacttcactttcctgctgcctgtggcaataaaagaacccgttttgttttaacattaataaggtgagagaatagagaatttccaaaagaaattaagaaaggcaagagggtaggtgttggcccatggaagtttccctaaagcaggtctgatggcggagttcagtgagaggcctttgatgcggcaacatctggaccacatgaaaaaaagcctagcaggcaaatgagagactggccaagcagagaggctggggtgggaagcggggggtatgggttctaatcctaggtcctaagtccctgagtgaccttgggcgagtctttgatttttctctggtcctcaattttactatcagtaaaataaaggaatgga

SEQ ID NO: 232198 - DNA, 480 bp, Homo sapiens
tgaaaattcagaagtgctggaaaccctgggcccggatttctatgtgacagcaattttggggctgagtggcttcatttagatggggcatgtgctccccatattctgctctccccttaacactgaggttgatgatagtgacctcaacatcaatgaggtagtgctgtttccatgtcatagaattaagaggaggttgaagtatttcccattctcacttcaagcaaaactggaacaatggaagatacacttagggcaccatatttcaagcaagaaaggaagagggcaaatttccttgtacatataaaacatactcctaggtgtttaatgtacaaaccaattgtgtctgtgcaaagtgacataatttaaaacatccttcagaaataaacacatcaagaaccatgggctactcaagtgaaaataaaattactaaaatttcaacagggtttacatttgaatgaaaataaattacaatgctgttaaatt

SEQ ID NO: 232199 - DNA, 416 bp, Homo sapiens
aggcatcagatttcagtcttctctttccaagcacatagtacaagcaggctctttcatcccacactctttttttttttccgagacggagtctcactttgttgcccaggctggctcgatctcagctcactgcaacctctacctcctgggttcaagcaattctcctgcctctgcctcccgagtactacaggcatgctgagaatacaggcatgtgacactgtgcccggctaatttttgtgttttcggtagagatggggtttcaccatgttggccaggctggtttcaaactcctgacctcaggtgacctgcccacctcagcctcccgaagtgctgggattataggcataagccactgcgcccagcccaaattcgtatgttatacagaattttctgatttataaatgtgggcaactgatcgt

SEQ ID NO: 232200 - DNA, 496 bp, Homo sapiens
taaatatccattctgtgtattgaagtataaatgagtcccacttaagaaaaaacaaaacaaaccaacttccaatgatttaaaaatactaacgtgaccctcttacgtttacctaaagctagtgtttctcaaacatcagctgtatcagaatccctgaaggacttgttaaaacaaattgctggtctctactctgagcttctgattcattaaatgtgggatggtacctgagaatctgcatttctaacacgttcccaggtgaccctgatgctgttgctctgagaaccactttgagatccacatctctaagctcatcagtctgtccgttacaccttacaagacatactttcctaatctgacacccttctatttgtctttttttggaatgctttagaaatttagcagttatcttttttatgtattttacatttgttacagctttccttggtggacagatatgagttttctacttgaaaataaacacgtttttctttaaaatatc

SEQ ID NO: 232201 - DNA, 285 bp, Homo sapiens
cagtgataaactggatgactctaatgaagaagtaacattattttaccaaataaagtggcataggcatttttctagatcaagagagtatttcagttgactttctcatgttttttttttaagagcatctagcagtttatttaattattttattctattttttatctttaaaatttatcctagctttattgtcattaacaaatgaaaattgtatatctttacagtgtatgatgtgacgttttgatatgtgtacacaccgtgaaatgattaaatcaagcaaattcacat

SEQ ID NO: 232202 - DNA, 652 bp, Homo sapiens
caccgcaacccctgagaggctgtcctgcgctggacaaagaaaggcccatttcactgtgtagctgaatgatgggcatgaatttggatgcagactgcccgagctccaaccctagctccaccctcagatagtgctcatgggaacaaaaattgatacaacccttagggagggaaatttgtatctgccaaatttacaaaatatccaataattccattgctggaacttcatcctccagatatgcctgtgcccacaaaaactgtgatatgtatgagcttattcattgcagcgtggtttgtgataacaaaaatattgtaatatccatcaatataataccggttaagtcagtatattggttaagtcagtgtaatatactggttaagtcagtgcatccaaagaataaaatgtagtggagctatgaaaagaacaagaaagctctttgtgtaatgatagggacacaccccaagatatggagttaatggaagaaagtaaggggcagacactgtgtataatttgcttacatttatgtgaatttaaggaagtaatatatttgtatttgctaccacgtgtgtaatatacaaacatacacagatgttctttcatttacaatgggattatgtcccagtgtacccatcgtaaattaaaaatatcataagta

SEQ ID NO: 232203 - DNA, 637 bp, Homo sapiens
tttttttttaaatagagaaggagtctagctatgtcgcccatgctggtctcgaactcctgacctcaagcaatcctcccgcctctgcctctcaaagtactgagattacaggaataagccaccatgcccagcctgattttaacagttttaattgaacttaagctgaaagtattatcactaaaaatcatcttgattcctttcactaaacctgtggtatgaatccagcttgtattacattctgtatctaaatacaatgaaagcagttcattcgcagaattaataaattccttctggcttttaaaagctttagagcagaaaatgacaagagagccaagaaaaactgtggatcagtgtgctaaatctatgccaaggaagcaccacatacctgcctcatgaaaaagttacagaaaactttaatagctaaagccctctggatggaatccaagagacaccttactctgtattactatttaaatttttagaatccagtatatttctcttctaatagcaagttgataatggtgctgcttctctggaatgcagtacaattggatcttttctacattgaaatatttcatagtaaattatcagcatctttaaaatatgctctcagctaataactgctaccacttaaaaaagg

SEQ ID NO: 232204 - DNA, 427 bp, Homo sapiens
caggaacagaaaacatattagtgttgccaggagcaaaaggtgggggaggtgttgactttcaaagcacaggaggaaattttttgttgttgttctttatcttgattgtgttagtgcccacatgactgtatgcatttctcataattcacagaactgtatactaataagggtgcacttcactgcacataaatgaatctcaacagacaaaaggttaaaaaagaaagaaatctcgggacaggaatcatggatttttgtattatccttgtatttgatggttgtttccagtttggtcactcatctgttcattcctttaacaagtatgtgtcgagtgcctactatgtgctgggcactgtaggttcaatggtaagaaaagcagatacaggactgctcttgtgaagttccttgaaagaaataaaacaaagtgcaaaat

SEQ ID NO: 232205 - DNA, 474 bp, Homo sapiens
ctcaccacattggccaggctggtctcgaactcctgacctcaggtgatctccccaccttgacctcccaaagtgctgggattacaggtgtgagccaccatgccccgccatcatttgtgtttatctctccaatacctagttgactgccacgcagtcagagatatttaaaagatgtttgaatcagttggtggatatgacgtggaaaaaaaatttgatgatcattctttcacatcattttataggcaagtaagtgaagtccagaaaggtaacattttgctttactttttccaagttatcagactgtattacttcaggcattttatcactacagtgctctagattcaggaaaaatattcccttccagtatgttccagaaataatgtgcggaaaccttagagacaggttatttcattaagaccagggttattctagcagaaaatgcctctctggtgtgtagaaagtgaactaagaatagtt

SEQ ID NO: 232206 - DNA, 334 bp, Homo sapiens
attaattttaaattgaactattttttaaaaacctctttggtaaatgaatctcattcctaaaagatttattcatcaaagctccattgtatttccagtgttcttggagctgtgggaaatattacaagagcaatcagaaattaaattcaattgtttcttctgcttagtggggagaatttaactactgtgtctacataatttcttattttctcatgtaggagacccaggcttgataatattctgattaatggttcagtatatttgagaatccaaagacaaaatactaaaacgaagtcaatcaaaaccccctttccctgaatttttgcaggaacaatta

SEQ ID NO: 232207 - DNA, 509 bp, Homo sapiens
aaacatgagccgggtgtggtggtgggagcctgtaatcccagctactcgggagtctgagacaagagaatcacttcaacccgggaggcggaggttgcagtgagccaagatcgcgccattgcactccagcctgggcaacgagagcgaaactccgtctcaaaaaaaaaaaaaaaaaaagattactttctttttatcattcctttatcttttaaagctttcttgcagtcaggtgcagtgtctcatgcctgtaatcccaacactttgggaagctgaggtgggaggatcactcaaggctacaagttcaagaccaacctgggcaatgtagggagacctctgtctctacaaaaaaaattaaaaaatagctggatgtggtagcacacacctgtagccccagctactcaggaggctgaggtgaaaggatcacttgaccccaggagttggaggcagcagtgagctatgactgcaccactgcaccccagcctgggtgatggagcaagaccctgtctcaaaaa

SEQ ID NO: 232208 - DNA, 538 bp, Homo sapiens
aaagagcaccacttgtgtatggccgtgagatagactctacacagtcccatcatttcttcaaaactctttctgcaagaccaggacatccacaactttaatcactttgtatgaaatgctattttaatgaattttatttttgctcagattgtgacataagtgttccaggtttgtgactcagagttaccagtagcctgagtcttttcctcttcttgaagctattggtatcatctatcaaaataaagataagtatagaacaaatacataaaaatataaattagatgaaggtggaaatattttttaatattgattttgagtttctgctgtatgttgtaaccattgaaaaatcaacacattttgttatttaataattgtttatcaatatttcttactccattaagctctgcccaagggtataagcttatatattacacattctcttgtactttgcaaaattggtttaatttcacaacacatcagagatttatctcaagttaaacagaagaaacaaaaatgcacaaagaaaagacatttctgcaat

SEQ ID NO: 232209 - DNA, 135 bp, Homo sapiens
tccggggcctcgctgaggtctcttcgctgctacttctgggacaaagaccactgctcacttggagcctggatctgaggaacgcaaaggcattaagttgctaatacatttttggaatggggtcaaggtagaagagtg

SEQ ID NO: 232210 - DNA, 214 bp, Homo sapiens
caattcaaagttggagacaaaaaagtgagctgttagctgtgtctgactttattccattcaagctcttctcagcctggtgcagctgtgtggggccaaggaagggccgagtgacatgagcaccacctgccatgcagtcggtggcgaggaagcttccagggatctgacagatgtgtcatacagaatgtaacttctagacaatgatgggcaaataata

SEQ ID NO: 232211 - DNA, 484 bp, Homo sapiens
tttgttattcagaatattttattttaaactacaaattagcacagctaatttgaatatttaaatttccgtaagcactgtaaattgaatacattttttcttaatgatatagtttttttcctaaaaatcctaggcatattcagacttaattcaaatgggttgtctaaaaccagacaatacagatgtggagccatttgtggtagatggacgtgtatatcttgcagaagtctccaatggccttaaaaagcattattattggacatcaacttatggagaatcttatgaccactcatctaatgcaggttttgctcttgttccagtaggtcaacagccatgaaaaagtagctgtaaaataattttcatacacttgtcttattgtttcacagagattaatattctatagcctattttcttttataaattaaaacaagttacttttttcaaatgtgtaaaagataatgactgtattaaactttgtataactgtc

SEQ ID NO: 232212 - DNA, 2765 bp, Homo sapiens
  misc_feature (2756)..(2756): n is a, c, g, or t
  misc_feature (2758)..(2761): n is a, c, g, or t
  misc_feature (2764)..(2765): n is a, c, g, or t
atccagatgtcacctccttcaggaagccctccctggtggccccgccctttgggagcacaaaaccctttatgctcccaaagcccaacgcctttatcatgtgctgatgctactctgcttcttcgctggcccggcaggccggtgcacactttgtaggagcgggctttgtcataatcttctttgtagccccagccctagctcagcagcggagcccctcaaacctcgggaactcctccctgcaaaggagccaggacgccctccctcaggctgcctttaaccaggcagggtgacaaaggacctccacagagtaggcggtcactgccttagcagtgaggcctcagggcccgggcaggcacagccagcgggactcgaagcaggctggcgccgaggctcgtgtagccgcctcacagctgcaggcggactgtaagtgcgcgcgcggtcgccatggcagcgcagccgccgcggccagtgggtgagaggagcatggggagctcccgggaggccgcccgtgcgccggccaggtccccggcttgggcctccactcaggccagtactccgggcgcggccctggcggtccagcgcgaatctccagaatctggtctccagaaacattattctaatctgtgtatggaaaaatcccagaaaattaatccttttatattgcatatactccaagaagtggatgaagaaattaaaaaggggctagcagcaggaatcacattaaacattgctggtaacaatcgcttagtgccagtagaaagagttacaggtgaagatttttggattctttccaaaattttaaagaattgtctgtatattaatggtttggatgttggatataaccttctatgtgatgttggtgcatactatgctgcgaaactgcttcagaaacaacttaatctcatttacttaaacctcatgtttaatgatattgggcccgaaggtggagaattgattgctaaagtgctacataagaatcggactctgaaatacctaagaatgactggaaacaaaattgaaaataaaggtggaatgttttttgctgcaatgctgcaaattaattcatcattagagaaattagatctgggtgactgtgatctgggaatgcaaagtgtgatagcatttgctacagtactaactcaaaaccaagcaattaaggcaataaacctaaaccgacctatactgtacagtgaacaggaagagtctacagtccatgtaggccgcatgttgaaagaaaatcactgtcttgttgcactacacatgtgtaagcatgatataaaaaacagtggtatacaacagttatgtgatgcactgtatctgaacagtagcctgcgctaccttgatgtcagctgcaacaaaataactcatgatggaatggtgtatttggctgatgtactgaaaagcaacactaccctggaagtaatagatctttcctttaacagaatagaaaatgcaggcgcaaactatctcagtgaaactcttacttcacacaacaggagtcttaaagcgttagtatggttttatatttaatcaaaataacagaaaagcaaatttttaaatactaacctcaatccccttaactcttaagattataatgaaatatgaaaactcagcttctaaactgacatagtattaagttacagtaaacatttacatttctatttttcaaatgtaatgtcttttacaattagactgattctattaacgattccttcaaattaatgagaaaatttgcattgcttatattacttatcctgaattctaatagaaaactcagaagcattcaatatgatcaagacttaaaagtaagaatgaactaaagaataaaatacttggatgcatttatccagaaaaatatatctgctatccacccaaacatttactgaataatataaaacagaagactttcaaaatgtagttagctctactaagtaccttaaggatctaattagaaaactaagtttcttggattttaggaattaaatggtcagtatttttaccactacattacaacatactgaagaataatgctaagactacacaagaaagtgtttgtaataaatgttgctaatttttgtattctttccttgtggaattattggtttcaggttgtcagtagtcagcaacaacatagagggagaaggacttgttgcactttcacaatcaatgaaaacaaatctcactttctctcatatctacatttggggaaacaaatttgatgaggctacgtgtatagtaagttttaagttttttccttcactgaaggctttttctgggatcatctctgtaacatcagatattatttacaggtgcctcagaaatggttacacagtgagacactgcagttttgataattaacataagtcttaaaattaactactagagagtttggtggttcaaataaccaaagatattaaaactatgtattagtattacacatcactgaatgacacagttctaattcctctaaggttaagaaaaatcataattattgatcagatgtagcaaaatttctgatctgctccctaataattataccaaaatatggaatgggagagatagagtacaagctatcaaaatatttggcatgttgctcacataaatacagacagcctttgatactactttcaaaacagaaataatggtaacagttttcatttggaaagaacgagggggaaaaagtagatgttaaaattctcaaaatttgcaaaaggactaacaaaaattccaccactaaaaagagtaataaaacatagagngnnnnctnn

SEQ ID NO: 232213 - DNA, 2605 bp, Homo sapiens
  misc_feature (2596)..(2596): n is a, c, g, or t
  misc_feature (2598)..(2601): n is a, c, g, or t
  misc_feature (2604)..(2605): n is a, c, g, or t
atccagatgtcacctccttcaggaagccctccctggtggccccgccctttgggagcacaaaaccctttatgctcccaaagcccaacgcctttatcatgtgctgatgctactctgcttcttcgctggcccggcaggccggtgcacactttgtaggagcgggctttgtcataatcttctttgtagccccagccctagctcagcagcggagcccctcaaacctcgggaactcctccctgcaaaggagccaggacgccctccctcaggctgcctttaaccaggcagggtgacaaaggacctccacagagtaggcggtcactgccttagcagtgaggcctcagggcccgggcaggcacagccagcgggactcgaagcaggctggcgccgaggctcgtgtagccgcctcacagctgcaggcggactaatctccagaatctggtctccagaaacattattctaatctgtgtatggaaaaatcccagaaaattaatccttttatattgcatatactccaagaagtggatgaagaaattaaaaaggggctagcagcaggaatcacattaaacattgctggtaacaatcgcttagtgccagtagaaagagttacaggtgaagatttttggattctttccaaaattttaaagaattgtctgtatattaatggtttggatgttggatataaccttctatgtgatgttggtgcatactatgctgcgaaactgcttcagaaacaacttaatctcatttacttaaacctcatgtttaatgatattgggcccgaaggtggagaattgattgctaaagtgctacataagaatcggactctgaaatacctaagaatgactggaaacaaaattgaaaataaaggtggaatgttttttgctgcaatgctgcaaattaattcatcattagagaaattagatctgggtgactgtgatctgggaatgcaaagtgtgatagcatttgctacagtactaactcaaaaccaagcaattaaggcaataaacctaaaccgacctatactgtacagtgaacaggaagagtctacagtccatgtaggccgcatgttgaaagaaaatcactgtcttgttgcactacacatgtgtaagcatgatataaaaaacagtggtatacaacagttatgtgatgcactgtatctgaacagtagcctgcgctaccttgatgtcagctgcaacaaaataactcatgatggaatggtgtatttggctgatgtactgaaaagcaacactaccctggaagtaatagatctttcctttaacagaatagaaaatgcaggcgcaaactatctcagtgaaactcttacttcacacaacaggagtcttaaagcgttagtatggttttatatttaatcaaaataacagaaaagcaaatttttaaatactaacctcaatccccttaactcttaagattataatgaaatatgaaaactcagcttctaaactgacatagtattaagttacagtaaacatttacatttctatttttcaaatgtaatgtcttttacaattagactgattctattaacgattccttcaaattaatgagaaaatttgcattgcttatattacttatcctgaattctaatagaaaactcagaagcattcaatatgatcaagacttaaaagtaagaatgaactaaagaataaaatacttggatgcatttatccagaaaaatatatctgctatccacccaaacatttactgaataatataaaacagaagactttcaaaatgtagttagctctactaagtaccttaaggatctaattagaaaactaagtttcttggattttaggaattaaatggtcagtatttttaccactacattacaacatactgaagaataatgctaagactacacaagaaagtgtttgtaataaatgttgctaatttttgtattctttccttgtggaattattggtttcaggttgtcagtagtcagcaacaacatagagggagaaggacttgttgcactttcacaatcaatgaaaacaaatctcactttctctcatatctacatttggggaaacaaatttgatgaggctacgtgtatagtaagttttaagttttttccttcactgaaggctttttctgggatcatctctgtaacatcagatattatttacaggtgcctcagaaatggttacacagtgagacactgcagttttgataattaacataagtcttaaaattaactactagagagtttggtggttcaaataaccaaagatattaaaactatgtattagtattacacatcactgaatgacacagttctaattcctctaaggttaagaaaaatcataattattgatcagatgtagcaaaatttctgatctgctccctaataattataccaaaatatggaatgggagagatagagtacaagctatcaaaatatttggcatgttgctcacataaatacagacagcctttgatactactttcaaaacagaaataatggtaacagttttcatttggaaagaacgagggggaaaaagtagatgttaaaattctcaaaatttgcaaaaggactaacaaaaattccaccactaaaaagagtaataaaacatagagngnnnnctnn

SEQ ID NO: 232214 - DNA, 2647 bp, Homo sapiens
  misc_feature (2638)..(2638): n is a, c, g, or t
  misc_feature (2640)..(2643): n is a, c, g, or t
  misc_feature (2646)..(2647): n is a, c, g, or t
atccagatgtcacctccttcaggaagccctccctggtggccccgccctttgggagcacaaaaccctttatgctcccaaagcccaacgcctttatcatgtgctgatgctactctgcttcttcgctggcccggcaggccggtgcacactttgtaggagcgggctttgtcataatcttctttgtagccccagccctagctcagcagcggagcccctcaaacctcgggaactcctccctgcaaaggagccaggacgccctccctcaggctgcctttaaccaggcagggtgacaaaggacctccacagagtaggcggtcactgccttagcagtgaggcctcagggcccgggcaggcacagccagcgggactcgaagcaggctggcgccgaggctcgtgtagccgcctcacagctgcaggcggactgtaagtgcgcgcgcggtcgccatggcagcgcagccgccgcggccagtgggtgagaggagcatggggagctcccgggaggccgcccgtgcgccggccaggtccccggcttgggcctccactcaggccagtactccgggcgcggccctggcggtccagcgcggctagcagcaggaatcacattaaacattgctggtaacaatcgcttagtgccagtagaaagagttacaggtgaagatttttggattctttccaaaattttaaagaattgtctgtatattaatggtttggatgttggatataaccttctatgtgatgttggtgcatactatgctgcgaaactgcttcagaaacaacttaatctcatttacttaaacctcatgtttaatgatattgggcccgaaggtggagaattgattgctaaagtgctacataagaatcggactctgaaatacctaagaatgactggaaacaaaattgaaaataaaggtggaatgttttttgctgcaatgctgcaaattaattcatcattagagaaattagatctgggtgactgtgatctgggaatgcaaagtgtgatagcatttgctacagtactaactcaaaaccaagcaattaaggcaataaacctaaaccgacctatactgtacagtgaacaggaagagtctacagtccatgtaggccgcatgttgaaagaaaatcactgtcttgttgcactacacatgtgtaagcatgatataaaaaacagtggtatacaacagttatgtgatgcactgtatctgaacagtagcctgcgctaccttgatgtcagctgcaacaaaataactcatgatggaatggtgtatttggctgatgtactgaaaagcaacactaccctggaagtaatagatctttcctttaacagaatagaaaatgcaggcgcaaactatctcagtgaaactcttacttcacacaacaggagtcttaaagcgttagtatggttttatatttaatcaaaataacagaaaagcaaatttttaaatactaacctcaatccccttaactcttaagattataatgaaatatgaaaactcagcttctaaactgacatagtattaagttacagtaaacatttacatttctatttttcaaatgtaatgtcttttacaattagactgattctattaacgattccttcaaattaatgagaaaatttgcattgcttatattacttatcctgaattctaatagaaaactcagaagcattcaatatgatcaagacttaaaagtaagaatgaactaaagaataaaatacttggatgcatttatccagaaaaatatatctgctatccacccaaacatttactgaataatataaaacagaagactttcaaaatgtagttagctctactaagtaccttaaggatctaattagaaaactaagtttcttggattttaggaattaaatggtcagtatttttaccactacattacaacatactgaagaataatgctaagactacacaagaaagtgtttgtaataaatgttgctaatttttgtattctttccttgtggaattattggtttcaggttgtcagtagtcagcaacaacatagagggagaaggacttgttgcactttcacaatcaatgaaaacaaatctcactttctctcatatctacatttggggaaacaaatttgatgaggctacgtgtatagtaagttttaagttttttccttcactgaaggctttttctgggatcatctctgtaacatcagatattatttacaggtgcctcagaaatggttacacagtgagacactgcagttttgataattaacataagtcttaaaattaactactagagagtttggtggttcaaataaccaaagatattaaaactatgtattagtattacacatcactgaatgacacagttctaattcctctaaggttaagaaaaatcataattattgatcagatgtagcaaaatttctgatctgctccctaataattataccaaaatatggaatgggagagatagagtacaagctatcaaaatatttggcatgttgctcacataaatacagacagcctttgatactactttcaaaacagaaataatggtaacagttttcatttggaaagaacgagggggaaaaagtagatgttaaaattctcaaaatttgcaaaaggactaacaaaaattccaccactaaaaagagtaataaaacatagagngnnnnctnn

SEQ ID NO: 232215 - DNA, 2319 bp, Homo sapiens
atccagatgtcacctccttcaggaagccctccctggtggccccgccctttgggagcacaaaaccctttatgctcccaaagcccaacgcctttatcatgtgctgatgctactctgcttcttcgctggcccggcaggccggtgcacactttgtaggagcgggctttgtcataatcttctttgtagccccagccctagctcagcagcggagcccctcaaacctcgggaactcctccctgcaaaggagccaggacgccctccctcaggctgcctttaaccaggcagggtgacaaaggacctccacagagtaggcggtcactgccttagcagtgaggcctcagggcccgggcaggcacagccagcgggactcgaagcaggctggcgccgaggctcgtgtagccgcctcacagctgcaggcggactgtaagtgcgcgcgcggtcgccatggcagcgcagccgccgcggccagtgggtgagaggagcatggggagctcccgggaggccgcccgtgcgccggccaggtccccggcttgggcctccactcaggccagtactccgggcgcggccctggcggtccagcgcgaatctccagaatctggtctccagaaacattattctaatctgtgtatggaaaaatcccagaaaattaatccttttatattgcatatactccaagaagtggatgaagaaattaaaaaggggctagcagcaggaatcacattaaacattgctggtaacaatcgcttagtgccagtagaaagagttacaggtgaagatttttggattctttccaaaattttaaagaattgtctgtatattaatggtttggatgttggatataaccttctatgtgatgttggtgcatactatgctgcgaaactgcttcagaaacaacttaatctcatttacttaaacctcatgtttaatgatattgggcccgaaggtggagaattgattgctaaagtgctacataagaatcggactctgaaatacctaagaatgactggaaacaaaattgaaaataaaggtggaatgttttttgctgcaatgctgcaaattaattcatcattagagaaattagatctgggtgactgtgatctgggaatgcaaagtgtgatagcatttgctacagtactaactcaaaaccaagcaattaaggcaataaacctaaaccgacctatactgtacagtgaacaggaagagtctacagtccatgtaggccgcatgttgaaagaaaatcactgtcttgttgcactacacatgtgtaagcatgatataaaaaacagtggtatacaacagttatgtgatgcactgtatctgaacagtagcctgcgctaccttgatgtcagctgcaacaaaataactcatgatggaatggtgtatttggctgatgtactgaaaagcaacactaccctggaagtaatagatctttcctttaacagaatagaaaatgcaggcgcaaactatctcagtgaaactcttacttcacacaacaggagtcttaaagcgttgtcagtagtcagcaacaacatagagggagaaggacttgttgcactttcacaatcaatgaaaacaaatctcactttctctcatatctacatttggggaaacaaatttgatgaggctacgtgtatagcatattcagacttaattcaaatgggttgtctaaaaccagacaatacagatgtggagccatttgtggtagatggacgtgtatatcttgcagaagtctccaatggccttaaaaagcattattattggacatcaacttatggagaatcttatgaccactcatctaatgcaggttttgctcttgttccagtaggtcaacagccatgaaaaagtagctgtaaaataattttcatacacttgtcttattgtttcacagagattaatattctatagcctattttcttttataaattaaaacaagttacttttttcaaatgtgtaaaagataatgactgtattaaactttgtataactgtctattgtgaaaaactgagtagggtaattttttaaaagaaattttacaatatagagactaaaattctaaccctggagaaagagaccaaggaactagactaaatttctttttataatgaaaatataaccaagtagtgaaatagcgtacaagtaaaggtcattgtaggtatctaactgaaagttattaagtagtattaataaaaaggtttgtggtagaaaattaccagtgactttcaaagggtttcaaagttcagaagttgaaaaagtattctacctatcctatttacgtgttacagacaggtgttactaacaatttcataaatacaggcaaatata

SEQ ID NO: 232216 - DNA, 1641 bp, Homo sapiens
atccagatgtcacctccttcaggaagccctccctggtggccccgccctttgggagcacaaaaccctttatgctcccaaagcccaacgcctttatcatgtgctgatgctactctgcttcttcgctggcccggcaggccggtgcacactttgtaggagcgggctttgtcataatcttctttgtagccccagccctagctcagcagcggagcccctcaaacctcgggaactcctccctgcaaaggagccaggacgccctccctcaggctgcctttaaccaggcagggtgacaaaggacctccacagagtaggcggtcactgccttagcagtgaggcctcagggcccgggcaggcacagccagcgggactcgaagcaggctggcgccgaggctcgtgtagccgcctcacagctgcaggcggactgtaagtgcgcgcgcggtcgccatggcagcgcagccgccgcggccagtgggtgagaggagcatggggagctcccgggaggccgcccgtgcgccggccaggtccccggcttgggcctccactcaggccagtactccgggcgcggccctggcggtccagcgcgaatctccagaatctggtctccagaaacattattctaatctgtgtatggaaaaatcccagaaaattaatccttttatattgcatatactccaagaagtggatgaagaaattaaaaaggggctagcagcaggaatcacattaaacattgctggtaacaatcgcttagtgccagtagaaagagttacaggtgaagatttttggattctttccaaaattttaaagaattgtctgtatattaatggtttggatgttggatataaccttctatgtgatgttggtgcatactatgctgcgaaactgcttcagaaacaacttaatctcatttacttaaacctcatgtttaatgatattgggcccgaaggtggagaattgattgctaaagtgctacataagaatcggactctgaaatacctaagaatgactggaaacaaaattgaaaataaaggtggaatgttttttgctgcaatgctgcaaattaattcatcattagagaaattagatctgggtgactgtgatctgggaatgcaaagtgtgatagcatttgctacagtactaactcaaaaccaagcaattaaggcaataaacctaaaccgacctatactgtacagtgaacaggaagagtctacagtccatgtaggccgcatgttgaaagaaaatcactgtcttgttgcactacacatgtgtaagcatgatataaaaaacagtggtatacaacagttatgtgatgcactgtatctgaacagtagcctgcgctaccttgatgtcagctggtaagtgataatttacacattaataattcaaagttaaataatgggaataatctatataaatattcatggtacttgggatacgttgttagacattatttccaatgattagaaactgcaaccaattgtcaatcctttgtcctaagctttaatatttaatactgctatcttttagtaacataaatgagcaatttagttgtgtaaacaagaatgaaagcaatattttatggtgaattttcattaactttcttggaaatcaagtggttaaaataaacctttactaaaacagaaagta

SEQ ID NO: 232217 - DNA, 473 bp, Homo sapiens
atattttagaaataagattttatccacttttaggaagagtctacagtccatgtaggccgcatgttgaaagaaaatcactgtcttgttgcactacacatgtgtaagcatgatataaaaaacagtggtatacaacagttatgtgatgcactgtatctgaacagtagcctgcgctaccttgatgtcagctggtaagtgataatttacacattaataattcaaagttaaataatgggaataatctatataaatattcatggtacttgggatacgttgttagacattatttccaatgattagaaactgcaaccaattgtcaatcctttgtcctaagctttaatatttaatactgctatcttttagtaacataaatgagcaatttagttgtgtaaacaagaatgaaagcaatattttatggtgaattttcattaactttcttggaaatcaagtggttaaaataaacctttactaaaaca

SEQ ID NO: 232218 - DNA, 2670 bp, Homo sapiens
  misc_feature (2661)..(2661): n is a, c, g, or t
  misc_feature (2663)..(2666): n is a, c, g, or t
  misc_feature (2669)..(2670): n is a, c, g, or t
atccagatgtcacctccttcaggaagccctccctggtggccccgccctttgggagcacaaaaccctttatgctcccaaagcccaacgcctttatcatgtgctgatgctactctgcttcttcgctggcccggcaggccggtgcacactttgtaggagcgggctttgtcataatcttctttgtagccccagccctagctcagcagcggagcccctcaaacctcgggaactcctccctgcaaaggagccaggacgccctccctcaggctgcctttaaccaggcagggtgacaaaggacctccacagagtaggcggtcactgccttagcagtgaggcctcagggcccgggcaggcacagccagcgggactcgaagcaggctggcgccgaggctcgtgtagccgcctcacagctgcaggcggactgtaagtgcgcgcgcggtcgccatggcagcgcagccgccgcggccagtgggtgagaggagcatggggagctcccgggaggccgcccgtgcgccggccaggtccccggcttgggcctccactcaggccagtactccgggcgcggccctggcggtccagcgcgaatctccagaatctggtctccagaaacattattctaatctgtgtatggaaaaatcccagaaaattaatccttttatattgcatatactccaagaagtggatgaagaaattaaaaaggggctagcagcaggaatcacattaaacattgctggtaacaatcgcttagtgccagtagaaagagttacaggtgaagatttttggattctttccaaaattttaaagaattgtctgtatattaatggtttggatgttggatataaccttctatgtgatgttggtgcatactatgctgcgaaactgcttcagaaacaacttaatctcatttacttaaacctcatgtttaatgatattgggcccgaaggtggagaattgattgctaaagtgctacataagaatcggactctgaaatacctaagaatgactggaaacaaaattgaaaataaaggtggaatgttttttgctgcaatgctgcaaattaattcatcattagagaaattagatctgggtgactgtgatctgggaagagtctacagtccatgtaggccgcatgttgaaagaaaatcactgtcttgttgcactacacatgtgtaagcatgatataaaaaacagtggtatacaacagttatgtgatgcactgtatctgaacagtagcctgcgctaccttgatgtcagctgcaacaaaataactcatgatggaatggtgtatttggctgatgtactgaaaagcaacactaccctggaagtaatagatctttcctttaacagaatagaaaatgcaggcgcaaactatctcagtgaaactcttacttcacacaacaggagtcttaaagcgttagtatggttttatatttaatcaaaataacagaaaagcaaatttttaaatactaacctcaatccccttaactcttaagattataatgaaatatgaaaactcagcttctaaactgacatagtattaagttacagtaaacatttacatttctatttttcaaatgtaatgtcttttacaattagactgattctattaacgattccttcaaattaatgagaaaatttgcattgcttatattacttatcctgaattctaatagaaaactcagaagcattcaatatgatcaagacttaaaagtaagaatgaactaaagaataaaatacttggatgcatttatccagaaaaatatatctgctatccacccaaacatttactgaataatataaaacagaagactttcaaaatgtagttagctctactaagtaccttaaggatctaattagaaaactaagtttcttggattttaggaattaaatggtcagtatttttaccactacattacaacatactgaagaataatgctaagactacacaagaaagtgtttgtaataaatgttgctaatttttgtattctttccttgtggaattattggtttcaggttgtcagtagtcagcaacaacatagagggagaaggacttgttgcactttcacaatcaatgaaaacaaatctcactttctctcatatctacatttggggaaacaaatttgatgaggctacgtgtatagtaagttttaagttttttccttcactgaaggctttttctgggatcatctctgtaacatcagatattatttacaggtgcctcagaaatggttacacagtgagacactgcagttttgataattaacataagtcttaaaattaactactagagagtttggtggttcaaataaccaaagatattaaaactatgtattagtattacacatcactgaatgacacagttctaattcctctaaggttaagaaaaatcataattattgatcagatgtagcaaaatttctgatctgctccctaataattataccaaaatatggaatgggagagatagagtacaagctatcaaaatatttggcatgttgctcacataaatacagacagcctttgatactactttcaaaacagaaataatggtaacagttttcatttggaaagaacgagggggaaaaagtagatgttaaaattctcaaaatttgcaaaaggactaacaaaaattccaccactaaaaagagtaataaaacatagagngnnnnctnn

SEQ ID NO: 232219 - DNA, 2919 bp, Homo sapiens
atccagatgtcacctccttcaggaagccctccctggtggccccgccctttgggagcacaaaaccctttatgctcccaaagcccaacgcctttatcatgtgctgatgctactctgcttcttcgctggcccggcaggccggtgcacactttgtaggagcgggctttgtcataatcttctttgtagccccagccctagctcagcagcggagcccctcaaacctcgggaactcctccctgcaaaggagccaggacgccctccctcaggctgcctttaaccaggcagggtgacaaaggacctccacagagtaggcggtcactgccttagcagtgaggcctcagggcccgggcaggcacagccagcgggactcgaagcaggctggcgccgaggctcgtgtagccgcctcacagctgcaggcggactgtaagtgcgcgcgcggtcgccatggcagcgcagccgccgcggccagtgggtgagaggagcatggggagctcccgggaggccgcccgtgcgccggccaggtccccggcttgggcctccactcaggccagtactccgggcgcggccctggcggtccagcgcgaatctccagaatctggtctccagaaacattattctaatctgtgtatggaaaaatcccagaaaattaatccttttatattgcatatactccaagaagtggatgaagaaattaaaaaggggctagcagcaggaatcacattaaacattgctggtaacaatcgcttagtgccagtagaaagagttacaggtgaagatttttggattctttccaaaattttaaagaattgtctgtatattaatggtttggatgttggatataaccttctatgtgatgttggtgcatactatgctgcgaaactgcttcagaaacaacttaatctcatttacttaaacctcatgtttaatgatattgggcccgaaggtggagaattgattgctaaagtgctacataagaatcggactctgaaatacctaagaatgactggaaacaaaattgaaaataaaggtggaatgttttttgctgcaatgctgcaaattaattcatcattagagaaattagatctgggtgactgtgatctgggaatgcaaagtgtgatagcatttgctacagtactaactcaaaaccaagcaattaaggcaataaacctaaaccgacctatactgtacagtgaacaggaagagtctacagtccatgtaggccgcatgttgaaagaaaatcactgtcttgttgcactacacatgtgtaagcatgatataaaaaacagtggtatacaacagttatgtgatgcactgtatctgaacagtagcctgcgctaccttgatgtcagctgcaacaaaataactcatgatggaatggtgtatttggctgatgtactgaaaagcaacactaccctggaagtaatagatctttcctttaacagaatagaaaatgcaggcgcaaactatctcagtgaaactcttacttcacacaacaggagtcttaaagcgttagtatggttttatatttaatcaaaataacagaaaagcaaatttttaaatactaacctcaatccccttaactcttaagattataatgaaatatgaaaactcagcttctaaactgacatagtattaagttacagtaaacatttacatttctatttttcaaatgtaatgtcttttacaattagactgattctattaacgattccttcaaattaatgagaaaatttgcattgcttatattacttatcctgaattctaatagaaaactcagaagcattcaatatgatcaagacttaaaagtaagaatgaactaaagaataaaatacttggatgcatttatccagaaaaatatatctgctatccacccaaacatttactgaataatataaaacagaagactttcaaaatgtagttagctctactaagtaccttaaggatctaattagaaaactaagtttcttggattttaggaattaaatggtcagtatttttaccactacattacaacatactgaagaataatgctaagactacacaagaaagtgtttgtaataaatgttgctaatttttgtattctttccttgtggaattattggtttcaggttgtcagtagtcagcaacaacatagagggagaaggacttgttgcactttcacaatcaatgaaaacaaatctcactttctctcatatctacatttggggaaacaaatttgatgaggctacgtgtatagcatattcagacttaattcaaatgggttgtctaaaaccagacaatacagatgtggagccatttgtggtagatggacgtgtatatcttgcagaagtctccaatggccttaaaaagcattattattggacatcaacttatggagaatcttatgaccactcatctaatgcaggttttgctcttgttccagtaggtcaacagccatgaaaaagtagctgtaaaataattttcatacacttgtcttattgtttcacagagattaatattctatagcctattttcttttataaattaaaacaagttacttttttcaaatgtgtaaaagataatgactgtattaaactttgtataactgtctattgtgaaaaactgagtagggtaattttttaaaagaaattttacaatatagagactaaaattctaaccctggagaaagagaccaaggaactagactaaatttctttttataatgaaaatataaccaagtagtgaaatagcgtacaagtaaaggtcattgtaggtatctaactgaaagttattaagtagtattaataaaaaggtttgtggtagaaaattaccagtgactttcaaagggtttcaaagttcagaagttgaaaaagtattctacctatcctatttacgtgttacagacaggtgttactaacaatttcataaatacaggcaaatata

SEQ ID NO: 232220 - DNA, 2586 bp, Homo sapiens
atccagatgtcacctccttcaggaagccctccctggtggccccgccctttgggagcacaaaaccctttatgctcccaaagcccaacgcctttatcatgtgctgatgctactctgcttcttcgctggcccggcaggccggtgcacactttgtaggagcgggctttgtcataatcttctttgtagccccagccctagctcagcagcggagcccctcaaacctcgggaactcctccctgcaaaggagccaggacgccctccctcaggctgcctttaaccaggcagggtgacaaaggacctccacagagtaggcggtcactgccttagcagtgaggcctcagggcccgggcaggcacagccagcgggactcgaagcaggctggcgccgaggctcgtgtagccgcctcacagctgcaggcggactgtaagtgcgcgcgcggtcgccatggcagcgcagccgccgcggccagtgggtgagaggagcatggggagctcccgggaggccgcccgtgcgccggccaggtccccggcttgggcctccactcaggccagtactccgggcgcggccctggcggtccagcgcgaatctccagaatctggtctccagaaacattattctaatctgtgtatggaaaaatcccagaaaattaatccttttatattgcatatactccaagaagtggatgaagaaattaaaaaggggctagcagcaggaatcacattaaacattgctggtaacaatcgcttagtgccagtagaaagagttacaggtgaagatttttggattctttccaaaattttaaagaattgtctgtatattaatggtttggatgttggatataaccttctatgtgatgttggtgcatactatgctgcgaaactgcttcagaaacaacttaatctcatttacttaaacctcatgtttaatgatattgggcccgaaggtggagaattgattgctaaagtgctacataagaatcggactctgaaatacctaagaatgactggaaacaaaattgaaaataaaggtggaatgttttttgctgcaatgctgcaaattaattcatcattagagaaattagatctgggtgactgtgatctgggaatgcaaagtgtgatagcatttgctacagtactaactcaaaaccaagcaattaaggcaataaacctaaaccgacctatactgtacagtgaacaggaagagtctacagtccatgtaggccgcatgttgaaagaaaatcactgtcttgttgcactacacatgtgtaagcatgatataaaaaacagtggtatacaacagttatgtgatgcactgtatctgaacagtagcctgcgctaccttgatgtcagctgcaacaaaataactcatgatggaatggtgtatttggctgatgtactgaaaagcaacactaccctggaagtaatagatctttcctttaacagaatagaaaatgcaggcgcaaactatctcagtgaaactcttacttcacacaacaggagtcttaaagcgttagtatggttttatatttaatcaaaataacagaaaagcaaatttttaaatactaacctcaatccccttaactcttaagattataatgaaatatgaaaactcagcttctaaactgacatagtattaagttacagtaaacatttacatttctatttttcaaatgtaatgtcttttacaattagactgattctattaacgattccttcaaattaatgagaaaatttgcattgcttatattacttatcctgaattctaatagaaaactcagaagcattcaatatgatcaagacttaaaagtaagaatgaactaaagaataaaatacttggatgcatttatccagaaaaatatatctgctatccacccaaacatttactgaataatataaaacagaagactttcaaaatgtagttagctctactaagtaccttaaggatctaattagaaaactaagtttcttggattttaggaattaaatggtcagtatttttaccactacattacaacatactgaagaataatgctaagactacacaagaaagtgtttgtaataaatgttgctaatttttgtattctttccttgtggaattattggtttcaggttgtcagtagtcagcaacaacatagagggagaaggacttgttgcactttcacaatcaatgaaaacaaatctcactttctctcatatctacatttggggaaacaaatttgatgaggctacgtgtatagcatattcagacttaattcaaatgggttgtctaaaaccagacaatacagatgtggagccatttgtggtagatggacgtgtatatcttgcagaagtctccaatggccttaaaaagcattattattggacatcaacttatggagaatcttatgaccactcatctaatgcaggttttgctcttgttccagtaggtcaacagccatgaaaaagtagctgtaaaataattttcatacacttgtcttattgtttcacagagattaatattctatagcctattttcttttataaattaaaacaagttacttttttcaaatgtgtaaaagataatgactgtattaaactttgtataactgtc

SEQ ID NO: 232221 - DNA, 1941 bp, Homo sapiens
atccagatgtcacctccttcaggaagccctccctggtggccccgccctttgggagcacaaaaccctttatgctcccaaagcccaacgcctttatcatgtgctgatgctactctgcttcttcgctggcccggcaggccggtgcacactttgtaggagcgggctttgtcataatcttctttgtagccccagccctagctcagcagcggagcccctcaaacctcgggaactcctccctgcaaaggagccaggacgccctccctcaggctgcctttaaccaggcagggtgacaaaggacctccacagagtaggcggtcactgccttagcagtgaggcctcagggcccgggcaggcacagccagcgggactcgaagcaggctggcgccgaggctcgtgtagccgcctcacagctgcaggcggactgtaagtgcgcgcgcggtcgccatggcagcgcagccgccgcggccagtgggtgagaggagcatggggagctcccgggaggccgcccgtgcgccggccaggtccccggcttgggcctccactcaggccagtactccgggcgcggccctggcggtccagcgcgaatctccagaatctggtctccagaaacattattctaatctgtgtatggaaaaatcccagaaaattaatccttttatattgcatatactccaagaagtggatgaagaaattaaaaaggggctagcagcaggaatcacattaaacattgctggtaacaatcgcttagtgccagtagaaagagttacaggtgaagatttttggattctttccaaaattttaaagaattgtctgtatattaatggtttggatgttggatataaccttctatgtgatgttggtgcatactatgctgcgaaactgcttcagaaacaacttaatctcatttacttaaacctcatgtttaatgatattgggcccgaaggtggagaattgattgctaaagtgctacataagaatcggactctgaaatacctaagaatgactggaaacaaaattgaaaataaaggtggaatgttttttgctgcaatgctgcaaattaattcatcattagagaaattagatctgggtgactgtgatctgggaagagtctacagtccatgtaggccgcatgttgaaagaaaatcactgtcttgttgcactacacatgtgtaagcatgatataaaaaacagtggtatacaacagttatgtgatgcactgtatctgaacagtagcctgcgctaccttgatgtcagctggcatattcagacttaattcaaatgggttgtctaaaaccagacaatacagatgtggagccatttgtggtagatggacgtgtatatcttgcagaagtctccaatggccttaaaaagcattattattggacatcaacttatggagaatcttatgaccactcatctaatgcaggttttgctcttgttccagtaggtcaacagccatgaaaaagtagctgtaaaataattttcatacacttgtcttattgtttcacagagattaatattctatagcctattttcttttataaattaaaacaagttacttttttcaaatgtgtaaaagataatgactgtattaaactttgtataactgtctattgtgaaaaactgagtagggtaattttttaaaagaaattttacaatatagagactaaaattctaaccctggagaaagagaccaaggaactagactaaatttctttttataatgaaaatataaccaagtagtgaaatagcgtacaagtaaaggtcattgtaggtatctaactgaaagttattaagtagtattaataaaaaggtttgtggtagaaaattaccagtgactttcaaagggtttcaaagttcagaagttgaaaaagtattctacctatcctatttacgtgttacagacaggtgttactaacaatttcataaatacaggcaaatata

SEQ ID NO: 232222 - DNA, 379 bp, Homo sapiens
agaaggaaccaactctgctaactccttgatttccaacttctagccttcagaaccgtgacagtgtaaatttctgctgttttaagcctcctagtttgtagtattaggtcggtgcaaaagcagctctggtttttgccattaaaaccacagttgcttttgtgccaacctaatactttgctatggtggccctaggaaacgaatgctgtgacctcagccaacttggttagacttttcaacctccctttcttcgtctataaagtgggcatcttgtagactttattcttgagaggcattgaaaaattaagaaaaatccagcctgcagactattggggatattgcctggcacatagttggtgctcaataaattgtagttattattaaa

SEQ ID NO: 232223 - DNA, 566 bp, Homo sapiens
ctaaggtgtctttcagtaggagaatggataaactggtacgtccagacaatggattatattcagcactgaaaaaaaagagctatccactcatgaaaagactacatactgtgtgattccaactctatgacattcaggaaagggaaaaaccatggagacagtaaaagataagtggttgccagggattgagaggaaggagggatgaataggtggggcccagaggatttttacggtaaactcctctgcatgataatgcaatggtggatccatgtcattatacacttgtccaagcccatagaatgtgcaacaccaaaagtgaaccctaaactatggacttgggaggatgatgtaccaatgtagtcaattgattgaaacaaatgtaccagtctggtggggggaagtcaatagtggaggaggctgtgcacgtgttggggtagggaggatatggaaactctactttttgggcaattttgccgtgaacataaaacagctctgaaaatataattaattaaaaaaatagttcaaaattcctttttgagacggagtctccaaaaaaaaacaaaaacaaa

SEQ ID NO: 232224 - DNA, 445 bp, Homo sapiens
cctgtaccatgcacccaaactggcaggtaaactgcaaaccaagggaacaagaagggcctaccactcctttaagacatttcatggcagctgcacgtacagctcccatttatatgccattggccacaatttggtcatacagccaacctagccataacagagggtggaaatgcattctttatacaatgcacccatgtactttgctgaaacttggggactctattactatagatttaaaaacagattgtgacccaaaaaaagtttttttaaaaaaatagaagagagtatcaaatagtgggggataaatagcagccccatcctaaagtttctctttccctttttcgtaacgaccaatgttatagtacttactaaggactgagtactctcctaaatattgttggttttgttttggttgattgattcattaaatcatttaatccttacaata

SEQ ID NO: 232225 - DNA, 497 bp, Homo sapiens
ccagctaaaatttgaagtttgaagtaaaagtctgaatactaagggaaaagataataatacatattgggagattacatatctgccaaaagacttctcctgatgttccaaacaccaccaagggagttttggatatatcagaataatctcagatgacactcatagcacacacctcttgaccagcagaaagccacagaacaaaacaggattagctccaaggcatagaagaaaggcatctgtgttgtgattttgggagttgataacattattaatagtctcttatttttttaactcttttccaagtttccattttgtagttcagaaattgtatatccattcttcatattaagacatgtatgtttatgtaacatatgcaagaaatttgaagactattagcaaagataatgaaagtgaaacccaaacgctatatagctcttaactcctcccatatttaatctttccactcttaaataaaggctagcataatggtgctgatttct

SEQ ID NO: 232226 - DNA, 129 bp, Homo sapiens
gggtccaggagctgccaaggaaaaccacagatctgcttgtttccatcgggagtcctgggaaccacgtgagtggtcactttaatcacctccgttaaagacatcttccataatcccctcctggcacttctc

SEQ ID NO: 232227 - DNA, 706 bp, Homo sapiens
aagcccttccatttgaatcctgagaaagacgcgctcaaagaacccagcgaacaaaggagagggttggagcccacgcaaaacatgggtgtgataaagccacacgcgacctgagcccccaccctcagtaactactctccagcgcccaccgggaggaggggtccggggaaaggattggcatcctctgcttctgcagaaaacatggctaccaacagcttctgtatccacctgcggaggagactgactgctctgttattcccccagcatctgtgaagaggctctgactggctaaagtgttggtatagtgatcaccccagggttaggcaaccatggctggtgaaaaggaaaaacgttatgaacctggctgtgcggagctacctgaggaagcttgtaggagaagggaaggagtctgtagctttaggggaagacagagccacaagatggaaggagcttggatgtctgaactattccatggagaaaagctgcaatgctgcatcttagtccagggatttttaaagtgtggttcctggaagagctggatcagagtcatctgtgttgatggtttaacataaagatttttgagccccaagactcaagtaggacaaggaatttgaatttttaagcagctcacctgacttgtctgtcctctaatgtctgaagacatctgacctctgctctttcagtaaaagcaacaatggttttaaaagca

SEQ ID NO: 232228 - DNA, 659 bp, Homo sapiens
aagcccttccatttgaatcctgagaaagacgcgctcaaagaacccagcgaacaaaggagagggttggagcccacgcaaaacatgggtgtgataaagccacacgcgacctgagcccccaccctcagtaactactctccagcgcccaccgggaggaggggtccggggaaaggattggcatcctctgcttctgcagaaaacatggctaccaacagcttctgtatccacctgcggaggagactgactgctctgttattcccccagcatctgtgaagaggctctgactggctaaagtgaaggagtctgtagctttaggggaagacagagccacaagatggaaggagcttggatgtctgaactattccatggagaaaagctgcagccaacgaagaacacctgcaatggactcttaacctgggggtgacgacaaccactgaaatatgctgcatcttagtccagggatttttaaagtgtggttcctggaagagctggatcagagtcatctgtgttgatggtttaacataaagatttttgagccccaagactcaagtaggacaaggaatttgaatttttaagcagctcacctgacttgtctgtcctctaatgtctgaagacatctgacctctgctctttcagtaaaagcaacaatggttttaaaagca

SEQ ID NO: 232229 - DNA, 459 bp, Homo sapiens
ctcacaaatgcaaatacaggaaagctttttgtaattgtaatacattcagcaaaaacaaaagcaagcaaagaataatttttccaaatcaagttgatagactgatatgcaagttgggaaataggatctttatatagagtttgatagacctcgattgagagacttttgtaagagtggctttatttttccccaggaaaagacattctggaacaagtttttatgtgaaaacaatctgtggttaagtgacttggagtgaaagctcaaactctagtgtaatctctgacttttgaatactttcttgaacctaaaaaatatgatcaaagctgtagtcatacaccagcagagacaaacagaagttgattcaccatggatgcaccaaaatctcagaaatcaccactaaagaacttattcatgtaaccaaataccacctcttcccccaaaacttattgaaataaaaaataa

SEQ ID NO: 232230 - DNA, 186 bp, Homo sapiens
tcccccgccctgtttttcttcttccccctctctgtctctgtctcttcctctctgttattctccttctcttttcctctctctggctttctttcttttctttctcttatttctttttttctctttcttctttctttttcctttctctctctctcacctccctccctctctccttccttccttcttctc

SEQ ID NO: 232231 - DNA, 366 bp, Homo sapiens
agacctagtaggaaaccttaacttccatccttatctcacaataaccaaggcagtgtccttgtttcctcactagctgggggtcaaaggaggcctgctaaacatgtttaaattagatataacgtttaaatgagatccagaatctcataataaaatacccaaaatgttcaggaatcaattgaaaatctctcattatactaagaatcgagaatatctcaactttaatgagaaaagaatcaataggcactaacactgagataacacacatattagaattacctgtcaataatttttaagcagccatcatgaaatgcatcataagtacttgcaaacacacttgaaacaaatggaaaaatagaaagtcttaga

SEQ ID NO: 232232 - DNA, 139 bp, Homo sapiens
caggggcctccaagggtgttctcagaagaaagggaggcatggaatccagattattcagcggaggctaatggtgtatctggcggggctcagcctgtgccgggcgccacgcgcgaattgaggtgtgaccgtgtgtcaggcc

SEQ ID NO: 232233 - DNA, 759 bp, Homo sapiens
atttgaaacaagatggagcaggaagggaggaaagaagggaaacagagaaagatgagagaaaatatccaacccctttcaagagagaaaaaatcatgatatgatttgcttgcctggtggcagagactgatccataatgaatcattcagacctttacttctgaccctcttgtgatgaagaatttagatttgtgagatggctggggtcaggtgggccaggagtggacagaggaagtaaataactaagttcagagtcattctgtagcacagattacagttcaggttttgctggaccaatcaggaaggttagaaaaatataacatcaataaccttgaccccgttgacactatctaaatccatcacaaaagaacagtatgttgtaagattcctgtaagtcgtaactaaagtcctgaccaggaccagcctactgattatgaatcagtgtcttggccaccaaccagtcctatctccctgggaattctgaatgagccaatgaacttggattcctagtaacattgatcaagccaagagatccctttccgcatgcaagtccacataatttctcacttagaaaggagccaatacagcaggagggagatttcaaaatagcagccatgacgaaacaagtgaaaattgtgtccatttttctttatctgttctgatgtaacttccagaatcattctttctgcatcttgacaccatttttaaagaaatttgttatccaagactgttaaatcataaataaaactcatcttattcagat

SEQ ID NO: 232234 - DNA, 611 bp, Homo sapiens
ggccaataatttttggattgtcatatttttcagttaggatattatcttcttgagagtttgcaacatgttttctagatttttggtagctctcttcataatttttaagaattatttattggttgattgattaataaagatattagtatatgtgttgatttaaagtgttaaatttaaaatggaattagatgagactaatggaacaggagaacttaggaaaggggacattataatactaaacaattagagatttgtgatgttcccctgggacaggctttgaaaaatcaccatggctgtgggtccttattaaccagccactcctcaaagagctgtctgcagcttcagaaagatacacagtgattgaaagcataatcattctgaatgaatattcagaaaacataaatatatatgctgatgtatatgtatgtgtctaacattcgcttatttgaggaacaaataaatgcttatttgaatttgttggtataaaatacctttttgtctatggtaatacagtgtgcccagaaggatgaaaaattcaagaataaagtaaagtactattcatccatatataatacagtattatatcgtatagtatagatctgaagcattcttgg

SEQ ID NO: 232235 - DNA, 133 bp, Homo sapiens
caagcaaagagggatttaatgcagacaattggttacagtgctcttagaaacacagaaagaacacaaaaaagaagagtgttataaagacactggaagctgcgattgaacctggactgaagcctagctgcccttg

SEQ ID NO: 232236 - DNA, 1023 bp, Homo sapiens
  misc_feature (11)..(11): n is a, c, g, or t
  misc_feature (19)..(20): n is a, c, g, or t
  misc_feature (24)..(24): n is a, c, g, or t
  misc_feature (38)..(38): n is a, c, g, or t
tggctaggtangaggcggnngttntagatatgcacggnttcgggggcacagctgccaccagcccgctcacggcagtcttcagcctctcccgcagcctgctggctgctgccctgctctacggtttctgccttggggccatcaagactccgtggccagagcagcacgtccctgtcctcttctcagtcttctgtggcctcctggtggcactgtcctaccacctgagccggcagagcagcgaccccaccgtgctctggtctctgatccggagcaagctgttccctgagctggaggagcgcagcttggagacagcccgggccgagcccccggaccccttgccggacaagatgcgccagtcggtgcgtgaggtcttgcactccgacctggtgatgtgtgtggtgatcgccgtgctcaccttcgccatcagcgccagcaccgtctttattgccctgaagtcggtgctgggtttcgtgttgtacgcactggctggggccgtgggcttcttcacacattacctgctgccacaactccgcaaacagctgccctggttctgcctgtcacagcccgtgctgaagccgctggagtacagccagtatgaagtgcgcggtgccgcccaggtgatgtggtttgagaagctgtatgctggcctgcagtgcgtagagaagtacctcatctaccccgccgtggtgctcaacgccctcacggtggacgcccacacagtcgtcagccacccggacaagtactgcttctactgccgggcgctgctgatgaccgtggctgggctgaagctgctgcgctcagccttctgctgccccccacagcagtacctgacgttggccttcaccgtctgtctcattttgataccgggctttccagggttcggtgaatatctctggcctgtttggcagtgggatgtggcagacgggtcggcggcaatggccgggaacggggcgttcccttgcacgtgggactgggtggtcagcggcgggttcacccacaagaggggtttcagcctgggaactgtgc

SEQ ID NO: 232237 - DNA, 476 bp, Homo sapiens
ccgatgcctgccccttgcccacagctgccgggcgctgctgatgaccgtggctgggctgaagctgctgcgctcagccttctgctgccccccacagcagtacctgacgttggccttcaccgtcctgctcttccactttgactacccgcgcctctcccagggctttctgcttgactacttcctcatgtccctgctttgcagcaaggtgagttggtggctgtggcccagaccccaggctgtccaatgggagcagagccaacttctgcctgggtgggaagagaatttcctgacggtgtggccaccgctctgtagtcagccccgtgggcctttgcagcagcctctcaaggaaggggttacttccaccctctacagagaggaagcaggctgaaggaggttgagggacttgcctcaggcttccagagaattggtggtcagccaggatttgaacccaggcctgtctgaccccacgaccacctcct

SEQ ID NO: 232238 - DNA, 1222 bp, Homo sapiens
  misc_feature (11)..(11): n is a, c, g, or t
  misc_feature (19)..(20): n is a, c, g, or t
  misc_feature (24)..(24): n is a, c, g, or t
  misc_feature (38)..(38): n is a, c, g, or t
tggctaggtangaggcggnngttntagatatgcacggnttcgggggcacagctgccaccagcccgctcacggcagtcttcagcctctcccgcagcctgctggctgctgccctgctctacggtttctgccttggggccatcaagactccgtggccagagcagcacgtccctgtcctcttctcagtcttctgtggcctcctggtggcactgtcctaccacctgagccggcagagcagcgaccccaccgtgctctggtctctgatccggagcaagctgttccctgagctggaggagcgcagcttggagacagcccgggccgagcccccggaccccttgccggacaagatgcgccagtcggtgcgtgaggtcttgcactccgacctggtgatgtgtgtggtgatcgccgtgctcaccttcgccatcagcgccagcaccgtctttattgccctgaagtcggtgctgggtttcgtgttgtacgcactggctggggccgtgggcttcttcacacattacctgctgccacaactccgcaaacagctgccctggttctgcctgtcacagcccgtgctgaagccgctggagtacagccagtatgaagtgcgcggtgccgcccaggtgatgtggtttgagaagctgtatgctggcctgcagtgcgtagagaagtacctcatctaccccgccgtggtgctcaacgccctcacggtggacgcccacacagtcgtcagccacccggacaagtactgcttctactgccgggcgctgctgatgaccgtggctgggctgaagctgctgcgctcagccttctgctgccccccacagcagtacctgacgttggccttcaccgtcctgctcttccactttgactacccgcgcctctcccagggctttctgcttgactacttcctcatgtccctgctttgcagcaagctgtgggacttgctgtacaagctgcgtttcgtgctgacctacatcgcgccctggcagatcacctggggctcggctttccacgcttttgcccagccgtttgccgtgccacactcggccatgctgttcgtccaggccctgctctcggggctcttctccacgcctctcaacccactgctaggcagtgccgtcttcatcatgtcctacgctcggcccctcaagttctgggagcgcgactacaacactaaacgtgtggatcattccaacacccgcctggtcacacagctggacaggaaccc

SEQ ID NO: 232239 - DNA, 575 bp, Homo sapiens
agatccatgtttcttgagtttttcttaaacgacagaagattttgcttcccagactagcatccctctgtggctacaaccagcctgaaccgaggggtctgccctttagaagggcccagctcacgggctcactgtgcactcaggccctagccagcctgctgtacgtaggtgtttgcgatttcatcattggccttgttttaacagacagcagagcagagcacctgccataaagcaagcctcgatgtgctaagtgccatgtggagcccttgccctgctggggctcgctgctcccatttgagctgccacagatcagcccctccccccagggtctccgaggagtcaggaccgcacagcctgccctcctagggaaggacttcctcagggaaggcaggcatgtggaagccaggtgcagagtcctggcctctccacacaggtgccgcccaggtgatgtggtttgagaagctgtatgctggcctgcagtgcgtagagaagtacctcatctaccccgccgtggtgctcaacgccctcacggtggacgcccacacagtcgtcagccacccggacaagtactgcttcta

SEQ ID NO: 232240 - DNA, 901 bp, Homo sapiens
agagtttggaaacttcgtaggaagttgtgggagacaccttggtttgtttgcttttgttttggggttcttaaatttagggattccacccttatcttgtgcagacacaaatcagatttttgtaattgcagatagatggaagtgtttgggcatcagaggaaggttccactggcccttcatccagtgggaccttctacacacagctattacgttctgctcgcaatggagacacccaagtaggttccactagccctgtcccacaagagcccagctattgcctggcagtatttctttaccaagaactgggctgccttggggaccaggtgggtgagcacaagggatgcctggcctctctgtcctgagaccccccttaattatgacccttacagccatgtccaccagcaacctggcaggcaagacaatggcacaacctcctttcactgcatttagggagaaaagggctggcctctctctgaaggagtgcagaaaatacacattattcaagcaagttagcatgaggcaagcctagagcttttacacagggctggatgttgagcagagagctgaggatgaggttggcattcttctcaggaaaatagcccaaagcccccaggatctaaaccttgcaggaaggaggccagacttggctgggctagaaggagcttttcttatgtcttcttaccccagcacccctaatttaaaatacagatccctgaggtgcgtctcaggtgttcaggaggccactcctgaacttttcctcttctgtgagggggtgggggacactgcagagggcatattgggtcccatggccccctacagctcactgcacaaaactctgctgggatcttgctacatatcccaagtaccaggccccccaggtctgaagtgggaccatgactccctg

SEQ ID NO: 232241 - DNA, 765 bp, Homo sapiens
aaaagatgtctataataaaatttatttataccagtggttctcaaaactgactgataatcagaaaaccctggggctctttcaaaaacaattaacaaaacaattctatttttagacccatgaatacatattttgggggaggaaggaggagggtatagatctgtattttgaaaagttccccaggtctccttgggaaattatatgaacaatcatgtttgggaacaaatgaatcatgttaccactgggaagaagtttgttatacatcctaaccaagaaacctaaatggttcttaagcatctgctagcagaaacagttataattatgaatacctaatgtctgttagattttgctgatccctcacctacctcaggaagaaacaaatccaaaaaagtaagatacggtcttttttatttgtgttaattaaaaaatgctactcctaaaaatatactaactttccacacttataaaggtgtttcttattttaaattcctcaatgagtgcggagaagacaacatagaagcttcttctctttctttctgtcttccttcaactctgtttctcttcttccttttatctttcctttcttttcttctttcctctgactggattgtttataacactttagaaaatttccctgactggaagagggccaatctgaatgagcttttgtctgtcttgggagtagaatgaaagcagattctgagcatggaccctgacttccagaaagactcccatctcctcctcagtgcctcactcttccctcagtat

SEQ ID NO: 232242 - DNA, 352 bp, Homo sapiens
ccaaatgtggcaaaaggagaaatctgtggggaagcaacagagacacttttcttaatatttaaatatttcattttcttcaggtagactttgaactctccagtctcatcttctttagagttaagacagacgtgtcagtcatcctagattttgttatgcctaaagtgtgaattaattttgagtggactacagtaattgtgctaaccatttgtttgaagagaagacataagagttcctttgtgacctgtggaaatacagaaacagccaacattacgaagttgccgccaggcatggacttgagggatcccatcccccatgtccctgaaccagaatgccagggattcccttccatggc

SEQ ID NO: 232243 - DNA, 2019 bp, Homo sapiens
  misc_feature (1984)..(1984): n is a, c, g, or t
tttcacttttcgctaaagtcacattccggcagcaattttatgctgtcaaaatgttctcaacaaggggagatttgactggcttctctgagaaccagtcataggaagcttgggctctgcttcttattgagttcttttttaaaattttgctgggggtccgggggaagaaggaaaaaaagcaacaacaataacgagaaacaagtcacccaggcatcttgtggagggtggctgctcttttcaggccggcggccagtccccgggcgtacagcgtgcggtgcaacctgcagctgcgggacgggtgcattcacgaggggggtgtgtgcgcctgggggtcacccctgctgtctctctgggtaggggtgcaggtgaagctcacatgtgccactctgtgagtgtcaccgcgagggaaaccctcccaggggcccgggcccagggtggccacggtgaggaggaggaggaccacatgcgcagggaagggcatggggcacagcatgtgtgtggcccacacaagggcggtctgctctcactcccctcgctgctctgtaattaagctcggctgcgcccactcaggcttccagacctttccctgagccctccgccccccgggcccactccccgttctcccagccttgctggctacttccactccccaaagagccttcaggggccttcttgtcgttgatcaaaacaacagggccaccagctcctcaagagtccaagctatagtttggcccaaatgtcccggccagggtggctctgtgtcaaaggccctgcagctcctccctcctgtttctctgggccctctctttggggttctggttcccgattaaaccttgacctctctagcacatgccttttgccacctcccccactggtcctggctcttccttccccgctgaaatgagttgaggctgagacctgggaagccgcaaggtgctgggatcccagacgagtccctcctgaaagggcgaaactcagtcgttcagggagaaagggaccacagccaacccaccacacaggtggagcccatggacaaggtctcattccagtggcccggtgtcacagcgtgtcctcatttgcagctaggatgaatgccaattaccaccaccccataggaaagctgcccccctggccagcaccagcccaggcgcctgttaggttttagttcactcactcctctctgcaaccccataggatacgagttaccgattctatgtcacaaattggaagagtgaggctcagagaggcaaggccacttgcccaatgtctcacagtggctcagtgtcgaggcaaggcctgtgtatcttccccattcccagaacctgctggaagtcaagggcagcacttcaggccccagctctgccccgttccagtgaggaacctgaagccagcacagcccctcccactaatccatgcgccccagcccgggcttcagctccacatctgtataatgggagagtgaggtcctggggatctatggctccttctggcttatgcctgtgtaacagatgggagagaaatgaagatagggctgagggtccccccaagccagggctttgaggcagtgtctccccagggcagccacaccatggtggagaccctgaaggcaacaggctgggaggccaagcagagctcagaagaggtgggagagaagggtctagaagcaggaggtggaggaagagaaactgcaaattgcgggtaggaagtgcttagtaaaatcagaaaaatttcagggcacaatcgctcatgcctgtaatccccgcactttgggatgccaaggcgggtggattgcttgaggccaggagttcaagaccagcctgggcaatacagtgagaccctgtgtctccacaaaaaaaatttttttttaaaattagctggttgcggtggcgcacacctgtagttctggctccttgggaggctaaagtgggaggattacttgagcccaggaggtggaggctgcagtgagctatgatcgcttcactgcacnccagcctgggcgacagggtgagaccctgtctggac

SEQ ID NO: 232244 - DNA, 486 bp, Homo sapiens
cactgagcataaaactgatatgacctcactaaagctaaaaaactgaagtagacaaaggcttggttttcaaagaattgaataattgggggtggtaggggactgatgcttaaagcaacaaactataatataagatagaataaataaatgctaaaaagggaggtggggtttgaccaggagaggacttaaggaggtgaggatgtgtaatagtggcatttaaggacacatagtttttcataactgaacagagcagtaaaagattattctgaatgtgaaattgcacatcatgttagatgagtaacaagttgtcagctttttgtcttgagcatgggatgagttgtgggagcttaggctgcaaaattggaatggaggcagaactgtcatgcagatagcttcactacatggtcaaagagctgatatgaagcctaagacaaaaatgcacctgggctatcttatggatgcagtcactgctaagaactaaagcaaaaa

SEQ ID NO: 232245 - DNA, 333 bp, Homo sapiens
tcctttttaaggcaaagtaatattctgttgtatgtacaggttgagtatccctaattccaaaatcaaaatgctcttaaatatgaaacttttggagcactgacacgacactcaaaagaaatgctcattgaagcatcttggatttgggatttgcaaatctctgtgggatcctgctttccattggtttgggtatatacctggaagtgatactgctagatcatacggtaattctatttttaattttttgagaaaccacagtaccatttttcatagtgagtacaccctttaaaattactccttttttttttttatttttattttttgagacagtatctc

SEQ ID NO: 232246 - DNA, 149 bp, Homo sapiens
ccctccccccccccccggcaccccccggtcaggctctactcttgggcgcttgtgattctctgaacactgttccctctgcaggaatgtccttccggactttcccagcctgatggcttttttcttaatatgagtcatgtttgctcctcaca

SEQ ID NO: 232247 - DNA, 380 bp, Homo sapiens
tcatgtggtggttaggatttaatgcattcgtggatgtaaagtacttacaatatgacctagcagagagtaagcactcggtaaaaaagaaaagctctctagttgaaaaaaccttgtttttgccttataggaatgtggtcgtccctaatgggctaccacagtaatgaggacttttgagagagagactttttggtataataaaataatttcctactgaaatggactgtgggactttgcttgtaaatgactccgccctaatgtatctgccgtatagtatttacaagtttgggatttcatgctattaatagaacaaaccataacatttttccttatttaaaatccagtttctccattttctcgtagcatgtgagcaggataggtag

SEQ ID NO: 232248 - DNA, 217 bp, Homo sapiens
ttcttgggccacacctaagtatgtgcagggcctgtgatacagccagaatttcctcctctgataaacttctctgagcctttctacttgtctttaacccttttattgtctaaatgctcactaaacaagaaaaataatacagggaacttggtttaggggtattggtagaagttaaagttgatggcagagcatgaataggggtgtctgcaaggaattgttg

SEQ ID NO: 232249 - DNA, 347 bp, Homo sapiens
ccacatttgcacagattatcactgtgaccccaaattgaatccaataaaagtattacatgcatataaataatacatatgtatgcatatatcagcaggcaatgctcactgtgaataaatatataaatatatttgttcactttcaaatgaaataactttcaagcatttttgatacttaataaatcacagcattcaaataaaccactaaaatgttttatgacttgtaacacaagagtagcatcagcaattagtttcaatgctttaatcttcaattatatgaggtggacatagaaggaaataaaaaaattaatgtagctaattgagaagataacaaagtattcccaagtaaa

SEQ ID NO: 232250 - DNA, 343 bp, Homo sapiens
ctggaattttacttccctttggtatggattgttgaagacaggaaatttgaatcatctgttaattccttttttctaaataagggcccttaagttaatacattgagcacacctgcatctctgcagaaggccaagcatcaggactctgacttgtcttcctcactttgagacagccattggccagcccattgatacagatgatggacatgttactttatagaaacagctcttacctgaaactcctcattttctgtttggtaatcactccttggcattctgaccacacacaaccatattgcttatgaaatgctagattgcccctcaagctgtgtcagtattcctttct

SEQ ID NO: 232251 - DNA, 424 bp, Homo sapiens
gcaaatttattcttaaaaagtatggtaatcatggccacaattgctgtaagcaatgggaaagcagtatctgtatcattaataccactatgatctgagtgcgcttgagctagaattcatgagaattctgctaatattatggttatggtgtttataacacgtttcactcaggaggtatgcttcttgcctggacctctagatatttctgcagaggacagagtgaaacaactgaggttggactagagtaacatgtccaacttcctgcatgttattcatgccagggtgtctttgggcaggaccgggtaacaagagcttagaagatgaatttcccatactgagtaaatttatttaccccttccctatcatatacacagatgagatggcgctgcctttcaggtgatttggtttgtgaaacagtaagtgtctg

SEQ ID NO: 232252 - DNA, 635 bp, Homo sapiens
ctgtgtccttatatattccctaaaagattaagaaaaacggatcaatcatctatttgcttttttagacaacggagaaagtccttgcaattgcatcatggtcatttactctggaattattatcactaaatttttttatttaaacaatattttgtagttaaaaaactccccaaataatctcaaaaagttatagtaggaattaaattgtgatagattaaaataaacagtgcagtggtccaaaagaccatttttctttatcttaattctgttttcccaaactaaattcgtattcatttacaatctcctaaatctctcactatagtagcaggaatttaaaacaaagactctacaaatgaccataaccataattaaaatgcagccatcacttttttttttttttttttttggaaaattgaaaaacaagtgaaatttcactgtggagataggcctactacaaagaggacattaactagccttgaatcacttgtttatttttgtctttaaacgtgtttggaggtttggatccactaaatcctagctgttcatttcaacgaaggtcgaggaagcaagaaggctcttccaaaacagcttcggggttaaagaaggagtacagttttcaacaatcttaagtcaaacat

SEQ ID NO: 232253 - DNA, 311 bp, Homo sapiens
ccaggccaggggaggagcaactccaccatgagggcttggccctcatgcctcctcctgcccagctctgcatggcatgtccctctggccttagctgccccagctgcatgtggcctcaggccagccccacccagccctcttgcttcctgtggccctgtagagtggctaccaggacccctgctggtgagggcgggtgcgggtggcctgtctccgagctgggctttcctccagcatggtcaccccctcacccgctcagttacctctgatatgctgtgcaaacatatttctcgatgaaatgctgggaagaaaaataa

SEQ ID NO: 232254 - DNA, 582 bp, Homo sapiens
ttctccatacatttaagaaacacctgccatatgccaggtatcctttcaagcactgaaatgcagattcataaaacatggtctctgctctcaaggagctcacagtggtaaggaggaaacaggcaatagcgagtgttctcattgcattcgtgaccccattgatcttgcaacagccccatgcatcagttattgccattataccattttaccgataaggaaactgtggcagggaggggtcaagcaccttgggtatttgacagcaaaaccaaggcttggtggtatcataaaacttccaagtagtaattcacaaaggtgactgggaaatggaagtgaccagaaatctttgcactatgaggacaagttcatgaccctgataccttcttgtccaggtagtatagctccagaccaaatgtctgcggccacccacccaaaaacttgttggataaaaatgactacacctatagtcaaatgatttttgacaaaggtgccaaacagttagataggaaaaagaaagttattttcaataaatgttgctggagcaaccagatatccatatggaaaaaaaatcttgaccacctacctcac

SEQ ID NO: 232255 - DNA, 502 bp, Homo sapiens
aaaagtaggcccaaggatgaggcctaattgagaggagggctcagaggagcctgtctaaagtttgatcaaggaatctttgtcacatatgaaaaaatggaggcccaaagaggttaagaaacttgctcagggtaatactgttagttagtggcataactgggactctgacttaaggctccccagtgatcaattaggtgtctattctacagggagcagactgttcgctgcatccactttcttgttttctgttacctcaaaagctccgtcaacacctccatcaaccagattgcttcttgtgttcttcttaaatgatgtcatcaaaaagattaagacagtgcatactatttaactatcactaagataaagcaaagactagggggttactttgaagtaatgttgagtcccaccttatctgacctacatagaattttgccactttgattactgctaaactctactgttagctaggagatttctatcttctgagttactataatatattcaa

SEQ ID NO: 232256 - DNA, 573 bp, Homo sapiens
gccctggggaaacagtccctgcagagacgctgcctgcttcagagccctggtgtggcctcctggcaggatatctatagcccaagagtcactagatttgcttccatcaccctgctagaaaattcattaaagtgaacacctcccagcattaggggtgtctgtgtgtgaatctctgtttgggagagactgtgacggccgagaggaagcacatggagatcacagtggtgtgtggtgtgcagcatggggaccagtcctgctcttgcccgagcctcattccttctccctaatacatggcatcacagttccagcccagaatccttcagaagtccatgctgatgttggaggatgaatatagggtgtctgccccatgggtgttttttagttcacaacatgaaacccttataataacttaatgtgcaatattactaacagcctttagtttctagacaggcagtgtagtgtaatggctaagaacatgaatgctggagccagatattcattcaaatcctgtgccttaatggtttcttaggtatgggacaaaaagcacacataaagaacacttaaactttgcttaaa

SEQ ID NO: 232257 - DNA, 996 bp, Homo sapiens
tggaacatgggagagaactcaaaatagctgcccagtcctcagaagctctcagatcctaggctcttgcaggaaagttttcagaagaattatagccagcttttctggggcctcccctctctgcacagtgaatctctggtggctaatgcctgggtcactgactgtatgtaagggtcttacatccttacatcaatgaaatgtccaatgtctgcccaattcaaagggagactacaatgtccccactgcttttccaggcccagcccctgtcccatctggggcctgagtcccaaccctttatttcatccacaccccaattccggcccacacctatggctcaggcccatcttcaatcctctttcccagtcctatctcctgcttttccatccccgatgaagaacactggagtagcttgccctgcgtcgcagaataaagtgcaagctctctccctacctgaaactcagcaccctgaatggcctttgttgaggaaacaactataaggtgggttggctttaccccctagggtccaaaaatctcaggacatctttagtgtctccactcctaaccttccccaggaaaggggacacccattctgcctgagaactttccagtcagtcctgaactccagagcaacatattgaaaagtggttcattcaacaccagggcaagattcaagagtctctggatctgatgcagctttgggatgaattgccagggaaaagtcaggcgaagggcaaacccaggtcctggcagtcctccatgtccacaggtgaaagcagcaaggaggcacagaaggtgaagttccagctagagagggacctgtgcccacatctggggcaaattctgggtgaggccccgcaaaatctatccaggggcatagaaagcttcccagggaagactctgggggtgacctctgaagagtcagaaaggaacttgaggaagcccttgaggagtgactcggtagggatttattaagactcacggacaggaatcatatagaaa

SEQ ID NO: 232258 - DNA, 349 bp, Homo sapiens
  misc_feature (84)..(84): n is a, c, g, or t
ctatgtatcggtctttgtctcagtcagcttgggctgctatcatcaaatggcatagacagggtggctttaacaactcacatttantttctcacagttctggaggctgtgaagtataagatcagggtgccagcatggttctggtaaattgaagttcatgaaataatgagaccttttataaaagacagtggcataaatacaaaatataccacgaacatttcccttaagaaatgtttcacagagtagcatattggtgtaattacacataagactgattcagcattataattacaaaactgttttcataggattcagtgttaattcaggctctcaatatgttgccaaagtctgc

SEQ ID NO: 232259 - DNA, 290 bp, Homo sapiens
gtagagacgaggtttcaccgtgttagccaggatggtctggatcttctgacctcgtgatccgcccgccttggcctcccaaagtgctgggattaaaagtgtgagccaccatgcccggcctagagctcttttttctaagaaaaaatccttttaaggccaggcacggtgggtcattgaatcgtgaattcaatgggtggtctctgagcagtcaccctgaatcaggcctgttaaacttctttcagggctcactgaatgtgactagataaataaggagtgttctccaagttaggcct

SEQ ID NO: 232260 - DNA, 633 bp, Homo sapiens
gagctatttacatttcttattggttatttacatttccatgcatggttttctggcttatgatgtgaaattttgtactttggatagttacaaaggatgcaataaaccaacaaccagtctctttagtttttcattatggaatacatacttttttttttaaaggaaaagatatcacatgttatctgtaattgaaatcagatagatggctaccagacacagtaatatggagagtatatttttgtttttttggctaaaacaaacaaaaaacccaggtaattaagcttagaagtctagttttttattctgtatctatgacaagtggtactcagttatttgaactaaaggagataaaagcagagtaattacttaatgtttaatttaggaaacccagacaaggcttatgtaataataaactgaggatttttagcaccttcatttaggaagggataaaatcccttctctttttcacttatattcaaattgtgtttggtgttctatccggttctagtttcttcaggctaggccatttcttttctgtataatttagatggattggactgaattaaactaccacatgtcatttggtgtttctttactttttcttttctgagatcatctgtggctgatacatctctg

SEQ ID NO: 232261 - DNA, 976 bp, Homo sapiens
  misc_feature (800)..(800): n is a, c, g, or t
atgtggatgctgggagaagtatgtgagatggaaaagttgtttcatggcatccaagaagtgaatgatcctcaagggctaccattggctgggtagtggagtgttgaccaatcacagctcaggggcgtgattgtctcgtcctgggatcgcgagaggtgtatatacagggaggccaggcagcctggagttagtcgaccgttgcgagacgttgagctgcggaagatgagtccaaagccgagagcctcgggacctccggccaaggccacggaggcaggaaagaggaagtcctcctctcagccgagccccagtgacccgaagaagaagactaccaaggtggccaagaagggaaaagcagttcgtagagggagacgcgggaagaaaggggctgcgacaaagatggcggccgtgacggcacctgaggcggagagcgggccagcggcacccggccccagcgaccagcccagccaggagctccctcagcacgagctgccgccggaggagccagtgagcgaggggacccagcacgaccccctgagtcaggagagcgagctggaggaaccactgagtcaggagagcgaggtggaagaaccactgagtcaggagagccaggtggaggaaccactgagtcaggagagcgaggtggaagaaccactgagtcaggagagccaggtggaggaaccactgagtcaggagagcgaggtggaggaaccactgagtcaggagagccaggtggaggaaccactgagtcaggagagcgagatggaagaaccactgagtcaggagagccaggtggaggaaccacngagtcaggagagcgagatggaagaactaccgagtgtgtagacggccaagtactcccctatctccgagagcagcgactaagttcaggcccagccgccagacctcagagatctcaccagcggggtgcttgccattctgaagataataaaatgaatgtgttgcaaattgaaaaaaaaaa

SEQ ID NO: 232262 - DNA, 1004 bp, Homo sapiens
  misc_feature (828)..(828): n is a, c, g, or t
atgtggatgctgggagaagtatgtgagatggaaaagttgtttcatggcatccaagaagtgaatgatcctcaaggtgtagcagaggaatttgtaggagagagggatgattgacatcttcgtgtagccctccatccatcccagttagcatggagggattttagggctaccattggctgggtagtggagtgttgaccaatcacagctcaggggcgtgattgtctcgtcctgggatcgcgagaggtgtatatacagggaggccaggcagcctggagttagtcgaccgttgcgagacgttgagctgcggaagatgagtccaaagccgagagcctcgggacctccggccaaggccacggaggcaggaaagaggaagtcctcctctcagccgagccccagtgacccgaagaagaagactaccaaggtggccaagaagggaaaagcagttcgtagagggagacgcgggaagaaaggggctgcgacaaagatggcggccgtgacggcacctgaggcggagagcgggccagcggcacccggccccagcgaccagcccagccaggagctccctcagcacgagctgccgccggaggagccagtgagcgaggggacccagcacgaccccctgagtcaggagagcgagctggaggaaccactgagtcaggagagcgaggtggaagaaccactgagtcaggagagccaggtggaggaaccactgagtcaggagagcgaggtggaagaaccactgagtcaggagagccaggtggaggaaccactgagtcaggagagcgaggtggaggaaccactgagtcaggagagccaggtggaggaaccacngagtcaggagagcgagatggaagaactaccgagtgtgtagacggccaagtactcccctatctccgagagcagcgactaagttcaggcccagccgccagacctcagagatctcaccagcggggtgcttgccattctgaagataataaaatgaatgtgttgcaaattgaaaaaaaaaa

SEQ ID NO: 232263 - DNA, 1094 bp, Homo sapiens
  misc_feature (790)..(790): n is a, c, g, or t
  misc_feature (918)..(918): n is a, c, g, or t
atgtggatgctgggagaagtatgtgagatggaaaagttgtttcatggcatccaagaagtgaatgatcctcaaggtgtagcagaggaatttgtaggagagagggatgattgacatcttcgtgtagccctccatccatcccagttagcatggagggattttagggctaccattggctgggtagtggagtgttgaccaatcacagctcaggggcgtgattgtctcgtcctgggatcgcgagaggtgtatatacagggaggccaggcagcctggagttagtcgaccgttgcgagacgttgagctgcggaagatgagtccaaagccgagagcctcgggacctccggccaaggccacggaggcaggaaagaggaagtcctcctctcagccgagccccagtgacccgaagaagaagactaccaaggtggccaagaagggaaaagcagttcgtagagggagacgcgggaagaaaggggctgcgacaaagatggcggccgtgacggcacctgaggcggagagcgggccagcggcacccggccccagcgaccagcccagccaggagctccctcagcacgagctgccgccggaggagccagtgagcgaggggacccagcacgaccccctgagtcaggagagcgagctggaggaaccactgagtcaggagagcgaggtggaagaaccactgagtcaggagagccaggtggaggaaccactgagtcaggagagccaggtggaggaaccactgagtcaggagagcgaggtggaggaaccactgagtcaggagagcgaggtggangaaccactgagtcaggagagccaggtggaggaaccactgagtcaggagagcgagatggaagaaccactgagtcaggagagccagatggaagaaccactgagtcaggagagccaggtggaggaaccacngagtcaggagagcgagatggaagaactaccgagtgtgtagacggccaagtactcccctatctccgagagcagcgactaagttcaggcccagccgccagacctcagagatctcaccagcggggtgcttgccattctgaagataataaaatgaatgtgttgcaaattgaaaaaaaaaa

SEQ ID NO: 232264 - DNA, 449 bp, Homo sapiens
gacttgcctgaagaggcgtggcaatgcagggatattggttaaacttgctttggaagcctgagcgtctggcagggttgcaggagggtgtgggggagagcagagactctggagctctgccgactttgaatctcatctctactgcttcccagctatgtgaccttcagctgttgcccaactggtctgagtcttgggtttctcaactgcaaaatggagaggatttgtgtaaacagttagcacagtgcctggaatgttgagtgtggtggtgaggaagagggactttgcagccagactgcctggtttgaaccccggctccactgcctgggctggttacttagcctccctgtacctcagtttcttaatctgtataatggggatactaatggtacctatgtcctaggattgttgtggaaggcaacgaatccatatatgtaaaatgcttagaaaaactt

SEQ ID NO: 232265 - DNA, 546 bp, Homo sapiens
ttctccctccttcctcctaacagactgataaaaacctgtgttccctaatgcctttgttttttgaagaagctataaagagcatctggtgttttctgcatgttctccctcttccctccaggtccctcactccatccccttcttttccctcccatatttgacctagatgcaaccactcaccccactgcagagacagagaaccttcccattctcagccagagaaagacatccgtggcctgaatggtgctgctggacccacagtgactctacataaaggctgtccctaggtaggggtagagctagtggctgaaggggaggaggaggactctgaaagaggcctcctgtggagcaggtaagcatcagagcaccctagggtgcagccaagggcaagtcatcccacctttctgagcctcagcttcctcacttgtacaatggggctactaaaaatagctactgcattcaattgctataaggatggcatagtgcctgaaaagggacctggcgttgagaaagcccctaataaataatagttattattatattgtaaaa

SEQ ID NO: 232266 - DNA, 544 bp, Homo sapiens
ttggatatttgtagtttttcactgatttttctctctgcataaagagctaatagctcattgtctataaatattttccaacattttgttttccaaaatggactcatttctacataaagacgtcatggaaagatggtttttcttcctgaagggttaggtcagccctgggaagaagtatagaccttggctcctgttattcctctttagatatcccagggttccaacaggaagttacaagatacctgcactacctgtaaagtttatttaaaatgattggaaggctctcataagcattggaggggaagaaaaactttttttctaccctcttaggtgaagtgcctaggagcctgtgaattaaacttacagcagacagactagcaggagaaaaagcttacaaagttatttattttaaattttgcttgcacaagggtgtcatagaaagaaatgaataccccaaggagtgatgagatttgattttctgtatcattttactacaggaaagggaggtggagaaaaggcaatattgagagagcaaatgacttcttta

SEQ ID NO: 232267 - DNA, 757 bp, Homo sapiens
tgttagagaacagaatagagaacagtacccagtatatgttctttgaatcgaataatggacccaactgtacagagaaatggaagggaatattctaagaggctgttctattttactttgtaagtcttttcttttaatggaggtataactaattcagtaatttaaaaatcacatatccctgttgttaatggactcatgagtgcagggatggcagaaacaaatcagataatgtacctgattctttcattgtgacagctgctatcaagttgtaaattagagccagccacaaggaagctgtgttaggtcagtccaatgactaatgtcatgtaataaatggctacttggtgcacaaatgactttcttggaacctacaagagttgtcaattctcatggtaatttgtgcattcgtaattttgtgtttgggaaaatgttgctagataagccttatttgatattagaaaataaacatttattgtttctactgaggaaactcagattttcttttgtaaaatgtacaggactgtgttatgttgcattttaggagataaaataggcagaaggaacgatttcaagcatttgcgtaagatactgttctttcaaagaccttctcaggcataaaagtccataatataattctgacaagaaactcttttagttacaaataattccatagtaaatatgatatgacactggctgatattcctgaaataccatgttacaaaaacctctagaatctaaacatagaaaatgatttccttta

SEQ ID NO: 232268 - DNA, 458 bp, Homo sapiens
gatggatgtaaatgttggatggtgggtcaagggtagaggtctgtagttagtcatactcttttgtcctgtcaaaatgtaaagggtgaggaaagtcctgtggcttttagatttctataatttaacgtgtagtggtaaaacagatttagaggtttgcagtataaaatgaggaaaaaagtaggctgggagcagtggagcacacctgtaatcccagcactttgggaggctgaggcaggtggatcacctgaggtcaggagttcaagaccagcctggccaacatggtgaaaccccatctctactaaaaatacaaaaaccaggcatggtggcataaaataggggagattatcctggatttccctgcaggcccagtctaatcacatgaacccttaaaagcaaagaataatccacagctggaggcaacaattcaatgccctgttgctgcttctgagatgtagggtttg

SEQ ID NO: 232269 - DNA, 453 bp, Homo sapiens
ctctggggattttatttaatacaccacttagaagttgaattaaacccaactcttgagacttgctgaagtctatcctgcccccggccatcttttaaagtgttttttatatggaccccagggctttatttggcacattttttttttaattacttctttgtaaccaggcagtaactacctgaataagtataatttaaaaggacaaagagctaatgacggcattgtcttgtagctccaatttgtcctcggacatgtgctatataccttgttactagtccacccccagggccttgcactaaataccttcacggatatacaacatgagagcatgggaagaacttgggagtggccgcttttatggctctcaaatggtgaattcatacctatgtgaacctttggactctcctagttggtgacacatggaaatggcacatggacacatggaccttttattaa

SEQ ID NO: 232270 - DNA, 560 bp, Homo sapiens
aattacatctctagtgaggtctctcaacattaccgttgtactgactttgggaaccagataatgctttgtagtgggggcggccatgtgtactgaagttaaaagactgagaacatgcacaaagatagatattatttctgatgtatttagttatttatattagctacaaaaatttgtaataacttacacatccaaaaataaatgtagactgaaccactaaaatcctatttatgcaagtatctttggacttcacgtttctgaaagttgcgtcttcgttcggatctatctggggcttggtgttgatgggcccatgtctacgctgtggaatctcaccggctgggaggacatcttatggttctactcacagggaggttttaaactgagacccataggctaagccattgttaaccaggcgaaggacaactgtgcataaagggagtatctctggcagagagacaagcatgtgtgtgggaagatgtaagtacctttgataatttctccaaaaaacttagtggtctcaacgaaaagctcctatttccatcaataaaatatgaaaacaacta

SEQ ID NO: 232271 - DNA, 779 bp, Homo sapiens
tagctgggagaagaccagtggtgtagaagtttgtaacctctcagaggaaattcaggatgctggtgggtgcctaggggaggtctctgctcagaaatgaacagagcacaaaggctgcaagctggggctgggtgctgggaactgggccctcagccacgccctgaggggcagtggctcgttcggcccggcacttgggccagtagagttcgctggggtgaggggctttcaaaaggagcgactcaccaaaatcaaattgatggactatgggcatcattttgctttgaaaattcagaagaaaatagaaattttgaaaatatcattttaaaatgtttgagcactatttatttatttatttttaataaattgtaaagacctggatcaactgcttggaagtgagcattatttttgaataatgctatataatgaaaaagaagctatataatgaaaaagaagaaatactcatcaaatgttacaatgggctattacaactcagcgtgtgagcagagccaaaacttggtttcatgaaatgacttaaaattgagtagttcatacaattaatttcaattctacacacaaggtagaaactggatttgaattcggtttcagtcacgggctcttgaggactcagttcttccttttgtggtctaatggcctgctatcccttcccttaggaccacagtgccaggctcaggccaagctgaaatgtgtccctcccactgggcttcagcatgcctacatcccctttctagagtctccgcaggcggcctctggcctgagcaatg

SEQ ID NO: 232272 - DNA, 358 bp, Homo sapiens
aaaaaaaaaaagaaaggccaccgctttactttagctaacaagagatgatatttcacaatacagtgacaaatggggccctaattgaggaatttgttaacagcccttccccttatagtggcattagcccaatttggccttagctgtaccactcacacagcttatattctgcaggatttagcgccaagaagacggggaatttaactcaataattaaacctccaaattgtcatgtcagcctgtgtatctctctctcctacctcctatccatgcctcagtttctctcggtaggagcacaggggaaagtcaccaatcagtccagtaatcaacatgtaggaattgagcaaggcttgagtggtgtg

SEQ ID NO: 232273 - DNA, 427 bp, Homo sapiens
cggtagatgcccctctccctctgtcagagctgagcatggcacttgtaaatagcgtcttcctggaagtgctgggtagggaacacctgtgggggctgttgctcaccccctcttcagggaacgctggtgctcatatttatgtatttggtggcctgaggggaggtactacttcacttgaattggatgtgtgctgctcatgtctttttggagtgtgttctgtgccttttgacagctttcagctttctcctcctcttcaggacctgttaaaggtttcagccctcctctcacaggctagggggcggtcaggatccccgtaccacaaggtgctggggggtatgtgggggctttttcttcatcgtgttcaggtgaatacaagtgtggcctctgtactgggatgctttctttcaccaagcaacctcattacattaaa

SEQ ID NO: 232274 - DNA, 418 bp, Homo sapiens
aactctagctctgcacaaatccattaggcaggctggcggggcgttattttacaaagggactcgcttctacaaagaaagacaaaagcttggtgcaaacaggcgtcttgactgacttccacctctccctacggtccccttcacagatcacaaacaaataaagcccaaaggacctcagccaaggatctccagatccaattttacagatggcgaaactgagacctcaagcaagactcaaattgatttttgtcaatattccccgaagtcagaggttgagaccctctttgagaccaaagatccaggcgggagtggagttctctttaaagtcgccaacaaccacgccaaaatgtccctttcccctgccccccattgcaagtgtttgattcaaagtcaaatggaaattggtttcagcagttgaaaa

SEQ ID NO: 232275 - DNA, 375 bp, Homo sapiens
gaaatattttttaaaattaacaaattaagaaaaactgtacacactgtttgtattatcccctcagagctgtattcttggcagttgaatctctagttggacttgtcagaagatattttggaggacgctttcttgagcaacacagtagttacactggcaactctacaaacatgtagtgctgtctctgtattttttagtgtgtgttctttgatttattttaaaccatggacatatgaagttataccaccaaatattagcaggtcattcctaaataataacagaacggaaacagtaatagtttacatttacttttccttaatcatagtatctaaaggtgctgtattagtctgggtccaataacgagatttaaaccacact

SEQ ID NO: 232276 - DNA, 266 bp, Homo sapiens
gactctccatcctggaacaccgggcatgacctgactcgcctttgcctcgccgttccctctgcctgcgatgctgtttccccgaccacacaggcctccctggctcctggcctcctccagtcttttctcagggtcttctccgtgaggcccctctgacaaccccgttcacattcctaaccagcacccagcagcctgtctcattgtctcttactggaatgtgtgtttgcacggcagggattttccccctgctgtgtggtgatggatcccca

SEQ ID NO: 232277 - DNA, 394 bp, Homo sapiens
tggctctgtgacagccaagcctctgtctgccatagagtttggcggtgggaagggaggcggactgcactcccgcacactggtggggcaaggaaatcaaaacccactcttgcatacatgtgccagcaaagtgatgtggggagttgctgtgggcccaggggaagctgcagtgtagggagggaatgtgtgggctggtgcatggctacaggggctaccttgctgaaactctctgccagtcaggcacggtctgtcagtgcagttggtgtagtgcaggcctccagggaacctgagattgcccagcaagcaggcatgggtatgctggggccttgggagaggccagcagaccaaggggagctcaagtcggaccggcctcatctgatggggaagaccaccctgc

SEQ ID NO: 232278 - DNA, 507 bp, Homo sapiens
aactgaagtaaatgtttttgaaatacagttgacttaccaaatgaatatagttttatggtgtatacttttacttctctaaaaaaaaaaagtatactttccattgttggctcttttccattgttggctcagttcttttccattgaatgtatgcagccttaatagaaaacgtttcttggtattgcaaagtctgttaggttacaggctggttgaaggaaggaaggaacctacaataataagtgtaaagccacagaaggaagagcagacagtggctgagtgaaagctggagaggatgtcgggctcagatgaggggaagggatgggagtgtcggcagtttttaaggaatctgagaaaacaaagcctaagtgttggagtcgtgccccattttggtcctcgtgatgccatcaacaagcatgtatttggcatatatttcactggagatgctaggtgtttgggggactttgaggataagagataccccttcctgtcgagaagtttggaatataattg

SEQ ID NO: 232279 - DNA, 1034 bp, Homo sapiens
agtggctttatgtgtccatgtaaagggacgtcagctggaatagcactcttggcctccgtccatccctttgcacaccccacccatgagaaggaggagtgacttattggcaagtttaggagaggaaccaggtaattcagctgctgtcctaagagcactaattctggtccgctcccccagatctgctcctccatgccatcagcccttcatgggcagtttcccaggaggggagcctctggctatccagtgatgcttgtgactcagaggtaagtctctgaaatcctggggttcaatttgctgctacgaactaagttgcatcctccaactgtctgatgttttgatccccatgtatctgaccaccctctgtctatctcaattggttcaaaagttgggtgaggaaaaggaaggctcttcagtgggtctcctcaggccccaacagtgcatggaatgattggtaggtggaaagaactaagggatggaaaccaatcagaaggtctgccaggcgtcatgatgtgtgatgaggactcagattagtgttgaggactcagattagtgtgatagtggcaataaagagaaagtgggacttgtgaaaaggaaaagaaaggctgtaattggggatagatggaggataatggatgaaggaaagggaaaatctaagtgaaggcccaccatctggaatgctctttaccccttcctgccgtctctgaatatcaattctatcctgtcttcaaagtctacctcagataccacctccttctcaagacttttaagaacttcccaggcaaaagccctctctttcttctcttgcgtgttagaaggctctgagtactttatgctgcatattgcagatactttggggcccatcttttctccactatgggctataaactctgttgacacgatctgtgtctgattggtttggtatctccacagattgtagcaaagtcctttgctgatacagtcaacaatatttatggagctagcctctggtattcaggaaggagagagatatcaaggttcctgttctcaggaggaga

SEQ ID NO: 232280 - DNA, 508 bp, Homo sapiens
acatgtactatgtgcgaacatgtactatgtgcgaacatgtactatgtgcctgccatgtgtgggcttgaatactctagcatttgagtaggggagcaggcaacaaacaaatcaatatttgggataatatcagttagtgctaagtgcaaggaagaaaaataaagcagatcagccttaagaataattttgtgtttaaatatacatcttccatttcagtatttgtgtatggttaaaatatgcttttatttatgttatgtaatttagtcctcaacatactttaagaggagacagggctaatattatacctatttgatgaataagtaaactgaggtacaaagaggttatgtgatttatcaagttacaaagcaagttgtggatttgcaactgcgttctttcctgtccagtgatttatctctaaagtattctttttataagtaaaattcttatatttgtttaaaaaaaagctgctgtggactataatgataaaaataaaaataaaccatatatcatg

SEQ ID NO: 232281 - DNA, 549 bp, Homo sapiens
caggagattgcaggaaataatttccaacagcaaatgagacattaattattcaatgcagataaacatcaacaacagcgcttcatccaaaggaattccactgggatccaggggctctgagttggagcccagttcggtcctctactcatggtgacctcagacacagtctctgtgtctcgggctcactgctgtaaaatcatgcggcctgtcgatgggtccatgtcacttgcagcatcttagtcctcattctggaggacacgtgccctcttagcagtgagccctggaggggctgactcgcagtgtctgctgtgttttccagtttccatgatgtaaatgcaccagggctgattctgggctgccagtgttttgacaattgatttgcagactgcgtgaaaatttaaaactcagctctcttgagctgatatgagccaccccagcccacccctgcagcaggcacgaacgttagtttgcagggagaggccagctgagctgctgcacagacctgctgggatcatcacagctgtgcgcttcaggccagtgcctcttcctgta

SEQ ID NO: 232282 - DNA, 248 bp, Homo sapiens
tttagaggttgctctagagattacaaatacacttttgactgattaccacccccctccagccttttgttctacagttgtcgtatttttgtttccacatattttaaatcccacaagccacaactattattttaaacagtcagaatttgtatttactcacatttatccttaccattgttcatttctttctgcagttctttgcttttatctgttattttcttgcaacacaaagaacttgctttaatattctc

SEQ ID NO: 232283 - DNA, 681 bp, Homo sapiens
cagtcatgccctgcctcttcctgagaatgccagcgacatttcttgggaggtgggattgggatggcggtggctcggggaccttggccatctcattggctcctgctcaccagtttcctgctgctccccagggcccttgttccagcggttcctccaccctcctcctctcaaatcccatgtgcctgccccaggcagcccaggccttctccctcgtgcccacggtgacaggcagcacagcgagtggtgacaccgcagggtcagcctccctgtcccccggcccctcgatcagtctcctctgcctttggggagagctgagggcctccgtgccctggcagaggagcctgaggagtcagaggtggcctcctatggtgttgccccacagcgcagccctggaagggaggctgagggcagctcttgcctagcatggtcccttgacaaatggtcctgggtgacaaagtcgcaaggttgtgtctcttacctgcccacaggtgcacgtcgtcagccccaccgcctcactgcagcccccaaggttaccgccagccgccgaggggtgggaacggcagggtgatgatatcaacagccaagaaccccctgggcttgtccactgctcaggccgtcccagtccccggggaagcaggtccaccactaggcccattcgacagatagcagcacaatcaccgtcac

SEQ ID NO: 232284 - DNA, 591 bp, Homo sapiens
tggagcatggtttcaaaatttgaggcaattagaagcaatgccacaatggattcactttaagatttatttagtgtagtgttttttaaaaatgaattacttgatcccttctaataatactgagaaattgctctttttgccaaattgttttcaatatcagaactatgcattctcatcaatagcaaacaggaatgtcagtttctcaacattctcaccaatatttgatgccatcagtcttttcgaacttggccaatctgtgaagcaaaagcatctgtcactgctgttaatttaaagtcttttcatgtattgtttggtcatttctatttctttggtgacatttccattcgtatcttttgaccatgttctaatggcatgtttgtcttcttgttgaatttttggatctctttatatagtttggttatttatcctttgccttatacgatgtaatattttctgtaagtctgcaatttatcttttaattttatttacggtatcttttgttgtacatagttaaaaattctaaagtaatcatctctgccagtcttttataatacctgaatttcttttcataagaagctcttctccaccatgaga

SEQ ID NO: 232285 - DNA, 485 bp, Homo sapiens
ttgtcttgcttttgccctggtggtctttatttccatattctaagcttttctgaccaaatattttggtttgctattaatattttaaaagaccattacaacagtagccaagaggtggaaacaatcaaagtgtccatcgttggatgaatggatgatcagattttggtacataaacaataatggaatattcaggtaaaagaaggaaggacatttaagtgaaataagccagtctcaaaaaggcacctctttataagtgtgattccacttataagaggtatctagagtagttcatttcatgagttgccaggaactagggtgaggaggaatgggagttcttgtttaatgagtatagattattcattttttaggatgaagagaattctggggatgggtagtaccaatggcgaatatacttcctatcactgaactgtacacttaaaaatggttaaattggtccatttcatgttatatgtattttatcacaatta

SEQ ID NO: 232286 - DNA, 428 bp, Homo sapiens
tcaacatctttctttgagctccatgtttttccctcttactgttccagttgcatgacagaattcaggagtttgatgcaggtgaacagtaggaaaattataaagagagaggctgggtgcggtgactcacgcctgtaatcccagcactttgggaggccaaggtgggcagatcacttgagatcaggagtttgagaatagcctggccaacatggtgaaaccctgtctctactaaaaatatgaaaactagccaggggtggtggcgggcacctgtagtcccagctacaggagggaggctgaagcaagaggttcgcttgaacctggaaggtggagattgcagtgagctgagatcacaccactgcactctagcctgggcgacagaacgagactccatctcaatgaaaataaataaataaataaataaataaataaat

SEQ ID NO: 232287 - DNA, 1328 bp, Homo sapiens
gatgtcagagaaccagtgactgagtgcagaggtgacttcacaccagcatctgctgtagccagaggtgggctgcaagagggaattagaggagccaacatgtcctctttctcctttagggtccatggagcagtccgctgcttccaggttgcctgtggggtccttcccagctctccgccctgacacgtcttcactccctagcactcgtggagctgactgggtggggacctcagtgttgactgaaagcgtgaatcaagtgccaggcactggtgacagagcacacagaggctgctgggcctcccaaggtcggggagcttgtggggaattcacattcttggttccgggactgattcactgagtcaatcaatattgattgagcacttagttggttgtggtggtggtaggaatgaattcctgggcttcctgcagcccctttccatgaatctatacatatcaaacatgtgcatgcatttgtaaacattaatgggagtgtactttacttttttcattttactcataaacagacgaggactttaaaaaaatcacaattattaaataattcccattactatacctgacaaaactaataataatttcataatagctaataccccgtcaatccatgccatattttccctcatctaaaaaacagaaaaaattacttttttttcccccaaagacagggtcttgatcagagctcactgcaatatcaaactcctgggttcaagtgatcctcctgtctcagcctctggagtagctgggattataggcatgcaccaccatgcctggctactttttgtagagaaaaaaatttaaaaaggtctcactatgtggcccagagtgttcttgaattcctggcctcaagcaatcttcctgcctcagtttcccaaagcactgagattacaggcatgagccaccatgcccagccaaaactttacttttttacacttgcttttctggaatcaggatctaaacatattgcatgcggttgatatattaagcctgttttattttttattttttcttctttcttaagcctctttattatagttccccctacattttggttcacatgccactgttatgttgaagaaactgggtcctttgtcttctggataccgttttacaaacatacttgttttcatttaataaatggctaaatttctttctatgtcaataattatacacatcattattttaaatcaccacatcccattgtgtggatagactatcatttataaagcaaattgcagtattttgagtgtttggatagtttacagagttttgctctaataataaagttgcaatgacaacccttgttgcatattttt

SEQ ID NO: 232288 - DNA, 705 bp, Homo sapiens
aggcaaatatcccataaatcctatttgcctctctttctcctaacctctggctccaccaactccccaacaggcctcctgcacacacaataggagtcaggagggaggaggcaggactgtgctacacaagggagatgggattataggcatgcaccaccatgcctggctactttttgtagagaaaaaaatttaaaaaggtctcactatgtggcccagagtgttcttgaattcctggcctcaagcaatcttcctgcctcagtttcccaaagcactgagattacaggcatgagccaccatgcccagccaaaactttacttttttacacttgcttttctggaatcaggatctaaacatattgcatgcggttgatatattaagcctgttttattttttattttttcttctttcttaagcctctttattatagttccccctacattttggttcacatgccactgttatgttgaagaaactgggtcctttgtcttctggataccgttttacaaacatacttgttttcatttaataaatggctaaatttctttctatgtcaataattatacacatcattattttaaatcaccacatcccattgtgtggatagactatcatttataaagcaaattgcagtattttgagtgtttggatagtttacagagttttgctctaataataaagttgcaatgacaacccttgttgcatattttt

SEQ ID NO: 232289 - DNA, 1201 bp, Homo sapiens
gatgtcagagaaccagtgactgagtgcagaggtgacttcacaccagcatctgctgtagccagaggtgggctgcaagagggaattagaggagccaacatgtcctctttctcctttagggtccatggagcagtccgctgcttccaggttgcctgtggggtccttcccagctctccgccctgacacgtcttcactccctagcactcgtggagctgactgggtggggacctcagtgttgactgaaagcgtgaatcaagtgccaggcactggtgacagagcacacagaggctgctgggcctcccaaggtcggggagcttgtggggaattcacattcttggttccgggactgattcactgagtcaatcaatattgattgagcacttagttggttgtggtggtggtaggaatgaattcctgggcttcctgcagcccctttccatgaatctatacatatcaaacatgtgcatgcatttgtaaacattaatgggagtgtactttacttttttcattttactcataaacagacgaggactttaaaaaaatcacaattattaaataattcccattactatacctgacaaaactaataataatttcataatagctaataccccgtcaatccatgccatattttccctcatctaaaaaacagaaaaaattacttttttttcccccaaagacagggtcttgatcagagctcactgcaatatcaaactcctgggttcaagtgatcctcctgtctcagcctctggagtagctgggattataggcatgcaccaccatgcctggctactttttgtagagaaaaaaatttaaaaaggtctcactatgtggcccagagtgttcttgaattcctggcctcaagcaatcttcctgcctcagtttcccaaagcactgagattacaggcatgagccaccatgcccagccaaaactttacttttttacacttgcttttctggaatcaggatctaaacatattgcatgcggttgatatattaagcctgttttattttttattttttcttctttcttaagcctctttattatagttccccctacattttggttcacatgccactgttatgttgaagaaactgggtcctttgtcttctggataccgttttacaaacatacttgttttcatttaataaatggctaaatttctttctatgtcaaaaaaaaaaagtcgacgcggtcgtgaat

SEQ ID NO: 232290 - DNA, 491 bp, Homo sapiens
taaaatagaggcattagagctataaatgtcctgttaagcactgctttagctatatctaataagtttaggtatacatgtcttcatttttatttatctcaaagtgtcttctaatttcacttgatgtcttctttgactcatttactatttaggaaaatgttgtttaatttccacatatttgtaaattttcccattttttctgttattgatttctaattccattgccgttggaaagaacatactttgcataatttcaagctttttacatttattgaggcttattttatgactagctgcagaatgttccatatgcgctttagaaaaatgtgtattttgctgttttggggagacgtgttccatagatatctcttaagtctagttggtttatactattgttcaagtcttctattttcttgttggtcttctgcctacttattttattcattattgaaagcaacatattaaagactctaatattattatgaaattttcta

SEQ ID NO: 232291 - DNA, 262 bp, Homo sapiens
gggctcacattttctgtgtaaatagctattttgcagttttctttaataatttttccatttataagtgggtgttcttaacactgaatcgtgaaactaaccgtccattttaaagatgccataaaaatacataagcaaattggcggggcgcggttccttacgcctgtaatcccaggactttggaaggccaaggtgggcggatcacagggtcaggagttccaggacagcctgaccaacatggtgtgaagccccgtctttactaaaa

SEQ ID NO: 232292 - DNA, 410 bp, Homo sapiens
tttactgtactcatttcacagtctgtgatgcagcaatccacaaaatattctatatcagtctcatgatgaactattaaatgaagggacatactcattttttgagtttccaaaaattatagaaataaggtagcctgtgaagacttacatacacacatgcacacacatacacacatatatatacccttaagcacacatgctatcaatagctctcatcagaattttcctagtataagttattaacaatggtgtaaaatggacaataatgtttctccttgtactttcaaaagatgaaatttacagtagtaaagagcatattttaaaatacaaatctctgaacaatgttgaggttgaaaattcatgcccatggcaatgccaaggcaaaataaaaggtctcgtagagaataatcttg

SEQ ID NO: 232293 - DNA, 372 bp, Homo sapiens
ccaaatggaaaatgttgaatgaatgtctggctcagtgatggacagtcagtatcatctttaaaatctagggctctcattcatgaattagactcctagtcctggagtgactatgtacaggagtgtggtagtggtgctgtatgtgaacacatgcaagcttgatttgccttcaggtggctgatagcctagtaaatcatcaaaatgagatcctgagtgttaatgtacactggacataaaaacaaatactggatcagcagcagacatttgtttactctgcaacttatgttttctatttccccttaccccttttcctccccgcccctgtaagtttttatttacctagtatggctttctttttagttgactctcaagtca

SEQ ID NO: 232294 - DNA, 806 bp, Homo sapiens
catccgtcttcacgttggatgcccagtggcattcaggaggttcttggcataactaggaaacagcattagccatcttgaacctattgtgctcaggaaggaaagcaacagggaaatcttggaagtaaaggctccctgcaaagcatcacaaatgctttacaatgtgtgattaaaggactgctggtttttatagtgagaatcccctgaagtctcagctgccaaaagaataatactagtggaggttccatcacaggaataacaatttccttctcacttcacaagctcctctgatcttgccaatgtgatgtttaattcaaaacagcgcacttacagcctttattttatacttatttagatattcacatgggaactgaaagtagactcagtggagttttttgttttttatatttttaacaattgtactttttctatcactttaaaaaaatctagtcaggtaattatagtacagttatttttaagctggggttagttgaacttgtatagcatttaatatactccttttaaatatatttctgccaggcatggtggctcatgcctataatcccagcactttgagaggccaaggtgggaggatcatttgagcccaggatatcgagaccagcctgcactacaaaaaaatccaaaaaatgaggtgggaggatcacttgagcccaggaagtcaaggctgcagtgagccttgatagcgccactgcactcctgcctgggaaaatgagacccagactcaaaataaatcaatgaatgaattaataaacaaataaataaataaataaatttcccataaattacca

SEQ ID NO: 232295 - DNA, 466 bp, Homo sapiens
tcctcctgtgaattgactgttcatatcctttgcccattcagctctcagattgtttattttacgcagatctgctttctaactcaagggtcacgacaggaactcctctaatataatccatcatcatgtaacatttttgtcccctttctgttttgcaacaactctgaaaataatgacttgcctatactgctaaataagagggtaagaatccatgccccacgcctccagccccagaataaaaaacaagtggaaactaacgatttttttcttacacgtattatagaatttctaagtctgtctggagcagtgggcacccaggcatagaccacttctttagactgagcacctgctctttgagggcagggactgtacctggttccattttccagatatttttccacttgtttatttcctaaacctttttcctactccggaaaccatgcatatcctttccccatgcatcagctgg

SEQ ID NO: 232296 - DNA, 505 bp, Homo sapiens
ctcaatccaaagctgccatccttatctatgaaccagtaaactgcccttcacagaaggccttggctttttacctttaaggatgatgcccttattctaagaaaagaacaaagaaggttagtgggagtacagggaagagacaactgaattgattcatacacttaagctctaaacgtggccaacatctcttagtagctgaagtgaaatggtaaatactttgggttacatagttttctgataaagtaaaggcaaagcaaatgcctaagtagaaagaaatgaccctgaacttttaaactcaagcaagcagtcatggagtgacaggctttttggccttgcctgatgacagtgtacatgacagaaaggcatgatggcagggcatgtatcatctttgtccatttccccccaattgagaccccaatcgtaccatcttcaggtttcttccaaagttatgcgtaagtgagtgactctcgtcagcatcaaagaccagtatttggtctgtattacattt

SEQ ID NO: 232297 - DNA, 436 bp, Homo sapiens
acagctaggaggcaagggagcccctgcagtggagtccataggttgggtcatcctttcagggcccacagaagggtagataatggctctggggacagtgtggataaaggggacttacacagaggagttagtagggagccactttagatggagtggcccagggaggcctctgcacagcctggaccaggttgacaggaagaagctccctggggaggtgtttgtgtggccggcatcccggcagagggactagcaggtgcagaagctccagtgcagggtgaactccatttttaaaggacttgaagggttgcatgagagacagagaggcgattggtagctgaggttggataagcaaccagaaaacatccccctggggccatggtaaggattcaggtgtgattctaattgcacatcttggtggagaatggctttcaggagggaa

SEQ ID NO: 232298 - DNA, 428 bp, Homo sapiens
cccaggcagatatggcctctgatatgcttggcctttgagaccatgctctttcctgttctcctgaagaaccagtagctatgagcacagaaattactacctacttgaaactggacttgttttctgcgctcctatgaaactgaacagtggagggttgctcgtgaaggatctgggacatgtttcatatggagcacaagaaaaggacgtcgaacatgcaacggtctgcatccagaggaagaaacaaagatatgaagaggttaaataacttgccaaggccaatcagctagcgagcatcagagctaggattcaagcccaggcagaccagctccagagcctgagctagactcaatgtcagtgatgatgtcgttgaccttcggggacagattctgcttttgccctggtgggtctgggttgagatgcattgcatttga

SEQ ID NO: 232299 - DNA, 434 bp, Homo sapiens
ccaggcccacacttggcagtgctaactcagcatgacaacacgcttaccaagttccttttcagagtggactttcacctccccttattctgtgcattcagcacagcgtatggagaaaaaggctaagctgggaatcaggacgcctggatttgagctctgcaccattcctgtggccttggctcagttattaaatctttctgcatttcagtacctgtaaaatgtcaggattcactcaaaaatcacctccaagtttcctgcagttataacacatatatgattgtctatattaaccttctaaaacaagcccaaatacaaataatgtaagtttacaaagaaacataaacaatcacgaaagcaaatgctttccttcacggtcattacaccaagtcaatgtaacactcctaacgatataacaccgtgctctaaaatggcggccg

SEQ ID NO: 232300 - DNA, 832 bp, Homo sapiens
tttaccctttgatttttctatacctagcatctaatctaatgcttagaaaataacaaatatttaataaacgtttgctggttaaatgcatttgttcaatgctatcgatcagatttttactgtggaaggctcactgaccagagtaggggatgagtacaaagagtctcagggcatttgggaaacaggataaaggccctttgtagaaaactggccaagggtgttgagtgcctgagctcagggaagtggcagtggatggaaaaatatttaggtggtggaattggtggttgattgaacatgtggggaaatgaaacaatctacgattatttgaaggcttctgggtttagaaaattatttggatgggggtgtgattcaccaaggggaatgaactgtgttctagacattttgaaattgagatgttcagagtattggttgaagttgtccaagagataactgggtatggagtttggagaaagtactattttggagagagaagttggagatttaccaacctctaggtactctttgaagctgtgaccataaaggagataactgtcatctgttgctgattagattgtcatagtggtggtggtacattggggaagaagagaataggtccaggagatcttgatattgaaggtccagatcaagaaggagagaggcctgtgaaggtttctaatttaaatcttggttctgcctcttgtctctgttctatgatgcttgaacaaattattctatgaatcttagcttcttcatctgtaaaatgagagtaatagtatatactttataaggatattgaaaggattcaataagtttccatatattaaatccctgccac

SEQ ID NO: 232301 - DNA, 549 bp, Homo sapiens
atgtgggccttccccaggagatgatcctgttaagtgttcggcagtaacctactttgttccttcgcctcagcagcaaatcttgctactggctctagatctgcggtttcccctctaccctgcctcccgtctccccagaatgggaatttcttttatgtttttatttttttcctggctcccttttatttttgtgcgcgatatttaaggtcgtctggatggggaagcaacctgcagctgaggtcgccggcgcctttttctttttagatgggaaggaggccaggaaagggtcagcttaaccatttcctatgtgccaagctgtgccagcagtccagggtaccctgactgtccctctgtagactgttgagactgagttcctgttgggacagtcagttggtatgtatccaagtccctgctgaccactaatgttctagctgatggtgagcggcacagtcccacttccccatctccccaagtaggtggtgttagaaaaccttaattttttttcccttttgtatggactacaaataaaacttggggcaatttgcagtttgg

SEQ ID NO: 232302 - DNA, 446 bp, Homo sapiens
gggatgcagatagaggccatctaaacccagagaactttcagctgccctgaaaatgaagtggactttttcattcttagcaggagattacaaaagaatactccatttacatttgaacttattgtcctgaagaaatcctctgggcgccatgcacggtggctcacgcctataatcccagcattttgggaggccaaggcaggagggtcgcttgagcccaggagtttaacaccagcctgggtaacatagtgagacactgtctctacaaaaaatagaaatacattagctgggcgtggtggtgcatgcctgtggtcccagccactcaggaagctgagacaggagaatcacttgagcccaggaggttgaaggtgcagtgagctgtgatggtgtcactgcactccagcctcggtgatgggtggcagagcaagactctgcctcacaaaaaaaaaaaa

SEQ ID NO: 232303 - DNA, 465 bp, Homo sapiens
tgtaatcccagctgctcaggaggctgaggcgggagaatcacttgaacctgggaggcggaggttgcagcgagccgagatcatgccactgcactccagcctgggtgacagagcgagagaccctgtatcaaaacaaacaaagaaacagcaacaacaacaaaaattagcctcgggtggtagcatgcatctgtgattctcagctacttgggaggctgaggttgaaggattgcttgagcccaggagatcagggctgcagtgagctatgattataccactgcactccagcctgcatgacagaccaagaccttgtctcaaaaataagataaaaataagaatattttcaaatgtttgccaatctgatgggtgaaaaaatgcaaattcattgttttcactagagtttccctgaatagtggtgaggctgcgtatctttggtatttggaaatgtctacgatatttgtccacttttca

SEQ ID NO: 232304 - DNA, 628 bp, Homo sapiens
ggaggatcatttgagcccaggaatttaagactagcctgggaaacgtaatgagaccccatctctacaaaatatttaaaattagctggctgtgttggcatacaactgtagtcttagctgcttgggaggctgaggtgagaggattgcctgagcccaggaggtctaggttgcagagagctatgcttgcactcccacctgggcaacagagcaagactgtgtctcaaaaaaataaaacaaaaacctctaagcaattgttacaaatctcagattattcttttgtatgactgtgttttctaatattatagatgcagcatattctcaaatatcattgttaaaagctttgtcctgaaatatgtctattttaatgggaaatatttgcactgattcttcagactggtccttctccccatctttattgtgagagatatagaatttaacttttaaaatagtaattaaataccacaacaaagtaaggatacttgtggagttgttttctctttaagtaagtacaatgactaatgctggtggcataaatacatacttacttttattccttatgacctgatgtagtcacagtaccccaaagtactgtatgtattatcaaataagctaccaacactcaccgtttttt

SEQ ID NO: 232305 - DNA, 500 bp, Homo sapiens
ggaggatcatttgagcccaggaatttaagactagcctgggaaacgtaatgagaccccatctctacaaaatatttaaaattagctggctgtgttggcatacaactgtagtcttagctgcttgggaggctgaggtgagaggattgcctgagcccaggaggtctaggttgcagagagctatgcttgcactcccacctgggcaacagagcaagactgtgtctcaaaaaaataaaacaaaaacctctaagcaattgttacaaatctcagattattcttttgtatgactgtgttttctaatattatagatgcagcatattctcaaatatcattgttaaaagctttgtcctgaaatatgtctattttaatgggaaatatttgcactgattcttcagactggtccttctccccatctttattgtgagagatatagaatttaacttttctttaagtaagtacaatgactaaaaatacttcatttgccaagagtctgctttcgttccttt

SEQ ID NO: 232306 - DNA, 503 bp, Homo sapiens
ggaggatcatttgagcccaggaatttaagactagcctgggaaacgtaatgagaccccatctctacaaaatatttaaaattagctggctgtgttggcatacaactgtagtcttagctgcttgggaggctgaggtgagaggattgcctgagcccaggaggtctaggttgcagagagctatgcttgcactcccacctgggcaacagagcaagactgtgtctcaaaaaaataaaacaaaaacctctaagcaattgttacaaatctcagattattcttttgtatgactgtgttttctaatattatagatgcagcatattctcaaatatcatttgattcttcagactggtccttctccccatctttattgtgagagatatagaatttaacttttaaaatagtaattaaataccacaacaaagtaaggatacttgtggagttgttttctctttaagtaagtacaatgactaaaaatacttcatttgccaagagtctgctttcgttccttt

SEQ ID NO: 232307 - DNA, 533 bp, Homo sapiens
gaatatctgcatatacataatgatctattttggggatgggacccaaatctaaacatgaaattcatttatgtttcatacacatcttctgcacatagcctgaagataactttatttttctcttggggttactgaataaactgcgtgttgtgcacttgcattttgactacaatccaccacctaaacccgggtgtagggttttccacatgtggtgtcatgtcagtgctcaaaaatttcaaatttggggctgggtacactgtctaatgcctgtaatcccagaactttgtgaggcagaagcagaaagatagcccgagcccaggagtttgagatcagtttgggcaatatactgaaacccccatctccacaaaaactcaactaaaataaaaattagtcagacatttttggcgtgcacatgtagtctctgctacttggaaggctgaggtgtggaggtggcttgagcccaggaaatccaggctgcagtgagccgtgactgtgccactgcactctgcctgggcaacaaagcaaaactcgatctc

SEQ ID NO: 232308 - DNA, 148 bp, Homo sapiens
acacagaagttcctgtttctcccatattctcaccaacaactggtatcatctaatgtttaaaaatatttgccaatgtttttttttgctttgatttacatttctgattactaattgagattgaagatctcttcatacacttgtaagccag

SEQ ID NO: 232309 - DNA, 392 bp, Homo sapiens
atttatatatagatgctccaagttgttttatctacactaaaagttggagcaccctaaatgtccaactacaaggattggttaaataaattctactacacatcagaaaaatgactagaaggaaaaatatcaaaatgttgattgtggtttttggaaggcatagtttcataggtaatttttcccttccttctctgctttctttctgtattttacaagttttcttcttgaacatttgttattttttaattgaaaaaaatgtttaatgagttcagtttcacaatttctgagcatctcctgtgtgccagacctctttggaagaggcaccaagaacagaaacttgttctctgcctttagcagcactcagttctgtaagagtagaggatgagttgtcatag

SEQ ID NO: 232310 - DNA, 445 bp, Homo sapiens
aggctagaggagggtttcacttcaatgaagcagtctgtggacttcctactgcccggcgtggataataagactcctgtgctttcatctgttcaaccggcagccctgagtttgaactggttaagagcactgcagtgaaatcttcggcaaattcctcaaaggagcttactctgcaaattatttctgtgagcaacacatcacccactcttgaagctccttttagtctttgccttcaaaataatcctgacatgaaaaaaagatggcagcactggcattggaccaaccatatcagagtccaacttgatttgcacctgtaatttccctgaggaaatgaaatacctgaaataattcagacactaatttcttcatgaagaatttaagttgcttcccactttagaccaaacactttgtctgcctagcatagtcctgaataaataaactggtgata

SEQ ID NO: 232311 - DNA, 274 bp, Homo sapiens
agagcttcttttaaaaatatgtgcctggggtcctggccttcacctgtactttgcctgtaattttccacctcttggtctttactgtatagcacttgagcaatcagctgttcagggtggtacagctggaggcaccatatgcacttcggcaattacatgtctagactcattacttactttcttttggcactgattccacatgattcgggcatttccaatcatccctagttccacttcttagatcttctgacctcctggcctagccctggagaaattt

SEQ ID NO: 232312 - DNA, 411 bp, Homo sapiens
agtcagagaagagtataatgagtatgttagggaatgctttggggaacaacatctgcaggagaaatggaagcaggattgagcagagggaagagttgacctgcagtgacgtctcagtgaaggcctcgttttgaatctgggatatcccttcagagttgtcttgagttaggggaactgggctggacctttatacacctatgacatttagtcactggatgaacgctgccaaaggagaagagtgcaaccttgggttaaaggactcctgaagatggccaagagctggattgtgttggcttgctgcactctcagcagctcaggaaataagtctttcattgaggaagagggatctgggtagtgcctgccagtattcactaccaagagtgatggcaaaataaatattctgacaaagacaaa

SEQ ID NO: 232313 - DNA, 472 bp, Homo sapiens
ataaaagaaaaagttggttctttgcaaagataaaactgacagaccactagctagattaaccaagaaaaaaagaagattcaaataaatacaatcagaaatgataaggtgatattataactgataacacagacatataaaatatcagcagaaactatatgcacatattagaaaacctagaggaagtggataaattcctagaaacacataaccttccaagattgaaccagggagaaataggaatcctcaacagactactgagtattgaaattgaatcagtaatagaaaaaaatcttgcaaaaacaaaaagcccaggaccagacagattcacagctgaattctactagacatgcaaggaagaactagtaacagcactattgaaactattccaaaaattataggagggaatcctccctaactcattctacaaagccagtatcatcctgatactgaagccaggcaaggataaaacaca

SEQ ID NO: 232314 - DNA, 341 bp, Homo sapiens
agccaagacccgccattgcactccagcctggatgacagagtgaaactccgttaaaaaaaaaatccccaaacaggactacttggaagaaactttctcttcttcccattggatttactggacttaaacctgagaaagggaagggaaaagcagctgccaatatcttgactccttgggggacactcacccaggctgcagccaacacaaagaagaatgtaagagctggagaaagagaacctgggtcctgataacatttttgaatgaatctttacctgaggctgaatctatccctacatattgctgcttgtgttgtaaagcaaataaatttattttcctgcttcacc

SEQ ID NO: 232315 - DNA, 418 bp, Homo sapiens
accccgtctctactaaaaatacaaaaattagctgggcgtggtactaggtgcctgtaatcccagctacttgggaggctgtggcaggagaattgcttgaacccaggaggcggaggttgcggtaagccaagatcatgccaccgcactccaggctgggagacaagagcgaaaccctgtctccaaaaaaaaaaaaaaaaaaaagggagggcaagtcataaagaaagaagattttgaatcaatataaacaactttctggctgggcatggtggctcatgcctataatcccagcactttgggaggcggaggcaggggtcggaagtggtcacctgagcccaggagtttgagactagcctaggaaacacattgagaccccatctttataaaaaatagaacaaattagctgggcatggtggtacatgcc

SEQ ID NO: 232316 - DNA, 343 bp, Homo sapiens
cggcacgaggagacgatctaaacctgaaacagaaagagggaaagctctgtcctggagagaaaattgcacagcgagagcacagtgtacctggacacagagtgaaagagcaggctgaaggagcctgctgtatctgagcacaggctgctctcagcaagtacacatagagacttgcttttgggcccaatgatcccctttactagcaaaatgacgtaagtagcaagagtcaccgtgcccggcctggtagaagtttttatatgaatatatgttgtcatttctcttgagtagatacccagcagtagaactgctgagtcatatgataactcaatgtttaactcttaaaaaa

SEQ ID NO: 232317 - DNA, 422 bp, Homo sapiens
catttcatagcaaaagcactcaataaattgaggattgaagggaactttatcaacctgctaaaagtcatccacaaaaatcccacagctaacctcatatgtaatggtgaatgactgaaagctttacccccaagatcaggaagaagacaaggacatcactctcgccacttacattcaacattttactggtggttctagcaagagtaattaggcaagaaaaataaataaaagacatcctgattggaaaaatgaaattaaactgtttgtatttgtagaagtcatggttttgtacacagaaaatcctaaagaatctatgaaaaccttagagaaaataaatgagttcagtatgcaggacacaataacatcatacaaaggtcaattatatttccatatactagcaatgaatgacctgataatgaaatttt

SEQ ID NO: 232318 - DNA, 1261 bp, Homo sapiens
gggtaagtatacgtaaaataggtgaagggtggagatcagaggaaagcgtgccaaacaggaagacaagttctcaatctagtctgaaaatttaacttgtagtttggctttcaggctttaaactgtcttcagcttggaggtggggtttcaccggggacctgcctctatctgcctaggcgtttgactgtcttctgttgctgtcactagtagcacaatataaagattttgtgctactgtttcacagtgatttgcaattagtgcttttttttgtcatgtagttttgtttttagtgcattattctttaggagaatttatccgtgaagcttgggtatcacagcttactgctatgtccttgatttatacttctcattgactgtgagaagtgatggctagttttcctgctgtgagcaggtttggtgatatacaataccattcgcaagatgttatatatgtgcattgtcacatttctttcaaaaatgatatttccaatttttccaaacattcatatcttctttctggccatcatactgattttattaccaaaataaaatcttatcattaactctgaaaacaatttaaataactataagccatagttagggaatgatttttaataaaacctagatacaaacaccatcattttctcctctaatagcaggttgtcttgcctgactctcaaaaatgagggagctaaatcatacagataggtgacatgttcatggctataaggaacaccatagcataatatttggacagtaagacataatacatatcctgaaaaaactttgatgtgtagtcagtgtaacccttgtcccctgtcctcctccctaacctcaggaaagatccacacttccacatttattccctacccacctttggttttgaatcctcatttccacagatgcagcatgacatctgtaacccctacaaatctgcatacccctccagccttcccagaacttcattccctccatcttcattgccttagctccttttgtctttaagtattcactcactaagtcaagaaaatattggagggggggtggggcaaaacaactaggctttaaaggtgggggattacccagatcaacacaagtctcccacttgaacaactgctctttgacacctgtaccctgagatgtgactatggattaaagtcatagcacccctgcctccaggttggaaagttttatggaaaatgaacatattttattagaagacaatgagaacttcctggagcagatgagtaaacacaccctcatgt

SEQ ID NO: 232319 - DNA, 419 bp, Homo sapiens
caaaaaagacataggacatgtttaagaaacaatatgcttggctagcatgcatagaacgtgagggtgaacagtggggaattaagttttaaaaagtttctgaagtctagtaatagcacttgggatgtcaggataagaggtttttttgaggagtttttgtttgtttgtttgtttgctttttgagatggaatctcactctgtcacccagactcaagtgcagtggggtgatctcagctcactgcaacatctgtctctactaaaaatacaaaaaaattagcggggcgtggtggcgggcgcctgtagtcctagctactcaggaggctgaggcaggagaatggcgtgaacccgggaggcggagcttgcagtgagccgagatcccgccactgcactccagcctgggtgacagagccagattccctttc

SEQ ID NO: 232320 - DNA, 394 bp, Homo sapiens
cactgcactccagcctgagtgacagagtgagactccgtctcaaaagaaaaaaaagtaatagccactgttgctcagccaaagagtgcttatgttgcatatttggctagtgaaggacatgtatgcagaaaacatgtaacaatgttgtttggactgagaagtgtggtgttttggtcagtcttcaacttatagtatagaacagggattgcttactgcagcccatggaccaaatctggctatttccatttgaagtattggctctttaaaaaaagtttgctgggtcaagcagggtggctcacgcctgtaatcctagcactttgtgaggccaaggcgggcggatcacgaggtcaggagttctagaccagcctggccaagatagtgaaaccccatctctact

SEQ ID NO: 232321 - DNA, 289 bp, Homo sapiens
agtcaagtccttccatgttcttctgcctagtttattctggctgcattgagagctgattggattgtgcccccgcagattgagggtgggtctgcttctcccagtccactgactcgaatattaatctcctttggcaacacccccacagacacacccaggaaaaatactttgcatccttcaatccgatcaagttgatactcagtattaaccatcactaaaccaactgtctaacttttagctgtataggtaaaatgcttaagtaaactaaggcaaagataactgtagcaataaa

SEQ ID NO: 232322 - DNA, 291 bp, Homo sapiens
gagtcttcaggcttagaaagctgtgtcggatcagacaagctgtggaaacggagggttctgggccctcctcctgcctccctgtttctcctttgagagtcatcagtgtctgaacaaacaagtggagtcctaagcagcctcattccaggcagacttcctgtctcctctcttatcagccacttgcaaggcaccttctctctcccctgctctcaaactggaccatccctgcaagaagagacagctcctgttttcaataataagaataagaatatctgatatttattgaacatacac

SEQ ID NO: 232323 - DNA, 460 bp, Homo sapiens
agacagaaagagcccttcacacaatcttcttgccagccctcaaaggggaaaacgggcttggaatggcgaaaggatttgcctggggtcactctggaggtggctgagccagggtttgaacctggggccatcctaccccagactttatgtcttaactactgctgggcaggagccaaatcagaccccatggccccaacagtgtgaggcccattgtggctctcagaacatgccagcagctctagccagacgaaatgctgacacagcctctgggtattaatagcccctgtctgggccgggctcctgtgcccctcctgaggccacccagggagaatggggtgagtgcttggtggggagatgagcagatcagttccctgtggtccagggatctgagtccagcggccctcgtgccaccccccatagggaccacttaggagccggaccccttctcttttcagcttcctgg

SEQ ID NO: 232324 - DNA, 392 bp, Homo sapiens
aatcttaacaatgttaagacacggacaagactgaacatccagttcacatccaggaataagtggccaacatggggtaaggacactctccagttagtattcttctctccttggctccaaaaagcacccaggccctggaggagggtcctggtggccttactgattcatggtggaggagttctaagaccaagcagaaggttaggctttggtaaagctcagatgggaacttgcaagcataagaacaagagggaaagtaacccccactgcacagtatccactcctcagctgtgtaaacaaataaaatggtccatttcttctggatcctctcctagttgtctttgtgtggacgcacaagcgcgcacatgcacacacacacacacacacaaaccacttca

SEQ ID NO: 232325 - DNA, 319 bp, Homo sapiens
cccctggacatgcttagcattctttcctcctgtagtcgaaggcccttcgtggtgctctctgccaggtggttttagtgatggcctctaaagacccagctcagttcagccacccagtgcactctcatttggcctccatccatgtcctcttatcactggtggtgggtgtgtccacactcataaaaaggagggggtagagaattttgaccatattaacaaggaggtggttaatactctaagatttcctgttggttctcttcagatagctctcctggtgtatctaaaatcccctcactgtaataatacatttaaatcctgatgt

SEQ ID NO: 232326 - DNA, 413 bp, Homo sapiens
taagaatactttacattattttctgtaaaaattttctgtaaaattatgcctaattaataaactgataatattaaaatacacgttccaccaagtgttcactttttttaacacaagtgttagaatgcatttcagatcacgactattactcattatcattttaattgatgtttaattaaattttaaaaatgttttattttttagttgaaaaatacaattgtatgtatttatggtatgcaacatagttttaaaatatgtattgttgtggaatggctaattagagctgattaacatatgcattacccaatacacttatcatttcttttgtggtgagaacacaaaatatattctcttagtgatttttgagtattcaatctattgttattaaatatagtcaccattaacaagaacttgta

SEQ ID NO: 232327 - DNA, 389 bp, Homo sapiens
aagcaatcacagatgtcttgccattgcataggaagaagactgcatggcagatcagcaagaaagaaatgaggtcagaagttagaccctacatgggaaagtcagaaatgatggaatctcaaggaaagcagcaaggagtgggacaagaatttcctggagctgaatagtttcaagtggcttttatgtattctaggcttctacaagcagggagcatatatatgctgggaattatcagtatcactgagagaaatacattagttatatacagatgcatacacatctaactatattgcacaagtacaagaagtctaaatggtattaaataattaaataattattctatgtacacatagttcagtttaaaatgtggggtttagccgttcttgatttaa

SEQ ID NO: 232328 - DNA, 427 bp, Homo sapiens
gtggctcccccatgctgttctcatgatagcgagtaattttcatgagatccgatggttttataagtgtctggcatttcccccgctggcacttctctctcctgctgccatgtgaagaaggatgtatttgcttccccttccaccatgattgtaagtttcctgaggcctccccagcaatgtggaactgtgagtcaattaaacctctttcctttataaattacacaagctaagatttatcataaattgtaaagtgggaaaattaaaatgaaggaattttaacatacttaaaaagtacattaaaaatgtactttcatgaaacagaaggcaacaagtttgaagacacaactgttgtcttaaagaaaacctttataagagataaactgaatcatccatggagctccagtgaagtgccagaatatttctttatgcc

SEQ ID NO: 232329 - DNA, 601 bp, Homo sapiens
attacaggtgcgtgccaccacgcctggctaatttttgtatttttagtagagacagcgtttcactatgttggccaggctggtctcaaaatcctgccctcaggtgatctgcccaccttggcatccgaaagtgctgggattacaagcgtgagcctccgggcctggcccctcaacacagtttaaacaaggaaaacttatcttcctaaaaatagagaagatagacagttcccaagtggtgatggtggtgtattttgtttgtaagttaatcagcaatttggtgatatcagggttctaggttgacttctctctgattctcttggttttctctaatttggtcatttattgtgatatttaagttaacaagtaaagtgcataggatgggagaaatctccagtggactagtggagtctgtgacagtggggtatgtggagtatagatccacaggctgttggaataggctcaggtcctcatctgctcagaagacaggcagggaaattccagtcttcaagggttttgttggtgaggagaacatggatatggatgtaatgtccttcccttttgttttctttgcacaaatttcagtggaaacatgttgccaagtcag

SEQ ID NO: 232330 - DNA, 457 bp, Homo sapiens
tggatatcccaaacataatggaaaaagcacacacaaataagcttatattatataattccatatacctatgtatatatcaagtataaaagtaggcaaaacaagctactgatggtggcacacacctatagttccagctatttgggaggctgaggcgggaagatcacttgagcccagaagttcaggttcaacctgagcaacatagcaagaccccatctgtaaaaaagaaagcattattaacataaaaataggcagaactactatattcttagagaagttactgttagggagacagacagtgagtgactgaaaggcaaaatgaggggaaattccaggggatagtaaatattttgtttcttagtgtgggttctacttaactgggtattttccatttgtaaactgtaaaattatgtgcacttttctgtatgtgtattacattgcaataaaattgtttaaaagt

SEQ ID NO: 232331 - DNA, 348 bp, Homo sapiens
ggtttctctttctttctcctaaccttaggagaaatgcttccaatgtgtatccagtaagtaaaatctgatttttggactaatatttacttttaaacctattatataaatttctatttattcttgttttattagtaggaatgggttttgatttttgcaaaatgccttttcagcatctatgatgcttttcttcatagatgtatttagagaatgaattatattaatggatgttcttcttgaatcatacttgcattcttgaaaggaaccccactggttgacaatgtatttatttattcactgttatatattctatctgcaaactcacattaaacatttttattgatatttata

SEQ ID NO: 232332 - DNA, 445 bp, Homo sapiens
gtgaggaacagtatgaccatagatcccctctcctacttgggtggaggaagtctccagtagttgaatcagagtaggtgttacctcaggcatgaggcatagctgaggaccactgaaagcagacagattgagttaaagtctacacatgtgggtccaggctcacttctcccacttagccagatagcatgagatagtgggaggatccctctggagcagctggcccacaagagtcctgcaaacactggcaactatgacctagtagaaaaacaaacctattagctggcagactgtacccattgacagtttccaacaagcaccatcatcagcatgagccagacatttggggaaaacagtgcaacattacctccagccatgcaagtgatccatcttggaccactgacccagtcaagccttcagatgactataacctcagccaatacctgactgc

SEQ ID NO: 232333 - DNA, 733 bp, Homo sapiens
gatgaggagttgcttatgcttgagcaaagaagtggtttcttgagatggaatctgttcctggtgaagatgctgtgaacactgctgaaatgactccaagaatttaggatattacgttataaacataattcataaagcaatggtatggtttgagggaattaactccaattttggaagaagttctactgtggattaaaaaattatatcaaacagcattgcatgtacagagaagtctttcatgaagagtccactgattttgcaaacttaatcattgtcttattttaagaaattaccatagccaccccttctttcagcaaccaacaccctaatccatcagcagccttcaatactgaggcaagacctgccaccagcaaaaagattacaaccagctgaaggttcagatgattgttagcattttttatcaataagttatttttaaattatggtatatacatttttttagacataatattattgcatacttaacagattacagcatagcgtaaatgtaacttttgtatgcactgggaaacaaaaaaatgtgtgtccctctctttattgcaaaatattcactttttgtagtggtctggaatggaacctgcagtatctccaaagtatgcttgtatttaaatcttgcttaagaagctagagaaagagtagcaaattattcctgaaataggtagaagaaaacataaaaattttagcatatgtcaataaataaagagcagataaagtc

SEQ ID NO: 232334 - DNA, 442 bp, Homo sapiens
cttacgcgcacctcccaactctaccacttaacaagctgtctgcctttgggcacaactgctcttcccttccacttctgattccctaattcagtctcagtttccttacttttgaatactgtcacttgtacttctgaaactcagtctatgtctctcctttcccacagtcagagattagccatacttaactatccttggactgttgttagactcctgactgcttttcccgacttagtctttccgccgtctgttttatactgtttacaacctccgggttaattttttttttattgtgatacactttctcaagaattttaaacactatcacacttaactaataaaataagtcttaagaccctaacccagccttcaaaagtcttcatatatggctcgtccctcatatttttcttccttgactctccctctcattgcatattgctttttg

SEQ ID NO: 232335 - DNA, 377 bp, Homo sapiens
ctgcccgaggccttgtgtcctgcgatgcttgtggccaagactgcatacattgctgtgacggtggctggttaggggcagggtgcatgagagattgggtcagctttctacatgggccggatgccggctgtcagtggagcacgtggctgctgcagagtgtgacccagctgtccccatctcctgctgtgggtcccttatccggggtccttccgggaaagtggctgatggctcatggctcacttccctcagctccacgcaggcctgggtggcccgctggggaatgagcagaaaccctgcccagggcaccctgacactgttggagaggagctttactgcagggaggccctcaacacacacccacttagtgtcaccggcggccg

SEQ ID NO: 232336 - DNA, 418 bp, Homo sapiens
tcatctcaggacagcatggccgatgtgttcattcatctcaggacggcatggccgatgtgttcattcatctcaggatggcatggaccaggtgttcactcatctcaggacagcatggctgatgtgttcattcatctcaggatagcttggctgatgtgtttattcatctcatgacggcatggaccaggtgtccatccatctcaggacggcaaggcccaggtgttcgttcatctcaggacagcatggccgatgtgttcattcatctcgggacggcatggctgatgtgttcattcatctcaggatggcatggactaggtgttcatccacctcaggacagcatggccaatgtgttcattcatttcaggatggcatggcccaggtgttcattcatctcaggacagcatgaccgttgtgttcattc

SEQ ID NO: 232337 - DNA, 735 bp, Homo sapiens
actgtcaggtgcagaaagcaagcctctttgttctatgggcattttcctccccctggatttgactgttatttactggccacgtgagcgccaggcgcgggtccggcggggaaggcgaccccagaacagggtagacaaaagctggcccagagcgcgacccgtgcgccccagggacgtctccccagctcctgcgacacgcgtgaaattggcccggacctgcctcctgagaggcttttcccagaaatgtcttgttaaagcctttgtaaaggaatcagtgtttacttgcgccgggagagctccggccctgggtcctggcaggcggcggatttctgagctgctggagagcaacccgggaaagcaaaatcagccttggactgtcggggcccctggggctccttgctccttatcgaaagcgagttattagatagacccccacagtcccattcagcagaatgggaaactggactcagacaccttttgccctccccacagggaggccacgccgtgcggctttgaccactgatctcccacccggagtgcccgacgcccagggtcctgccaccgggcagcctcggtcagtccacagttgtggctccttccagggcctggactagggtgagcacaagccttgagcgcaacatttaagaagggcgccgaaaagtcagtaatcaaaagaaatatcttgatgcaatgcctctttaaaagaaaaaaaaatgcaaaaaatccatgatgaataaa

SEQ ID NO: 232338 - DNA, 553 bp, Homo sapiens
attgctagcctggaaagcaaggacaatatatattgaaatttaaagtacatataatttcacattgagcaaattcgttctgaatatagtttttactaggggctgtgggatacccaaaagttgattaacaaatacaaaagtacagctagataggagtaataagttctagtgttctctagcactacagggtgactataattaacaatttattgtatattttcacatacctagaagagcacattttgaatgtttctaacacaaagaagttacaaaagttttgagatgttggatacgttaattaccctgatttgatctttacgcattgtatacttgttgcacaatgtcatgttgtaccccataaatacgtacaattgttgtgtgtcaattattaatagaaataagaaaaagttaactctcaattccattttcaaaaaaatactctatcaggtaaggattatatgtactagaacaattattctagttttgttcctgatagcaaaacagttacaaaaaaacctggaactctcatcagtaaagaaatggttaagttaaaaat

SEQ ID NO: 232339 - DNA, 339 bp, Homo sapiens
gggtatatatttattaagatatttaaatgtatcaaagttataatataagcatgccaaatataaaaaaatagattttggaaataaaaaagtacagcaaacgctttttaaatcaaatctaaacgcacattcacgtctttctcaatcaggtgattcatgagtcaacaaggctgactcttaacaaaaggagtaaagctctaaaatctccaagatttaaaagcaaaaacaaacaaaaaccagctatgcgttgttgttgttttttaatagcttttggatcggataatttagtgagtacttttcaccactgatgcattatgtgtgcaggggctcgtgaagcttgat

SEQ ID NO: 232340 - DNA, 371 bp, Homo sapiens
cccacagccaacctgaggcctgactcagaatgtttttctgggctgagagccacctcttaaagcacatggcccataagctgtagttggtaggaggggaacaagggtgaatccatacaagatctatctgccttgcaatttttctatcaaaattatctgctgggattttctcccatacagagatttaactactgccccaatgtccaaggctagtttctcacagcagagagacagaaatgtacctaagttcacggatgggaaaggcaaaagggaaatgcattcaacaaatgtgaccagcacttttcatgtgccaggaacttcccaaagtgttggggacacaatattgaataaaacaaaactcttgccctcatgga

SEQ ID NO: 232341 - DNA, 846 bp, Homo sapiens
gtttccgatgagaatcaaagtcctacagatacaaacaaacaaacaaaaatgatgaaaaacccacaaatggataaataaatactttcttggtgttgaatcttttctttttaaaatcctgatgtcaacataatacaaataatatgaaatttgttctacagcttaaggtcaactgatttcagcaaatatgagaaatgctctcaaaaggataaattgtttctgtctttttaaaggaagcaaggttcttattcccccagtgaagccagaattgctccagccagggctgaaatgggaatcctgtccaccaaaagccgggtgacccttttatgacattctcatcacaattggaattatccccttcaaaagagaccatgccacagtcttccttttaagcaataacacaaaaggaagtagaaaatgtagatgcaatagttcattacagttggagccctattttctcttattctttgaagatgtcccatttatattcaaggttttgatcagactggaaagaaaacacatttaccagtttagttggtgttgtgtagagaattctaatgttgaaacagtgaaaacagcgtttttcttcatagtgagtgtttcccaagcagtttttacacttgggatgcactaagtgaggccagttcctccagggactcacatagtcccttagcaacctacaagggatgagagttgtaaaaaaatgtgctttggtttgagttctcaagaaaacaaatgacttccttccttctagactttaaagaaagatgacactgaagtggagctactgaggctgcctagagaccacatcaagcctgcagacagagccaacacacagctgagaagatc

SEQ ID NO: 232342 - DNA, 923 bp, Homo sapiens
gggtaacactctgtaattctcccccatgtatacattaatacatttatattgcttttctccaattaatctgccttcacacagctgattttttaatgaaatatcagagagtgaaggggaagttttcctatagctcctacagtagtcaactcatcctgctaccctccacttcccccacctgcctctgaaaaccacagatctgctctccatttctatattttgccttttaaaaaatattataataatatcatatagcatgttgccttttaagtcctaattttttactcttattaaggagtttgagaggtatcatgttatatgtataattattttttttctttttattactgagtatcattccatcatgtaaagttacccctgtttgtttatacattccccagttgaaacaatttcagttgtttccactttggggtggttacgaataaagctgctctaagtattcatatacaggtttttgtatggacataagtattcacttatatgaattgtccaaataactgggtatttgcccaagtgaaccacttgtgaaattatattcacataggtgaatctaacttttccaccaggaaagttagaatgtttcagttgctccatgtccttacaagtttatattcaatttttttcttgttgttttgttatgctttgctttagtcatttcaatgagtttataacactattgcaatgttatttaattcagtgtcatttaattgagagtttctcaatgaattagtaatggaaagaaagtatctcaaaacaataaaggctacacatgacaaattcacagctaacattgtattaaatggagaaaagctaaaagctttttgtttaagaactggaacaagacaaagatacctactatcgccactcttattcaacatagcactggaagtcctggcaatttagac

SEQ ID NO: 232343 - DNA, 270 bp, Homo sapiens
acaccactgcttttgcttccccatagttttcttcattgcatgataactaacttttccaaactaggatttgctacatctagtgtgacaatctctggaacatttcagtagcttatggtgataataataaggatgaatatttgaaaattaaactattttggaaaatctgggacatatgactaccacacccagagatgactaccagggaggcagagttcttaggcctctgaggaggtggcatttccttcaataactttaaaattttttcacatt

SEQ ID NO: 232344 - DNA, 408 bp, Homo sapiens
actgaagtaaagttgaggaaaatgaaggtattctcttttgtaagagaataattgtacaatactgaatatgaacaaaatattgactagtttggacatagtgagctagatgacaatatatcgcatttaatttcctaactcaaaaatagattttgcttttccactttgccattgtaaagcactcatcggtctgtggattcttcagagccccatctggccaacataaaatccccacaggaaaaaaaaccaagagggagaactaataatggagatcctggtgagattaaatttcttttcttctcaatgaaatgtgaaagatgtattacccgcagtttggcaaagacagctaataaatatcacaaccgtgatttgagagccatgctatgcatgaaagcaaaactgagttaaaag

SEQ ID NO: 232345 - DNA, 444 bp, Homo sapiens
gtatagtttgtagcatttaatcttctatttcagtgattggtttggatctacttaattttaagctttactggtcatttgtccccctcatgttgtacctaataagtgtgtagtttttaagtgaaatcatacataatttcaaggaaactgctagagacaatgttgagtatcatcaagaacatttaatcaaacctgttgactaagagctttagtttggcttacaatttcatatgtaaatccaagaaaaagacttgtaagctaaaaagcctgtttcgttcggaaaaaaaagtacataacattttaaagatttgtgagaggaaaaaagcattagatgcgatagaatggaataatctctttttagaagtaaattagtttttatttcatttgtgggtggtattgagaaaagtggtggaaataaatacattgagcagattcagaatttaatag

SEQ ID NO: 232346 - DNA, 138 bp, Homo sapiens
tcttcatcctctccccatgctccctctgttgtcatttccccttactctccactgcacctggtctccagcattgttttctgtttcttttttgttctgagttattctgtgtcagtcagtgaagggtttaattatttttac

SEQ ID NO: 232347 - DNA, 478 bp, Homo sapiens
gttatgaaatatcaactttaaaacctcaaaagcacatttattgcctgaatgaactagttggaaaatgaaagcaggaaataattccagggttctcttttccatggaggtattttaacctctataaggaacattttccagaggctgggacactgtatttatactccctagatgcctggaaagctacagttggtctcattgccgccttattaattatattgagcctaactctaaggtaaatctgagtcctctggggtgggtgggagtgggggtgatgagagtactgtttagctctttgttagtctagggatacagaaggtatcatctaaacagctgaaagaatgcagatgagaacagtattttaaggcttattattttaagcaacagtctaatattagccaacctaatatgagtgtgattgttttctccaaaagtgaccatatctgttaaaatgtgtgattctattacatttgaaatatta

SEQ ID NO: 232348 - DNA, 377 bp, Homo sapiens
aaatcaaggaaattgagcaagccgtctttcaaaggaagctagatcgcattgatccaccgtattccaatcagctatttattttttccacctaacactcccctacagggttactaggacaaatgactcccaggctatgtttcctagaatgggttttttgcccccataccgggactaaaacactgtctccttatactcagttaattactaaagtcatctattcaggtcacaaacgttaaaaatcagttgcgacataaccgatatcatcatgattcctttaagtaaagagcaattcaaagcttcattatctttgtcaatacacccacaaatagttttatctcattacacagagcaaataaagcacatcctccctgctgata

SEQ ID NO: 232349 - DNA, 263 bp, Homo sapiens
cttcagcactttttttttatgcctcctcagttccacccaaaactccatgccctagttttgtgcttcccctgctctctgtatgacctccaatccctggaattcatctctcagctcactcacttcctaatccttttgcaggatttctccccaatcagacaaaatctatctctgtacttagaaacacactacttctaccttgaggtaggaaggtacctaccacactttctacttttcttcttcctctttctaatccttcttcctct

SEQ ID NO: 232350 - DNA, 483 bp, Homo sapiens
ctgagtgccttgctcctcctgatgaatacagagggcaattttctgttgatttggaattgctatttccacatcatcagcaatatttctgcctgagacttttcataaaaattggggcctctcatctgctgctctgtgtgaatctaccagaagttgaagatggtaaagcaacattggttcaaggataaattttcttcaaattacaacagatggaagaaaagattttaaatgacctcttttaaaatgcctggataacataatatggatcatattttggtgtcagaagtttgtatcttagtgatctagcatgtaagctctcccttaagcaatgcaaaggaaagccaaaaccaattatgtagcaaactggaaagaaaggctgttttcggctccttgggcaaatactaacttactgaaagctgaacattactttattgttttgtatttctctttctgcctaataaatgatgaaatggtcaaaagtttctt

SEQ ID NO: 232351 - DNA, 444 bp, Homo sapiens
aaacaacatatgatccaggtctttgactgcacttccccagggcttgagtacatctcgggatattatagaaagtgctacttaaacaccagttgaaatggaagagcatagtacttgataaatccagaatgttaggggatttttgtggcaattttgaggaaattattaaaatatcatttgattattaaagagtaaaactcacaaaatacttggcaaaaccacacacttcctgagcccttgttaacctgactgccttgttcctcctggctcaggaggaaatatatctacttttcatattatgacaatgtagctggcttttccttagcacaagtggaagaaagggctataatgttacacatgatatgtgacttggtaataggtgtcttctctccaccagcattcaatatgtattctgaactttctctttttaagattaagaagtctgtt

SEQ ID NO: 232352 - DNA, 310 bp, Homo sapiens
tgtgtgcctgagtttttgttcagacactgtctccaaatcatacaacactcaaatgagggaaagtgggaactatagtgtttgttccctcagcatctgagggggactgctttcaggacaccctcttggataccaaaatctgcaaatgctcaagtcccttacaaaaaatggtataaatttgcatatgctctgaatcatctctgtattacttataatatctaatacaatgtcaatgctgtgtacatagttgttataccatattgtttagggaataatgacaaaataaagtgtacatgttcagtacagacacaac

SEQ ID NO: 232353 - DNA, 488 bp, Homo sapiens
cagaacacagagagacattgatcagcggggttgtccacacctggaagtggcgtgggggccctggcttcagagagctgctgcccaacacaggaggcgctggccagcccccagccctggaggggcagctgcattcctgggaagcccttgacccacatccccagcacgggaggggaggctctggagtggggcattgctctctctgctgcgctcctggactctgcaggaagagggtgtcttggctatcatggagacgctgacctcagccccagccctgcctcctgggcaggcctggaccaggtgtgttcgccctgggttggggtcagtcccacagcagcgccagggcctggcccatcgaggactcggtggcctcggccaggtattcgcaacacagccagtcctcgaggctgggagcttccccacctgcggcccgctctgctaggcgcaggaccagcagcccgcggcgcacccgcagccagggcccgagcgct

SEQ ID NO: 232354 - DNA, 296 bp, Homo sapiens
taagtttgaccattccttaatggaagaatataggcttatttaactatcaatatgcatgccatttggagcctttttggcccattagaaaaataaacaacttaacaaatttttcaaaataaaaaaaagcttggcctaggcaactgcccttttctaagaagctaagtaaaatccccatccccatcggatcctgactgaccaagtgctactttataaggtgatgctaaataccctcaatggccttctcatggaccttcttttccagcttagatcttggcaatacatttctgcataatgcg

SEQ ID NO: 232355 - DNA, 465 bp, Homo sapiens
gggggtctgaacccaagagacagctggaggatgtctttcttcttcatttaagaggcaatgagttgcttttagaatgagtcaataagattgattttggtcacatttctacggccctgagtaagttacttcatctcgggatgctcagtttttccctccccaaaatgggtataaaaacactgacagccgggtgtggtggctcacacctgtaatcccagcactttgggaggctgaggtgggtggatcatgaggtcaggagattgagaccatcctggccaacatggtaaaactccatctctactaaaaatacaaaaaattagccaggtgtggtggcatgcaactgtaatcccagctactcgggagtctgaggcaagagaatcacttgaacctgggaggcagaggttgcaatgagccaagatcacaccactgcactccagcctggagacagagcaagactccgtctaaaaa

SEQ ID NO: 232356 - DNA, 490 bp, Homo sapiens
ttttgtgtgtgtgttcatcctgttcatagtacataaagcaccatagacctgtgaggttttagtttttttgtcaagttgggtaaattttaaaatagtacatatggatacacactttctgttccttcctccctttctttttatcccccacaggtcactggaaccttgttgttgctatttttattattctctatgtttttcactataaaaattgctattgactcgtgtttagatttatttatcctacctttggcaacgcctaatactgctgctaagccagtccaatgatttcatgtattttattttgtaattttaaaacgaaattttttcttttgaaattttccatgcctgtcatatttatactctcctttatattattttctatattcatgatagttaaagttctattctgttaagtccaaagtgtcagtcattcgtataattgtttctatttacttttttgcttgattaaaaatcaaattttaccttttca

SEQ ID NO: 232357 - DNA, 1703 bp, Homo sapiens
tgggtgcaggtgggcacaggtgcagaaggtgcaggtgcagtgggtacaggtgggcataggtgcagtgagtgcaggtgggcataggtgcagtgagtgcaggtgcaggtgggcgcaggtcgagtgggtgcaggtgcagtaggtgcaggtgagcacaggtgcagtgggtacaggtgggcacaagtgcagaaggtgcaggtgcagtgggtacagatgggcataggtgcagtgagtgcaggtgagcacaggtgcagtgagtgcaggtgcaggtgggcgcaggtccagtgggtgcaggtgcagtgggcacaggtacagtggacacaggtgggcacaggtgcagtgggtgcaggtacagttgggcacaggtgcagtgggtgcaggtacagtgggcgcacgtgcagtgggcacaggtgggcacaggtgcagtgggcgcaggtgggcacacgtgcggtgggtgcacgtgcggtgggcgcaagtgcagtgggcacaggtgggcacaggtgcagttggcgcaggtgcagtgggcgcaagtgggcgcatgtgcagtgggtgcaggtgcagtgggtgcaggtgccggtgggcacaggatccaattgggcgccagggtgcaagttgagccaaggccatcaaccccgtgtctctcctcacaggctcacatcacccaagatactcaaagcatctcccccatctgcataacccagcaaagcaaggactccatgacctgctgtgtacccaggccaggaacctgacctgccacaggcccagggctgcgtgcacactggctgaatgcattagttaatattttggtgacgctggttacttgccacctctgctgtaaataacagcagcgtcaaggatacagtggccacgagaggtagcagctgctgatgtgtggagaagcctccatagagaaatacgtgtgaaagatgcatcaagaaaacccaagctgtgatgctgttaagggctgaaatgtgtctgctgaagtcctaaacctgcaaacgtgaccttatttggaaatagggtctttgcaaatataatcaagttaagatgaggtcatagtggattagggcgggccctcacccaataggaccagcttccttaaaagaaaaggaaaaggccaggcctggcacggtggctcacgcctgtaatcccagcactttggaaggctgaggcgggcagatcatctgaggtcaggagttcgagaccagcctgaccaacatggagaaaccccatctctactaaaaatacgaaactagccgggcatggtggcgcatgcctgtaatcccagctactcaggaaggctgaggcaggagaatcgcttgaacccaggaggcagaggttgcgttgagccaagatcgcgccactgcagtccagcctgggcaacaagagcgaaactcagtctcaaaaaaaaaaaagaaaagaaaagaaaaggaaagggccagatgtggtggctcatgcctgtaatcccaactcttggggaggcagaggcaggaggatcgcttgagcccagcatgggccacatagggagaccctgtccctacaaaaagtaaaaaaattagccaggtatgatggtgcatgcttgtagtcccagctacttgggaggctgaggcaagaggatccttgagtctgggagaaggaggctacagtgagctgtgcttgtgccactgtactccagcctggcccacagagtgagatcctgtctcaag

SEQ ID NO: 232358 - DNA, 1086 bp, Homo sapiens
cggaagctgaacggaccgacggaggtggcgtggatgagcagcagccgcctgagcagtgaggaaaccccgcggacagcgcgatggagcctcacactgttgcccaggctggagtgccacagcacgatctcggctcactgcaatctctgcttcccaggttcaagcgattctcctgcctcatcctcccgaagatctgggactacagaaacatgaacacagccctgatcaagcggaaccgatacactcccgaaacaggcagaaaatcctaaacacacttgcagcaccagccagcaaagctgcactcacagcgtcgggaaccggaggtggctgggagaaccgggaataaacgacgggacacacgtccagccttcctgagttcaagcgccctgaattcacccaccagcacacccatgggggagacgggcacttttgtatgtgacacgggcccccaataagaaaagcctggggtgctctccctagagctgacacgtgtacacgcatgcaaaacccagccctgggactgatgggctctaggccccgacaaaggagcacaggaggcctattccatttcagtacaatgggttccgtgattggccaaggctgggctcagtcctacaccagactgacagcttcctcaccctcccacgcttgggtttaaagacatgtccacaggaagatgcaccatcagtcaacggctgctgttaggagaaacaggaacagcactgaccacacggcgagcacaggacacggccaacccggcaagcacgaaaacatgagagtgaagcctacagtgagtctcggaattccagaccacgggccaggtgctatggctcacacctgtcgtcccagcactttgggaggctgaggcaggatgaatgcttgagcccaggagtttgagaccagcctgggcaacacagcgagaccctgtctgtacaaaacatgttttaaaaatggaaacaaaaagtcgggagcggtggcacacacctgtcatcctagcactttgggaagccgagacgggtggatcacttaagctcaggagttcgagaccagcctgggcaacatggacaaaccccgtctgtactaaaactt

SEQ ID NO: 232359 - DNA, 1420 bp, Homo sapiens
cggaagctgaacggaccgacggaggtggcgtggatgagcagcagccgcctgagcagtgaggaaaccccgcggacagcgcgggatcttactggatgcactaaaaatgctattgtgagctgatcatggtctcacatgcctggggtcccagctactcaggaagctgaggcacaaggatcgcttgagcccaggacgtcgaggctgcagtgagctgagattgcgccactacactccagcctggatgacagagcaagaccctgtctcaaaataaacaaacaaaacatgctattctgaaaaggggccacagctcaccagctgctgagaagacacaaaaggccgagagcccaagtctgagctgaaggcacaggctcacatcacccaagatactcaaagcatctcccccatctgcataacccagcaaagcaaggactccatgacctgctgtgtacccaggccaggaacctgacctgccacaggcccagggctgcgtgcacactggctgaatgcattagttaatattttggtgacgctggttacttgccacctctgctgtaaataacagcagcgtcaaggatacagtggccacgagaggtagcagctgctgatgtgtggagaagcctccatagagaaatacgtgtgaaagatgcatcaagaaaacccaagctgtgatgctgttaagggctgaaatgtgtctgctgaagtcctaaacctgcaaacgtgaccttatttggaaatagggtctttgcaaatataatcaagttaagatgaggtcatagtggattagggcgggccctcacccaataggaccagcttccttaaaagaaaaggaaaaggccaggcctggcacggtggctcacgcctgtaatcccagcactttggaaggctgaggcgggcagatcatctgaggtcaggagttcgagaccagcctgaccaacatggagaaaccccatctctactaaaaatacgaaactagccgggcatggtggcgcatgcctgtaatcccagctactcaggaaggctgaggcaggagaatcgcttgaacccaggaggcagaggttgcgttgagccaagatcgcgccactgcagtccagcctgggcaacaagagcgaaactcagtctcaaaaaaaaaaaagaaaagaaaagaaaaggaaagggccagatgtggtggctcatgcctgtaatcccaactcttggggaggcagaggcaggaggatcgcttgagcccagcatgggccacatagggagaccctgtccctacaaaaagtaaaaaaattagccaggtatgatggtgcatgcttgtagtcccagctacttgggaggctgaggcaagaggatccttgagtctgggagaaggaggctacagtgagctgtgcttgtgccactgtactccagcctggcccacagagtgagatcctgtctcaag

SEQ ID NO: 232360 - DNA, 359 bp, Homo sapiens
caaatctaccctttggttcctgaactcattagagaagagaagacaaaaatacaaggaggaattagagcagaactaaatgggaggcatacttgatatagttacagaaagtattggtcttgtatttttaagagctagctttaaatcctgtcttttgcaggacttggacagtcctttagctgctctcaaccattggttcctcatcaataaagtgagaacaagtaatgccaaacttgaggctaggcatggtggctcacccctgtaatctcagcacttgtggaggccaaggcaggaggattgcttgaggccagaagtttgagaccagcctgagcaacatagtgagaccctgtctctacaaaaat

SEQ ID NO: 232361 - DNA, 196 bp, Homo sapiens
acaagctatagagccaaggtcagttgtttgaaatgtcactagactgctcttgacagagcacatattaaaacaattactcgagaattttccaaattgtgatattgtgcttggcaaactagagaacacggtgcaatcacatggatgccagccacaaggcagctgggcataaggtcatttctgcatattttagagcttc

SEQ ID NO: 232362 - DNA, 534 bp, Homo sapiens
actaaactgcctggaagaggtgggaggagagcagccattaaggtatgaggtacagagtcccatcaggtgagacccatgtctgtagccactgaggttcctgttgcaacaggtgagatgtgatcttcccaaagccccagcttcttccgcaggaggctgagacagcaggcccacggatgtccattcaggaagaggctaaggcttgggggtcaggtgaagaatcttgagagacacaaaaattgttctagtatagtcatgacttaaaattataaagaataattttcaagtcttttagcaaatccatgaattggtgtttttgtggagatatgaatgactttcagtaaaagagtcaccgaatcataataggtatggaggtggaaattctattattaagatttatgattactgaaatattttcatgattactcagatccatttctggactgaccttatgcttaaccagatgatgtttattattaaagctgatttttaacgagtgttcattaataaaaaatgctcttaaccacaaagctttgt

SEQ ID NO: 232363 - DNA, 271 bp, Homo sapiens
aggtgtggtggctcacgcctgtaatcccaatactttgggaggctgaggctggaagattgcttggggccaggagttggagaccagcctgggcagagactccgtctctacaaaaaatgaaaacaatagccaggtgtggtaatatattcctatagtcctaactacccagtaggccgaggcaggaggattacttgagattaggagtttgtggttacagtgaagcatgatcactccactgcactccactctgggcaacattgtgagatcccatcta

SEQ ID NO: 232364 - DNA, 347 bp, Homo sapiens
agctggcctctgtagacccgggctaatgatgggagatgctgctcctggcctggactgggctcccagataggagaaggactgctaaggttggctgagacaaaaggtggttccttccctggcatggggcacggtgccacccagacaaagttggagattattagcaaagaagaaggcaatgactgttggatagtcggccaatgagaacttcttcagtactgtttttttcctggttgtttttgcaagcacaagtggcaacatacagtgcatatggctctaccacttgcttttgcaccccaaaattaatagcatgatctaccttaaaaataaaccctgtagcttctacttca

SEQ ID NO: 232365 - DNA, 567 bp, Homo sapiens
agtgcagctcactgctagtgcttgtttcttggggcaaacaggaaatgagttaagcttgaatgtgaatttcagaggtcagagataaccagtgtcttcagagaacagaaagatgggatatatgcaatttaagtgcttttcactgctttaattagaaacgtagtccctgtttcatggaaaagtttgccatttcttgcatgagcctcttccattggtgtatctttccctgtgtacaggttaccagctcttcaaacccagtctgatctcttggctggaggaagaggaagagttgagcacactgccaagagttctccaagaatggaaaatgtgcctgaaaaccaaagggccagccctttggcaagataatttttgtttaaaaacattaaatgggatacagttggcaagaaaccaaaatggagaggaactctatgactgtaagcaatgtgaagatgtcttctgtaaacatccatgccttaagaccaacatgagtactcaaaatagaggcaacacgtctgaatgtattcagtatgcaaaagacctcctttctctatacaataaaacctctaccat

SEQ ID NO: 232366 - DNA, 561 bp, Homo sapiens
tgaggctttaatggcaggcctaggctcctgatgcccacttcctgtttctcacttctctcattcatccttttggattcctaaaactactcacctcagaagtgcttatgagactttaggctgcctgttgagatatcagaaatatacaaatgaatgcaatttttgttcagaaaaacctccctataagtacatttcctcatcctaagtcaaacagcctgagaacagttctctcagaagcctcttcatggatgatttcctgcttgtttacaaatcagcagtagaaggagaatgagtttactaaagtggtggctgcctttctcactcttcctgggagtgaattcttttgagctcaaaacacagaaggacataagagttcctagaactccctttttttgggtcctctgtttcctgactctgagtctgcagattttcctgatggttttaggctggatgatggcaatcacatagccactctactatggttctctcatagctactcacagagccactctgctgcaggataacttgctcatgaaaggaaatgccagattaaaccccttgcca

SEQ ID NO: 232367 - DNA, 493 bp, Homo sapiens
tcaatcagctcggtaccactccagcctgggcataagaagctactccagcctggtaggataagaatataaacttcaggtgaccgaaaaatcagaatcggttttgggtactgtactgggggcagggcagagaggtgggcggcagttggggtgcggtgattgtagtaggctagggcgctttcgggtccccattgcagcccccggatgagcccgcagtattttccttatatgatcaggtcccattgcgggcggcgccgcttgcccggagcctgagaggattatgaaaacgtggcgagcgaaatggggccaggggacctggagcaggggcgtgaggagagtaggcagcgggtgaggctggacgggagggaggtctagggaggcctctgccgcgggcactgtgagtcctggccgatgatgacgagaccactgcgcaatctgagttctgggaaccaggtgatggagtatgttctgagaacagactgaggccgaaaaagca

SEQ ID NO: 232368 - DNA, 303 bp, Homo sapiens
gaccctcaaagtttatcaaccaaaagtggagtcaggagaaagtcacagagaagagatgctgaacctagaaatggggcacctattgtgcctgcctcgcatgatggagaaattgctggaatcgactgaataccagtgacaatgggaggggaaatgtcggggagatgtggaccctggggagtccccacagactatctggcaatatctgtggcctgctaactgctggcttcaaggacatttatcagtgagcaggaggacccctgaattagagagatgcttaggtgtggcactggtgttgtgggagga

SEQ ID NO: 232369 - DNA, 412 bp, Homo sapiens
ataagaatatttgttgagcatagcatggatgatagtcttctaatagtcaatcaattactttatgaaagacaaataatagttttgctgcttccttacctccttttgttttgggttaagatttggagtgtgggccaggcacggtggctcacacctgtaatctcagcactttgggaggccgaggcgggtggatcacctgaggtcaggagttcgagaccagcctggccaacgtgttgaaaccccgtctctactaaaaatataaaaattaggtgggcgtggtggcaggcacctgtaatcccagctactcaggaggctgaggcagcagaatcgcttgaacccaggaggtggaggttgcagtgacccaagatcgcaccattgcactccagcctggggacaagagcgagattcttgtctc

SEQ ID NO: 232370 - DNA, 384 bp, Homo sapiens
gagatttggaaggaagagactagaagttccaagctcaaggtgccaatagatttggtgtgtgtgtcagtggagttctcgtcgggagcctgggcatccacacccacctggcggtaataagaatggtggcacaggaggcctgctgaaaatgggatgtaaatatgattctacatcttaacccacaatactcgaaatacccaggcttcaatggaaaatcacttactacaccaagaatcaggaagatctcaagcagattgtaaacagatccttctgcctcagcctccagagtactgggactacagccccaagacctggatgaccaggaagccagcaactcgaccagaatggcaggctgtggaaagaagtcatttggtgagcttcagactg

SEQ ID NO: 232371 - DNA, 543 bp, Homo sapiens
agtcttatccatgctgtagtatctattacaactgcattccttttcatgaccaaataatattccgctgtgtagagatacagcatattgttactcattcatgagttaatggacacttgaattgtttccacctttggctatagtgaatagtactgctttgaagacttgtctacaagtttttgtttgaagatctgtttttgattctcttgggtatatacctaggagtggaattgttgggtcatttggtacttttatgattaactttgcgagaaactggcaaactgttttccacagtggctgcaccattttacatccccaccagcaatgtatgagggttcctatttctccacattctcaccaacacttgttattatctgtttttgttttgttcttttgcttatagccatcctagtgggtgtaaagttacatggtagtgttttgagttctaagattctcacagactgggaagaaatgtggagagatttttgtccttttttttttttgcctgctgctgatccaaacagtaaaatataaaccttcagaatg

SEQ ID NO: 232372 - DNA, 540 bp, Homo sapiens
agaggggtggtgaggaagggttaaaatcaaagtaagctatgcttcaaggaaaaagaaaagaaaaagtagtcgcagcctggagaataaatttgacctctttagttttatattgttgcagctaaaacctgtgatgaggtcattcttagtgaactacttataactacttagttcttataaatgctgccaatgttttttttaatcgtgatatttaagaaagaaaaaaattaagataaatagtcaatacatattgatgagttatatgaatttgtttattcttggtattgcttcttagttgtaaaatgtgaaatggttccaaagaatgggcttttagttctgttttttgaagtagcagctattaaagtgcaaaatgcatagtaggcaaaatggtgttgatagtttacattctgtattttgtgattaaaattagacagcaatccaaaaagagaatataacttcaagtacattcatgtcatacttttgtttattctttaatgtttttcatcctagtatgaatttgagattagttttactggcattaaa

SEQ ID NO: 232373 - DNA, 254 bp, Homo sapiens
ttcctattcctctggctgctcccttccagatgccttcagagcctctccctctgtctgcctcttaagcgttggtgttccctaggccccctctgcccttctttgttctctttcctcttacatttctcaaactgtttaggtgtcagaacacctggaagtcataaggagtaccacgaaatatcaatatacttaatttcatgattagagctgggaacagttttattagcagaaactatgacgattgtctatgtatgcat

SEQ ID NO: 232374 - DNA, 926 bp, Homo sapiens
aggcggggccggcctgggccggtcatccctggctggcgcgacccgcagcctgtccgggaagccgttgcgacatgcgggctgggaaccgcctcacctccaggggggaccgcggcggcccgctagactctggtcgggtctggagtattgggccctctggccggactcggtgctcctcaggccccagcgcccggcactgagcctcgcatccacattcgcagagtaaacccaacaagtgttgaatgaatgaggttccccgggccccggctgtcactgggctctgcgccaggccaagagccgaaggcgggggaggaagatgtcgaaatgggcgggatgattcacagatgacggccggtggcgaggcggggctggaggccgcatcccaaaggcagcagggaagtgcggcggctgtggggaagctcggacgcacggcctggccgagtctgaagcatcagtattttgtccctgagccggcgcgctgatgggtcccccgcctggcgatgagggcttctccctccctcgggtcagcccgggtcctgagaggcaaggccagcgattcccggccttaggacctcctgcgctagggagcacgggcgtcttcttccatttgccttccccgagcgtgttggcacaagctgcccgcggtttccagctctgtcttctctgttttacccagatgatgcaactgtggacttctccatctgtttataggttttccttggataggaaagatgttttccttttttctttctaaagtttagcccttctctgggcttcctttttaaaaactttttctactctcttcagcagttgttattaacctttaggtcgcgaccgtttggaaaataataaaactacgaattctcttctcctaaaaaaaaaagaattttcaggttggatccggacaaagggccagaactaaaggggga

SEQ ID NO: 232375 - DNA, 491 bp, Homo sapiens
ggcagcccccattcgcccaagccgttccagtttaggccacgacaggaaaagtctgggagcccagttctgtgtccccccgcgccgcttcagcggaacagcccaagaaacttcctgtggttcagacaccttggtttgttgcaactttgggcgcagaaagttggaaagtgtgggtgcactcactgaaaacggaaagcgtggtcccaagtttacagaaatgctaaaatgcaaaccaaaaaataaattctcttttgatttctctcctcgcggaaagctggcgaaagcacacgttttatgatcgtcatctttcattgattatacacacgtgtgacttggagtttccagtaggaatactgttctttgactctcccgtacttcactgaacgagtaattagttaaaacaagtccccaaattccttaatctcaaaatgcatatgtaaatagaatctgcataggatacaaaataaaacgcgcaagtgggaattcggcatttt

SEQ ID NO: 232376 - DNA, 430 bp, Homo sapiens
gagtaggttgtgatcaaatcataacataatacctaaagaggcatcaatatagtgttgtagaaagaacaatagatttaaagttcctccactcaacaaacatgcttgtgtgtgtgtctactaccctgcaagtactgttctaaataatagagtacaggccaggcacggtgactcacatctgtaatcccagcattttgggaggccgaggtgggctgattacctgaggtcaggagttcgagacaagcctggctaacatggcgaaaccccatctctactaaaaatacaaaaattatccaggcgtgatggcatgcacctgtaatcccagctactcaggaggctgaggcaggagaattgcttgaacccgggaggcggaggttgccgtgagccgagatcctaccactgcactgggcgaccgggtaagactccatgtcaa

SEQ ID NO: 232377 - DNA, 737 bp, Homo sapiens
gaaaaaagaaagagaaaggggaaggaataagccgcaatgccttttgtgaacaagattcgaaacttacacacttctgccacactttttaaacgttatttatttatttcttagagacagagtcttgctccgtcacccaggctggaatgcagggacctgatcttggcttactgcaccttggaactcctgagctcaagcaatcctgcctcagactcccaagtagctgagactacaggtgtgagccatttcctccggcacatgttattcaatataaacaagtcactgaaatctggcacatacccagaagtagaattaagctacaccctttcagataagaatagtaaaagaacttattgaaatattccaaagccaaaaatgtggacattgaccccaactgcaaaaatacctcagcaaattccaaagtcttgaagacttctgagtagatccccccgtgggtgaggaggccaaccacaagcaacactcagtggtagcaggaggtggcaggggtgagggcaggaaacagtgcccctctcagtctcccagcagacctgccaccatgatcagccagccctctataccacccactggccagcccatcctggaagatgccaagtggacaagccagcactcagacacacagatttgggaaagtgaaaaaccatttagccctggggcttgaggcagggaaagggatgggatgggcaaaaagtgcatggccatgcccagtcccaggaaaagga

SEQ ID NO: 232378 - DNA, 393 bp, Homo sapiens
ctagcactagatcacacagcctcggagtggcagagcaagcctgacatcccaggaacttgcaactatcagcagcttctttcccctctctgtgcctattttctcacctgcattattgaggtttccaaagacagtcccagatctcctatggtagaggcagggggcgactgtccaagcaccccaccacgcccactaaaggctggtccagcttaaacgtactgcggagaggggtccacagggcaagatcaggccacagtgggtgtctggggctgcttgggcccagcacgtctgaggccatcatttgtttggatctttctattaccttttcctggaacagagtagaagactggaaaggacttttcaggagaagtgagaggtgaggttaaaaaggcagga

SEQ ID NO: 232379 - DNA, 1281 bp, Homo sapiens
atttgcagacatatgggtgattggtacagtaggtttataaacagaagtttaaacttgtaagcttaagcttccgtttataaacagaagtttaaaattataggtcctgtttaacattcagctctgttaactcactcatctttttgtgtttttacactttgtcaagatttctttacatattcatcaatgtctgaagaagttacttatgcagatcttcaattccagaactccagtgagatggaaaaaatcccagaaattggcaaatttggggaaaaagcacctccagctccctctcatgtatggcgtccagcagccttgtttctgactcttctgtgccttctgttgctcattggattgggagtcttggcaagcatgtttcacgtaactttgaagatagaaatgaaaaaaatgaacaaactacaaaacatcagtgaagagctccagagaaatatttctctacaactgatgagtaacatgaatatctccaacaagatcaggaacctctccaccacactgcaaacaatagccaccaaattatgtcgtgagctatatagcaaagaacaagagcacaaatgtaagccttgtccaaggagatggatttggcataaggacagctgttatttcctaagtgatgatgtccaaacatggcaggagagtaaaatggcctgtgctgctcagaatgccagcctgttgaagataaacaacaaaaatgcattggaatttataaaatcccagagtagatcatatgactattggctgggattatctcctgaagaagattccactcgtggtatgagagtggataatataatcaactccttggcttgttattagaaaccgcctgactaccgtgatggggtatataaaggccttttggcacaattatccggctttttaccaagatgtttttggatgccctcccggcacttggtttcaatatttaggggctggggtcaatcaaccttgcacgggtgtactatccgtggcatcattctttgccttttctgccgccactattcctggtctatctctctctcttacctctcactctctactcggctctacctcttctcttatctagcttcatactatatcaccgtactactctcacaccgcctctaccactcctctccgcgtccctatcctcctcgcctagtgttctgctttgtccttctctgtacgctcctcttatgctacttctatctctccttgctcagcctctcctgtagtccgccatctacgctcctactccctattcatcattgcgctccttctcctatcccg

SEQ ID NO: 232380 - DNA, 1062 bp, Homo sapiens
atttgcagacatatgggtgattggtacagtaggtttataaacagaagtttaaacttgtaagcttaagcttccgtttataaacagaagtttaaaattataggtcctgtttaacattcagctctgttaactcactcatctttttgtgtttttacactttgtcaagatttctttacatattcatcaatgtctgaagaagttacttatgcagatcttcaattccagaactccagtgagatggaaaaaatcccagaaattggcaaatttggggaaaaagcacctccagctccctctcatgtatggcgtccagcagccttgtttctgactcttctgtgccttctgttgctcattggattgggagtcttggcaagcatgtgtatgtactgcccctgttttggtcaagaggaagtatctagaatttcaaatatttagcaacaaaagtttattccttcagtggaagatttataataatgataggtgataggcccacaaggaggacttacaatgtggaacttagtctctttccctcactcctgtagagtaattgctttccctacccctttaatctttatactacctctgcaaatgataaaggatgatggctctattgagaatttacaattttttgtcatttttttaatgtggagttcacgtaactttgaagatagaaatgaaaaaaatgaacaaactacaaaacatcagtgaagagctccagagaaatatttctctacaactgatgagtaacatgaatatctccaacaagatcaggaacctctccaccacactgcaaacaatagccaccaaattatgtcgtgagctatatagcaaagaacaagagcacaaatgtaagccttgtccaaggagatggatttggcataaggacagctgttatttcctaagtgatgatgtccaaacatggcaggagagtaaaatggcctgtgctgctcagaatgccagcctgttgaagataaacaacaaaaatgcattgaagattccactcgtggtatgagagtggataatataatcaactcctctgcctggtaagtgtctattcttgttagaatt

SEQ ID NO: 232381 - DNA, 1120 bp, Homo sapiens
atttgcagacatatgggtgattggtacagtaggtttataaacagaagtttaaacttgtaagcttaagcttccgtttataaacagaagtttaaaattataggtcctgtttaacattcagctctgttaactcactcatctttttgtgtttttacactttgtcaagatttctttacatattcatcaatgtctgaagaagttacttatgcagatcttcaattccagaactccagtgagatggaaaaaatcccagaaattggcaaatttggggaaaaagcacctccagctccctctcatgtatggcgtccagcagccttgtttctgactcttctgtgccttctgttgctcattggattgggagtcttggcaagcatgtgtatgtactgcccctgttttggtcaagaggaagtatctagaatttcaaatatttagcaacaaaagtttattccttcagtggaagatttataataatgataggtgataggcccacaaggaggacttacaatgtggaacttagtctctttccctcactcctgtagagtaattgctttccctacccctttaatctttatactacctctgcaaatgataaaggatgatggctctattgagaatttacaattttttgtcatttttttaatgtggagttcacgtaactttgaagatagaaatgaaaaaaatgaacaaactacaaaacatcagtgaagagctccagagaaatatttctctacaactgatgagtaacatgaatatctccaacaagatcaggaacctctccaccacactgcaaacaatagccaccaaattatgtcgtgagctatatagcaaagaacaagagcacaaatgtaagccttgtccaaggagatggatttggcataaggacagctgttatttcctaagtgatgatgtccaaacatggcaggagagtaaaatggcctgtgctgctcagaatgccagcctgttgaagataaacaacaaaaatgcattggaatttataaaatcccagagtagatcatatgactattggctgggattatctcctgaagaagattccactcgtggtatgagagtggataatataatcaactcctctgcctggtaagtgtctattcttgttagaatt

SEQ ID NO: 232382 - DNA, 907 bp, Homo sapiens
ggctgcaggaattggcacgagggaagaacagcctttcaaatttgacttctgcatgtggatagatttctttacatattcatcaatgtctgaagaagttacttatgcagatcttcaattccagaactccagtgagatggaaaaaatcccagaaattggcaaatttggggaaaaagcacctccagctccctctcatgtatggcgtccagcagccttgtttctgactcttctgtgccttctgttgctcattggattgggagtcttggcaagcatgtgtatgtactgcccctgttttggtcaagaggaagtatctagaatttcaaatatttagcaacaaggaggacttacaatgtggaacttagtctctttccctcactcctgtagagtaattgctttccctacccctttaatctttatactacctctgcaaatgataaaggatgatggctctattgagaatttacaattttttgtcatttttttaatgtggagttcacgtaactttgaagatagaaatgaaaaaaatgaacaaactacaaaacatcagtgaagagctccagagaaatatttctctacaactgatgagtaacatgaatatctccaacaagatcaggaacctctccaccacactgcaaacaatagccaccaaattatgtcgtgagctatatagcaaagaacaagagcacaaatgtaagccttgtccaaggagatggatttggcataaggacagctgttatttcctaagtgatgatgtccaaacatggcaggagagtaaaatggcctgtgctgctcagaatgccagcctgttgaagataaacaacaaaaatgcattgaagattccactcgtggtatgagagtggataatataatcaactcctctgcctggtaagtgtctattcttgttagaatt

SEQ ID NO: 232383 - DNA, 455 bp, Homo sapiens
cagctacttgggtggctgaggcaggagagtcacttgaatccaggaggtggaggctgcagtgagctgagatcacgccactgctctccagtttgggcaatagagcaagactctgtcaaaaaaaaaaaaagggggaaagagagaaagaaaaagaaagaagaataaacagcaaatgtgatcaatgtcacacagagaggaaaggaaataataagaattattatgactatcaacaaaacccaaataaaactatgttcttcttccagagcacaaatgtaagccttgtccaaggagatggatttggcataaggacagctgttatttcctaagtgatgatgtccaaacatggcaggagagtaaaatggcctgtgctgctcagaatgccagcctgttgaagataaacaacaaaaatgcattggtaaagcccaggtgtttctaccatcatgggatagagaggggtg

SEQ ID NO: 232384 - DNA, 727 bp, Homo sapiens
gggagagcacatgtgtttttatgagaattatgctgagatagatttctttacatattcatcaatgtctgaagaagttacttatgcagatcttcaattccagaactccagtgagatggaaaaaatcccagaaattggcaaatttggggaaaaagcacctccagctccctctcatgtatggcgtccagcagccttgtttctgactcttctgtgccttctgttgctcattggattgggagtcttggcaagcatgtttcacgtaactttgaagatagaaatgaaaaaaatgaacaaactacaaaacatcagtgaagagctccagagaaatatttctctacaactgatgagtaacatgaatatctccaacaagatcaggaacctctccaccacactgcaaacaatagccaccaaattatgtcgtgagctatatagcaaagaacaagagcacaaatgtaagccttgtccaaggagatggatttggcataaggacagctgttatttcctaagtgatgatgtccaaacatggcaggagagtaaaatggcctgtgctgctcagaatgccagcctgttgaagataaacaacaaaaatgcattggaatttataaaatcccagagtagatcatatgactattggctgggattatctcctgaagaagattccactcgtggtatgagagtggataatataatcaactcctctgcctggtaagtgtctattcttgttagaatt

SEQ ID NO: 232385 - DNA, 169 bp, Homo sapiens
cccacctgcctcccacgtgcctggcctccctctgccccgccccctttgtcactgcagacaaagcttttcaccactgtctttggttcttccccttactccaaatcacaatgatccccagtgtggctttgccttgggaattaattccagagttttaaatgatgaacataat

SEQ ID NO: 232386 - DNA, 447 bp, Homo sapiens
gaactataataagctattttgaagtgtcattgtcaatacaaagtacataccagtgtgagattttaagcagtaataaaatctatgtgtggaagagtaaatgaagcgtttctgcaatattaatgaacggacagatatatgggaagaagtgatattaaaccttgccatacactctgacaatgtacatgaacagagccagtttgcttgtaaagattagtaacatatcattgcaatagatgtgcatcctgtggtctaaacttattcctaaatgacatcttgaagtttggcctgtccaaaaacatcttttgaggaaggacagatgctatagctgctttcttcaaggaaaaaaaaaaaagtaagtgacatcacaccttgttttaaacttaatgaagtgaagtaaggatgtcctctgaaaaactggccggaagtaggagtagtaggagggggagg

SEQ ID NO: 232387 - DNA, 114 bp, Homo sapiens
tgagagagcaggatgctgtctcaaaacaaacaaacaaacaaaagttaccaattatgtattttacatttttaagcaatttgttttcctcttatgtattctgtggtgctttagttt

SEQ ID NO: 232388 - DNA, 401 bp, Homo sapiens
aaggaagtggacattcattcattcaggatgttctgagtatttcagcaccaccaggccctgggaaatcaaggtctcagcagatgacggtggcagtttgatttttggctgaattgtcctctacagcagtcactgggggttgcgtttttctcacactgcccagtcatgcagcacacggaagccatccatatgccatgggaaaatgctttgtctcctgcctgggcgccccccgagccagtgagtacagtcctgcctagtggcaaggtgagtgtcctgttcccaagtcatgaaaatgctcttcactggggcgggtctgccgagttgggaagggcacttacggtttaaaccgagagactctccctgcatttgaaatgaggacatagagttctttttctctttacttt

SEQ ID NO: 232389 - DNA, 472 bp, Homo sapiens
cttggtggctcacgcctgtaatcccagcattttgggagggcgaggcaggcggatcacttgaggtcaggggttcgagaccagctgaggcaagtagtgaaaccccatctctactaaaaatacaaaaattagccaggcatggtggcgtgcatcttctagtccaggctactcaggaggttgaggcaggagaattgcttgacccctggaggcggaggttgcagtgagctgggattgtgcagctgcactccagcctgggcgacagttcgagacaacatctcagaaaaacaaaaacaaaaaaaaaacaaaccaaaaaaacattttttttgttgctaataggcaaacatatattattatttcattatatgtatgttgaattatatgtatgttgccaggttatctactggcacctgagattgtttttacccatttgtttgagttctttgtatataaaacttaacccttcaagcatacttta

SEQ ID NO: 232390 - DNA, 471 bp, Homo sapiens
cctttcacgctcgaagatacctcatttggatgatacaatgttaccttacctactctgtgacctttgacaagtctggttgcctccgtagccctcagctttctcatgtgcaaatgacagatgaagtgcgcatatcttggaatcttggaagtgatgggggtgtttgatgggacctatcttgtcaatgccctgcagccaaagaccactgggagcacacctcacctgtggttaacaagctgggtttcttcttgcagtaagggggaatgaacaccacagcgaaccagggggagtctctgaaagaggtattagaaaggacttgttactggatttgggccagtgctcggtggcttggcgagggtttaagaagcaggcctttgctctgaaccggctgctgtcaggaggcggggctcattctatgactgggtgtcttcttcaaccttatctaggataaaataaaatcataaaacactgtgc

SEQ ID NO: 232391 - DNA, 417 bp, Homo sapiens
aggttaaggaagtgttccagtgctgtagagtgcactccagaggggtgcaagctgaagaaaatctgttacccatctagaaaaagaagtgagaataaaagcatcctcttagtctccttcctttccgtatgacctagggtggaggaaaagacagggagtgttcgactgttttccctccctggttcctgggttctgccaccaagttaaatatgccgcccatggttgaagacatggtcctccaagccatggaactggataaactaagtgatgggactaaccgtgctttactgcgcaaccttaggtcatccaccttctgtgatttccctttgacttcctaaacctgtgtgatctgcctggctccccaaaaaacgtatctccagagagactgtgtcgtctttgagcaaggctcctttaatggag

SEQ ID NO: 232392 - DNA, 514 bp, Homo sapiens
acaactgtgatggttcattttatttgtcaacttggctaggctgtggtgcccaattatgtggtcaaacaccctgaggatgttgctgtggaggggtgttttatatgtgattaacaggcaaataagtagactttgagtaaagaaaattaccctccataatgtggtaggcctcattcaatcagttgaaggccttaagagcaaggacagttttcatgaagaaaaagaaattatctccaggaattcaaggtagaaaccctaactgagttttcagcttgctgtcctgcggaattcagtctcaagactgaaacatcatctcttaccaggatttcccatctgtggacctgtcccacagatttcagactggccagcccccacaatcatgtgagccaattccttccagtcagtcaaacaatcagtctacctatctaagagcctattgcttctgcttgtctggaaaaccatgactaatacaccagcaatgaaaattaagaaaataaaacttgaaaacaatgtcata

SEQ ID NO: 232393 - DNA, 315 bp, Homo sapiens
ctcaccgcaacctccatctcccaggttcaagcaattctcctgcctcagcctcccaagtagctgggatcacaggcatgcaccaccacgcccggctaattttgtatttttagtagagacagggtttccccatgttggtcaggctggtctcaagcaatcctccgaccttggcctcccaaaatgatgagattacagatgtgagttgccatgcctggcctcttttttttattttagataacagtcttttatcagatatgccttttgtgaatattttctccaattttgtagctcgacttatttattgacagtctttatttt

SEQ ID NO: 232394 - DNA, 457 bp, Homo sapiens
tacacttagcttacttaacagtccaagaagttattctttaaatatgtactgttgataaggatgattgttataattttttttaaatagtgaaaaaatggaaactactgaagtcacccaacaatgggggattgtttaattataacatgttcccagtgtcatagttaacaattaatggccgggggcggtggttcatgcctgtaatcccagcactttgggaggctgaggtgagcagatcacttgaggccaggagttcaagaccagcctggccaacatggcaaaaccccatctctactaaaaatacaaaaattagctgagcatgacggcgcatgcctatagtcccagctactcagaaggctgaggcaggagaatggcttaaaccccggaggcggggattgcagtgagccgagagcgcgccactgcactccagcctgggtgacagagcgagactctgtctcac

SEQ ID NO: 232395 - DNA, 506 bp, Homo sapiens
tggagaagtgaagttgattgaggggaagggaacatgaaaaattgaaaaacataaccactaggaaccataaatgtattgaaatactgcataccctccccagagtgttgctcatccaaatatcagccgtgaatgatggggcaggtcaagaacaacttacggacagtagcatttgagggaattctttctaaacatcaataacatagccattcttttcctatttataagctgtttgacaaattctgagcagagactgaaacagaagtctctagaagcaagagaagtctttattcctttcccaaattaatagattttgaatacatcttttttaaaaaaagaatacagtagaaaatatttgtaatatgaccatttagttgatgactttcataacactgtaatacccaccaatgagtgtctacatctcattttctaggccttgcagtgcatcagtactgacagtggtgtcgtttaaacaaagatcccatccctttccaactccctagccctaa

SEQ ID NO: 232396 - DNA, 452 bp, Homo sapiens
tggagaagtgaagttgattgaggggaagggaacatgaaaaattgaaaaacataaccactaggaaccataaatgtattgaaatactgcataccctccccagagtgttgctcatccaaatatcagccgtgaatgatggggcaggtcaagaacaacttacggcctatttataagctgtttgacaaattctgagcagagactgaaacagaagtctctagaagcaagagaagtctttattcctttcccaaattaatagattttgaatacatcttttttaaaaaaagaatacagtagaaaatatttgtaatatgaccatttagttgatgactttcataacactgtaatacccaccaatgagtgtctacatctcattttctaggccttgcagtgcatcagtactgacagtggtgtcgtttaaacaaagatcccatccctttccaactccctagccctaa

SEQ ID NO: 232397 - DNA, 479 bp, Homo sapiens
tcaggaaaccacagccaggagcagctgatggggcagctcagcaggtagggcaggtgcaggccatggacagtcagcaagggcctgcagggagcctgcagagcccgaaagcacctcccaactctgcagagcagcagctcgcagcctcttctaaacaccgtgcacagttctgcagttcttggcccttgtctcatattatgttgctgaaaaatagaaggaaaattctgcagggtctgacgctgaccctgaacaggatgcatgggggtaggtcttgcacagcggcctgtgtggaagggtcgagtcataagagggtcatgcactcaaaataacgagatggatgtcgcctggaggagagtcccttcctgcctacattcacagaggccatcctttgctgtctgtgatgggcatattcaaatcaacataaaaataaacggcaaagaatgtaggtttctcagccaaactgctccatacaaacacaaata

SEQ ID NO: 232398 - DNA, 285 bp, Homo sapiens
tctattatctattcttcctgatgctctccctccccctcagcatatgacttggtccctataaagaaatcacatatttttttatcacattatagttgttgcagataccttaaaatatcacctactggctatgacttatttgacttgatactattattagacccaccactggatattgtaatctataaataatcatatatattactatataataattttttattttgatatttgtatcttaatgtaattattccctttctagtcttatatatttaattttatgccttt

SEQ ID NO: 232399 - DNA, 476 bp, Homo sapiens
ctggggcagggagtgtgcttggtgtaacatcccgctctttgagtttgattctctgggtgtttgctcccataccccgctaccatcacagtggctgctcacctctagtatcccttccttagttacctccaagtgtctgcaggaatgtggcagtggggtgggggttgtgtagcaagaaaaatccgctgggcatggtggttcatgcctgtaatcctagcacattgggaggccgaggcaggcggatcacctgaggtccggagttcaagaccagcctggccaacatggtgaaaccctatctctactaaaaatacaaaaattagccaggcatggtggcgggctcctgtaatcccagctactcgggaggctgaggcaggagaattgcttgaacccaggaggcacggaggttgcagttagccgagattgcgcccgtgcactccagcctgggcaaaagagcgagactccgtctcacaaaaaaaaaa

SEQ ID NO: 232400 - DNA, 1512 bp, Homo sapiens
  misc_feature (112)..(112): n is a, c, g, or t
gggaggaagaaagggaagagggaaactttaaaaaatataattcctcaatatgtaaactggaaaaatggccccatcagcatttcttgtgcacaataaatactaattgttcaanactcatgtatgtgagaaaaggagacaaatacattgaccaaacataactcctatatacaactgaactaatgaactaacccaacaacccttgaattagaacacatgaaaatatatttaaaaaaagaaagaaaatatattaaagatttaaccaaccatcaagcatcaaaataatacactatactaaagtattacagcataaaagaagcctgaagtcaccctctctgctacctttcttttgagaatagaaaaaataaaaatgcagttaaattaagagtaattctcactggagcattaggaaccaagaaggctcagctgtcctcagggtcaaacgtaaggacagaagttttcatgtggactctctaaacccgaaatggcaggaattaaaatagcagcagcagcaagggaaataacacagttgagaagaggaagtaacagacactactttcatcatgtattggcccagttccagctctagattaaatcaattatattctagtgaattttgtatattcctctttactaagaagaggaagagaaaaagaaaacatcattttatcaggctttgcatgttcttttcctagaaatttttatagtgagactggagtcacttcattatggactaaaatttactaattcattaagtttttgtgtgcctactaagtgctaaaagtgatttacagtgattcatatagccatgatcactaccgtcaatggggggaaatacctaatatgaggatagatatgagtgaacagtacttacagtatattatgagtggagaagtagagaatgttattaaaaaacctaagtagggcatctaaactgtcttcagggaaggaaaggtttcctggagcaagcaatggctgagctaagatctgaagaataaacaggagtaggccgagggagtgaggaggcaagggtgttccttaaggagagaaaatagcatatgcaaagacctaaagaggcagtatggcatgtttgagttgctgatagaatttttgtgcggcaaaagcacagaatgccaggtaagggcctagaaggctaaagcagtaaaatatgagctagtctatggggttaaactctcaaaaagagctcaacaagctcagaataaactcaggtaaagagtaaagaggagggtgggcacagtggctcacgcttgtaatcccagcactttgggaggccgaggtgggcggatcacgaggtcaggagatcgagaccatggtgaaaccccgtctctactaaaaatataaaaaattagccgggcatggtggcaggcgcctgtagtcccagctactcaggaggctgaggcaggagaatgacgtgaacccgggaggcggagcttgcagtgagctgagatcgcgccactgcactctcacctgggcaacagagcgagactctgtctc

SEQ ID NO: 232401 - DNA, 326 bp, Homo sapiens
agagtggctgcctcgcagattgcggctgcctcacagattgctgcagcctctgcaggcccaagatggaggtgtcggaagcagccaaatctttctgattgccagtctgtttctccaggaagcttcattatatccagaaagatcttactggggagtatatccatcccatctcataaggtactttgtttccagggtgctgatcctactggtggatcattcagaaagttaatcaggtgctcctaaaatggtttttggaacttccaagttcttactcagaattccaagccataggagacaggtatctaaggtgccaagctgattccattgtg

SEQ ID NO: 232402 - DNA, 267 bp, Homo sapiens
tgtatcttgttactgtttgaggttagacaagtatatgcatttctgaagattcttttttgaatagtacatttaagatctgtgcatttcacagtatgtgaagtatgcctcaaaaaaaaaaattcgtaaaaatattgaaacctggctggccacagtggttcacgcatgtaatcccagcactttgggaggtcaaggtgggcggatcactcaaagccagggagttcgagaccgttctggccaacatggtgaaaccatgtctctactaaagta

SEQ ID NO: 232403 - DNA, 468 bp, Homo sapiens
ttgttaaggccaatttttttatggtaaaatacatatattaaatttaccattttaactatctgtaaacgtatcgtttggtggcattaagtacactcgcgctgttgtgcaaccatcaccactatccatcgccagaactcttgcatcttcccaaactgaagctctgtctccatcaaacaacaactcctcatgcccccttttcccagcccctggcaaccctcattctactttctgtctctatgaatctggctgttctagggacctcacagatgtggaatcatgtggaatttgtctttttgtgactggtttctttttcatggaaaatgggccaatgacatatttgaaatgtagtttatatttgcattaaagcagtaaatgtacacagtagtggaatcaccatcctactcgtgaagcccatgaaagccacatggtatccctgatgaaaaattgaaaaataaaatattcttaaca

SEQ ID NO: 232404 - DNA, 429 bp, Homo sapiens
gcaggagaattgcttgaacccgggaggcggaggttccagtgagccaagattgcgccactgcactccagcctgagggacagagcaagaccccgtctcaaaaaaaaaaaagaaaaagaaagtaaaatttaaaaaaaaattagccaggtgtggtgacacatgcctgtgattccagctaatcaagaggctgaggcaggaggatcgcttgaacccagcaagcagaggctgcagcaagccatgattacgccattgcactccagtctggtaacagagtgataccctgtctcaaaaaaaaaaaaaagagaaagaaagaaaatgcaattccctctggagtcagatgctcttggatttgaattccagctccagcactgtctaactgtgtaaccatggacaaggtcatttacctctctgggcctcaatctgctagtcagt

SEQ ID NO: 232405 - DNA, 1670 bp, Homo sapiens
tgctgaattataggtagccatgtcccctgcacactctctgtgttaaggattttactgtctagggattctgaatgttcaagctcttctttgctattattaaaggagagattaagctcaattaaaaattaccaaaaaaatcagctgtattgtcattagagggttaatcgaaattttaatgttatagatcatattaaccttttctaaataagagcaccttcatctgagtttatccttgtcagacttgccccttataacattaggcagaccatgactcctcttcaatcctaataggtgaagaagacatcaggacagcatggaagtgtgtccacaattactctgggttgtcacaaagatcttgactgttatctaggatgaccctttttagcatttgagcggtctctttaaaaatcaaacgaaatatatggtcctcgttctcataaaataaaacaaaaacaaagcaaaactgaaaagaccaagaaacaaaaaggtaaaacagatacacatgggattgttcattacctgtaggttaagaaaccctggtctgggaatatgagattgaatcagtgtaccagctttggaacatagtaagaactgaaagactaatagatgacagaatgttacagacgaattcacaatgagccatgaaggaataggagaccaatggcaaggatatagaagaacctgggcctgaaatatgctagtccttcagtagcatgacttagataaggatctgtatccctggactccccaatttttggggagactatacctggactattttatttgcctgaacatcttaaataaaaattcaagggaaaagcagtaaaagtacataacacaatagagaaataaatgaagaaaaattaaaagtactttagattttcccaacatgaataaagaaaactgtctgtagagatatctaaattataaagagaagaaagacatatttttttatcatggttaatggagttataactagaaacagagaaagctatatatgtgtatttatttttataggaatgaacatatgtactctctcacaaacaaacacgtgtgtgtgcatatgtgtgtatgtaagagatataccatttatctatcttcctagctctctatataattcctttgacaatatcattactagtagattcaggtactatctctcaagggatgtagtataaaacatagctttctctgtagaatgaaaaaaatagactagatatgtgtgagcagattggtgtatgcaatttccaagtaaactccaaggcagtgaaatacgaaagtttaaaaaaaccaagtttccaaaaatatcatagaatttctgaaatatgtatatatcatagagtatatttctatgtaatcaattagtataaacatgccaaaaatattagctattaattaaattggagctataaaataagactattcattgagagttttacatggtatctctgtaaacatgattaaagttctaacccattgtgagatgaggaataggctgcctagcaactgttttaactagttcccctgagattctcaagcaaaaaatgggtgtatggatgggagtatttatttttgtttctatattaaagcttctagatgattcctaactagtcactctcattgtttttcttcttttcatcatctgaaagtaataatttttaaaaatagta

SEQ ID NO: 232406 - DNA, 376 bp, Homo sapiens
tgttgatgactagtcaaatcgaaaacaatgtgcaggccaaatagtttgtaagctctgcctttgagctttaactcttagttgcctaaaacaccaaggacttagaaggatccacctgcctcagggactctgggcatcaatatgtggatggtctgtggctttatagcagctgatgacaggagaaaaccttgcccaagaggaagagaaggaacagatgggactgccatctgtgaccccaacccactgagcatcagaccaggcagtaccagccaagaaaagggaaagaaacacagaggatggtgtcatgagacaccaaagttctaatccagactggacgacctcggtcaagtcacttaacttctctcggcctgtttcctta

SEQ ID NO: 232407 - DNA, 434 bp, Homo sapiens
agggaatagtttgctcatactaaagtgctgtatataaaggaaatcatattagttcattcaatgtaaaattaaaattaaaagttctaagtaatatatttagtgttgctgtttatttcagtaataccacccacaatgagttgtgacatttcagtgagtatttcataatgcagaattcaaaatctagcccatattggacttacgtgaagaattatgatctgcaccatttgttaaacagtaataagtaatccaaccacaaccaacagactctgagtgtgaattaaaaaaaaaactccaaaccaaagatctaattgtggaaggattgcaatgaaaccttaaattagtacattatattagttcaaccaattccttagagattcttagctctagaaaatggttttgtgaacatttctttatcagtgttagatatgctaggt

SEQ ID NO: 232408 - DNA, 539 bp, Homo sapiens
cactttacaaataatgctgctgccaactactgtgtacaagtctttgttgtatggacatacaccttcttttctcttgggtaaatccctaggaatggaatagctagatcacatggtgggtgtatgtttaatgttttaagaaaacatgagactcttttccaaagaaattggaacatcttacattcccaccagctatgcatgaaatttccatttctttcccattctctccaacacttgctatgtcacagttattttaattttggccattctaatttatatttttcttaaaactagtgatatgagacatctttacataaagtatctgttaaaatctttagcccttcttttactgggctgtttgttttctcattgttggagctttgagagaaccttatatattctggatacaagtcctagatcagatatctgctttgcagatactttcactctgtggcttttatttttagtattttaacaatatattttaaatcttgatgatgttcagctgatcattttttttcttgtatgggtcatgttttaac

SEQ ID NO: 232409 - DNA, 557 bp, Homo sapiens
cagctttacaaataatgaagccaactgaaatgatttatcttgactattactaataaacatttattctttaataaaatcaagctatattcacctacatttttatcagcagattcccaaagcaaaaaacttttgggttattctaccttttgttaattacaaagttcaatatttctagcagaagacttcttttttccagaaaaggagggctaggttatttggattgcctttaaaaattgaaaagctgataaaagttgacgagtggggactcaatgtccacttttaggataaagcctgttttctgaataatatattgaacggggttaggggagatccaagctacattttccctgagggaactgggggcaacacccagttggccaaggttgttagtcttgtggagtgagggagacagaagtccagcacaggaggacaggtccgaaagtgtccctatagcccttaaccacaggtgcaacccccacagcatgagagttaagcagaactaaacatgctcttctgcctcataaccgcaagagactagaaaacgtaaacaggagaaa

SEQ ID NO: 232410 - DNA, 467 bp, Homo sapiens
ttgtcattcctattgtttatattattctcaatatttcatattatgttattattatttaatacagtgctgtgcatattatttgtatatttctggtgttttgtcttaaaatgtaacaattgcaatgattgactcaaagagtttccattggcttcccaaatgaacctttagcacaataatacaattaagatagtaataatgaatatatgtgaaggctaacattcaatacaaagattagaaaatagataatagtatttcacataaagatgagaactaatgcattatatttggctgaaacagaaaagtgaatgtggtattgtgttagtgaatcacagagcaatgtgataactttgaacctattaacatatggaatttttcacctactaacttcacttttcaactgacttactttactaagatccctaacattttatcctaaatatttatttattgattaatgggagattatt

SEQ ID NO: 232411 - DNA, 382 bp, Homo sapiens
atccccccaggatctggagggttccccgccttcccctgctcaaaactcttgagaagacaaaacccaaacacctaggggttgtggaaatgttctaaaatggattgtggtaatggacacacaactccaaaaatactgaaagccattgacttacgcaccttaggtcagcgagttgtatggtatgtgaattatatctcagtaaagctgttacaaaaggaggaaggggcagggtgcggtggctcatacctaaaatcctaacactttgggaggccaaggcaggaggatcccttgagcccaggagtttgataccagcctgggcaacatagggagatcctgtctcttaacaacaacaacaaaatcaaccgggcacggtggcgtgcacctg

SEQ ID NO: 232412 - DNA, 372 bp, Homo sapiens
caggcagagatttgggaaattcctaaatggcaaggcatagaaagttgtcaggcatagttagtgcctacatcttggtttctaaataccattcttcagtgaaaagacctagggctctatggacatgtagttggttctaggactatgacagggaaagtaggaggagaagcctagaacatcttgtggtgccagaaaataagaaagtgcttaaatagtaatgggaatacatcaaaggacacaagagacaactttaaggattttccattggccaaatctaggacaatttgtgcaacaaattaaacgatgacaataatgggttatagcccatagaataaaataaatgcacgagtccataccaatataaataaataattg

SEQ ID NO: 232413 - DNA, 366 bp, Homo sapiens
agaatgttcttaacatgcagattccagctccctccccctagggattctaatccaataggtgtatgttggcttgttgcaactataacacaattcctccaggtgatctgagaaccataggtgtaccacaactgaatcatttgacagctgcagaaactgaagcccacggagggaaaggggcttgcccaaagtcacacagcaagttaagggcaaaggcaaaattcaatcttaagtctccttattctctggccagaaccctttccaacttctctttttcaaaagatcaccaacagctgtggtgggggaggaccatttgagcccaggagtttaagaccagccctggcaacacagagaccctatctctacaag

SEQ ID NO: 232414 - DNA, 394 bp, Homo sapiens
ttcacctgttctcccccttcctgtgaggggtggagcacagcaggaccaaatgagtggtgtccatccctaccagcactgaaggggctgctggctatttctagtgcccgggcactcgagtttcacccatgaagaggtcagagaaaattttctgcttcagtaggtgctttatcacaaacttctcattgtttataattctaaaattcacttgtcaattgattggttgaaattcaaaacaaattttcttttttgtgttatttatgtattattgttacataataattgtacatgtgactttgtccattaaacaactatgacgaaataagccaacaactgaagaacaaaaggaagaatgaaataatcttcattgtgaacaataaaaatcattctacaaagc

SEQ ID NO: 232415 - DNA, 545 bp, Homo sapiens
cacacttttgaacgtagtggggcttggctgctgcgagttacgcaggtatcctggagaggcagggcacccggggacacggatgactcgaggccgacttcgggtggctctctctgctccttcctgtgggggtgaagacgcccgggtcctcgccggcccgtgcgcaggggagcgggaccgaggagcgctctcgctccgtcctgcggcgtcccgcgcccaggtgcacatcggggagctggggacgcaggcgactcaggcagtttctgggagtcgttcttacgtcatcatgtcacgggcagaacagggcagagcgcccgcctttctcgcaaaaccctcctgtcccttgtgtacttacactgttacaagtaaagacttccccaagtgaccaaattttagagcattacagtaaaattggtacttgcagatgcctcagcttgattccttaattgatacgtatctagccacaactttaaactaccgagggacgatgtaagactgctgtgtcgcttttctttccttcaaataaacttttactcggtacctgttct

SEQ ID NO: 232416 - DNA, 497 bp, Homo sapiens
  misc_feature (107)..(107): n is a, c, g, or t
  misc_feature (109)..(109): n is a, c, g, or t
  misc_feature (120)..(120): n is a, c, g, or t
  misc_feature (126)..(126): n is a, c, g, or t
  misc_feature (130)..(130): n is a, c, g, or t
  misc_feature (151)..(151): n is a, c, g, or t
cttaagataaagattgtacttgacagtttagtatatccataaaactatttgaggtggttaaggttcttgggttcattttccttaatactttgctgaatattgagttntnttgggggttgnaagagngggnccccaaccaaatagaaaaagnatctactaaattaggaaaaccttgaataattaggtatcctaggtaagagcccctaaacatcaagcaatctgtgagtctgtaaagaaataaatattttttggattattcttatctaattccacccctgttggaagatgatttctttgttctttgcaactatggaagctgtgaaaatcatcacaagtgcctctgaaagcgagtgttaggttggttagagggtttaatattttctgcaatggtttgtaggaattttaataaatgtagtatattttctgagatgattttgtaaaagtactattttaaatatccaatccacccataaattcccatatgtgatagaaaaaaa

SEQ ID NO: 232417 - DNA, 648 bp, Homo sapiens
caggcacctgccactacgcctagttaatttatacctgaagtttctaagaaaaaggaataccagtcaactcaatgtactccctggtcatggggaaataagattgttttcttccagatatttgatctccaatctaccatcattataatctgggaatgaccttcaagaacaaggtgaatgtgttcttctgatatgaaaaatgatttgcaggaagaagcgaaattacgaacaacagcaccaagcatttacagagaccctacaacacaacaaacacacactttacttatattgcctccatctttaccctcatctttctcagatgaggaagctgagattcagaggagctaaataactcattcatcttcccatagctagtaaacagaagaattgggatttgaacccaggtgtctttaactccagagcccatgattacttttcttttacatagttatatcccatcaactcagagcactttgattttcatacatacccacaggtgctgcattgcttggacgatattcaaagtgatatgagttttctccaccttccatttgtcctctgcacaaaaaattcacctgtcctctgtttgattggcttattaatctatcatactgtgagaaaggttaccaaaatgctaaagcagaggatttt

SEQ ID NO: 232418 - DNA, 594 bp, Homo sapiens
caggcacctgccactacgcctagttaatttatacctgaagtttctaagaaaaaggaataccagtcaactcaatgtactccctggtcatggggaaataagattgttttcttccagatatttgatctccaatctaccatcattataatctgggaatgaccttcaagaacaaggtgaatgtgttcttctgatatgagagaccctacaacacaacaaacacacactttacttatattgcctccatctttaccctcatctttctcagatgaggaagctgagattcagaggagctaaataactcattcatcttcccatagctagtaaacagaagaattgggatttgaacccaggtgtctttaactccagagcccatgattacttttcttttacatagttatatcccatcaactcagagcactttgattttcatacatacccacaggtgctgcattgcttggacgatattcaaagtgatatgagttttctccaccttccatttgtcctctgcacaaaaaattcacctgtcctctgtttgattggcttattaatctatcatactgtgagaaaggttaccaaaatgctaaagcagaggatttt

SEQ ID NO: 232419 - DNA, 371 bp, Homo sapiens
tagagaaagagaaaatttgagagagacaggttgaatgctcagacagtaagtaggcagaaaatctcagaagagcagtacagcttcctaaaatgctcctggcttccatgcatctgtcaaactttcaggtagattttggggtgtcaagcatgatcatacagaaaaactgactcaccacctggaattctatgggttgagaaggaatgaaaagtggataacaaccagaaagaactctaatggtccagaaggccagcagcggcaattctgatgaaggaagcagactaccctcagtggcagacctaggccttgtccctggagaatcctgctgctgggatactgctgggtacacaaagtaaagaatgatttgtggaaca

SEQ ID NO: 232420 - DNA, 515 bp, Homo sapiens
ttgttttcttcttgttaatctgtcttttattatatgagtcccagctaagacctaagatggggagaggtgatctttagcctcttctacgtatatacttgtgacatagttaatgatatacatgtcgaagtatttcagggaaagtctgctaatgtttgcaactttgaaaggcatcaaaaactaagattgatgaaaggatggagggattgataggtatgttatcaaataaggagaataaaatgtgagtaaaaatagtttccactgttggtctgaaaatttttataataaaatactgaaaaaaataattgatttttttttttttgagatggagtctcgctctgttgccccaaggctggaagtgagacccttttggtgagaatggagacaccagtaacttacagcttaacaatcaccaatgagaactaagagctctaaatcaacctgattttactgttccaggaattcttactcacgaagataggctataggtcaatccataccttcattctgagctttag

SEQ ID NO: 232421 - DNA, 1359 bp, Homo sapiens
tgcagtagcttcaccagatttcgttgcgtctgctgtccaagattgttgaggttagcgttatttatagttaaatatgagagttgagagtgtgggggaagttgttgtctggtactgcacccaaaccaggaggataaaggaggccgcgggcccctcccttcgcgcgggctcgcacctctccccagcctggtgcacctgggctgacgccggctcgggactcgtgcggagcgccgcgagcgcgcggaggcagaggcgcgctgactgccacctccagcccgtgccggagggacagcacgcgctgcgcaacggagaccgttctccttggccgccgctcacggctcgcggcgaccaccgccgttgaagctgcaggcgggcagccgtgcgtctcccgggacagccagccccggcggctgctcctcccggatgccagggccagggcgccgggcggccgccagcaggagaatgaagagctcggtgggaggaaggagagaaaagctcctgggggcgccgaaagctcagcccagccgcgatttcacctgtgtacacgatggcgagagtgaggctgaattaatacctgatgactttgaagaaaaaccagaaagagaaaagaaacataccaactttactttgtgcaatgtatgtaacattcagctgaattcagccgctcaagcacaaatccactacaatggcaaatcacatcaaaagagattaaaacaactcagcaatgggacgctgaaaaatgacaatggtggtacatgccagagtcctgctctcccggcccttgtccgtccaccagcccctcctttgcaaccatcgctggatattaaaccatttcttccctttcctcttgacactgcagctgcagtcaacctcttccccaatttcaatgcgatggacccgattcagaaaagctgtaataaaccatacattcggggttcctcttccccaccgaagaaagcagatcatatcatgcaacatttgcccagttgagatttaattctgatagccaggctgcgggcccactacaaagggcacgaaaattgccaaggaaggctccacagcactggaagccatgaaaaataaagcagaaatctgtaactgcccaggacagcgcccaaggattaccttcactccatcaataccattaccatcaattaccagctctgaccagaaccggggcggaaacaacggtgcgcatggaagccgcgttgggtttaatcttaccattcttgccagacgaagggttctggcgggaccaggaatatcacgagcgcacactgtgtacacccgcaaacagcggtttgtacaacggataccccctctaagtgggaaaagcgcctatgagccctgggaagacagtcc

SEQ ID NO: 232422 - DNA, 1065 bp, Homo sapiens
tgcagtagcttcaccagatttcgttgcgtctgctgtccaagattgttgaggttagcgttatttatagttaaatatgagagttgagagtgtgggggaagttgttgtctggtactgcacccaaaccaggaggataaaggaggccgcgggcccctcccttcgcgcgggctcgcacctctccccagcctggtgcacctgggctgacgccggctcgggactcgtgcggagcgccgcgagcgcgcggaggcagaggcgcgctgactgccacctccagcccgtgccggagggacagcacgcgctgcgcaacggagaccgttctccttggccgccgctcacggctcgcggcgaccaccgccgttgaagctgcaggcgggcagccgtgcgtctcccgggacagccagccccggcggctgctcctcccggatgccagggccagggcgccgggcggccgccagcaggagaatgaagagctcggtgggaggaaggagagaaaagctcctgggggcgccgaaagctcagcccagccgcgatttcacctgtgtacacgatggcgagagtgaggctgaattaatacctgatgactttgaagaaaaaccagaaagagaaaagaaacataccaactttactttgtgcaatgtatgtaacattcagctgaattcagccgctcaagcacaaatccactacaatggcaaatcacatcaaaagagattaaaacaactcagcaatgggacgctgaaaaatgacaatggaagttgcctagaggattgcatcagttactatattttactgaacctaagatgtcatcagttcgaagatgcaatgttatgatacaccatcaatttcaaagatgtcaaaatgggaaaagatcagcatcttaaaatggaagaatatatttaaggtacttacaaatagcacttaatataagttgtttatcattttatcatgaaatcttcattgctgttgtaattaaaattaatagtatatcaacacataaaatagagataacagatgtattgaagaagttcatctgtaacttcccaaataaatttattgtggaaaaccataaaa

SEQ ID NO: 232423 - DNA, 452 bp, Homo sapiens
agtattacataataaaatgtctccaatatcaaacatgtttgaggaactttgggttacatttaatagattttacacaggagttctcagtgactttaacaatcctagtgaatactaggtcccaagaatagtgcataaaaatgtagaaaaactccatatgtctcacaattatttgatgacactccatttttcttacaatatcttatatgcttgaaacaaacttagagaaacacttggaaaaggtacaaaagtgggccaggtatagtggctcatgcccatctctacaaaaagtagttaaccaggtatggtggtgtgctcctatagttccagctacttgagaaactgaagtgggagaaacgactgatcccaagaggtcgaggctgcagtgagccatgaatgtgccactgcactccaacttgaccaatagagtgagagcctgtctcaaaaaaaaaaaa

SEQ ID NO: 232424 - DNA, 146 bp, Homo sapiens
acaacaccatatttttactcctggacagttcggtgcggacatgacgatccggtctctggcccattagggttcccagaccttggcctggcagtttcggcctaaatctccttgccgacccagcctcgatcccctgcggcgtccaggtc

SEQ ID NO: 232425 - DNA, 329 bp, Homo sapiens
agaaagctgaataggagaggaaaggagattcaagatgtgttcatgggggttatgcatcagaacctctttacatcctttgaaagatgaaagtagaacatgcaactcctttcttaagactctgttgagtcttaaaacagttaacattctgatgaactttgctaaatttatgatgctgtgcagagaaggaaccataaagatgacagcttcaatagggttacacctggaggatttgtctaaaattgtggacggaaagcacagctttcagctgaaattttagaataaaaccattgctttgtcactggagtcaagagtacgttattaccagactt

SEQ ID NO: 232426 - DNA, 206 bp, Homo sapiens
aattaaacctggggggcggaggttgtaatgaaccaagattgcaccgctacatgctgcactccaacctgggcaacagagcaagactccgtctcgaaaaaaaaagagattgctgtgaggattagttgatttcctacatacaaagtacttggaacagtgactgacacatagaaagtcttcatataataaatagattattattagtggcc

SEQ ID NO: 232427 - DNA, 605 bp, Homo sapiens
tgagacagagtattgatctgtcactcaggctggtgtgcagtggtgcaatctcggctcactgcaacctccaccttctgggttcaagcgatcctcatgcctcagcctctcgagtagctgaagggggagaaagttgaggctgcagtgagctgtgaatgtgccactgaactccagcctgggagaaatagcaagaccctgtctcaaaaaaaaaaaaattcttagtttaaaactcatacttaagtaacataatagtttccttacagttgcttaaaactattggtaagtatctctggaactatgagcaatttatctagcaagttgtgtatctttcataaataattacatatctagatcacatcataccattttctttattaaaaagtttcacccaagactagtttactatgtggggatttcttgagagttggggtcatgtcatgctcatgtttaatttcctctaggctctgcctatacaaaacctacatattactgaattgagagatagtatatgtgacatataaacagaaagacccaaaagggaaagagaattgacatcccatacttaaaagagttccatttatatattaaagtttgccaaccccagcact

SEQ ID NO: 232428 - DNA, 501 bp, Homo sapiens
ccaacccagagagggaaggggactcacccacagtgactcagcaaggtcaccacagaggagggaacagaatctgggaatgtggagggatggaccaagctgtgagcctcagggccctcgtctgcaaaatgaggaaataaacactgcccaggcagttttgaaggaagatgtaaaagaacgacccacagcatctggccaagaacaggggctccacaaataacatcaacgggccaggcagtagccgtctgcaccctgctgttctccagaagaccaagccctactcaggctcagcagccacccttgcccctttctgtggcccactctgtgtcatcgtctgaggaatggggcccagatgtggtttttttccacctggcagacacctgctgacagcttctgtcgcttggcggctgtaattgcagtgctctctcccctttatgccctgctaggcacagactccatctgcctctgccagggagtttattaaatagtttattaaatctcact

SEQ ID NO: 232429 - DNA, 495 bp, Homo sapiens
ctgggggctttatttattcctaacttttatacttacaaccattgtccgtaattttatatattgcttcatatctcctgtattccacacgaatggaaggtactgcatcttatttatccttcacttccaagttcctaccaaagtgcctgacatatggtaggtacttagtgaaaattgaatgaaaccaaattactgattatatattctcccttggatatctcacgtgcatctaaaacttagtacgtggaaaactgaactcattatccttcttccatgctcaacattgtcttttccttcctatgtttcctattttgatgaatagcccgtattctcaaccagtcacctgggccaagagctttggagccaacctgactttctattttcccctcacaactaattgataaccaactcttgtctattctccccacccaaaaagagcagtttaatccatgaccacctccccactctcactgtactgccttggttacgacccccaaa

SEQ ID NO: 232430 - DNA, 191 bp, Homo sapiens
aactgaggcttacatttaaatgcctatcttatagaatcaatattagacataaaaaacctagttgagtaacgggcacataataagggctcaataaatcacagctactattattgtcattattagtataaataggctagaaaatgtcttgtgtagactctttttattgcaaaaactacacatatctctaatat

SEQ ID NO: 232431 - DNA, 380 bp, Homo sapiens
gctttgttgatctcttctattgcttttataatttctacttcatttatttctgctctgatttttaatatttcattcattcaactaactatgggcttagtgtgttatttttctagttccttgaagtgtaacactagattgagatttttcttcttttatgtgtaggcatctgttgctataaacttctctcttatgatttgctgcatcctatacaaattgatatgttgagtgtccactttcattagtgtcaaggtattgttttattgtcctttaaatttcttctttgacccactgattattgagaagcatgttgtttaatttccatatatttgcaattttttgaaattcttcctattaatgatttataatttcataccactgtg

SEQ ID NO: 232432 - DNA, 316 bp, Homo sapiens
atggcatgtaagtatcgttaaggtaaaatgaaatagcactaaaagcaaaaaccacaatgcaagttaagaatcataatggatgaaaaagaattacaaagagtaataacactttcaacttgggccatttctggttaattagtttagattacgcagtttgcttattattaagtagaatgatttcccaaacttcttcactgacctttacttgggggtatggtgtgatgtaaccttatcaattagtcatttaacttactagtataatattaaggttaaaaaccaaattccatagctcatatctgtaatcccagcactttgg

SEQ ID NO: 232433 - DNA, 355 bp, Homo sapiens
ttaacattgtaatggactttaatttcttatttatcttgcaacaatatctgtaaaccatttgccagattgagtggtccaaagtcttcggagaagttctcatattcgagttcattatctatgctgaaataatgtacatttgatgcactctttggtctgctgtagagaatggcaaaacgaaggcgatcggtgatgtccaggtacacgtcgtcctgggggtcccagcggcgcgggtcctgcagcgtggagctgcgcatcttcttcacaccctgcaaggtcaaagagcagcgctgccagcagaggggcgcggcggcccagctcgaccgccgcttgcttttccgcttcctggaggcggccg

SEQ ID NO: 232434 - DNA, 676 bp, Homo sapiens
aggaagggcttagagagaaaatgcaaagagaattctctttagattcaaattagattttgtggctttcttaacttatggtttcattcattgaacattaaagggtttcctacttagctccaaagatgccatctcaaagttccaaagtttttctgggttagtacagaagttcctgtccctggcaggctgacagagcagcaaggtgaaacatgggtaggtaggtagagaggtagctaattaggaggaaagaaagaagattatctacttagcttgaggcggtaaagtgtgatctctaagagccagaatgcctgggtttgaatcctcactccactacttatttgctggctgttggtcttggaccaattactttatttcttgttttctcatctataaaatggagatgaggctgagcgcgtggctcacggctgtaatcctaacactttgggaggccgaggcagatggatcacctgaggtcaggagttcgagaccagcctgaccaacgtagtgaaaccctgtttctactgaaaatacaaaaattagtcaggcatggtggcggacacctgtaatcccagctactcaggaggctgaggcaggagaatcacttgaacctgagaggtggaggtcgcagtgagctgagatcacagaattgcattccagcctgggcaacaagaataagact

SEQ ID NO: 232435 - DNA, 423 bp, Homo sapiens
  misc_feature (274)..(274): n is a, c, g, or t
  misc_feature (315)..(315): n is a, c, g, or t
  misc_feature (323)..(323): n is a, c, g, or t
  misc_feature (329)..(329): n is a, c, g, or t
  misc_feature (363)..(363): n is a, c, g, or t
  misc_feature (390)..(390): n is a, c, g, or t
  misc_feature (401)..(401): n is a, c, g, or t
  misc_feature (419)..(419): n is a, c, g, or t
caatgctgaactttcccccaccacacccggtttctcctctttccctccagactcactcttgccagctaaggtgggaggacttgccagcctctgccgttactgctctctgcccagtgcccctcagggaatagctgcttagcagcagggcctgggcctgggctggtctagggcttggccaaaaagaagccagacaagtgccctgccttgatgtcacagaaattcccaacaacaaatagacaacaactagaaaaacaagtcactctatttacagttnggaaggaatcattaaggaagaaaagcaccagtaggtatganggagatgnaatggnaagagggcagaataacaggctgccttaagaaggnttggccagggcaaggcctctcctggtnaagccgggttntttcagttaaaggaaagnaagc

SEQ ID NO: 232436 - DNA, 537 bp, Homo sapiens
tgtttttttcttaagagacagggtcttgggccgggcgcggcggctcatgtctgtatcccagcaatttgagaggctgaggcgggtggatcacttgaggtcaagagtttgagaccatcctggccaacacggtgaaaatgattggaaaatgatcagaagtaaaaagatttgcccaaagtagcacacaaattcaatttctatgggtcctatatggattcatttattcacctaacacgtttactgaatatctactatgtgccagcaattgttctaggagctggggatacaataccaaaccaaagttcctgtcctcatggagtttaatgaacagttaaccaaaactgtaaaaccatgttgttagaaatccttgacacactcctagaaaatgaattttattaaaattaaggcttccctggaagtgaattctgcctattttgatataaatttccaacagatttttttttttttttttagacactgtctcattctgttgcccaggctagagtgcagtggcatgaccacagctcactgcagccttga

SEQ ID NO: 232437 - DNA, 304 bp, Homo sapiens
tgaagacttttgatacatcacttgaaatgttcctcctgaagttgagggtcttttgtaatatcaccagggcagtgaatggcagagaccagatcatgaatcgcttcatttagagcctgcctccgggcttccctgcactctgtggctgctaataccacacccctgtgtcccttgtggtcttaagtcacaaaaccagctattattagatttgcctggagtgtctgaaaacaggcttagaatgaggaaaccttgtctcacttttatacaactggaaaacattacagaatttgactttttgaaaatttcc

SEQ ID NO: 232438 - DNA, 272 bp, Homo sapiens
ggagatgggaaataaggtcccagagttttgtggtgctttgactcagctttcggtctgctgagactcactcacaaatgtgtcattccgttctgccatccgctttgttttctttctcttttctcagttctcagaatcttttttcctaattattcaaccaacttgttgacatccttctcatgcctatgacaggaaggcagtcctcaccccagagtggccctaagctatgtctgtggctcaggagccctctccacggggcctctgcctgggatggt

SEQ ID NO: 232439 - DNA, 526 bp, Homo sapiens
ccacatttttaagccaaattgttgggtcttttaaaaactagcattttggctgtagtataacagtcttagtttaactgattcaaaactatggctggcttagtaaatttaacgctagtggccaataataacagaaaagagataaatattcttaagtatgtattttgagccagggattctgctaagtactttattcactctcattaaagccttgaaacaattgttgcatgtttaagttattaatgagccccattttacagaggaaaatgaggaaactgacctatgtaacttgctcatggtcacaagccattaaaggtggcagaattaggatatcaatccagtcggtgtgactccagaaccctcctatttactctatactactcataaaattatttggtcttggggctgggcgcagtggctcatacctgtaatcccagcactttagggtgttgaggtgggtggattgcttgagctcaggagttttagacctgcctgggcaacatggtaagacctcatctctacaaaaaaa

SEQ ID NO: 232440 - DNA, 396 bp, Homo sapiens
catcagcctcccaagtagctgggattatagacacgcaccaccatgtctggctaatttttgtatttttagtagagacagggtttcaccatgttacccaggctcaaactcctgggctcaagctgtctgcctgcctcggcctcccaaagtgttggaattacaggcatgagccactgtgcctggcccaggactctaacttttaagtatgaacttgtaagttaaaacgactctcagaccacctgtgtggagtctctgagaaaagagtaaactattttaatagtccagggagaagtgatcaagtccttatctaggacagtggcaatgggaaccaaacatgggaacagacagcttaaacctggtggaagtaggatccactgaatttgatgactaactggatgt

SEQ ID NO: 232441 - DNA, 344 bp, Homo sapiens
cagacagtctgttcctcgcatatgcagtgctgtgtggttttaggtaaggtgtttaacacttcagcctcagtttcctcactatagcattgactgcacaaagtggtggtgaggatcatgggaaagggcaacagagaaggtgcccaaggccagttcacacagtctgtgcttgacacaatagcagcaacggtggctttcaattttgaagttccaactgtaggcccaatgtggaccctcacacaaccagcctaacctcatggatgagaaaactgaggatgagaaacttgcccaaatggtatgtttgtgtgcaaaaattagcaaataaaaatgaacacaggcagggcacg

SEQ ID NO: 232442 - DNA, 601 bp, Homo sapiens
gggtccctgttttctggcaatatgctatgcatatttgcaaatatgtaaactgcatggataattttgctgtaacgaggaatgtcactttaccagactacaactttaatcagcattcctctgaacaaacttgctcatgatactaagcaacgcaaacatgcagccaaacaactggtgttttaatattctagcttctatttcttccacgtcataatttcctgtaataatctcactcatgcctgaactccacagacattcttatttatgtttttcaggtcagtatgccaatagcagtagtattgttcttgaaaggttgagtttttcaaatgagtcctgaaagaattctaccacactgcctatttcccaagcagggatcatgggagaaaggaaattttgaagaaaatggttctaatgccattttgttaaaagtactgagagatttacaatgatcaagtaatatgccagttctttcaaaggatgccaacatctgatgccaacataattacaagttggaaaaatgtgtaatgaatcaggcggctcataatttcccttagaatatgtatgcacaacttattaaatgacataaaaagcaaagagtcacggc

SEQ ID NO: 232443 - DNA, 143 bp, Homo sapiens
tatgtcgtctgtctcctgctagaatttaagcaagaaagagcaaggatcactgtttttgttcactggtgtctctgaagtgcctataacagtgcctggtacgtggtagacattcaggacacatttacttgatgagtgaatgaatg

SEQ ID NO: 232444 - DNA, 435 bp, Homo sapiens
cagctatttccaataatgggaaaaaactcacctggagagttttaggtagtgcagaatattcaaaagaagtaaaggcatgaagaaacattttaagacccagcaaaatgatagatccaaaagggacagtaaaagcattttatggttgcatgaaagtcctagatattttattttggggaaagtacatggtataatggaacagctggccattggacttggaatcagaatcaagattcctatctggacttcactctgttgagcctgtgactttgggcaaatcacttagccttatcaaatatcatttttctcattttacaaaaactgataaaaagaatggttatgagatttaaatggcaggatgcatgtgaaaacacactgtgaagtacctggcaaatattaggtacttaataaagatgagttgaattggaatctaataaa

SEQ ID NO: 232445 - DNA, 460 bp, Homo sapiens
tgagagagttttaaaagcactggtatttgtcccacacaaggtcgcccgctccaagtcactgttccccgctccccgggtaggcttatagccaaagaggcttctaggcttcgagatcagcccaccgcgccccctcagcccttctccgcgggccgcagccccatcccggcctctgggtcccggccggggatcggaacccagccggcttctccgacagcgtttccgacgcccggcacctctcgcagccccgtcccccaggctcccccgtctccacccgccaccccccggcgctcccgtcaacgtccccttcctccctcaggacgccccttggggcgcctctcgcgccgggtcccgccgggtgctcggcacgctgttcctttcctctcccctcccgcggcccttcttctgtggggcccacctggcgcggcccccgcccccggccagtctcctcagtgagcggccg

SEQ ID NO: 232446 - DNA, 471 bp, Homo sapiens
tggagacaatgatgctgtcctcagagattgtcgtcaggggttaaatgaggtaatatacacaaagcacttcacccagtacctggtaattgcaagaattttccagaaggaaaactgagctctccttctgccacctgggagtagggcagttggtgcattccaacagcatattttatagtcaaagcttcatccgcagtagagtgaagaaacgacatggaaggcagaagctgggggcagaaaacatgttccctggctgggcatttccttcctgtcctcatggtgagacatcattgatcactgtggtcactgtgcctctcagatgaccccctggtgggagttgctgccaacctctgagggtccttctcagacagtgagttgggtgctgtacagaaacaaacttgggtggcgcctactccatttccaaatatctctgggctctgggagtttggcccagctcttcactatgcttatttc

SEQ ID NO: 232447 - DNA, 352 bp, Homo sapiens
gagattaaaacaacaaaaaaggaaagcctacttgaagtcatgcttgagggaaaaggatgacattatttattcatgactcaggaggaaagcccacgctttataaaaacagaaatgtcaatcatctttctcatgtaatctaatcttagcaaataacgagcattatattttgggttgacttagttttcagtgtctttaagcaaagcttataatgggctactattaaaagttccatttagtactggtttgcatcacagcttaattgtagtcgttataaacttgggcacttattttcatttcagcaaaatcacaaacatgaccttaaattggttaggggagtcattcattctgctgt

SEQ ID NO: 232448 - DNA, 388 bp, Homo sapiens
agttcactggagtctacctgggatccccctctgatatagtttggatgtctgtcccttccaaatctcatgttgaactgtaatccccaatgttggaggtggggcctagtgggaggtgtttggaccatgagggcagattcctcatgaatgtcttggtgtcatcctcacagtaatgagttatctgagttcacacaagatctgattgtttaagagtctggaacttcctccttgctctctcactctctcctgacatgtgacacgctggctccccttcaccttctgtcatgattggaagcttcttgaggcccttaccagaagcagagggcagcactatgcttcgtgtacagcctgcagaaccatgagtcaaataaacttcttttcttcataaatt

SEQ ID NO: 232449 - DNA, 320 bp, Homo sapiens
agagagtaatataattttaatatattactaatatattactcttaataatataataaatggttagagagtaatataatttggatatttgtcccctataaatctcatgttgaaatttgatgttcaatgttgagggcaggtctgggacctccctccctgcttttgctccccctctcgccatatggcacaaatgctcccttcaccttctgctatgaatggaagcttcctgaggccttcaccaaaagcggaggctggtaccatgcttcacgcacagcctgcagaatcatgagccaaataaactacttttctttataaatcatcca

SEQ ID NO: 232450 - DNA, 554 bp, Homo sapiens
ttgttaacattattattgagggcctgctgtaataaatatctaggaactatttaggtagtagaaaaagagtatatgtcctttctgtctgccttcttttggttttttgcttctcttctgccttaattaaacatgatttggaatagttatttttaccttattactcaagttaatactttttttaataagcagtatgtcacatcacctaaagatgactgctttttaaccagctcctatttttaatgtcagtatatttatatttaaggcatcattaaacagctttttgcaatgtacttttcagttacttgtgaagttggaatgctttgtgttcttgtatttttgttactaggttgcaagtacaggaattgaataacttcagtttaagaggaaaaaaagtcatgttgctttttacatgtcagagttcttaacagaaagcaaaggtttccaacagcacttgcatttttagtctaaaagcattctgggcattattcatacagatcgttttcaaactttttatcaagtgcattcttctaataaaattaagtgaaatactgcgt

SEQ ID NO: 232451 - DNA, 463 bp, Homo sapiens
agtcatggaagaagcctttctgatgagagaagctagagtcctggaaagctacaggcagatgagttaaggttaagacaaaaggggactgggagggtcttactgaccgtgtagttgttttaaggcagtttctagactttgtaatatgttataaagttaatttctgttaaaaaatttgaattctagacccaggcacggtggttcatgcctgtaatccctgcactttgggaggccaaggtgggcggatcacctgaggtcaggagtttgagaccagcctgaccaatatagtgaaaccccatctctactaaaaatacaaaaattaactgggcgtggtgatgggtgcctataatccagctattctggaggctgagacaggagaaatggttgaacccaggagtcggaggttgcagtgagccgataacggtcccactgcactccagactgggtgacagtgagactccattta

SEQ ID NO: 232452 - DNA, 534 bp, Homo sapiens
ctgggctggaaattgttttactgactttcttcattataaaatgaagtattttacattcagcctcataatgatgaatgttcacatcttgtatacgtggtcttcagcaagatattccaataggtcagcctcaggaacaccagattaagtgtctgtgaggagaaatggcatagggacctcatttaataattaggaatgctgctgcttttagtaggaaattcattttcatacttaagttcattcagacttcagggacacattgtggggctattgaaaatataaatgccatccacgacaatcatagacacttagtagacattaagtaatttctgtggtaaaaaaaaaaaaaaatgagctgatggcaacaagttcaattctaagtctacaaatgtgcaggttctctaagcaaacaggatgtttttttccaacattcccttggagcctgggttccaaaagaaatcctttgcactctgaccaatgggtccttttccctgcacatcttccttgggaattatggccttaaatactacagaaacc

SEQ ID NO: 232453 - DNA, 211 bp, Homo sapiens
ctgggctggaaattgttttactgactttcttcattataaaatgaagtattttacattcagcctcataatgatgaatgttcacatcttgtatacgtggtcttcagcaagatattccaataggtcagcctcaaaagaacactctgcagtttactgttaacgtgtctgagtttcttgtagttagacgctggcactggcgatttacgatatgaat

SEQ ID NO: 232454 - DNA, 447 bp, Homo sapiens
gttatggtagggaaaaatgctagcctgggagctgggtggtctgcctcagtttcctcatctgtacaaaaagaggaagcatggcaagagggtatctccaaagactttactgctacaatagagcatgactccacaggctcaggagagggccaattcagccaggccccaggctccgttcctcctctgctgtcttcaggccacccagaagggccactgcccacttgcaaagcctgggcaacaaagtgagactccatctcaacaacaacaacaacaaaaaaaaggcttaatgctaatggccacaaactcataatggcagtaaaggagcaaacggcattgccaggtggtgtggggcccagaccatgcccccacatggcctgaggcttgggtcctggctctgtcacctacaggttgtgtgatgctgggcaaactaataaacttctttgtacctta

SEQ ID NO: 232455 - DNA, 492 bp, Homo sapiens
ttaatcaaacctcccgattcagcatgacaaagtggccatggcatacagcataaatggagaggaagatacaggatagaaaaccaccagcaaacaggtaaagagggttcctatgttgattacaggaaggatactgtcaccaggagaatcacaaaactagcacttccagataacactgtgtttgcatttgctttctaccacattcatgtggtttcctgcacttcataatttaatatttgtaagagaaaaaaaaatgctgttatgaaaccccaataatgcatcacttgaaggcagaaagccagctgctaacaagagtgacatctgagcatcatttctgaagctctgcttcagaaaggggatgtttagtaagaaagaacaataataaatgctattcaacgtaaaacaaagtgtggggatccacagggttaacaggctggccggtaaccagtaacacaatgacggcaagcacagagaaggaaaaagtcagatccccta

SEQ ID NO: 232456 - DNA, 787 bp, Homo sapiens
tgcacttgtacccctcaaatttatgcaaaaaggatggaaatatatccatgcatatatacatacaaaatgaatcagaaatatatcataaaagtgataaatattgaggtataaactataacaaaaagatagaaaatggagagtgccaaattggctgcatgtttcagagaaggcattatggtagaaatgggattaaaattgggctttgaagagtgacgaggtagataggggagaggagaccatttcaagaagaagcaagacctgtaatctcagcactttgggaggccgaggcgggcggatcacaaggtcaggagtttgagaccaacctgaccaacatggtgaaaccctgtctctactaaaaatacaaaaattagctgggtgtggtggtgcatgcctgtaatctcagctactcaggtggctgaggcagaagaatcgcttgaacccaggaggcggagtttgcagtgagccgagatttccccactgcactccagcctgggtgacagagtgagactccctctccaaaaaaaaaaaaaagcaaagaagaagcaagaacctaaggttatatggctacaggggaatcagatttgagaaatttatgctatttgagacctgccatatattctattagattttggaagtcagaaagcttaatgtttaagcactttatctcatgttacattcttaaaagcatcccaacatgtgctgtgtattttaatgatattgtcgaatactagaatgcctgcttggttggtaagactcttgtatacgttaccttggaatcttgataaga

SEQ ID NO: 232457 - DNA, 508 bp, Homo sapiens
agcaagcactgcgggagtattttctgttgatccgttggttcaaaaagatgctctcacaggagaaggctcatacaggctggatgatgagctcattattaagacatgtgatggtcactggatcccacaatatttctgacatgtttattcctcttgctgattttctgactttttattgttgttttgtttatactgagagctgctgacatgtgaatatcccaatagctatcatccctgaaagatgtgctttttaagaatgaagactgcagtttttctggagtcagcctcttgtctctttctcctggctcacacttcacaaaatgagaattttttcttaagacaaacaaacaacaacaacaaaaaaaacgaagcagaactggatatagtggctcatgcctataatcctagcactttgagaggccaaggagggaggtttgcttgaggtcaggagttcaagacaagcatggacaagaaagtgagaccctgtctattacaaaaaaaaaaaatacaa

SEQ ID NO: 232458 - DNA, 525 bp, Homo sapiens
agatttctctggctccaggggcaggtctccaatgcaaacaaagtctctctcttcctcccactattttctcttcgcaggacatgagacttaacaacctgctaaaaatgagcttttgggacctacccatcaaggaataaactgtcctcgccatgagagatcaaatgaaacctgagaccagagactcattttcttgtaaaatgctttctccaacagatttttaaaaagaaaaggggggaaatgtgaaaggaaaatatctgtggtccccaaaatcacgaaggaaaactcaagccgggaactgcttagggcaaacctgcctcccattctattcaaagtcactcctttgcccaatcagatagatgcttatctgatttgcctcctttggaaaggctgatcagaaactcaaaagaatggaaccatttgtgtaacagccatctgtgacctggaagcttccttcccacttcagtcttcctgcctttgcttcaagttgtcctgtctttccagatgaagcaatgtacttcttaacat

SEQ ID NO: 232459 - DNA, 267 bp, Homo sapiens
taatcccagcattttgggaggccaaggcaggatgattgtttgaacccaggagttcaagaccagcctaggcaacacagtgagacttcatcactacagaaaattaaaaatttagctggacatggtggggcatgactgtagtcctatcaacctgtgagcctgaggtgggagatcgcctgatcccaggagtttgaagttgcagtgagctatgattgcatcactgcactccagccagttcagcctgggcaacaggatgagatctcattgcta

SEQ ID NO: 232460 - DNA, 482 bp, Homo sapiens
tcttcccccagatcatttatcactatggtaattaagacttagatgttcagactgtggaatgaaaatagaacagattctagcgcagatttttaaaaatatttttcttcctgcctccaaaaaagtacatgttcatttaagacaattttgaaaatacaaacaaatgcaaagaaaattaaaataattcttaatcctattacccagagacaacttcttctaatattttggtttatattcacccagtcttattcaaggaacacaacaaacacacactctttccctttatctttgaaaaatatgatatttgatacatacaaagaatatatgtaacattacaccccctgccccaaaaatcaaaacattataaatcatggcaataattgtcatttacctatgtgcaccccttggtcttgcacttcctctcatggagtgggagtatcatcctcttgccttattaaagtaattttaaaaattgtttgtgttta

SEQ ID NO: 232461 - DNA, 456 bp, Homo sapiens
tcagcattgcatgactcagaccctgtgagcacagcccatgttcagaatgtggaaatccatcccagacagtaggtagcagatttccagccaaagggctgcctttccaggagagcctgtgcagccgggttctgccctcgttcggggaactctgccaggtttcaggagccagctcaggcacttcgccccctcctcagaggctgcctcttgagccttcagtgcttcctgagtgcctcctgaaaccaggccgggtgctccccagacagtgactgtttaatgaccgccacactccagtcgtggctgagaatgaaggaactcttcccttaaaactgaggtgtctgggccaggtgcagtggctcacacctgtaatcccagcactttgggaggccaaggcaggcggatcatgaggtcaagagatcaagaccatcctggccaacatggtgaaaccccctctctatt

SEQ ID NO: 232462 - DNA, 617 bp, Homo sapiens
ggagaatcgcttgaacccaggaggcagaggttgtggtgagccaagatagcaccattgcactccagcgtgggcagcaagagcaaaactctgtctcagaaaaacaaaaacaaaaaacgaggtttccttagtatgttaatacctctcttaaatgctgttcccttttccccccgatatctaaccagtgacccaaagttgacatgcatccttcctatatccacgtgttgatacttaactacatacctttatcctatgaacattatatatatatagttttattttgattgtcttaagactatttaaatacagatatctttatttagcttgctttcttcacacaacttggccaagatttatctatgtttatttaggtagctctagtttatttacttttactgttaggtggtatgtgctctgttatataactatgtcaggtttctgttgatggtcatttttgttgtttccatttgtttgctattaaacagtactataaggaatattcctgtatatgttaggtatctgttgtgtaagacttctagagcagtggttcttgaccctacctacatcccatgttcatagaaaatattttacagtactttaaagaaagcattggccttaat

SEQ ID NO: 232463 - DNA, 353 bp, Homo sapiens
taatggcaaaagataatactttcccataagattgtgagcaaggacagatgtccactctcaccactcttatctaacatactgctgaaagttctacccagtgcagtgaagcaagaaaaggaaacagacataaagattgtaaaagaaaaaacaaaactgttcctgtttgcatgtaatataattatgaacatgcaaaatcgaaagaatctacaaataaactcctagaattaattaagttcagcagtgtccagtatacacaataagtatatttaaaaaatcaattgtatttctatataccatcaatgaacacatgtatactgaaagtaaaaatacaatatcatttacaattactcaaa

SEQ ID NO: 232464 - DNA, 410 bp, Homo sapiens
tgagaaatgaggctctgtcaccagggtcctgcctctgtcacagtcgtacgtcaaggtgagccgcataaagtcacaatccataagaagccaagactctggagggagctgaggttatgatgggggctttctccgaaaataagaggcaaagcaacacaactacctcttctaagatgagagctaaggtgggaaccagtgtgaattaatcaataataagttaattgtacatttaaagataactaagagtataattggattgtttgtaacacaaaagataaatgcttgaggggatggatatcccattctccacgatgtgattattaagcatcacatacctatattaaaacatcacataccccataaatatatacatctactatgtatccacaaaagttaaaaatattttttaaaaa

SEQ ID NO: 232465 - DNA, 506 bp, Homo sapiens
tgttagaatcaattaaaatgaagaccaggtctgaagaatccttgagcagacaaagccagttaggcctatatgcgaccttcaccttgtttgatttgcaaacataagtgaaacttaacttgagctatttcttataaatgtctatgttaaagagaaacagaacttaagctcaactagtcagaatcagccaaaaaacttctcattatataactaaggactttccagtgggatagaccaaataaggcaacttataattataaccaattaaatattttctcagcatctcttccacatttaccctaaaacatctgtgcctctgcgtcctcagtgcaaccctccaaccacctctggtttggagctgcctgattcgtgaatcactctttgctcaaataaactctttaacattttattgtcttggtttacttttttaacagattaaataaccgagtactattgtctagccaagttgacacctaaagctgaccatcgtggccaggtgccgtggctca

SEQ ID NO: 232466 - DNA, 461 bp, Homo sapiens
gatactgaatttgttttcaaactctaccagctactggcactgcaagcttaagcaagttactcaagcccttgaagcttggcctcttcgtctgcaaaatggggctgataaggcttctaaaagagagttgtgaaaattaaatatgatatagtatgtaaatatcgttacataaaatgtacacatttactaaattatagttgttattatggaacccaacactaaagaagcgggcagagaatatcacttgtttctgtagttaggaatagtagcagtaaatttgacatgtgccactatagtgaaattgctggcacttaagttatttgtcatatactataataatatgatttatgaatgttaattctcaaatcagttggaagccaactgtgtgttcttgttcagaattgaccaacctagaggttctgaattgagtgaaacctatatcattaaaagaatgtgacttggta

SEQ ID NO: 232467 - DNA, 376 bp, Homo sapiens
agagaatctgtgaacagaccatgcaaatatgcctgcctggtttttcacaacagtgcaaaagcaactcagccaacaaaagacagcttttggccaggcgcagtggctcactcctgtaatcccagcactttgggaggccgaggcgggtggatcacgaggtcaggagatcaagaccatcctggctaatatgataaaaccccgtctctactaaaaaaacacacacacaaaattgccaggtgtggtggcaggtgcctgtagtcccagctacttgggaggctgaggcaggagaatggcatgaacccgggaggcagagcttgccgtgagccgagattgtgccactgcactccagctcgggtgacagagcgagactgtctcaaaa

SEQ ID NO: 232468 - DNA, 392 bp, Homo sapiens
tagcttgagattggatgcacttaatttattcttaaattcatgtctcagtggtttccttaaaaaaaaaaggctaaaacattgaatggagttgtactttaaagtaaggggtacagctgggcacagtggctcacacctgtaacccagcacattgggaggctgaggcaggaggatcacttgcccaggaattcgaaaccagcctgggcaacatggtgaaaccctatctctacaaaatatacaaaaaatgagatcggtgaggtggtgcgtgcctctagtcccagctacacagagcgctgaggtggaagaatcacccgaacttgggaggtgaaggctgcagtgagctgtgatcacacactgcagtccagcctgggcatcagagtaagaccctgtctcca

SEQ ID NO: 232469 - DNA, 485 bp, Homo sapiens
ggctggattggtgataaatgagcagtgaccagggaaaaagacgaacctcaaataccctaatttgccattcttggtaatatatttaacttgagcagacaaataaggttaatcttttttttttttttttttttaaccaggctaatgagtatatagaatccctctccagctgatcttaaaatttgccacttgggattattgagtttcactttttccacagtgtctttggcttttgcttacacattcttcttctttgacccagtctcattacatcattaataacatttaattaagccctgcagcaaagtgagaccctcttctctaccagaagctacaccggcttataaactgactatactcaatgtaaccttgacttcccaaacagaaacagctctgtcttagaccttggatcaaagcagtctttccaataagtaactgttaaaacacatcacctagggtggttaatacactattccatttaaacaagt

SEQ ID NO: 232470 - DNA, 866 bp, Homo sapiens
agaaggggtgggtctcccacctgttcctggctcccactaactttgaggagttcacagccccagccactcctccccactgcagccagtgtctccgtagcaactgctccacatgggccactgctgccatcatagagcggtccttgcaggtgcctttcttgtacctcagcactcctgggggtcattagaagccctagcaacactgctcaccacactatagctccggaggccctagcagtcctgctcccacagatcccacttctgacaccatctattaaaagaaaatcttcagctgaattaaatttaaaggaacttaattgagcaatgaatgattcacgaatcaggcagcccccagaatcacagcagattcggtgagactccagcacagctacatggtggaagatttatagacaataaagggaacgtgatgtacagaaatctgaagtgaggagtgaggtccagaagcaactgggtccgttacagttctcagcagtgaggtccagaaacaactggactggttacagtgctcagcatttgccttatttgaacacagctgaacactcagcagtgtgtgagtggcagaagtttggctgttgggattggccaggactcagctatagttacaggtgcatactccaaagttaggttatcagtctttctacctattaagttaggttgcagtttgtccacagggactcaaatctagaagtacagagtccttcccaggccatatttagttcactgtaacagttcctattatgacctcactgacagttctttttctctgaattttcctttcttctcaacagcttgtccaaatgttccattggtccctgttcatcccgccctgcagctctccttgactgatt

SEQ ID NO: 232471 - DNA, 429 bp, Homo sapiens
caggcagctgagaggtctagttggtaggaactaaggtctcttgccaatggcaagggactgaggcctcctgaaaacagacatgtgaatgagaaaaccttagaagtgagtcttccagccccaatcaggccttcagatgactgcaacttcaggagagaaccaccagactaagccattcctgaattcccagccctcagaaactgtgtaagatcatgtttgttgtttcgagctgctaaaattttaggataatttgttgtaacagattgtgaatataattgctttaacatttattatccatcttcatcttctaccacattattttattggtcctttgtaaaactcctggggccattctttttctttctttttttttttaaagatggattctcgctccagcctgggtaagggagagagaaaaaccttatctcctta

SEQ ID NO: 232472 - DNA, 490 bp, Homo sapiens
cacattgctaaatgtgactgtgcttcatagaaatggtctgggctgccttccagaggagctccatgtcttcctcacaatgcggtggttggctgtcaccctgtagccttgtgttgcctcagtttactgtggtgggaagccagataactaggctgcacccgcccagagtccgggctagaggtggactcctgtgaaggaggggtctcctgtgtacatggtctccatggttttagccacatgctaggaccacagggagttgatcccttccttcctaccctgagtctgtggtctgtgatttgagatcactggctcagtgaagtgtagctccccacttacgaagtaagttataaaattggtggcagtgatttccatccaaagattttgttaatccacttaccaacaggtaactacttaaatgtactgaccgtgtgctcataaaagtaaaatactgtaattatagaaataaattcaacatgttgaagactttctcgta

SEQ ID NO: 232473 - DNA, 800 bp, Homo sapiens
ttaaaccagactgtagttgaactaaaataaataaggtctctttttgtcttttttgtgattccatgggtcgggtcaaattgacggcacggaacattgcttactcttgaaattccaaactcttgaaatttcaatttaaaatattgggttttccctgcccttcttaggatagccagtagaaaaatggggtttccctggatttccttggtctggtaggtgcagcaatatgacatgagtacctcataggagggactacagagaagcaaggattccagatggagggagagtttggaatgtgaaagaagggtgttattagctgatgctgactcattggggtttgaagtatgaacacgtgtttagtgagcaatattggagttttcatagtaagagcttgcagaggtggctgggagtgaggcatgagatctctcggtagaggcaaaatagagtgatgagagccagaagcactggatcaggtgctcccaaggggaagttgtaatgaagagtgaggcaggattgcgtaagtagaaaaagagaaaaagagagcaatgctcttgtgaaaagggagttgaagtgcaatacagactgcagctccatccgtcagagggttgaaatttcacacacgaaggctcattttgatatgttcacatttatgtggcaagcgctccaaaagggaggccctaaatacatcttgtcagaataactccagcaaagactgacatttacacatttctctggttaggaaatgtaatagaggcaggggcatatacaggttttatggggcctaaaccttatgtaatttgagg

SEQ ID NO: 232474 - DNA, 314 bp, Homo sapiens
tgcgcctggcccttaaaccactgttttatacagacaacagcaaccctgctttgtgagctagcttacggttttaccaagtaccgtttttttgtttgtttgtttgtttgtttgttttttgcgggggtggagggctaccagctttatcaatataattcagataccataacactcatttaaagtgtacacttctggctgggcacggtggctcacgcctgtactcccagcactttgggaggccaaggtgggaagattgcttgagccctggaggttgagacaagcctgggcaacatagcaataccccatttgtttctttt

SEQ ID NO: 232475 - DNA, 430 bp, Homo sapiens
gtgctgagattacaggcgtgagccactgcacctggcctgaaactgatattttagtgcaaattttgtatttgttttcttgagaggcaatggcgtactggagccatacggaccatgaataagctacctaacttccttacatctatttccccctccatctattgaatgggtataatagcacatattcgtacaggctggtggctctcaaaacttaatctgaggctgacctgagatgctagtcccagatcctacctcccagagatttcagttcagtagttctggggtgggaaacactgtcagaggactgtttgaattaaatgagacatgtacaaaatgtttaacacatgtctggacaaggtcagcaattataacccataaataatatttccatttactggacctaacatgaggagtaacttcttttgggaaagtt

SEQ ID NO: 232476 - DNA, 552 bp, Homo sapiens
aatgtctgggatttgtaataatgtgaaatgcataatgagaagatcatgtaagtcccttgtgcttgtgtcacaggtgcaggacatttagtatccatggcctttgcccatcctcaatcgtgtgaccatcaagaaatatctcctgggtgaaaaccattcctcttgagaaccactgagttagagaggatttagaggagctaaaattgaaggtttccacatgataagttatttaaaggatttagtgaaacttctctccccctgctatcacaatgaaaagatagtttcgtgacagaacataaattgtaacatactattgctttagtagtttattatctgaaatctctagttactgttgaaatctaatcccggttttcttcctctggatttagagtaagttaaaatgtttaccacaacttttaagagttgttattctgaaatagataatgataaacacaaaatgcatactttaataccacagtgaccagacttaacatccaagataaataaaatgggtaatattggacactttaaatgtattacaggttctagtactta

SEQ ID NO: 232477 - DNA, 516 bp, Homo sapiens
caaggaggcagttgccagatcacatagggcatttcgggaaaaaatcctttgaaagtcattttataaaatctttgttagtctatggttcattatagacattttcccttaattggtgggcaaggacttgaaaaggtgaggcttgttggtggctgaccaacctgcctgatttgaggacgcactgatgagtcttcaggtttctgcatctttagcacagtcatttatagctcatatacatatatatgtatatatgtgtacatatacatatatgtacatacatatgtatgtatatatatacacacacatatatattttatatttgaattcggtttcaaatagttttgtattttacattaggtatgtttggagaattatgctgcaacaaatatacataaattatttggaaacagaaatatctttaaattgggttttcttaatgaaggctccttaaaaagaataaaattattttctttatgtttccccattctatataataaacctttacctgtttcaatggta

SEQ ID NO: 232478 - DNA, 710 bp, Homo sapiens
cacttgtaccaatgtccacctgtacagatgtccacatgcaaatgcccatctgcactgatatccacctgcacagatgcctacctgcatgaatacccacttgcctgaaagcccacctgcacccatgtccactggcacaaatgcccacctgcacccgtgtccactggcacaaatgcccacctgcacagaagcccacccacacaaatgcccacctgcaaaaatgtccgcctgcacagatgtccacctgcatgaatgcccacctgtgtccacatgcacgaatacccacctgcacagatgcccacctgcacggatgcccacctgtacaaaggcctacctgcgtgaatgtccacctgcatggatgcccacccgcacggatgcccacctgcacagttatccatctgaacagccctctggtgcctccttttgcttgcacatgttcaaatcctcccagtcctacagtcgattgttcctagttggggtcattctgggcatgttattctaaaacttgttttttcccgtctccacatcaaaggagaaaggtctagcttgcttctttgctatagagcagggcctgagtgaggtcaggaccacagagcagaccctatgagtgttggtcaggacacagagcaggaccccttcagggtctggaagagggttccccaagctcctgttcaacctgagtgagaggctcaggctgcccccaacacactgca

SEQ ID NO: 232479 - DNA, 523 bp, Homo sapiens
gtagagattgggtctccctgtgttgcccaagctggtcttgaattcctgggctcaagcaatcctcctgcctcagccttcccaagtgctgggattatgggcacaaggcactacatctggccacctgcttgtgttttcacaagccctgcaggtgatggtgaagcactcctgagtttgagaaccactgctttagtggaatgctggctaaagtcacacaggtttatttcctgtataatttagtcccacctcacatgctaatgcttactgtgactcttcaggaaggaaatacaatatactagcattttctcccaaaagtgttgggcggtggaagcctattttcaggtagcattgctaggacatgcttctctggaccacacgggggaagtcagacagcatttctccagacagccgggggctagagagggctcagtcccagctcccagatattcataaggagtactcgacaggccctggagattaattttgagctcagactttttgacctgccaaggaacaccaagattta

SEQ ID NO: 232480 - DNA, 408 bp, Homo sapiens
ctccatggagtttaagctttatttgattgtcctaaaacaccaaagaaagataaaataagattactatggtgtcctggaaggagcaagcactggagtagagtcagaagtcttgagtccttgggctttgatatttattggcaatgtgattttggataagtcacttaatctaaagtggggatgaaagtgtctgctttgttaacctcacagggttttcattaagatcaaatgatatgatgtgtgaaagcactgacaactatatatgctaaacctgggcaaggtattatcaagctcttctccagcagactgcaagcttcataaggacaaaactatttaatttactataaattcatcactcactttagtgtcttgcacagagaaagcacacaataaaattatttgtggaataaa

SEQ ID NO: 232481 - DNA, 442 bp, Homo sapiens
cgttccccatgccccggtgtgggtgaactcgattgaggagggaggaggatgacacccgccgggggtgttaattagtaagcacagtggcctcaaagagctcaaatgaaaggaagaattgcatgtctctcacttgaagtccagagctagcaatgattaagcttagtgaagatgtaaaattttcatcgctagagagacgtccacacttggcttcaaaacttcaaaggatgggctgactgtctttgaggaccactgcagttggtgactttaagttacagctagtgctcattgaccactctgaaaatctcagggcctttagtaattatgcaaaatctattctttctgtgctctagaaatggaacatcacagtctgagtgacaacacatctgttaacagcatggtttactgaatactttaatcccactattgagacctactgctcaga

SEQ ID NO: 232482 - DNA, 276 bp, Homo sapiens
acacacaaagaaacaggttttcactgatgttgcacctctccctatagttgtaacccttcccctttcagctaaaatttctgggtattaaaaggctggtaccctttgccacctttattttttattgtttagcttcttggggagctaggcattaaagacaaaaatacttaaaaaaaaaagaaacaattgcatatatgaagaaattagaaagtgtatggacatgcccagggaaaggctcaaaaaaaaattacaaaagcaataacaataagaaaaacagaa

SEQ ID NO: 232483 - DNA, 421 bp, Homo sapiens
gattactattgggtgagtttcataagagaattaaaagaaaatcttagagctaaagtagctggaaggatgaatgggtagaaatactaattactgctagaaatactcgtgactgaataaaaatatatgctgccaggcacggtggcttatgcctgtaatcccagcactttgggaaggcgagacaggcagatcacgaggtcaggagatcgagaccatcctggctaacatagtgaaaccccgtctctactaaaaatacaaaaaaaaaataaatagccgggcgtggtggcaggcacctgtagtcctagctacttgggaggctgaggcaggagaatggcgtgaacccaagaggtggagcttgtagtgagccgagatcgcaccactgcactccagcttgggcaacagagcaagactccatctcaaaaaa

SEQ ID NO: 232484 - DNA, 246 bp, Homo sapiens
tgttgttaacaatatttagccacatcctaacctctctggctgctttttaggtaagaggaggcagactgatcatcggttaataatcagttttgaaaattaataaatgcaggaggagagaagttctgggtagggaaggaataccacttaacaaacttgtttggctacttgagagtagccatgactaaaggaattcatggattcgttagaggttttgaacattataagacagaacagtacatgacacca

SEQ ID NO: 232485 - DNA, 409 bp, Homo sapiens
agggcctagctagtgctgtaggacaagggaaagaagtgttaaaaataatagaataaaacaaatatttatttgttttgatatgattatagattactttttattgtctgtgtagtcaagcaactaatagaattatttaaaagaatttgacaaaggaaactagatacagcattttaaaaaggcgtttttaatgcaacagccaatgagcagacataagaaaagtggtctatgggatgcacaaaggcctatagaaataagggagggaagccgggcgtggtggcacatgcctgtagtcccagctactcgggaggtcgaagcaggagaattgcttgaacccgagaggcagaggttgtggtgagcggagatcacgccactgcacttcaccctgggcaacagagcgagattccgtctc

SEQ ID NO: 232486 - DNA, 842 bp, Homo sapiens
acttaaaaccaaactcaaatgtcactaaatgagggaatggacggaggttaagtattttgaggagaggtgttaggaaatgcaaaggaatgtttcctaaatgtttttacttgtttccatttccaatatggctaagtaagttctactggatccgaaattctcacagatatcaactataaagtaccaaaagaccaaaaacaaaaaaaaaaaaaagaaaagaaaaaagaaattacctggaagcattagagaataaaattaagcagacagattctggaggggagctgaaattcaaaacttggaagcacaggtcggtccagagtgagtttcccattttacaacttttagagtgagaacaggctaaaattaatgtcacttcgggtggccatcctccaatagaaaactcacagtgtttttggtttgaagacccaaagaacagggttcagggcaatcatagccacaggaaaatgaattcagaatcttggaaagaagagaggcagagaggggaagctcccaaatctgtatataaacactacccaaatttctggttgacccttgaatttattaatatgagacaaactaaactttcagacaaaaagagttaccagagatgaaggagaacatttcatgatagtaaatcattatattaagaagaagtaagaattgtagatgaatatgcacttgataaaattccaagtgagatcacgtcatgtaattctgaggtatatgtcatgtgtatattcttgatggagcagacacaaattatcacaaagataaaagaactgaactgagattcgagctgctacccaggggatagttttaaatttgagtataactaattgcctgct

SEQ ID NO: 232487 - DNA, 374 bp, Homo sapiens
gatgaggcaaacagtatgagagacaagatgtaccagagagtggtcctcaacaaaccagggtttcaaagactccagcctgagcaacatagaaacacagagaccccctaactctacaaaatataaaaatgattagccaagcgtagtggcatgcgcctgtggtcccggctactcggcaggctggaggatggcataagcccgggaggtcgaggctgtagtaaaccgtgatggcaccactgcactctagcctgggcaacggagtgagaccctgtcttaataaaaaacccaaaacaccaaacaactaaaacaaagactttacctctacttctgtcccccacagcccactcagcttatctttgaagaaaacaagaagtcag

SEQ ID NO: 232488 - DNA, 452 bp, Homo sapiens
ccaaatataagattatatcatcttcaaacaagggtaattttactttttcctttccaaatagatcccctttgtttctttctcttgtctcaatgctctagctaggacttcttgtttttttcatcatgtttaatttaatagtgtaaatcatagaacccaaagaaagtaccactagtgatgcataaagtgcttccaagaagcagagaaataacataacaatataagaaaaagctgatttgcttgatatgtaccacggtttgaggtctgtagctttgtctgcatttttagaaagatgattcatctcagaaacacatgaagtaaacttatggtattgataaattcagtacagtactgtaaatatactttatcttccttataattttcttaacatttccttttctctagcttacttttgtacaaatatggtatataatacataaaacatacaaaatatg

SEQ ID NO: 232489 - DNA, 1417 bp, Homo sapiens
tcaataatggccaacttgctatttaactgtgataaagggaaatgtttctgaagacattttaaagttttttatacatacgtaagatttttatatacatacgtaaggattagatactatgattactttttttgtattttgaaattgaaggcacttaagctcttgtgatattttgaattgactgatccatttaaaaaattgtttagctataggtgtttgtaacaatttcttataaaatgattttttttcttgattcatgatattaaactccagattgaaatgaggggctatgagctttgaccctgaggaaagaaggccaaaacatagatctgaggaaagatttgaacatggcaagacaatctcagggttaagatgttgctaagttgattctgagaatcaaaatcaggctttttttcctgtgatgggatcataaaaataatctttttatcaggacaaaggttatgggcgaaggatagacagaattttggcactgctgctttcctgagccaaattaagtagtttttctaaatcatgaaaaaagagcatgactatccatctggaacttcctagattgattttcaaatgatagttcctctttgaagtatttacaggtctgtttttgccagacatcttttcatactgggaacttttttttttgtaatatccactaaagttaatctgcctttatatagacttggatttttaaaaaaccaaaggatatattttccattcagatttatggtaactattttatgagtaaatagaagtttgaatatttttcttatggtttaatctgtttttttaaattatatttattggtgatataaatgtatcagatgtatcagtgcctgtgctcaccaagttcgtctcctaagaagcagtttgtgtgctacaacgtatgcgtatgagtaaataacacatgaacaatctgctggggctgccaggtacatcccagccaggacagccgctgggccagggggaagaggtactgctgagggaaggaagcagctcttcatgggcagctagccaggtgtaaccatcacagtaaaaacagccaaagagagaagaacaacagcagtccttgaggatattgttttccatgtttatttttagaggaaatcataggtttgtcagtttctgctttgtgactactgtgagaagctaaacaattagaagcattacttgtgatatttttagtgtatttatgttgttttcatttgatttgggggtgtattatagtactgatcacaattctaatccccatcaagcaatgtacagataactcttccaagaaatgtttccctcctttctttcctcccttcccttctctttctccctcacctcctgtctcctctcctcctccctttttaaaggcctttgaacagtttaaacgaccactcaataaaatggctctgccctt

SEQ ID NO: 232490 - DNA, 1514 bp, Homo sapiens
tcaataatggccaacttgctatttaactgtgataaagggaaatgtttctgaagacattttaaagttttttatacatacgtaagatttttatatacatacgtaaggattagatactatgattactttttttgtattttgaaattgaaggcacttaagctcttgtgatattttgaattgactgatccatttaaaaaattgtttagctataggtgtttgtaacaatttcttataaaatgattttttttcttgattcatgatattaaactccagattgaaatgaggggctatgagctttgaccctgaggaaagaaggccaaaacatagatctgaggaaagatttgaacatggcaagacaatctcagggttaagatgttgctaagttgattctgagaatcaaaatcaggctttttttcctgtgatgggatcataaaaataatctttttatcaggacaaaggttatgggcgaaggatagacagaattttggcactgctgctttcctgagccaaattaagtagtttttctaaatcatgaaaaaagagcatgactatccatctggaacttcctagattgattttcaaatgatagttcctctttgaagtatttacaggtctgtttttgccagacatcttttcatactgggaacttttttttttgtaatatccactaaagttaatctgcctttatatagacttggatttttaaaaaaccaaaggatatattttccattcagatttatggtaactattttatgagtaaatagaagtttgaatatttttcttatggtttaatctgtttttttaaattatatttattggtgatataaatgtatcagatgtatcagtgcctgtgctcaccaagttcgtctcctaagaagcagtttgtgtgctacaacgtatgcgtatgagtaaataacacatgaacaatctgctggggctgccaggtacatcccagccaggacagccgctgggccagggggaagaggtactgctgagggaaggaagcagctcttcatgggcagctagccaggtgtaaccatcacagtaaaaacagccaaagagagaagaacaacagcagtccttgaggatattgttttccatgtttatttttagaggaaatcataggtttgtcagtttctgctttgtgactactgtgagaagctaaacaattagaagcattacttgtgatatttttagtgtatttatgttgttttcatttgatttgggggtgtattatagtactgatcacaattctaatccccatcaagcaatgtacagataactcttccaagaaatgtttccctcctttctttcctcccttcccttctctttctccctcacctcctgtctcctctcctcctccctttttaaaggcctttgaacagtttaaacgaccactcaataaaatggctctgcccttcacaggtggttggaagttggctttgtgcctcacacaccataggtgtataattatggagcctaacagatccctttgttattttactgcttatgcttgg

SEQ ID NO: 232491 - DNA, 495 bp, Homo sapiens
tagagcaagagaggatatctaaaatcaaagatatatgacactgctggggctcagaaactgatatcccaaaatattgcactttgacatgctgaactgaagaagctacaaggtctctctgaccttctccccacccctcctgtctctcaatcctttccgtctcccaaagcacaggatgaagttgttttcagaagttccttatctgcctaaagtccaaacctgccaaagaatacaattatctttagtctctactctgagttttcattaaatgaactaatatcacagggagaaacacaagcctgtcaacaaacctagatagattttgtcacaaaccactgtctactctgcagccctaacagacattgtcccaggcccttgcatgttcttcaagcccattgaattcccctacaaatcatttattatatccctaaaaacacttctcaagctcccatttccctaggaagtagaataaacatctatgtccaattgcagtattgg

SEQ ID NO: 232492 - DNA, 344 bp, Homo sapiens
ttttgtagacacggggtcttgctactgtaacccagggctggtgttttgctgctttaaaaaaaaaagttttctggtcgggcatggtggctcatgcctgtaatcccagcactttgtggggctgaggcaggtggaccacgaggtcaagagataaataccatcctggccaacatggtggaaccccgtctctactaaaaatacaaaaattagctgggtgtggtggcacacacctgtagtcccagctacttgggaggctgaggcaggaaaatctcttgaacctgggacgtggaggttgcagtgagctgagattgtgccactccagcctggacacagcaagactccatctc

SEQ ID NO: 232493 - DNA, 1587 bp, Homo sapiens
ctgggccctgttctaagaactttgatgtatccttatttagtgcttaaaataaacctaagagggttaagtactattatgatttccattttacacgaaaggaaactgagctgcaaggtcacatagctagtaagggattgttctgggctgaagaaaaaggatgcatggaggggagtatcttgcccaaggtcacgttattagtaattagtggagtcagaattccaatgcaggttccttcactccagctcttcttacctcagaaaacacacttgcctggaccctcccctggagttggatttagttggcttgggcatggcgatttttaaaacttccccaggcgattttaatgcacagccagactgagaaccactgctttaccccatttttggagtaaaatgaattaccctccttaggaaatctggtcgctctatgtggccattcctttagttcctgcccctcctccacagaaacacaccattccaaatctggcagctaatttttcatggtctttgtttcttcaaaattattttcaggaagtcttggtgaatatatgttggggtataaacagaccacaaagaaagaccccataggggtattctgttgatggattttctgcacgatcttttctttttcattcttccattatacttcctggaggagggactacccctttgttcgtcatttagttccagctgggtaccaggttgggtatttggggaggtttacagattaataaaactagaccactaccctccaggagttttcaattttagaagggaagtatataaatgtaattctaggtttaatttttagagtgaggtggtgtggagtgtgagctctgcagtcactgccttggtttgagttcctgccccaccgcttcctacccacagaactctggccagtgcttgagccctcctggtctccaggactttgttggcacagtggacatgccaaattttttgatgagagacatgacgagttagtgctggtggagtgcacaccaccgggcccagtgtgagggtcagtcctggtgagctgctgtgctctgtgcgttgcctgaagctttccagcaggccttagctgatgctcatggatccaaaacatcaatagtaagttactaagccttatctgctgctccttaaattgacagagtcaagaattaggtaaccagggaggagccacagaggtgtgtgaatgggaaactagacccagtcctggaagatgagcaggaaatggagtgggagacattgataccccaagaccctagttaggcaaaaagaaaaaaaaaaaaagacatctaggctgggcacggtggctcatgcctgcaatcccagcactttaagaggctgaggctggcggatcacttgaggccaggagtttgagaccagcctggccaacatggtgaaaccctgtctctactaaaaatacaaaaattagctgtgtgtggtgatatgtgcctctaatttcagctactcaggaggctgaggcatgagaatcgcttcaacctgggagttgaaggttgcagtgagctgagatcatgccactgcactccagcctgggtgatggagtgagactctgtctcaaaaaaga

SEQ ID NO: 232494 - DNA, 1588 bp, Homo sapiens
ctgggccctgttctaagaactttgatgtatccttatttagtgcttaaaataaacctaagagggttaagtactattatgatttccattttacacgaaaggaaactgagctgcaaggtcacatagctagtaagggattgttctgggctgaagaaaaaggatgcatggaggggagtatcttgcccaaggtcacgttattagtaattagtggagtcagaattccaatgcaggttccttcactccagctcttcttacctcagaaaacacacttgcctggaccctcccctggagttggatttagttggcttgggcatggcgatttttaaaacttccccaggcgattttaatgcacagccagactgagaaccactgctttaccccatttttggagtaaaatgaattaccctccttaggaaatctggtcgctctatgtggccattcctttagttcctgcccctcctccacagaaacacaccattccaaatctggcagctaatttttcatggtctttgtttcttaaagaaagaccccataggggtattctgttgatggattttctgcacgatcttttctttttcattcttccattatacttcctggaggagggactacccctttgttcgtcatttagttccagctgggtaccaggttgggtatttggggaggtttacagattaataaaactagaccactaccctccaggagttttcaattttagaagggaagtatataaatgtaattctaggtttaatttttctaaaagtcacttcagaggaatacaaagtattagggaattcagaggcagcagaggcagagtgaggtggtgtggagtgtgagctctgcagtcactgccttggtttgagttcctgccccaccgcttcctacccacagaactctggccagtgcttgagccctcctggtctccaggactttgttggcacagtggacatgccaaattttttgatgagagacatgacgagttagtgctggtggagtgcacaccaccgggcccagtgtgagggtcagtcctggtgagctgctgtgctctgtgcgttgcctgaagctttccagcaggccttagctgatgctcatggatccaaaacatcaatagtaagttactaagccttatctgctgctccttaaattgacagagtcaagaattaggtaaccagggaggagccacagaggtgtgtgaatgggaaactagacccagtcctggaagatgagcaggaaatggagtgggagacattgataccccaagaccctagttaggcaaaaagaaaaaaaaaaaaagacatctaggctgggcacggtggctcatgcctgcaatcccagcactttaagaggctgaggctggcggatcacttgaggccaggagtttgagaccagcctggccaacatggtgaaaccctgtctctactaaaaatacaaaaattagctgtgtgtggtgatatgtgcctctaatttcagctactcaggaggctgaggcatgagaatcgcttcaacctgggagttgaaggttgcagtgagctgagatcatgccactgcactccagcctgggtgatggagtgagactctgtctcaaaaaaga

SEQ ID NO: 232495 - DNA, 1643 bp, Homo sapiens
ctgggccctgttctaagaactttgatgtatccttatttagtgcttaaaataaacctaagagggttaagtactattatgatttccattttacacgaaaggaaactgagctgcaaggtcacatagctagtaagggattgttctgggctgaagaaaaaggatgcatggaggggagtatcttgcccaaggtcacgttattagtaattagtggagtcagaattccaatgcaggttccttcactccagctcttcttacctcagaaaacacacttgcctggaccctcccctggagttggatttagttggcttgggcatggcgatttttaaaacttccccaggcgattttaatgcacagccagactgagaaccactgctttaccccatttttggagtaaaatgaattaccctccttaggaaatctggtcgctctatgtggccattcctttagttcctgcccctcctccacagaaacacaccattccaaatctggcagctaatttttcatggtctttgtttcttcaaaattattttcaggaagtcttggtgaatatatgttggggtataaacagaccacaaagaaagaccccataggggtattctgttgatggattttctgcacgatcttttctttttcattcttccattatacttcctggaggagggactacccctttgttcgtcatttagttccagctgggtaccaggttgggtatttggggaggtttacagattaataaaactagaccactaccctccaggagttttcaattttagaagggaagtatataaatgtaattctaggtttaatttttctaaaagtcacttcagaggaatacaaagtattagggaattcagaggcagcagaggcagagtgaggtggtgtggagtgtgagctctgcagtcactgccttggtttgagttcctgccccaccgcttcctacccacagaactctggccagtgcttgagccctcctggtctccaggactttgttggcacagtggacatgccaaattttttgatgagagacatgacgagttagtgctggtggagtgcacaccaccgggcccagtgtgagggtcagtcctggtgagctgctgtgctctgtgcgttgcctgaagctttccagcaggccttagctgatgctcatggatccaaaacatcaatagtaagttactaagccttatctgctgctccttaaattgacagagtcaagaattaggtaaccagggaggagccacagaggtgtgtgaatgggaaactagacccagtcctggaagatgagcaggaaatggagtgggagacattgataccccaagaccctagttaggcaaaaagaaaaaaaaaaaaagacatctaggctgggcacggtggctcatgcctgcaatcccagcactttaagaggctgaggctggcggatcacttgaggccaggagtttgagaccagcctggccaacatggtgaaaccctgtctctactaaaaatacaaaaattagctgtgtgtggtgatatgtgcctctaatttcagctactcaggaggctgaggcatgagaatcgcttcaacctgggagttgaaggttgcagtgagctgagatcatgccactgcactccagcctgggtgatggagtgagactctgtctcaaaaaaga

SEQ ID NO: 232496 - DNA, 528 bp, Homo sapiens
caaaatgtccctcaactggtgaggggtgctatggtctgaatgtttctgtccttccaaaatttgtaagttgaaacctaatccccaatgcatgggtatttggaagtggggactttagggtgggattaaattatgaagtcagaccgctcatgaacggggtcagtgcctgatatggttagaatatgtaactcttccaaatctcatgttgaaatatagtctccagtgctggaagtggggcctggtgtgaggtgtttggtcatggaggtggatccctcattaatggcttggcacatccccttggtgataagtgagctctcactctgagttcatgtgagatctggttgtttaaaagtatgtggcattcccccacacacaattttgccatgtgatgtgccttctcctgctttatcttccaccatgagtaaaagcttcctgaggtctccccagaagtcgaggagatgccagcaccatgcttcctgtacagtctgcagaattatgagccaataaaacctcttttctttataaatcaaa

SEQ ID NO: 232497 - DNA, 427 bp, Homo sapiens
agttttttggtctctctatttagccaaagaattatatttaaatatagagctgacctgctgattatcagtaattttctttcataagatatcaaatgaatactgagaatatcattctgtaccttctttaacgtctaattgtggttctcatctggaggatggcagtttgagaattaggactaagcccgtctcccctttgagtccatttaaaacaatgaaaatctggtcaaatatatccaaggaagatagagttgggcccactctgtcttcaatttaaaagcaggttggaagatgaaatataaatattaatatgaatagggtgatattatttaacatatctgtcttttgtttcatatgtccaaattaaaattttctatattgattgctttcaaagttaagcaattcacttgaattccctaagcattagaga

SEQ ID NO: 232498 - DNA, 605 bp, Homo sapiens
gaaccatgttaagccatgccagtgaggagagcaacagagcctgtctgtccccatgagggagtctgtctctgcttttctgcagtcaggtcactgcctactgcctgggggctctagtcattccagtggaagacgaatgtaacctgcgtggtgatgtgacaactgtttcctccctgaccccagaggatctggctctaggttgggatcaatcctgaatttcgttatgtgttaatttacttttattaaaaaagtatagtatatataatccaaaccaataacccttttggggtttcttgtggcggttgaaatagtcccacatgtggtcatcagaaaataagccattcctcataccaatataggatcagctccttgacctttgaggggcaggagtgcttcctggtgtgtgtattaaaatcccttcctgccttgtttcatggcagtgaaatgccttttggtcctgtccaagtgtatctttcactgatttttgaatcatgttctagttgcttgaccctgccacatgggtccagtgttcatttgagcataactgtactaaatcctttttccatatcagtataataaaggagtgatgtgcaatagcaaaaaaaaaa

SEQ ID NO: 232499 - DNA, 534 bp, Homo sapiens
ctcagttggttgcatgatcttgtacaaatctccttttcagactcagcgcctttacaggtttataccccattccgctgaggggtgggtggcattgcttaacaggttggaaaacaaggccatgggataatttaagtcatctaaatggaagattgaggcagaaaatagttttctagtttcttaatccagttgctcatcagttcagttacgctgaatcttgatttttacttctggattttgtttagatatgagttattaaattacattttgacaaaatgttgaaagtttgttgcagctgttcagaaaactcaaattctgaaattaaaaacaactaagtaaagatttttgctaaggaaaaactaagagcacttgtaatttgggatgtatatggactatatataataatatgtagttaagattgaagaccatatgtttaaaaattagatttgctgttagtatatttttacattgtaaattattaatttgcttcattatgttttgctggaaagctaaaagattagtaatgtctgacttcac

SEQ ID NO: 232500 - DNA, 1056 bp, Homo sapiens
gtgtgtatgtgtgtgcacatgagagagagtgagggagtacccaagtgagagaatgtgtaaaacaaacaaatcagttgctcaaataacctgcttgaaaaggcttgttctaattctaagcagtattcctaaaacatgtagtttcctgatacttgaataatatatgatagcaattcacaattataaagctctttcacacgcattacctttcacttagtgtttaaatttgtagaaatttctggattttaaaggccacattttctaaaggaagctattgtgttccctgggcaatgtagacacagaactgggtgattgcacaattggacacagaaaatttttttctttaaattataggccagagaaacatgtctaaattgatgttttgaaactttctctatggctttcataagcttttcctttatggctaccaattatataaagtaagtagattctaacactttcaatatgatgatctctttcagtgtcaaagagaaatgaatccttgtatagcaattgttcttttactgtcctttgattgagaaaagtatacacaaaaactattaaattttgtgactttaaaattgcattttttggtgtgtgaagctcagtctgtactttattgtgggaaaagcatgtaaaatgatggacacatgatttttattttactataacattgaaaataacgattaaatattatttaattctgtgtcagagaaataattttgttgagaacattctcctttattaagagaaaaaaaaaaaaaaagcattccaggcatggtagctcattaatcccagcactttaagaggccgaggtgggcagattgcttgggctcaagagttcgagaccagcctgggcaacatggtgaaaccccatctctacgaaaaatataaaaatcagtctggtggcatgtgtctgtgtctgtgatctcaactacttgagaggctgaggtgggacaaattgcttgagcccagggaggcagaggtttcagtgaggcaagatcgtgccactacactgcagcctgggtgacagccagaccctgtcttaaaaaaaaaaaa

SEQ ID NO: 232501 - DNA, 407 bp, Homo sapiens
ctttgggagtcattgtatgtgctaaccttaatggtgttactctaataattatgtacgagcttgttaatgaactgggaaacattgattttagaagcttagaaactgtggaggaaggtgcttcatatggatctttctactttttgtatcttttgtgtttccatgaaaaaatcttttaatttgtgaaaagtaagcctcagaattcatgtctaagcatttcgtagaaggatgcacgtgagaaaaagcacctgcgctgtcatagcgatcctttggtgttttaagatgaaaaagttcaaagcattttagaatagtcataaagatgacattgtataagttaggagctgggttgtcctgtcactttgtggtgacaaaactggtgaaagtggtattaaaatcattgctggatatgt

SEQ ID NO: 232502 - DNA, 457 bp, Homo sapiens
gtcttcctaggcatcatctattctttatcctgcccttatttatcctgcctccacagtacatttcagccatgcagaccccacaaaattcactacttgtggctgcttgtttgtcacccacacacccatcagtgcttagagtctcttctctggaagtagggctgttttcacatgtccatttacagtctactgctttctagatttctctcctttaactctctacactgctacaattaaagtgaactacatattgctcttccctttttataaaaattctatttcccctccctttgttaattttgctcagaatgctttgttcttccagaaagtcttttcctattccatttctgtagccccccttttatctagaaaaaagtctctctgaacgtctgtagcacttaacataaacttccttgagatacacttcattttttactaacatgtggacctatctacatct

SEQ ID NO: 232503 - DNA, 487 bp, Homo sapiens
gacactctgaaatcagaaaatatcagagaaatagggcatttcagtaaataatatataaaattgatcaaatttcttggaatgggtgataaattttattttttccatgacacagccctcaggagatcctgaaaacacgtgcccctgtgatgagatttttaatcaaaatcataattcaagatcatgtaaaagctaaacccactgtactgacttgggtcaccctcaagtagaacttatatattctctcccgttttaacattctaaaacaaattaatgttaatcaatccaccttaatttgtcaagttcaagtccgtcttgccaaaactaattcaggtacatggtaaaatttaccagatttttaaagataaaataatgaattgcttttcctatttttgcctgttttatctataaatctcttacattataatttaatagctcatcctgccgcaaatagaaagcctataaaacctatccacaatagctatgtcca

SEQ ID NO: 232504 - DNA, 573 bp, Homo sapiens
cttagaacattttaattttttttaccaatgattttaaagacagtttatttattaaatattttacttgtcacgtgaacttgaaaagcattgattagtattttttgatcaagtatttaagtgcttttatttttacttaagctaattagagctcttttacatatttttagtagtgacacattgtgtacacaacacataaatgcatagcgtattaggcatggcaatagaagtacatcttatgtatttgtaagacctctttttcccttagacttttaaattcatgatagcctgtttcatcaccctgggcagttgtcagctaaatagtcctacatttgcatattaaaggaaacaactcttaggtgaaaaatcagatagcaaaatttacatctcaaagtaccaagagacagtctggtttgctagagggaaattaaaatggatttaatttgccatttaaacaaaattatagaagtctattataaaatccttttaaatacacacacacacacacacacagatcctatagcttttacttcagaactttagccatgagataaatacaaattccccagcttgcaa

SEQ ID NO: 232505 - DNA, 161 bp, Homo sapiens
aataacaaaaaagaacatcacctttataaatatacctagtagaaactaatttgataccaaattgatttaattaccgtcatccattttaagaatgtacaaactcacctagaatagtaagaaattgtacacaattctttgatacccattattagactagatac

SEQ ID NO: 232506 - DNA, 464 bp, Homo sapiens
ctcaaaacagcatgtattcaaaatgtaaataaggcggtttatagatgaatgggaagatttgtgtattttcactaaactcattaaaggtactgaatctgttacagtatttattttgtattttttcactttgtactcagaacagtgtaaataaaattactgtgttaactgaatcctgaatgaaaattagttgtccttaatagtaattggaatagtagttgtaattgtagttatctgttgagattgtggagctaataaaataagctagaaattcagtggaaaagttaagttaacatttgttgagcaaaataatttattgcattttaaaaacatctttcaaaccttgggggcagtgtagattgtccaaatgatagcccaaaattcaaagataatttctgaaatttgtattttcttttatttgacttaggatgttgacttttcttggctaaataaaattattttactta

SEQ ID NO: 232507 - DNA, 521 bp, Homo sapiens
attttgaattctctttttacttctttatattattaaaaattctaaaatgagcatttttacttttgaaacttaaaataattacaggtgtatttatttaaaaaacacatattggatctttactatgtgtcaggcattttcccaggttctgggaataaaacagtgaacaagagagacaacatcagacatcgagagtagaatgatggttacctgaggctgggaagggtagtgggcaagtggggaggaaatggggatcgttaatgggtacaaaaagtacagtaaataagatctagtattcaacagcacaacagagtgactatagacaataatgatttaattgtacattttaaaataaatgtataattggattgggtaacacaaaggacaaatgcttgaggtgatgaatattccatttaccctgatgtgattattatgcatcatatgcctgtatcaaaatatctctcatgtaacccagaaatatatacacctaccacctactatgtaataaaaaaataaaaaattaa

SEQ ID NO: 232508 - DNA, 613 bp, Homo sapiens
agaagaataggccgccactgaacggctcagccccctgaccaggagctgtccggatgttttttgtggcggcttgcaattcgctgtgacctttccaggaagtgttgcacacgggcgtgtggcaaacgagctggccgtttctcgcggtcctgctaaaacgctgtcaacctggcgctccaccagaggccccttggcttctcgggaggcgaccgaggagctctgggggcggggaggcttttacaagaagcgaaaagacggcctcaggggtggccgggaacagcctggaatcagctggaggacgtcagcaggactgaggaaagggctaccaccagcgtgaggaaaggggggaagagggcggaacgcggcgaacggccgcgctgggaggctgaggcggggtcccagcgagccggcggctgggaaacaatggcgcgagcgtgacgtgggccggaggcgtcgcggcggcgcggaggaaggggctgccgtggggcgggggccgcaccgagggagttgggaggcgtgcggcgtccgcgagcgcgctggcggggactcggcctaaggagaggggccttggggccatggtccctgggggccgggggcgggggcaggcggcggccgc

SEQ ID NO: 232509 - DNA, 505 bp, Homo sapiens
agaagaataggccgccactgaacggctcagccccctgaccaggagctgtccggatgttttttgtggcggcttgcaattcgctgtgacctttccaggaagtgttgcacacgggcgtgtggcaaacgagctggccgtttctcgcggtcctgctaaaacgctgtcaacctggcgctccaccagaggccccttggcttctcgggaggcgaccgaggagctctgggggcggggaggcttttacaagaagcgaaaagacggcctcaggggtggccgggaacagcctggaatcagctggaggacgtcagcaggactgaggaaagggctaccaccagcgtgaggaaaggggggaagagggcggaacgcggcgaacggccgcgctgggattgttgccgtgcgctggagccggtgagtgcggcgggccccgtgggcgggcggggaaggagcgggcgaacggggagctaggtggggaggtgcgcggccgaacacgcgaccccagggtagcggccgc

SEQ ID NO: 232510 - DNA, 189 bp, Homo sapiens
gggctacaactttctttctttctttctctttctttctttctttctttctttctttctttctttctttctttctttctttctttctttcttctttccttccttccttctttctctctttctttctttccttctttctttctttttctttctttccttccttccttctttcctttcttttccttcctccct

SEQ ID NO: 232511 - DNA, 376 bp, Homo sapiens
aaggaaaggagagctggggacgggggagcccagaacacaaggctgacagcacaaagagaaagccctctgtccccaacaaacctagaaatcaacatccccaagctcgcatggcccaaacacactaagaaatacgactcagaaaatcaacagggccagtggacccatggatccatctcagggagataaaaataacgagcaaacaggtacgcttaggctatgtttaaatatgtgcaggatccacagagacagcatggataaaatgttaggaaatacatttggcttctgtctaaggagtaaaatgaacaggcatctatttttaaaaattacaaatcctggatgtaaaaaatacaatcatttaagtggaaaaaaaacacta

SEQ ID NO: 232512 - DNA, 418 bp, Homo sapiens
attatttctaaaaattatgttatgtaaaactattttctaaagcctctgggattgctgagtctgaaagtaagcaactaaattagaaagaatttaagaataatattctcataacaaatactgagttaataccgaggtctagaatctcatatactgtgacaaagttagcattatttctcactgccctggggaaattactccctggacatgagtccctgaggcctgaggcaagtccactctgtaaggctaccacatgccagcagatatgggcattattcactattgaaaactttgccatttcagattttatctcaattataacataccacacacttacctttgtgtgtgtgcacatgcacacacacagttcttaaataggtcttctggaattttacacacctattgccaagatgtgacattt

SEQ ID NO: 232513 - DNA, 520 bp, Homo sapiens
agctatctaaagtgaaatcgcttttcctttgtgggctggtattgagaaagagacctcatcattggtaggaaagagatttgagctttgtcattcgcaaagtggatcaattttcatttattaataatatctcattatgtggtacttaagtggaggataaataattcttttttgtatcatgggtattctatgacactttaaagtgcttttgttaagtgctttctcatttagttagagaagagtaaagtagctgctgaagaatcctcattttaagacttgagtataaattattcttcccctgtagcttttctgggcatatgctcagagaaaagcgggtggttaaggaaaaatgcaattatgttttctttccttggctaggaagcaccagtatgaaaattttctcacagcctaatttttaaaaaacaaaaaggctttgtggcaaggtaattgattaagagggaaagtactgaggatgatgacctttctacagtgacagagagtgatgaaattggttcaaagtaaa

SEQ ID NO: 232514 - DNA, 582 bp, Homo sapiens
tgacattttttagtctctccctatctagtgagtgattcctactgacatgctcaaatctccatcctgtatcaagaaagcagaaatgggggacgggagtggggaaggggggaatatctcttccacaaccagactgctcaactcttccttttttttttttttttttttgagacagtcttgctctgttgcccaggctggagtgcagtggcgcgatctccttacaatattctagcccaggtgttggcaaactacagcatactagacaaatccaacctgttgccagtttttgcatggtcacttggctaagaagggtttctacgtttttaatgattgtgggtagaagggagaatcaaaagaataatgatattctgtgaagtgaaaatgacacaaaattcaattttagtgtccataaattaaattttattggaacacagccatgctcatttcttacggttttttctggctgcgtccatgctacaatagcagagttaagtagttgtggcagagactatatacccacaatgcctaaaatatttactgtgtagacctttacacaaagtttgctgactcctgctctatctagcc

SEQ ID NO: 232515 - DNA, 506 bp, Homo sapiens
ccaggcccaaggtgatcaggccacacactctgatgtgaaagttccagaaacaacttaaacatcagccctgacagcagacagctctgatgaggaggagtcactccctgagtggccagggaagctgccgattgctgtctggcaaatagaaaaaggcagtggctgagcttcccgggggcgagcagcgcaagcccaagacagcggcccagggacctcggcaagccggtgagatccagacttgcacggcccacaaaggcctgagtgaacctgagtgaacaggagccaggccatgagacacaggcacagaagaggctggccaagcccagaggaatcttctcctgtgtgttctgctgctgctgtgtgtttaaaccatttttaaggcctttaaatcaaaccggcgactttaatccgatgaaggcttagcctgctgcactgtgcccacgacacgtgtacccagtcgccgccacgtgctccaggacagggaccaggtggagtcaccgtgatcctca

SEQ ID NO: 232516 - DNA, 511 bp, Homo sapiens
agttgtgcctgtgctatttgttaaactctcttttctgttgaatggccttggcacccttgcaaaaattatttaaccctatgtgcaaaggtatttatttctgagctctctgttccattccattggtccccacgttctgtccttacgccagtaccacactgttttgatgattgtagctttgcagtgagttttgaaatcagaaagtatgagccctccaactttgttctttttcaagatcgttgtggctattcagggtcccttgggattccatatgaattctaggatagtttttctatttttgcaaaaaacagtaattctgataggattatactgactgcagatcgcagtgggttgtgtggacatcttaacaatattctcttcaatccatggacatgggatgtgtttccatttattgtgtctttttaaatttctttcactgatgtttcctttttttttttgtcgttgttattttttgtttgtgtactccagcttgggcaacaggagcaaaactgtc

SEQ ID NO: 232517 - DNA, 550 bp, Homo sapiens
cgacgcagtgtaggtcaaaagaatgcatgcacgcttctaaatgaatcttgtctgaatatgtcgtgcaggctgtggtgccgttttccttgtaacaaggatttattagtgaattatcccaagtactccatatatctgtctgtggttgtatgaaatgaaaaaaggggcagagtgcaaagacccacactcacgcacacgcgcttcttctcccacccccacccccttcaaactttattcggaaccttcctttgctgttctggggccgctattgtaaaagcctgggctccctctagtagcttgcgccaccccccctcgctcagttattctgcatgcggggttggctctctctattatcagctttgaaaacttatcctggttttgggaggggtgccgtttttattttcctgaacatttgcttgaaatattttgttagggcctcaaagacgatacctgtctttattttttatatattcttgataactatgatatatttattaataaccagtgtttctggatgagatttcaaataaaaaagaacctttaaatcgtggct

SEQ ID NO: 232518 - DNA, 558 bp, Homo sapiens
tagtgacacctggactcctgggaaggaaaagaaaattcgtttttagcaatgaggttgctaaaagaagcaactagaaaacaagctactccaacttcagatctttgcttggtaaagcctctactttcaggtgagtggggtgagttttctgatgagaatcaagaaggccggcctctctctctgggaagctcccagcttcatggtcctgtggcagaagaaacccaagtctggaagaatccagggcctcatctgagcctttctctccagcattagaaggaaatccacaattggctgacaagcccgcattccaaacacacacccagttaatgaaaaccacacacacacaaacgagagataggttctacctgcctgtgacaatctggagtaggaaaagcacatgaaaaatagccttgggactttattctgaatactctgcacctaaggaggaattgagtttctcaaaaataaaggctttctgtttacaaacatgctgtttttgccaaagagaattctttattttaggtgctttgggaaaactgcagagtcctcgggtttgtggcc

SEQ ID NO: 232519 - DNA, 467 bp, Homo sapiens
aaggcagcacgctcattactgagatcccttgctagtggcaggaagccttcgtatgagttaaggactctgttttgaagtacagaacttgtctaaataccactcacatgcagagttcactatcgcaccacacccatctctttacttaatacaagagatttcaaagtaagatgtcatcggtggttttatggtccctccagaggatgagcagaccataaatctctcttgaaactcagagctgggccaatttaactgtttgctcattattttgtaatgctgagattgaagggagaaaaaaaaaccttcagaaatttttgcaaaggaataagttgagttgttggctgaatcactgtggtgaatttcagtagtaactctacggctcacattttatgttagaaagaaagtgattctcaattccacgttaactgtgtgcagtaataaaaggcagtttgagattgcttctcagacac

SEQ ID NO: 232520 - DNA, 363 bp, Homo sapiens
ctaccaaatgccacctttacccaaggccatgaagatactgccctttgtcaccttctgaggcattgttttccctccctatttacacctgctgtccacctggaaatgatttcccctctgatttttattatgaaagttttcaagtctaccgaaacattaaaaatagcttaatgaacactaatatccttccactaaattcaccaatagttaatgttttgccacattttttcaaaatatagatgtaaataggtagacagatcgtacattgagctgtacaattttgttttattccgaaccatgtgaatgttttaaacattttgacatttccctcctaaatatttcagtgtgcttctcctaaggataaag

SEQ ID NO: 232521 - DNA, 199 bp, Homo sapiens
aatggacattcaaatctgtaaatactacactgctcttaagacctgatttgaaatttcacaggaaggcctaatcctatagtcacaaggtaaggacagttgagtagtgtaagaaccccaacctgcttgcagagaaccttggttttcatagaaaggaaaggctgaaggttttctagcattgttgcccttctttgtctgtcag

SEQ ID NO: 232522 - DNA, 502 bp, Homo sapiens
acataattatccacttcagctgttctgaacacaggtaagaaccaggaagtaagcattaaagagccctggacaggccaggtggatagccatacgctcacacccatgcatttaaaggagagctctttgatctttattcattgtctacttaatccttttagaaaagcaattccaacaaatttttatctagattccaacccaacagaaatttcacagtgcctgggtatttgaggggcttggggtgggggatggcggtgatgctgaatggagctgtccaacaatagcacttgatggctaagagcctcacagggaagaaagagtataaaagcagacacaagaactgaaatgtaacagcagtctggtttcacttattttaaaagcaaacagactcatacaatctcagtaatctctgactttattattgccatacagcataatttagtaaccagtgttcataatgataatgcagagtaatatatatgattaaattctctttattctgctt

SEQ ID NO: 232523 - DNA, 398 bp, Homo sapiens
gggcctcaaaaaaacactgatgggacaaacgcaatgaatgttggacaacctcctccctcccttgcctgagatatttcagctgccctccccgaacacccctccacccgcagcgattatttttaattagttgctaacatttaaactcaggagagctcacataatctggatttctgtctcctcattagaagagttagcagccctgagactagaacccacgactccagtgctcttcagacaacctcagtggagctgggggctgccctgggggctacacctgggctgtccagcttgcacagcccttgccaggcccacttacctcatccgcagaaccctccacatccctatagtcatttgagttttcccccacccttcgggtcatgacggcttccttttttatg

SEQ ID NO: 232524 - DNA, 449 bp, Homo sapiens
ttattcaacaaatatttatcaagtgcctcctgcatgccaggtgtactgttctaggccctggggatgcggcagggaacaaagtccattaaaaactctgccctcatggagctgatatccttggggagaggaaggaagatgataagcaagacacatagaaatgcaagtggccaggcacagtgacacacgcctgtaatcccagcactttgggaggctgaggcaagtggatgacttgaggccaggagttcgagaccagcctgcccgttatggtgaaaccccatctctactaaaaatacaaaaattagccaggcgtggtggtgggcacctgtagtcccagctatctgggaggcttgaggcatgagagttacttaaacccaggtggcagaggttgcagtgagcctagatcatgccactgtactccagcctagacaacagagtgagactctgtatca

SEQ ID NO: 232525 - DNA, 339 bp, Homo sapiens
gcgctgtgcagttggggttaagctcctctccttcagccttggagcggcaggaaaaggccccaaacactctgaggctgaggcttctctgcccaggaacccaggatcatacaaccgccaggcacagtggccacagagcagcctccaccttaagggaacaattccagacacgacctcattgaatacaccatggaagatgttatcttctttaaaagtaccctcatggcagggcgcagtggctcacgcctacaatcccagcactttgggaggccaaggcgggtggatcacgaggtcaggagatcgagaccatcctggctaacacggtgaaaccccgtctctact

SEQ ID NO: 232526 - DNA, 286 bp, Homo sapiens
aattttttaacaatagctaacaaaatgttttaatagaacagttcctcatttcttttttctgttaatatttactagcttctttaatactttaattggctacccacacatcctgtgtacctatagaaaaattaaaccgtaagataacatcataagtacacagacccggaaagaaataacagtaactcattctacttcctgcttcctgaaaacagcctcagtgaaactaattcttttacccagctaagtgagtgtcttttgaatagtcttccattcaggggagttcatc

SEQ ID NO: 232527 - DNA, 417 bp, Homo sapiens
tttctgtgttgtgggggaaggcagacagctactcagcatttatatcccataagaatggataacactaaaacaactgacatcatcaagtattggttagaaagtggaactgattctctcaaacattttcattgtagtttaagatgacacaaccacttaggaaaatgtctccccatttcatacaatgccaaatatatacttattttataacccagaaaatccactcttatgtacttaaactcaagaaaagtgaaaatattattacagaaaaacatgtatatctgatttgttcgtagcaggtttattcatgatagcctcaaatcagaaactgcttttgtgtctatcaatagcaaaggcctcaaacctgtggtatagtcataaaattgagtattacaaaataaaattaatgaataatagcaa

SEQ ID NO: 232528 - DNA, 417 bp, Homo sapiens
tatttaagagagtaggctagtggatatgattaggaattcaagtataattgtgcaaagtagtctggtttctggacaaatgccaagacccactctaatcctaaacagtacttcaaaccactcgtgcccctataaattatttggtattttttacttcttgagaatacttccaactttcgtcccagaacgtatctccatgtggctaactaaagccacatgaaaggcttatagtgaattctaaaaacctttattaacaactttttaaattgtctgtcctgtcaaaacagatcataaaagttcctttgcaactgttctacttttattaatagagctgatgtgaagcagtatagtaatacatgggaaattctacctttgaaattgctacatttgaattactacagttcaagcaatattacctaa

SEQ ID NO: 232529 - DNA, 475 bp, Homo sapiens
aacaaaagttgtgggaattcatcaccattatatcttccttacaggaaatactaaaggaaaatttttaagttgaaatgaaaggatgctaattagtaacatgaaaacatatgaaagtataaaaatcactggtaaaggtaagtatatagtcaaattcagaatactttaatactataatggtggttcataaatcacttttgactatagcataaaagttaaaagacaaaagtagtaaaaaaaattaagctacaataacattatagatatgcaatatgaagaggtataaattgggatgtcaataacataaaatgtgaggatgaaaggaagtaaaatatagatttttttttgtattgcagttaaattgttatcagcttataactataagatgttttatgtaagcctcatggtaaccacatagaaaaaatctctggtagatacacaaaagataaaaaggaaggaattacagcataccacaaca

SEQ ID NO: 232530 - DNA, 440 bp, Homo sapiens
aattaaatataaaatttattttttataaccattgtgtggggttgagattgtggataaagatgaagcaaactctgaaagataaaaacggaatgttggttgtgggattgtgggtatactactttggttgccattggataatttatttaaaacacacagattggccaggcatggtggctcatacctgtaatcccaccactttgggaggccgaggtgggtggatcacttgagttcaggagttggagaccagcctgaccaacatggtgaaaccccatctctactaaaaatataaaaaattagctgggcgtggcggtgggtgcctgaaatctcagctactcaggacgctgaggcaagagaattgcttgaacctgggagatggaggttgcaataggccataatcacaccactgcactccagccagggcaacagagtgagacttctca

SEQ ID NO: 232531 - DNA, 432 bp, Homo sapiens
gtagagatgtggttttgccatgttgcccaggccagccttgaactcctgagctcaggcaatccacctccctcaggctcccaaagtgctagaattacaggtgtgagtcactgtgcccggccaagatgtactttaggatgctagtccgctgtcttcttggtttactggatcttcaaataaactggcttttcctcccaccggctcttcctcttgagttttggctttggttacatttgtggatgaaaggaaaaaatgcaaaaatatgaaatagacgccatcaaaagggccaaaaaagaaaaaaagaagaaaaataaaacaattaaaatgaaagcttagaagttttaacaaaagtttatgcaggttatggaaggacagtccctctcttgccactgtagataaacctgagctttgcacatgaagatgctgttcacgcat

SEQ ID NO: 232532 - DNA, 360 bp, Homo sapiens
ctggtatcccttcctcttttaataagggcactaatcccaccaagggctccatcctcataatctcgctaaacctaattacttccccaaagcctcacctcctaataccatcacatgggggattagggcttctttaactttttaacttttaagttcagaagtacatgtgcaagtttcttatgtaggtaaacttgtgttgtggggtttgttgtacagattatttcattacacactcttaagcccagtacccattcgttattcttcctgatcctctttctctaccctccaataggccccagtgtctcttgttcccctctatgtgtccatgcgttctcatcatttagctcacacttgtaagtgaga

SEQ ID NO: 232533 - DNA, 486 bp, Homo sapiens
gggcccaggctacctggaacctccaaaaacacgtgcctcgcctccaacaaaggcactgaggcacaatccgaaggccagccatacaacttccacactcaaacggcacacaccaaggcccaaaatagcatcagcaccatcatcaacgagatgtaaacagagggaggacacgactcactcctcctcgtacagtgtgacctgcatctcccgggagcacacttttatctgtgcacaccggtggtacccacccaggagatgatgcttctgaaactcctaaggccccaaaaccagccagcccctgtgttttcattcatccttccctcccactgaggggttgcaaacagagctctgtctttagccagcatcttctagaaaccctcatccttcctctccctcccagacacgtgcacactgagatcgagacccagacagcctccgttctaggcactttcccagtcagtttatgtgatggccctattcaaatactca

SEQ ID NO: 232534 - DNA, 412 bp, Homo sapiens
tcctgtcaggtttcttcttcagaacactacagaggcctcgctgtgcacggatcataagggcttttattccataagcaaacccttcttaggacctcccagatgaagacataaaatattgctgtgccccaggatttctagaccatccaaatcaagtattcagagcactccaatatacagctataattctgtagataaacttaatatttcaactatgacatagctgtgtgtatccatgagattccacgcttctcagatataggaagcctgtcttctagtcctcttgtaatctcatcctgaagccctgcactcaggggccatcaaggatctgacagatcagcctttctcagtccctggccccagcagggggaaatgctgtgtaaaaaaagcacagcatcctggaatgtcagaccca

SEQ ID NO: 232535 - DNA, 988 bp, Homo sapiens
ggtttctgactctaaaatcagatgtttttcacatccagagctgctttaaatcctcctcaccactccaccccctaacaactgcttggttcccctctcagctcaatctgctgtcaccttcattacttaaagcattttttcttccatagcagtagctttaaatgttactgcctgcaacttcaggcttttccagcctcaggacaattacataaaggaacaaaaaataggctttgtgctagagcagaatagctaaggcaggagctgttggttccaatgtttatatttcaggctatattctttgtctctttgtttctctccttttaaaaaaatgtgatccactcattttcatacatatcaccgcagggcctgtttgcgcaggtctgagaacgcatcactcctggtacagtaatagtgactgtgcacacatcagcatgtgtgggatgggtagaccctgggtgtacattgtctatgcagaatcattaggactcatctcaaggatgctgaggaagtgccagtcatttcacatacagttcagttgtgagagacaattttttcctttgtaaatactaatcaccatcaaagcataagaatgctgatgagacacagccgatcactctgccatgatctctgagcattaggaggctataccatggcagtagaaagtaaaaatgtctcttcttgggaaaaacagaaacattttcaaagtgtaacctcaggagaatattaattaccttaactcaaactttgacgttggggaaagggttggcttcatgttgtgtaaatttcaatcatcatagaaattctttaccatatttgatatagttggggtaggttttttatttattttcacctctgaagatttagctgggtttaatatgctcacattccccagtgaagtctacatgaggaggctgggaagcatactggttaaggctatgggtcttaagcatacctttcccacttatgcagtgtgactctgggaagctattta

SEQ ID NO: 232536 - DNA, 464 bp, Homo sapiens
tacccaaaggtgtgaataccaggaggccatcttagactctgcctgccacagctgggttgcagccagacctgcctacctctgaaacccaatgcactgcaaatagttgcctggagatcctggtgagcaacccagcttcttacagaagtaagaattagtggataagtttgacacaaattgttaagaatgatccagagtcttttgctcttctagacttactcttcttgcaggaagtgagaacaaatggactgtcagctggaatagaatttcttgtatatcaagaccagcatcctacacagagccctcagtaaaactatttgcatgaacagattttgggctccatcagctcgattgccctacttttataacaaatgtttataatatccttaattctaagatgaaatccataaataaaatgtccctgcccacataatttcaaaatatcaatatgatgtaactgtaatata

SEQ ID NO: 232537 - DNA, 437 bp, Homo sapiens
caaggaatcatctgaatggatggctaaaacagactgcttgggccccactccagagttcctgtttcaggaggtctggggagggcctaagaacctgtattctaacaagttttgagggatgctgatgtctgaactagggagcacagtttgagaactcccgctctagattctgttgccacactgctttttatcaagtacctgactgttaagtcactgatattcagattttgaaagtgtatttgtcacatttagatgaatttgaattgctcctagtaacataaagatattgatgctatgtatgcttcatagcatccaaaagataaaaagcgaaaataatgcaaatctgaaacaaacaaacaaaaaaaccttccaggtctcactcttattcgtaataatgattaagacagtctgtaggtaagtgagggatttaaaaaaaaaaa

SEQ ID NO: 232538 - DNA, 346 bp, Homo sapiens
aggcacatctcagttcagactggtcacctttccactgtcaatggatgcatgtggctggagagtccttctttacttaaagaagtaggtaaaattagctttaagatatttaatcccatacatctaaaatatgatttcgacatgtgtttaataaaaaaaagtacgaatgagataattcactttcttttttttttttttttttttttcagttagttttgaaatctctttgttttttttcatttaaggcatatctcagttcagactgaccacctttccagtgtcaatggctgcatgtggctggagagtcctttattggaaagcatttgaaaaatacagaaaagtagatgga

SEQ ID NO: 232539 - DNA, 247 bp, Homo sapiens
cacagggcagtcttccagctctccacaaccactccctctgcaagcatggctcactgcctaggagtcttagttaccttgtcacaaagagagcctagctactctaattatattgtaagctcctggatttgtacaggtttcccttactgtaagacacaaaacttgcacatcatcggtgctctacaaattttgcttggtttgaggtgataagactcctcctttacatatacagaattgtaaatcagagcaa

SEQ ID NO: 232540 - DNA, 88 bp, Homo sapiens
tgtccctaaaattgttacgctacaaaatgttgctgctttcctattctaggatatctatggaacatgagcactatatatacacccataa

SEQ ID NO: 232541 - DNA, 541 bp, Homo sapiens
gctattggttaatagcttctctgcgcctctgtcctcacctgtaaaatgggcacagtggtagcgcctaccccacagggaggcactgaggacgcctggcctcacacagaggaagggcaataggactaaagcagttttcagggccaggtgggtttaaaagtcctgcattctagtccttggcctccaactccttgggcttctactgtgaggaccaaatgacccagcactaagatccttccctgactcagataagtcagtgcccaatatggccaggcaccgaggtagccactggcagagacaatctctgctctcaaggaaagtctgccatgtggctgcagcagagctccttcccacttacccaaagctttgagctccaataaatcatctcaggaatacctggaaaatggaagagatgaggcgctctccctgtagaggggaagaaatggaagcacagaaaggacttggctcagagcctctttctaggaaaacatcaacttccttttgattttccaggcatcaaagaaaggtctatgcatatgagaga

SEQ ID NO: 232542 - DNA, 456 bp, Homo sapiens
agactgttgcttaataagctcttctcccgaggctgtcgtgttgtcagtgatagtgtcattcttaaatggtttgtttactcagaaggcccagtcattagaagccagaatgggcttcttatttgctttgccattttatctcacttaataaaactatattctatgttctataactgtagtgttctataactgtattctattgactatattgtattatggaataacaaggtccaaatttacccttctaccttaaaaaacaaaagacaaaatatatgaaatgaaggctttcagacttgagacaacaggcagcataggacagtgatctctgagtgaagggaaacaaatgaggtattcctggagagttccagtctgcagaacaagaagaacctggacagcccagcagtctacctgaattgaggagatagagttcaaaatatggggaaccaaggcagagtccca

SEQ ID NO: 232543 - DNA, 248 bp, Homo sapiens
cagagctctttggtttcctcattctttccagctagaacttttttcttccctacagcaggtcctgcagtttccaacattcaccaagtatagtacactaacgtctctttgcaacttctatcatttcttcagcactttgtcttagttatcaaccaccatcccaaaactccttaaatgaagttggaaaaagacattattttaatttcaaaacagagctacctataaataaccaaaagaaccaaataaatatt

SEQ ID NO: 232544 - DNA, 987 bp, Homo sapiens
aaacttttattatccatgcttatgaaatgagatttcaaatggagtcactttgatgcatcatacaaatgtatcaaattattgaaattttgcatcagcaggcacctcagagattaaatatatccttcaggaaatctagccttataacagtatcactagccttataataatcaggtagttgtagtatcctgtccttttagacttagtattggactgacagtcaggcatggcaattcctgagcatgttggtggtagattggtggagatggtgctggaagtcacctccagagcatggtgaatttgataggcaggtgggtagaatagcctcagaacatttgactttcactctatataaatcttgtggcacatagccctttatattgggtttattaataataatgataaaaatagtcattgtgactaatagtaattggcactatgcttaacactttagatatattgtcttatttaattctaacaaccccccctaaagtagtagtaatattcccattttgctgatgaaaaaactgaacccaagtatatagagcttgaaagtggtggaacaaagagcttttcaccctagccagtctaacatgcagttttggtatctagattcccccagttagagatgatgagcataataatcaatttttatctagaagattcagatgaatacttgtacattttacagcaatgataaatatgtgctttaagtaccttttaaatatatgagttgtggtgatgtttacagttgatctaacaccaaagctaataaagtatctaactgtaagtcttacaggagaaatcatgggttaaaagtcatttggaattgagggcactctcagtgcttaagaggatgtttctatagaagaatacaagtatcctgttttatacttgatcttagtaaaaagaccaagaagagatgtaatagcctttgttaatgtttggaaatatattaaaattaaaaagatattataaaagatatatttt

SEQ ID NO: 232545 - DNA, 456 bp, Homo sapiens
tacagggggactctgtgaagagtccagttccctatttttaatcaggttcatttttcacctgcttagaaagtggaacatctcctgaaaggtgacaagtcgtgatcaaaggcaagtctccaggcagagagttggcaggtttccgaagcaaaggttacttagaagtggaggctccactgccagcttccccccgctgcaaaatctgacactcctcaccctcagggttcagcaagattctcggaaaggccttttctgattctaggaggtgctgcagcaggagctgactcggccatttcctggcctctttagttggaagatgacagaaaggcggaagcagggactgctattgtgaggcccatggcagccttcctgtaaaacaaattggcaaattgtcaccttcagatggaccacagctggccctctgaacagccctccttggcctttccagagtaaaaaaga

SEQ ID NO: 232546 - DNA, 878 bp, Homo sapiens
ggagatacgatcttttcacccagtgttttgagcatgtctcaatctcaattgatcaaatctacaagaagctctgcagaaacaacagcgcccaagtgtcaagttacatcaaagagcaaactcaagaccagtttcagatgatagtcatctccctaaaagaagagttctattccagagccgacgcgctgatcggcatctatcctgagtacgatgactgcatgttcagccgagttttgaccctagatctttctcagtatccagacactgaaggccaagaaagcagcaagagacacggagagtcccgctaggggcagtcctgcagcagtcacctgatcactgttcagttcccactctaatactcacacagctcctccacaggagacttctggagcaagcaggaccagcctggtgcaccctttaagagaaaccttagtcgttctagccaaagaggctgtggctcactttagttgagtgttcagacctcattctagtagggaaagttttcagtgagagctggtgttaaatgagtttttaaaaaacaaacaaaaggtacaattttgtactataattctaacttctattttgaaataagctagtttggttggaaaaattttgaattcagcttcatcttcactctgatcttgccttacacccaagtaatcttgaagggaacttctcttggtttttaaacatactagttataagattgttaataaactgttgaacctggcttttgggaaattgtttcagagaaactatgttagtattgaaaatatcaataaaaaatgttctaatttcacaaaaaataaaaaaaatggccttgttggcctcaccggtggacttctgcggccctttcctttagggaggggtaattcatgatc

SEQ ID NO: 232547 - DNA, 826 bp, Homo sapiens
tgaagtggatgcagccctagacaatactaacataggcaaagtgtcaagttacatcaaagagcaaactcaagaccagtttcagatgatagtcatctccctaaaagaagagttctattccagagccgacgcgctgatcggcatctatcctgagtacgatgactgcatgttcagccgagttttgaccctagatctttctcagtatccagacactgaaggccaagaaagcagcaagagacacggagagtcccgctaggggcagtcctgcagcagtcacctgatcactgttcagttcccactctaatactcacacagctcctccacaggagacttctggagcaagcaggaccagcctggtgcaccctttaagagaaaccttagtcgttctagccaaagaggctgtggctcactttagttgagtgttcagacctcattctagtagggaaagttttcagtgagagctggtgttaaatgagtttttaaaaaacaaacaaaaggtacaattttgtactataattctaacttctattttgaaataagctagtttggttggaaaaattttgaattcagcttcatcttcactctgatcttgccttacacccaagtaatcttgaagggaacttctcttggtttttaaacatactagttataagattgttaataaactgttgaacctggcttttgggaaattgtttcagagaaactatgttagtattgaaaatatcaataaaaaatgttctaatttcacaaaaaataaaaaaaatggccttgttggcctcaccggtggacttctgcggccctttcctttagggaggggtaattcatgatc

SEQ ID NO: 232548 - DNA, 851 bp, Homo sapiens
tggccgtctcgacagtcacccagatgtaataaaggcaccacgcgagccaacgtttgagtggcacagtgtcaagttacatcaaagagcaaactcaagaccagtttcagatgatagtcatctccctaaaagaagagttctattccagagccgacgcgctgatcggcatctatcctgagtacgatgactgcatgttcagccgagttttgaccctagatctttctcagtatccagacactgaaggccaagaaagcagcaagagacacggagagtcccgctaggggcagtcctgcagcagtcacctgatcactgttcagttcccactctaatactcacacagctcctccacaggagacttctggagcaagcaggaccagcctggtgcaccctttaagagaaaccttagtcgttctagccaaagaggctgtggctcactttagttgagtgttcagacctcattctagtagggaaagttttcagtgagagctggtgttaaatgagtttttaaaaaacaaacaaaaggtacaattttgtactataattctaacttctattttgaaataagctagtttggttggaaaaattttgaattcagcttcatcttcactctgatcttgccttacacccaagtaatcttgaagggaacttctcttggtttttaaacatactagttataagattgttaataaactgttgaacctggcttttgggaaattgtttcagagaaactatgttagtattgaaaatatcaataaaaaatgttctaatttcacaaaaaataaaaaaaatggccttgttggcctcaccggtggacttctgcggccctttcctttagggaggggtaattcatgatc

SEQ ID NO: 232549 - DNA, 419 bp, Homo sapiens
agtcctcagcccaggacttgaagttaggagatctttttttgccttggctctgccataaatacaccctgtaaccttggatgtgttgcaacatctgcaaggataggaatttgatcactgctaaggttccttcaaacttgatcagttcgctgttctgtcttttgaatgttaattcacattcatctcctatattaagactttggctaagtcttgtgatttcttgccttattggagcttttcttctaatctgaattcttgcttctctctccttttcctttacacacccacacaagtcctaacctctccaggaagtgttttgaaatgatgttacctgggtttgagttcttggcattagcctgtatcatctatttggtattattatactattatagctgtttaaaaaaatcttttattactgtttg

SEQ ID NO: 232550 - DNA, 658 bp, Homo sapiens
taatcccagctacttgggaggctgaggtgggagaatggcttgaacccaggagatggaggttgcagtgacctgagatcgtgccactgcactccagccttgctgactggggttttgctatgtcgcccaggctggtttcgaactcctaggctcaagcagtcctccctcctcggcctcccaaagggctgggattacaggcgtgggccaccgcacctggcctacagtatgcttcatagaaatatgaaaagaatgagagcaaggttgagatagaaagtaacagggcatccctcctgagtaaaacaatcctgccccctcacgctctcgtctaccctcccgtgggtctccctgcttctgtcgtctgccagaaactggctgagccaagtgcacttgcagacgccatctgttctccctgggagtggggccggtgccagcgccagcatctggactcttggcaaggagccctggagccctggagcgagggaactccggccccacaaaggccagggaatcctccagtctggtgagacggagggcttctgggaagggaggcctatacaaggctccatgaaggaggtggaagcttgcaagacgatgatagtcttgtaatcagtccgatggagatggatgtaaataataatattaataaaccccatcaaatgtg

SEQ ID NO: 232551 - DNA, 940 bp, Homo sapiens
taatcccagctacttgggaggctgaggtgggagaatggcttgaacccaggagatggaggttgcagtgacctgagatcgtgccactgcactccagccttgctgactggggttttgctatgtcgcccaggctggtttcgaactcctaggctcaagcagtcctccctcctcggcctcccaaagggctgggattacaggcgtgggccaccgcacctggcctacagtatgcttcatagaaatatgaaaagaatgagagcaaggttgagatagaaagtaacagggcatccctcctgagtaaaacaatcctgccccctcacgctctcgtctaccctcccgtgggtctccctgcttctgtcgtctgccagaaactggctgagccaagtgcacttgcagacgccatctgttctccctgggagtggggccggtgccagcgccagcatctggactcttggcaaggagccctggagccctggagcgagggaactccggccccacaaaggccagggaatcctccagtctggtgagacggagggcttctgggaagggaggcctatacaaggctccatgaaggaggtggaagcttgcaagacgatgatagtcttgtaatcagtccgatggagatggatgtaaataataatattaataaaccccatcaaatgtgttcagagtgctttctttgccaggctttggataaatgttggatatctgttctttttattttttatttttctatttcctaggcagcacctaaaccaaaataggttcagagaggctcccaatgttggacatttgttgttgcagcaactctaagtactctacatatgttatcacataagaggcaaggagcattatccccattttgtaggtgaagaaataggggttcagagaggtgaaggcattgtctagaggccacacactcagtgacttaaagagcctggaaagg

SEQ ID NO: 232552 - DNA, 533 bp, Homo sapiens
ctttcatcaatgttttgtagttttcattgtagagatcttttgcctacttggttaaaacttcctagggtttttgttttgttttttgtagcaattgtgaatgggattgctgttttctttttcagatagttcactattggcatatagaaatgctactgatttttgtatgttgcttttgtatcctgcaactttactgaatttattacttctagcagttttttggtggaatctttagggttttgtgtgtataaattcatgtcatctgcagacaggaagtttgacttctttctttccaatttagatgccctttgtttctttctcttgcataattactgtggctaggacttccagtactatgttgactagaagtagtgaaagtggctatccttgtcttgttccagattttagagaaaaagctttcaacgtgtcctcattcagtatgttagctgtgtgtctgtcatacatggtctttatttacaaactatgcatctgacaaggggttaatgtccagagtatataagaaactcaacaccaaa

SEQ ID NO: 232553 - DNA, 277 bp, Homo sapiens
cgtgatgttaacatgtatgtaagtaaaatgaatgacaacaataatataaaggtcagaaggggagaaatggaagtatcctgttgtaagtttcttatgctatacgcgaactggtataatatcatttgaaggtaggctataataagttaaagatgtgttctgttaatcctaagaaatatgaaaataacacaataacaaagagttacagcaaataacacaacaaaagagataaagttggatcataaaaataatcaatttgaaaaaagtcagggaaaaacag

SEQ ID NO: 232554 - DNA, 1175 bp, Homo sapiens
gagaggcatttcatgataaagggattaattcataaaaaagacaaaacattcctaaatgtgtatgtaccaatcacgaagtctcaaaatacatgaagcagaaactgatataactgaaaggacaaatagaaaatctataatgataggtagagatttcaatacttgtctctcagtaattaatagaacaagcaaacaaaacaaaataaaaccagtaataattggtaagaatggaactctcttccgttgctgataggagtgtaaaatggtacaatcgttttagaaaatggtttggtaacctctaataaagttaaacatatgctttcaacataacccagcaatcccaatcatagatatttaccccccaaaaaatgaaaacatatatccatatgaaaagctaatttctttattcataattgtgccaaatagaaacaacccaaatgtcatcaacaggtgagtagataagtaaattgtggtctatatatacaatggaatactattgagcaatgaaaaggagtgaacaaattagacatgtaacaacatgagcagatcaacctcagaaacatgctgaatgaaagccaggcaaataaagaggaattctgtatgaagctccagaaggcaggaatctaatctgtagtgacaaaaattagacctgtgatttcctaaggccaggggtaggggttggcgattatttgggaaagagcacgaaggagccttttggtaggatggatatgttttatatcatcactgtccaacactgcagaactttctgcaatggtagaaatgtcttccatttgcactgtctaatatgctgaataacagtcacatatggctactgaggatttgaaacatacctagtacaactgaggacgtttttcattttaattttagctcattagacttgaaatagccacatgtgtttagtggctactctactggacagcacggtatctatatcttgattgttgcagtaattgtgtgcatggataaatttgtcaaaacttattataaaatacactaaaaataggtgcattttattgtatataagccttacctgaataaagttgattttaaaaagaggcaaagcatttcccaactaactctaatgctccaatttttcaagtcaatattatcagcagttcacagaaacattggcggttccatagaaagagaacaaaccg

SEQ ID NO: 232555 - DNA, 218 bp, Homo sapiens
ccaagatcccaccactgtactccagcctgggcgacaaagcaagactccgtctcaaaaaaaaaaaacaagaaagaaagaaaaataaataaataaataaataaataaataagctgaataacagatgagtaacaaaatactctgcagaaaggaggacttgacattttcaccagtaactggagatgtaaaatttattaaaattcccatatttcattttataa

SEQ ID NO: 232556 - DNA, 442 bp, Homo sapiens
acatgcaacacagaactcattgtcgtcctctccccaaatgtgccctttccgaagcttggctaatgacaggttgcttgagccagaaacaaaggaatggtcttagacttcccttctgtccgcattcccccagttccatctcacacatgtctcctgagagcttctgccctctgcttctgtccgccgggctggtgctcagccagtgcacgctgcgtggccctcctgactgtagaagagcctctcttgttatggggagaggacttctctgtcttccgaggacttaggccgagcattactgcctgtgtgtacttccctgaccgctctgccctggcagaatttgatgctcaacaactgtggctctgagggcacagccccgattgctctggggtagagctttttcatcgttgctctaagtttcttaaatggggaagctctttaccaagtg

SEQ ID NO: 232557 - DNA, 143 bp, Homo sapiens
gaatgtggcatttaaaagtacctttttacagtgggaaagaattctgtcaagaataaacagtctgaccttgttaaatgggccaaagtctgtctgtaacctagttccagaaaactagcttttactagtttagaaaaagcagatta

SEQ ID NO: 232558 - DNA, 257 bp, Homo sapiens
taagcaagcacatatagaaaataaacaaaatatttctcgaaaggagagggaaaacagacacatagaagaaaatgataataatagctgccatttactgagtgtatactacacattgtgaactttctcggacctcttcagtatattagatatagttaatgggtgcagcacaccagcatggcacatgtatacgtatgtaactaacctgcacattgtgcacatgtaccctaaaacttgaagtataataaaataataatata

SEQ ID NO: 232559 - DNA, 509 bp, Homo sapiens
tccttgtttcggtatttttagatggagtttcattgctgagacacggtggattcaatcatcggccgttggtgattgagctcaacctgtagtgtttcttcccttcagggaggatggggctggggtgaaagttctaaccctctaatcaggggcacatgcttgttcgtctggtgatcagcccccttcctgaagccctccaaggccccctcacagtgcgtcaccacattagcctaaactcatgtatgttagagggggttctctgtgaataaccaaagtcactcctaccattcagaaaattcaaagcgcttaagagcgccatgccaggaaccagggacgaagaccaaatatatttctattgtgtcacaggagggccaggataaaggaaacagagattgtcgactagatttctgactcagagccctggtctaagtttggctggaggcagcaaataaagtttagagaatacctgagccagtgattgggggatgaaaacaaccatttggagcttaaaa

SEQ ID NO: 232560 - DNA, 98 bp, Homo sapiens
gcaattctagacccttgtgtcagaaagagcaaatcctctagccctttgatcttcacaatccttcaattatctttctggtttccttctgttgtcattta

SEQ ID NO: 232561 - DNA, 249 bp, Homo sapiens
gggcttgaactgagctttgaagaaagtgtagacttggggacaggcagaggaagagggggcatcataggcagcagaaaccacatggacaaactctctgccggagaatgggcatggccgggctgaggggtccctggacaggaaccagccttccctatgcacctgcacccgtgagtctcacaacagccccaacaggcaagtgttattttcctcaattctaccaattaaaaactgaccttgggcaactgctta

SEQ ID NO: 232562 - DNA, 383 bp, Homo sapiens
ggaaatgatacaaatattcatcaaaaaaagattggtcgactaaaccagaatacaatcatactatagaatatcggaatagaatgcagctctctaaacgttaggtagaattctatatctctgtatccaagaaatacccatgatgaattgttaaatgacgtgtaggagagagaaccacaggcctctgtggtccgtatgtgcacggtgagcgtgcaggaggctgcatgccaatgctgtcaatggggtggggatgaactgtggcaggatgagtcatttattgctgtttcctttatacatgttctttctttgacttattacaatgagcacgtactactttcgtcatttcataaaatccagtaacagcttctctgcaaagccctccaaat

SEQ ID NO: 232563 - DNA, 223 bp, Homo sapiens
cagttaaactaaataaaatgttgaagtaaagagatacacacagccctcaaaacattgtggcattataactccatcactgagatttgtagggtgctgagcagaatgtaagcactctgacataaggtctcaggcacaagtacacatctcttcagtagaagtgtgaaagcagacaaggactatatgtaaacaaacatggccatgttccaataaaatcatagacact

SEQ ID NO: 232564 - DNA, 319 bp, Homo sapiens
gtgaaaatagccacttattagttcctgcctcaactgatgacattccaccattgtgacttgttcctgccccaccctaactgatcaattgactttgtgacattccttctcctggacaatgaatctcaggagctccccaccagcaccttgtgacccccgcccctgcccgcaagagaacaccccctttcactgtaattttccacgacctgcccgaatcctataaaactgcctcaccccgatctccctttgctgactccttttacggactcagtctgcctgcatccaggtgattaaaagctttattgctcacacgaagcctgtt

SEQ ID NO: 232565 - DNA, 343 bp, Homo sapiens
ctttatcctccattcctgctgcttctccataacacttattactagctgaccttctatgtaatgtatctatcctttatctctagtcccacagaatgtaaactccagggcagcagagatttttgtttcgtttatgtacatctgtatattcagtagttaaaacagtacttgggacctagttgccactcaataaacatttgttgaataaattaaataataaactacattagttcttcaattaattttttaaaatatggtggttaatagtgagtaacattcaaaaaataagttgaaaatttatacctattgcctcttacccacaataaaaaagggtaaattcaaggaa

SEQ ID NO: 232566 - DNA, 437 bp, Homo sapiens
ctggtccctgagggcatcccagcttccaagcacagtgctttcgataggaatgttattgatgataagagaacccgctactcagaaaactgtcgtttgatatttgtgcctctcaactccagcctccttcagcctctgcatcagtcattctttgttttgttttgcttttctagaggcagaatctctcagtcaccaaggctggagtgcagtgacacaatcatagctcactgcagcctcaaactcctaggcccaggagaatcgcttggacccaggagacggaggttgcagcgagctgagatcgcgccatagaaacaccatggaactccaacctgggcaacaagagtgaaacttcgactcaaaaaaaaaagagaaaaaacacattaggtaacagtttctttttagcatttgtgtaacctttaataaaataaagtgataatcaa

SEQ ID NO: 232567 - DNA, 407 bp, Homo sapiens
ggaaactcctattgtgatcttaagggctgtaacccagagaatctggttcttcctggagtatttcagcagggatcagcttaaataggtctacttgaagttcacaactgccaaaaccgcgtgttcagactgaaaggctgggagcatttcagacgcatttatgaacttccaccaagatgatccggcaggctgaaatcgcagggagagcgtctgttcaacaaaccctttcttcttgattgaattagtgttacccactaacaggatgaggaattcccactccacaagctgactttttttcctctttccacctcccgcctccctccattaaaatgtaaacttgattcctgtgtcctttgccggagcctggcttccctgtaagcccatcataaacatcttggtagaaatgcaac

SEQ ID NO: 232568 - DNA, 397 bp, Homo sapiens
acagtttaagctgtttattccaattgaacgctgtgtgtttccatcagatcctcagtgagattcagtccaatgagtcaattgcaaaataaagtttttgtcaagggaatggcagaaaatgacaaaaccacaattctgaatgatcattcaaaagtaaaaagtactttctactactgtgtggagattttcttatctctacttttactcgaattgaatcttttcttctaatgttcttttgaacagtttgtctttggtgtcctgaaaatgtgcacgctgatagcagtaccacatgctgtccctggcacagagtgagctaacagttgaaccacctctgggtaactgcggactgcagctagtgtaagtgcaagagaaggcaccctggccaccaattcgtttcaca

SEQ ID NO: 232569 - DNA, 712 bp, Homo sapiens
gttatctatacttttggcaatttgttcaaacgttctgctggtatgtgagagggaaggaaaaattgtttattgaccacagatccacaatattatacttctcctatacttaagcaataagggacagcatttaaaactcttttaaaaatgttaatcttggctgggcacagtggctcatgcctggatccccagtaatttggaacactgaggcaggcagattgcttgaggccaggagttcgagactagcttgggcaacatgcgagagcccgtctctacaaaaaaaaaaaaaaaatacaaaaattatccaggcatggtggtgcacacctgtagtcccagctgttggggaaagctaagttgggaggatcccttgaacccaggaggttgaggctgcagtaagctgtgattgagccactgagctccagcctgggtgacagagcgagatcctgtgtcaaaaaataattttgatttcacggaaggagaagaggactagtcttataccatatcccaaatgaaattgaaaatgtcttctgggaatcacagcaatgactcaaacttctgaatagtgactaggtttgagctggtaaggaagggattgtcaaatgccgtgacagtccacaggagggcagcagtgctccgatttacaaaggattagtcatactagtgtaaccttttctgagtgagcctagaaattctgatgaaaacagtgtagtccagg

SEQ ID NO: 232570 - DNA, 612 bp, Homo sapiens
atttatcttccacccacaccccagctgtcttcttgagcaggatttaaaggggctccaggatcgttctcttctgtgtgtcccacatttggtccatagggacactcaacacctattttgctctaataaactcaaagtgcagaccaatcctaccaaccgtgcagcctcttcactcgccaaagaggctcaccaatccctctctcctgatctgtaggtttccagggctggagtcagacaacaatcccctatgctcccaacttacaggttctctgagtggcccacatggagaggaaaaaatagtatgagaaatattacttttcaagactttccatgactaaaacaagaaaatactcctgttttagtcatggttctccagagaaatagaaccaatggattatatatctgtaactatgtctatatctgtatctataaaaggagacttattatgaggaattggctcccacaattatggaagctgagaagtcctaccatatgccatctgcaagatggaaacccaagaaagcggtgtaattcagtctgaatccaaaagcctgaaaactaaggaagctgctaaaaatcccaatccaagagcagaagacgagatgtccccatgct

SEQ ID NO: 232571 - DNA, 238 bp, Homo sapiens
atagaacatgcaagttcaagagacagaagcaaaacaggagttgacaaaaaatagtaacagctagacccggtgtgagagtgtttttatacaacagtgaatgagaaaatgattttcactatttcttgcctcttaacaaatagagctgtgtgtatatggcagaaccataacaatttcagctgttatacatttgcattttgaatatttagacattaaacatttaaatctcattcaaaagatt

SEQ ID NO: 232572 - DNA, 211 bp, Homo sapiens
tgttaaattgaacgtttaatgtgtgtcagctatatgaatttttctctcttaattttcatggtaacttgctgaaataggtaccattcctatttaatagatgataaagttattcagagagtttaaatagctgattgaaacgtaggataacaaagacaataatccagaaacaaaattgttctagcttacacactgtagtatccaagttggcaaa

SEQ ID NO: 232573 - DNA, 743 bp, Homo sapiens
gttcttcgggccatggtttatttgaatctcctccagacttgttagagtaactggacaaggggtcaatgcctacttcttgttcttctggctgcagaggatgtctagtttcagataaggaatgatacattgtgggaactggacagcgtcacctaaagtaactacctgcgcgctccctcccgtgaggggtggaaggcagacagcccattccagcacttgtgcactccagtttccacctcgtttgctcgcaggctccctccttaatagagaatctggatagtagcatttttgaaacaagcaacaacagaaaaaaaaaatcctctccttatgttgcatttattcaatttgtgggctcctgctgcaggtggtccctgagacaatatcatagaagatttaccaggttctcaggtcttttaatacatcaacatataatgggattctcttatgggaaacaaagtattcagtgctttccggatttatgtgaccatgggatctttacactccaagcatctcagattttctttcaggctttgagaatttttctcccattccaaacttttatcttgatactgatatcactgtggcgcagaagggctccccagctcctattccctgaatcctcctcctcctcccctcctctttctctctctctccctcagtctgcagggcgctcgcggaagcggccgggcccggcccgacctgaaagagaacagggcgggagggggtggcggcggtgaccagcggcc

SEQ ID NO: 232574 - DNA, 467 bp, Homo sapiens
cgccagggagctgaagggtccacccctcccgccatccacccccgacgccgactccgaggcgcacaaacggggggcggtgcggcaacccgtccgccgtggcggcggcaccctcaggccctcccgtgagaaggcggcggcggctgcggctgcagcagcggcgcgaaggggggcgaaacctgtcctgaggctgagtgggaggccggggcgggaacgactgcatgtggggctgcactggaggaaggcggaggcgttcagagggcttgggcttttttacgatcatcatcattattttattttacctgtggcgcagaagggctccccagctcctattccctgaatcctcctcctcctcccctcctctttctctctctctccctcagtctgcagggcgctcgcggaagcggccgggcccggcccgacctgaaagagaacagggcgggagggggtggcggcggtgaccagcggcc

SEQ ID NO: 232575 - DNA, 511 bp, Homo sapiens
ttctcattcacttggtagtcagagccacaggcacggaggctcaagccactccacaagcagttaatattgcaaaccatacataatagtatacttaatatagaaatgttataggttaaacattccacaaccaacaaagtgacatttaacatcaagagaaaaaagagataggagaaagagttaaggaaccagttcagaggcagcgaagaagacaaaaggcatcctggtctgggccaggcggtgggtgggtggtctgtgaggtcggtggtctgccatcctgcaaggaagtctttgaggtggcagagcctttggccacagaggctgagttatcatgagtgactgcaaaacagtgtcagttaaaacagccattttgagctcctgaaggcctaattttctttttcttttattattattttttaagacaagagttttgctctgtcacccgagattgctccattgcactccagttttccagcgttgggtgacagagcgagactccgtccccccaccccca

SEQ ID NO: 232576 - DNA, 516 bp, Homo sapiens
tgggaaagccccgccccaggcctgcctcagaacacaggaacatgctgccagtgttttcctttatcatttaaagtttgtttgtgtgctgggcaaggagacgcttgcaagcaggttcttgaactgggtgtaatgaaagctgtagggatcgcatggcgccctagacccactgccaaggccaaggggagagacaaaggcttaatggaagaaagtggctgcagctgctctccaaagctgtcattactttcttgctggaaactttgaaatattatttgtttcctgtttcgaacttctggagatataccatcccagtaccatgattaagggcaatagtgtcacagggaggtgggctggcctctgcgtttttcatgtgggcttttccatctttaatactatattgctttataaatgtctttttgtctgtagatatcttctgatccctgcccccgccactcccaactcctggcttctgatgtgaaatgagagacttaaagttgatcaagttcatgccgatgttta

SEQ ID NO: 232577 - DNA, 385 bp, Homo sapiens
gaattatatgggaggccaggagcagctcccaagaagaccctgcgtgcgccgctaatgtctgatttgggcagatcagcgagcaaatgcgacaacagcccacagggatgtgttacaaattagtgctttttcatcttatttaacaccaaagccagggaatgcgagaggaaagtggccaaggcctgtcttcccggcaacttggagcacaaaagggatcctgccccagccgtccgaggtcggggaggggaatgtgtcagcccccaggaatctcatccagcgcctgcctttcagaaagtgaaggatcatgaattagagcaaataaatcaagcgcacacaggcatgagagggtttcttttatacacaaataccttctggaccctacactttg

SEQ ID NO: 232578 - DNA, 223 bp, Homo sapiens
acccggcaaagttctgcttggccatcatagctttacaggtgtcaaccagccatgtgacctgcatgacctccatgtctacctgtgaagtctgggctacaggcgcaccctccagggacttccagaacccaaacccagtgatgtaagaggcaaaataatttcaagtctcctttcatctatttttataaagtagaaataaaatggccttttggtcaaccaatctgtc

SEQ ID NO: 232579 - DNA, 535 bp, Homo sapiens
atttatccaaagtcattgtgattttatgaaacattgtgattttaagtgctgaaccatgttgtttttcaatgtaaaatgagtgtaacttttagtaattattgaaatttaagcgttactgtgattttccataattctatttcggtagtcacaaaaaaacaaaaatttggcttcttattggcccttctagtgccaacactggcattgttgaaatacatttctaaggaagatggtgagtgtttcacttcattagtagctgcatgacaagccaccccaaagtttaatggcttaaaacaacagtaattcattatttctcataattttgagagttgactgagtgagtcttctgctttgtgtggtcttggctggggtgctaggaaagagggcagtccacagtggcctcacttacatagctggcagtggatgcaggctgctggcgtggagcacagttgggggtggcctgggtgcctcagctctccttaagtgtgcctctctgtgaagttagttgggcttgcttacaacatggtagctggattcc

SEQ ID NO: 232580 - DNA, 471 bp, Homo sapiens
ctactgcttctcaaaaggcaggagaatttctggaatttctatcaagtgtttgtataatttgccgtcactacaacctctgctaacatatgcttcgaagtacagttttcattaaaatgaatgcatttaaaatattctcaatattcgtgtaatttcattcaatccttgttaacaagcatactcccttattcattttgccaatcccttcacctccttgattcctttctagttgtcaatcaaaactgccacactgtagtagaatacagtaagtggacttaggaatttgatagctggaaatgctacacataagtccctgagaagtgactgactagagtgaccagctcaattagtgacagcgccatgaagactactctgggatatgagatttgattcagcactcatcgtagcacttacaacactgcatcataatttcctattaatctgtctcaataaactatccttgagatcacagac

SEQ ID NO: 232581 - DNA, 804 bp, Homo sapiens
ctgtacaaaaccaaatgtttgttactataacttctgcatcacaattaaaatccaaagagttatttaaaaacagtcaactcaatcaaaacccactacttcagaatccatattttctttgaagccacagtaacacttatatatggttaagactcgaatgcagaaatttggttgattggaaagctaattaaacttccaacttgctcaaatagaattacaaaaaggcaaaattgccaacagccctttttagagagtgctgagaagatagtatgggaactcttctccatcctgttctcccagctgtttggatctggctctgtatctgagttaggctgggtcaaacagactctgcctcctaagaatttagagtcagaacattgagagactgggtcactctgacagaagcattgaatttataaggacatgtgaatttcagatccaaggccaccatttaggggcagccattttggggccagtaatacaataagggacaagcagaactagttgatctcaagagaagctggtgaatgcagctaatgaagaaacagagagaattggaggcagtagaccatgtggtctcctagagaaagagagtcagtagctaccttgggtctgaccactttcaggacccttgtctaatctaacgtctggctgccactttttgttcttgatttccctgcacttcctctgagtcataataaatccatctcaacctaaggggattcatttttctccttagacaacagtgttatgtgcctaattatgttctccccttcttaatgttttttgtcctaataaaaccatgta

SEQ ID NO: 232582 - DNA, 748 bp, Homo sapiens
ctttctctttcagggttataagaaacgcacctgacttaaataacatgtattgtggatatataaatagactatatgttcaatattatcactgcacttataaacaaagaatgatatgtgagaagatggccaatccagtgcagcttggttctacatattttagggaggcatgaggcatcaatcaaatacattgaaggagtgtagggggtgggggttctaggctataggtaaatttaaatattttctggttgacaattagttgagtttgtctgaagacctgggattttatcatgcagatgaaacatccaggtagcaagcttcagagagaatagactgtgaatgttaatgccagagaggtataatgaagcatgtcccacctcccactttccatcatggcctgaaccctggaggaagaggaagtccattcagatagttgtggggggccttcgaattttcattttcatttacgttcttccccttctggccaagatttgccagaggcaacatcaaaaaccagcaaattttaattttgtcccacagcgttgctagggtggcatggctccccatctcgggtccatcctatacttccatgggactccctatggctgaaggccttatgagtcaaaggacttatagccaattgattgttctaggccaggtaagaatggatatggacatgcatttattacctcttaaaattattattttaagtaaaagccaataaacaaaaacgaaaaggcaagttacgaga

SEQ ID NO: 232583 - DNA, 408 bp, Homo sapiens
tattgcttacttctagttgatctcaaagcccatatagctaaaagtcatgtagccaaacaatatacatctaatctgtcactagcttccttatagacaacgtctctggcatgtatgtcactatggtaatagttgcttaaagtttttgtttttgtttttgttttcaggaactaggtgttcttacccaagttaaactacttgaaagagaccaccaaccctctttctaccttgcccattgactcctgggccttattactatggagtaaggataataggagaatgagaaagcagatagaagaaggaaagaagagagttgcaggcccttcaactgggcctgcacaaatgcccaagaagtgactttctgataccagaaggccaaaaacctcaccttcacagcatgctaatgccacc

SEQ ID NO: 232584 - DNA, 398 bp, Homo sapiens
gaggccggcgtgtctggaatgagaacgagccgcgcacgcagtttgagggttccggggagccgcgtcctcccctttccaggcgacagccctaactacaggaattggccaaaattcagcatttccagactttccttgggaaaaggggccgaagaagtgccggcaacaagaagggccacaacggagcgcgccacagactcaccgcggctggggtcgggaccggcgcagccccctcccctcccgcccgtgcgcgccccgagccgggcgccccgacccggcctccacccgctcaggcgctcagggtcaggccgggccgggctgcggcgcccccatccccgcccgggcagcgaggccgggccaagcggggcgctccgggcctcgggcctacacgcggcggccgc

SEQ ID NO: 232585 - DNA, 375 bp, Homo sapiens
tattaactctttaaagctatcggctcttttaattggagatgttgaggtttcctcatttaacaaataggcagttgttggtggttttttcctatgacttacagtggtttcactgttttgacactttaaaaacggaagaacctaaaattcagactagagtgtactagtttgtggtcctgctactttgtagcattagaagcttgccaagtttgattgcttctttgaattagtttcttcatctgaagaggaagggtcagaactatcattaaggttaacctctaattgccagtgattgtatttggctcttaagaacaaatgcttttggtacacaaatgcatagcacataaagtaacatgacgaaaccccatctctaccaaa

SEQ ID NO: 232586 - DNA, 493 bp, Homo sapiens
tgcagactgccaacttctagctgcattttcatgtggcaaaaggagattgagctagctctctggtctcttcttataaggacactaatcccattcatgaaggcttcaccttcatcatctaattactctccaaagaccccacctccaaatactatcacattgggaattagatttcaaatacaaattttgcggggacacaaatattcagtccataatagtaatgattactcattatacatagggctctaaatgtgctagcttctgatagtttttacactcacttctctttattagcttgtcaagcataattagggcagtggccttactgaaaattattgaatttagtttcctaaggacagatattgaggagttttttcttcactaaaaattcacgttccgatacagctttcatctgttactactttgtgagatggaaaatcttttattttatttttatgtttggattgacccttcttaataaagtcggcatgtaata

SEQ ID NO: 232587 - DNA, 406 bp, Homo sapiens
cagcatatggaaggaatttctctggcatggttcagctttgagtctagcaggaatatactagtttaaaaattccagaacttcctcagaacgaactgttaagtgatcagttaaaaaaaaaaaaaagttggttgggtgcagtggctcacacctgtaatcccagcacttcgggaggttgaggcgggcagatcacttgaggtcagaggttcgagaccagcctggccaatatggtgaaaccccgtctcaactaaaaatacaaaaattagccaggcatggtgcaggtgcctgtaatcccagctactcgggaggctgaggcaggataatcgcttgacccaggaggcagaggttgcagtgagccaagatgtgccactgcactccaccctgggcaacagagtgagactctgtctca

SEQ ID NO: 232588 - DNA, 342 bp, Homo sapiens
gtaataatccctgcaaataaaatctctctttactgtgtccaaatttgttttttatttgacactacacactggaaacaaacacaatatttctcaataaggacaatacaatgaggtttactccagcttaaagagtttaatgttttctaacttgttcaacagataaaacatttacttggcaatgtggcaccaaaaaatacgtggcttcaaatgctacaatcacagagcaaaatgttcacatcatgtgagccctgagagtaactgagattgaagttacagcaatgacctatcctctatcccaacctcatgccaaaatatatgccccttgagtagagtggctggtta

SEQ ID NO: 232589 - DNA, 147 bp, Homo sapiens
agtgagttgcataatatgactagaatgtaaactctctttgaggccagggactttgttttattccctgctataacccccgtgcctggcacacagtaggccttcaaaaatgggattaaaagaataaactttggcaaatgacttcacatt

SEQ ID NO: 232590 - DNA, 564 bp, Homo sapiens
gctcttagctcatatttgtcctatcacattcttcaacaactttgcactcttcctcaaacctggtataaaaacgttcaggtttaactgtttatttgggttttcatttccttatgaaggtttctttgtcacataaaacttatattaaataaattcataagtttttctcttgttaatctgtcttttgttagagacccaatcaaggaccaaaaagagtagaaggaaaaagatatttttcctctcctacaaaccaaagtcacagtaaaaaactgtaacaaaaatctatttcatgtcgtctgtatctttctgtactaactaaaatcactggttcctactgcctggagtcaactttctaaaaagctttagagaaatcacttgggatcccagaggcttcctaatctgtgctctgttgtaacctatttacaagaaggtcttgtttcaacatctctcactatacaattaagccagcattccaagtccataataatacctttgagcaatggctttgatataatgggtcttttaaatgaattataataaaattgttctttttaaaattttaatttg

SEQ ID NO: 232591 - DNA, 441 bp, Homo sapiens
caggaagaggcgcctcataggaaccacatttttcaggaccttggccttagacttcttgccagcacatctttaagaaaattaatttttatttaagccaccaagcttgtggtattttgttatggcaggtggagaagactgagaaagtccctcactttgattcctgtccctcacgcaggtatggctcctaacaactggggccttcctaggctgcagggatggggatgcctttagggcagttatccagagctgaattaccctatagaatgtcccagtctcctgagctgccttcagttgttttcactaatttgccataaattcagtcaagaataataaataaagtttaaatttttttctagcatttctggtgttcagtggccagacagatttctctgtacagaaatggcatgttatacaagtacatggtgattttatcatattctc

SEQ ID NO: 232592 - DNA, 527 bp, Homo sapiens
cgtgtcacttggataacttccaccacaaacacatctggtgaaggggctgcgccatcgcgggtcgcccccagattagaaatcaatcacagtcaatcttgcagtgagtctttagccaggagtaagctctggcctcaaagtaacccgcctgctggggaaggaattctggagatgcctggttcgtcccaggatctggcccccaaagcttctaggaaatagatgaccagacaggtgagcatggtgtgcactcagcaagcatccagataaacaaatgtgcacagggcccgggagctgcaggtgggagagggaaggcagtaggctcacagcttgctcccaggctggatttcaagatgaaaggaagcacatctgtagtttgctcaaagccatgtcttgagactggggagaaaggaggaaagaaaggccgtgttaaaacacagttcgaagctgagctgctcggtgacataacgaggcctgtgcgaccacccaggaggaggtttttcaggcttctctggggtggacatggccaagcg

SEQ ID NO: 232593 - DNA, 518 bp, Homo sapiens
catggaagactatttttccacgaatggggaccaggggatgctttggggatgaaattgttccacctcagatcatcaggcattagttagattctcataaggagcgtacaactagatctctcacatgcacagttcacaatagggttcttgctcctatgagaatgtaatgccactgctgatctgagaggaggcagagctcaggcaataatgctcacctcctgctatgaggaccagtttctgttaacaggccgtggaccaatagtggtccatggctgggggggttgagggcccctgctgtagaacacatagatagtaggctgcactctgaagattctactccaatacacatggagtatagcctgggaatcgtttgttgttgttttatataaggtcagtgggacatttagcgatccaggaggagtactttagattactctggtagtctattatagactctagtagtctatatattggagcactaaataattaatctagaagaagcaaagggacatgtcaggatt

SEQ ID NO: 232594 - DNA, 161 bp, Homo sapiens
gctctcaaattcctcccatgggctaaatatacttatgtatggaaaagaccatagcaagaattctgactaatggaccactcacagaaatcttctgtcctactcctacagaaagttcttccacttttttcctctactttaactcttatcctctgggcatgtgt

SEQ ID NO: 232595 - DNA, 405 bp, Homo sapiens
agacatggaaagtgggggcatgggtaaggaaggaggaggtgagagaaggtgggggtgggagaatcaggcatggcagagtggtggaacccaatggaggggtggagatgcggaaaggggaaggataaggagggagacaaagacattaagattagtgataggtagaggagactaagtctccagcatacctcagaggagctgcatcccttccccactaatttaggaatgggaatactgagtctctggtcctccagtagagaatgagtcagccagtgcaggggctcacacctgtaatcccaacactttgggaggctgaggcgggtagatcacctgaggccaggagttcgagaccagcctggccaacatggtgaaaccccatctctactaaaaatacaaaagttagccagg

SEQ ID NO: 232596 - DNA, 122 bp, Homo sapiens
aggaatccaaagaggattaacgaattttcacagttctggatttcacttttactgaaaacaaatatttgtaagtgctggggatatattttagaataaagtatgtagatatagattcatataca

SEQ ID NO: 232597 - DNA, 403 bp, Homo sapiens
aagtatatgatggatatgtccatactaaagactcattaaagtccatactaaagtatatgatggatgtggggaaggaagggcagcaatggaaaattgactcgccttttgaagaagagctgcctccctaccttattcctcctgcaaaatagactccaaatgaatttaaaaattttcaacattaaaaagactccataaaattagtagaagaaaacattaataaatatgttctgtatagccttgggtctttctaacttcttattaaaaattacataaattataaagtctgtacagactttaaacttctgtatagtataaacaaaacaaaacaaaaatcagtaacaactcagaaacaaggatgaagaaaaaacagaaaaatttcaactattttactgaaaaaaataaa

SEQ ID NO: 232598 - DNA, 536 bp, Homo sapiens
caaattaggaaggaaaagacaagatatgtaaattatgatgcaagttagaataatagcaaaataattatggatatatttttcaaatatgaagatcatagtatatttgacagcattttgcatagtatttttatacaacattatgtatattatattgtataatgtgatgtagagcatttcctctactgctgtatctcatgaattaaaatatagatttttagaactttagacgaatttgtcatacattcacttacatttttatcacttgttcctgttaggcagttgtcatgttctattattaaatggaatataattttattactattgctattattattttatagtcagggcctctctctgtcatccaggctggagtgaagtggtgcaatcatagctcactgcagcctctaagtcctgggctcaagcagtcttcttgcctcagctactcgggtagctgaggcaggagaatagcttgaacccgggaggcagaggttgcagtgagcggagatcgcgccattgcaaattagcttgggtgccag

SEQ ID NO: 232599 - DNA, 225 bp, Homo sapiens
ctgggaagtaatcatagtttaatgagagcccggaaaacagtaaatggcctgaaagactttcgttgttaccataattttagtatagcttattaaataacaataccagtggtatagcttgggagtgtgaaacttgattacaacttaacgattgtgaagtttaggttattaaggtgatttttggatgtgactttatgtgaaacacccttttcttcggagagtagggga

SEQ ID NO: 232600 - DNA, 1028 bp, Homo sapiens
aatatcagctcggtaccgattacgctcctagacgggaatgaacacctgggccatgccatcctgaaatgaatgaacacattggccatgctgtcctgaggtggatgaacacctggtccatgccatcctgagatgaatgaacacatcagccatgccgtcccgagatgaatgaacacatcggccatgctgtcctgagatgaatgaacacctgggccttgccgtcctgagatggatggacacctggtccatgccgtcatgagatgaataaacacatcagccaagctatcctgagatgaatgaacacatcagccatgctgtcctgagatgagtgaacacctgggccatgccgttctgagatgaatgaacacatcggccatgctgtcttgagatgaatgaacacatcagccatgccgttctgagatgaatgaacacatcggccacgccgtcttgagatgaatgaacacatcggccatgccatcctgagatgaatgaacacattggccatgctgtcttgagatgaatgaacacctgggccatgctgtcttgagatgaatgaacacctgggccatgctgtcctgagacgaatgaacacctgggccatgctgtcttgagatgaatgaacacatcagccatgctctcctgagagggatgaacacctgggccttgccgtcctgagatgaatgaacacattgaccatgctgtcctgagatgattgtcctggttatgcagacatttctttatattatttgcttaactttaatgccctcctaggaagatttcccatactttcctcccttcaatcaaaatatcccaagttcaacaggtctggctcactcctctctattcatctaaggtctactttgttcaggaatttctgtctaggactcaggcaggaccaaggaaatcttttcagtgacattttaaatatcactgtttatggaatgtgtatagataactgaataaccaaataagtgttgttttgaaagtatctttattaaaagaatataaagaacagaaactctaggcttata

SEQ ID NO: 232601 - DNA, 504 bp, Homo sapiens
ttctcatctctttatctataggtaagcttgcttaaaagaactttgggtggcctggtaacttcaggacgcttcgccaattaccagaggaagtaaggcttgcccaaaaccgagcaaaccagaaccagtggcccctgtcacctttagatcattagcatatcattataatgctaaagtccccactcatagaagagaatcatagaagagaatcgttgccactttctgcacacgtgtcgtatgaagagcctgttcatgatctgcacctgcgtgtctgaagttcctccccacataagcttacatagctcctgccccacatctaaccctgttacattccccagctccccaccgctctggaagaagctgtctttagagcaagtgctctctccttctccatgcctggccgggaataaaacctgcttttccttttccccaatctggtgatctttctttgtagctgatgcagagtagagaaagaactcagtgaactggtgacgaagccaattccag

SEQ ID NO: 232602 - DNA, 710 bp, Homo sapiens
ccacagtcaccatatggagagaagcctggtcgctcatccctgtgagcactcgaacccccactcctcaacaagcagagccagtagaacaactgtctcacctcctggctgaattttcccagtagcagtggctctacatttttctgaggtagagctcctgaagtcaaccaaaaggccctctgctactgccactgcagtggtagtgaccttgctgtccttgaattggagaagcagcgaagaccctgagtgctttaaccacacctccagcaagctgctcttgcactagggagaagaggccagtctgtctccctgttacctgtccctgacaccctctcatcaccaggcgggccttcctagcttgagcccaaagcacaggtgccccatccagggccaattgcactgattaataatgggtccacatctctctgggttggaaccccaagaggcaagtgaaaggctctctgccataaccactgctaagatcccttccccttctgcccaagagtcccaagccaagatttgcagtcagcactcaagtgggagaggaacccatactttcaaagcactgagaagaagcatggctgcaatcatgaggaaataaagaggagccacactgttgattaagtggctgcctacaggccactatgtgtaagtgccacctactggatcacagcccaaaattcaataccaaaaatactttactaatatttgaa

SEQ ID NO: 232603 - DNA, 619 bp, Homo sapiens
ccacagtcaccatatggagagaagcctggtcgctcatccctgtgagcactcgaacccccactcctcaacaagcagagccagtagaacaactgtctcacctcctggctgaattttcccagtagcagtggctctacatttttctgaggtagagctcctgaagtcaaccaaaaggccctctgctactgccactgcagtggtagtgaccttgctgtccttgaattggagaagcagcgaagaccctgagtgctttaaccacacctccagcaagctgctcttgcactagggagaagaggccagtctgtctccctgttacctgtccctgacaccctctcatcaccaggcgggccttcctagcttgagcccaaagcacaggtgccccatccagggccaattgcactgattaataatggacacacatactatatgaatacacacaccaaagaaacaatcacatagtactaaaaaagaatagaaaacgaaagaatcatagagagaccggcataaacacaataagagaagaaataacaaaaaacaaggaacgagtaaaacaacaacagaaaactctcacaaaaggaattggaagaagaaacagtgtcatgaggaaataaagaggagccac

SEQ ID NO: 232604 - DNA, 361 bp, Homo sapiens
gtggtgcattcatgctcctctaggggggaagcggggtcggaggggagtgctcagagccaccttagcgcaaagtgctaacttttgaattgaggcagtgccaggggacgcagtatccgcatcgcatctacattttacctcgctgtgaaatgagaacgcaaagacgatttaggttttattgtttccgacttatatttttccgaggtctttgatttacgggaaattgttacgtactaaatctcatatagcaagagatttagaggaagctacagaatctaggctaatgtatctaatagcatttcctgcttttgctctttttctttgcctttttcccctactctaagaagttcatattcctggcctg

SEQ ID NO: 232605 - DNA, 144 bp, Homo sapiens
gaaaatgcgggactaaaatattaatatacatgaagaaaattaggcaaatgaaaaccgaggtaattactaattccaggaaaaaaaaaggataagaaaatacaactacagacaccattaaatgggaaaataaacactgatttggtc

SEQ ID NO: 232606 - DNA, 173 bp, Homo sapiens
tagttacttgtataatcagaaaaatcacattaatgaatatacaccttcatctttgaatgggtgtgactagtggacacttaagccccccaaagtcatattttctcgttttgtaatccactttacacatggagattaatcacaaagtgttcctcttaacaacaaggaccttggga

SEQ ID NO: 232607 - DNA, 387 bp, Homo sapiens
gcatcgcccacgcccgaaacgcagccgctgggggccgagaaattatccccacctggcccgagggccagggacgcaggagcgcagcagcgtggaggggctccgcgctggcccggcgctgcccgcggtcctgccctcgttccaagggcacggcgccggtacgaggacaccgacgctgtggcgcaactgccgtcccccgcagcaatcccggagcccggctcccggccgcccctcggccctgcgcaggctgcctctccccgacgcggagtcccaccccgctacccgccgcccagacgacctcataaacaagtcctcgaagtgcggaggcaggaggcggggcgcagcgcgggggcaggaggcgggccagggtcagggcagaggctgcggccg

SEQ ID NO: 232608 - DNA, 967 bp, Homo sapiens
gattaaggtctttatacatattctacagaagaaaataaactttatgtggattaggaagaaaggaaaggactggtagttgatgtggaatcctgaaatcattgtgaaaactcttttttcctttaattattggtcatataaataataagccttagggcaaaattgggttaaagtgacacaagaactgtttgggattctgttagagatgccagaagttgttccagcagttctgtttggacaggaaaaatggaaacagaatggaccattggagaacaagattatctaattgaagataggtctcttttggcagatatgttcagtaacatcctaagctctaaagcttagcactggaacacacacacacacacacacacacacacacacacacacagagcattctaaagggccaaatagatatacttagcttttgtttaaaaaaacttaaaagaataagcttaatggagaaattaacaggaaaatatgagctcattgaagtggaaagtatcctaattgcatggctgaaattactttttttttaaaagagtttcaatacttttgtcacaggactttgaataaagaaaaatatttcttggtttccactggacaaaagccagtaagaagctggggaaatagatgtgatgcctgccaactccacatgggagaaaaagatgggtagatggttgggtcgatgcagatgagatgggcactttggaaatcttttctcagtgatgagaaatggtgttcatttaggggagctgagacattgagttctgctcagaaacctgctcttgaatttccgcagtatctctcctgtcctggcaacgtgaatattactgggatgaagcctaaatctatgattacaaaacaaacaaacctagttttatcctgacagaagtaatgccagaattattgtaacacttttcacactggttattccctaaactgagtccataaactatgtaaatagatt

SEQ ID NO: 232609 - DNA, 493 bp, Homo sapiens
cgcatgtgccgctccatagatgccagctttgggtttgaaatggaaatgtttgagtttctaaacatctgtcaagcacatggctttcctaaaattctgggagttctcacccacctcgactccttcaagcataacaagcaactgaagaagacaaagaagtgattaaaacacaggttctggacagaagtttaccaggttgccaaactgttctacctttctggaatggtgcatggagaatatcaaaaccaagaaatccacaatctgggccattttattacagttatgaagtttaggcctctcatggcaaacttttcacccttatatcctggcagacagttaaaaggatggaagatttgacaaacccggaggatatccaaacaaacatcaaatgtgacctgcaggtgtcactttatggttatttaagaggagcggcacatgcgggggatcctcagagtcggagtgcatccataagcatccctattaataagctgatccc

SEQ ID NO: 232610 - DNA, 702 bp, Homo sapiens
  misc_feature (622)..(622): n is a, c, g, or t
  misc_feature (644)..(644): n is a, c, g, or t
  misc_feature (656)..(656): n is a, c, g, or t
  misc_feature (676)..(676): n is a, c, g, or t
cgcatgtgccgctccatagatgccagctttgggtttgaaatggaaatgtttgagtttctaaacatctgtcaagcacatggctttcctaaaattctgggagttctcacccacctcgactccttcaagcataacaagcaactgaagaagacaaagaagtgattaaaacacaggttctggacagaagtttaccaggttgccaaactgttctacctttctggaatggtgcatggagaatatcaaaaccaagaaatccacaatctgggccattttattacagttatgaagtttaggcctctcatggcaaacttttcacccttatatcctggcagacagttaaaaggatggaagatttgacaaacccggaggatatccaaacaaacatcaaatgtgacctgcaggtgtcactttatggttatttaagaggagcacacttgaaaaataaaagccaaattcacatgccaggacaaggtggggctcacccatgagctggtccagagtctcatctccacctactccaccattgatgccaagatggcttcaagtcgagtgatgctgctttccaattccaaaccacttgggtcagaggctatagataatcaaggctgagctgaaaggcagagcntaggaaaattcttatgctctgntataagcgtacncctagaggattgcccaggcngcaagggtttactagtaaggaactag

SEQ ID NO: 232611 - DNA, 812 bp, Homo sapiens
cgcatgtgccgctccatagatgccagctttgggtttgaaatggaaatgtttgagtttctaaacatctgtcaagcacatggctttcctaaaattctgggagttctcacccacctcgactccttcaagcataacaagcaactgaagaagacaaagaagtgattaaaacacaggttctggacagaagtttaccaggttgccaaactgttctacctttctggaatggtgcatggagaatatcaaaaccaagaaatccacaatctgggccattttattacagttatgaagtttaggcctctcatggcaaacttttcacccttatatcctggcagacagttaaaaggatggaagatttgacaaacccggaggatatccaaacaaacatcaaatgtgacctgcaggtgtcactttatggttatttaagaggagcacacttgaaaaataaaagccaaattcacatgccaggacaaggtggggctcacccatgagctggtccagagtctcatctccacctactccaccattgatgccaagatggcttcaagtcgagtgatgctgctttccaattccaaaccacttgggtcagaggctatagataatcaaggagatggctttggattccctgttctgtgtgctcctgtctggctcctgaacccagctggagaggtgtgtcaatcccaactggtgaagtactgagaggaagctacacaaaaggcagcaaggtgttaataagtgtacctctgacattttaaccacctctgacttttccatggaatggacaagtagtagtctctgtcagagcaatgttttaaagg

SEQ ID NO: 232612 - DNA, 433 bp, Homo sapiens
gaaaaataaaagccaaattcacatgccaggtattctcttgctgtagaacatacgagaattgcacataggattcttgggatggcttcatttctcaggaaaagtgaaaaatgaccaaacaagggaagatggccttgctggaggttttaaaagtaagccagctatgtgtaggcctgcaaaggtgttaccgaatccctcttctctgacctcttgtagctagagggtcactgttccagtgtggcacaatgcccttctttagggtcatgggttaagcccttggactgtggatcgtttttaaccccccagtcaacagtagatacttactgacttcttgtcagttgaagctggctttttgggtcctgtcttccaggggtagaacattttgccatgagtgacatcagtttcctcccagacccttgtgttcttcctgaataac

SEQ ID NO: 232613 - DNA, 739 bp, Homo sapiens
ttttttttaaatcaagagacagggtgttactctgtcatgcaggctggaatgcagtcacatgatcattgcacactgcagccttgaactcttggggtgcaaaggattctccaaccttggttcccaagtagctggcactacaggggcacatcaccatatatggctaattctttttattttttgtagagatggggtctcattgcccaggctggtcccaaactcctatcctcaagctatccaccccccatcagcctcccaaagtgttgggattacaggggtgagctaccatgcttggtccaaattttttgtttatacaagggaaaatctccagtaaaatatgtataggtgccaataccataactgttcaaacacccttatgactaaataggcacaaaatttcatctttttaatgactgccacctgaagttcagaaacatcctagggaaaaaaggataaacaacttcatcaataaagaggctactattatttcactactgtctgggagatccatcgtgggcttacaggaatccaaatggatactgccgttacgtgtagaagtgtttatcctccagcccttccaccctaccttccccaagaaaaggaactcaagggggccatggaaagggaaggagtcttcccaaaaagaccagactgtttttcctcctctgtcatagtccctatagagtcaggcagcttaggggttgcagggggtgggtagcataagtgtgatgtactaccgagg

SEQ ID NO: 232614 - DNA, 712 bp, Homo sapiens
cctggactcaagcaatccacccacatcaccctcccaaagtgctaagattacacacatgagccaccacacccggcatatacatgccttttgttgggtaaagagagagctggtactggaaaaggtaaaagagaaaagaatatttaatgattttctgataactcttattgtaaacttaacagtaattaaggaaatcatcaagaaaaattttgataaaatgacctagatgaaaaagatttatttctttagaaacttaaaagtgactgggcatcgtggcttacacctgtaatcctagcactttgggagaccagggcaggggagtatttgagtctgggggttcaagaccaacctggacaacatagcaaaaccttgtgtctgtatttaaagagaagaaggggaaaaaaaaaaccttaaaaacatttaattgagtcaatataaactgaagataatatttgtagcaaatataattaattaatctggtaaatatataaagagtactacttaatgacttttaaaacagaccccacctgacctgtactgctatacaaagaaataactgaatacaagggaaaaatttggtgtaaggggtttgttatattttaattaatgtttaacatgataccaggttatatacacattgttttcacaggtaagataacttttaagaatgtgaatggcatgggaaaaaaggaattgaaggaaataatattaaaac

SEQ ID NO: 232615 - DNA, 390 bp, Homo sapiens
tgtagcaggcccctctgtcttcagccagcctggacagggctctggccacaggcattccctccgttgttgcagctggcatgcctcttctctgctccttttggttgcggggaccaggtggcatctgcttctttctgtctcatgacacctggcctccccgccactaattccttcctactgttttgagcgacaccctatgcttcttccccactgaggatatagaaaaaaacaaagtgtgattttcctaccacactctcgtaacatagaatccttctgtgacctcgtaaccaaaatgtgtgggaattgcttcccaccagcaaccaagctagtagttctgcagtggacactagataggcaccgtccaattccattcaattctggcattccccacct

SEQ ID NO: 232616 - DNA, 432 bp, Homo sapiens
ggaagcaaggaagcctgctccgcccctccaagccttaggtgttagatggacaggctctgcccgtggggaggaggccggccccagcgcctgtctcattctgaggctgtgttcaccccattctctaacagccacattcctctttcaccttctttctcaagtggttcagaatgtagggaatggaagagatgctcatctccaggtgctgccaaccccagcaaaaagatgaagtgatagaatgaaaggcaaaggaagatacccacagcattccgcagggaaaagagcataacccaagaataccacaccagccaggcggtcacaggggtacaaagccaccctttcctagcatgaaagggctcagcaactaaagcacccacaagctcttcttgaaagtcatgttcagcgacaaaatcctgccaatcaagagatgattca

SEQ ID NO: 232617 - DNA, 449 bp, Homo sapiens
tttcatgtgcttattgaccatgtatatatcttctttggagaaacacctcttcaaatcttttatccctttttcaattaggttatcttctgatggggttgtggatgttccttttgtattcttgataaaagtcttttgtcagatatatgatttgcgaatattttctccagttccagggagtatcttttcactttctttatggtgttgtttgaaacacaaaagttttaaaatttttaatttatgtatttacttacttataaattgtgactaaatgtacacaatatgaaatttaccactttaactattttaaagcatatagttcaacggcattaagtacattcacattgctgtgcaatcacccatctccagaaattttatcatcttccaaaatttaaacttatatacccattaaataacttcttaatttccactcttgccagtccctggcaact

SEQ ID NO: 232618 - DNA, 163 bp, Homo sapiens
cttgatgaatagccgttaagcaaataaacgaatttgaaggcaaatttgtggaatcccagccagtgcctctgcctccaccctgcagaggccacccttctaaggttcagagggctcagcagcatctgcttagagtagagctggcaagaagggggaggtgttgtcg

SEQ ID NO: 232619 - DNA, 93 bp, Homo sapiens
cttaaaggaacaatatgctatgatctttcacactttccaccaacttctcttctccaggcttttcctacttatcctgtaaaacttaatttacag

SEQ ID NO: 232620 - DNA, 387 bp, Homo sapiens
atagtaacaaatgccatccaaagcaaattgaacaggatatttttaagctttcaaattctactaaggtttgactttttcccccaaaataggaagggtagaatatcagaagtttatgctaatcctcagatcccagctaaatacctttccttgctgaaaggcagaattctgtaacgagaacacacattagctcagggctcctttcagtcctggttttgatagtttgtaagtccctctgccctgaaatgagacaccattctttatttaatgtcccatttcagtttccagaatgaaataccagtggaaagggaagaccagctttagcacaataactcctccttaattaccagtcttatctctccactgcaaggtcatcattttctgtgtggt

SEQ ID NO: 232621 - DNA, 369 bp, Homo sapiens
gtctggctcttttttctaatctttgatcacattctctgtttgtctatgctcatctcccttccaccttcttcttcatttctgccttttcagctcattaattgactttttgtagccattaaagagagacatgtgaatctcctggaagaaattaagctgtctgctgggggcatggaggatgagttggcaggtctcccatgctaattgatttcatcttgattcagtgagtctcccaagccaggtgacaactcagcagtgcccagaagttccaggcctagaaagaaagcaaatacttgaagctgcctcttgctaaggatgagtcacagggggctctgccatagggacctcataggccttggattgtccatgagc

SEQ ID NO: 232622 - DNA, 1356 bp, Homo sapiens
  misc_feature (955)..(955): n is a, c, g, or t
tttccttgctggatcctgcttgcaggaagcattataatctatctgcatccatcacccaagtaatgtgactctctttctaccaggttgctgcttacagaaagaattgttacctatcactgggccagcacctagctgttgtgatgcttctttttctacctacattcagctcacaatgtagattttgacatactgctgggctaaacaccaaaaatgaagttacgtttttcctcagcactttcctcatcaggcattgtgacatattgtttggcccagaactaaggtaatgtgagcctcctgcctgaaccctgcccatagtgggcatagtgacatatttgtgaacccatcatccatataatgtgactttcttacttggcttttccctataggagagattgtgacatatatttgagcccagaaaccaaataatttgacccttctttcctgctatggccatgctcccataaaagagagtgacttattgctgcgattagcacacaggctatgtgattcttctgcctggttcctctccacaggagttactttgacatatctctgggcccattacttagatgatgtgactcctcttattcctgggatgtgttcacagtttggactgtaacatatcgcttagtcaagcacttatgtgatgtgactcttctctcatgttttggccttgtccactggggtgcttgtgatatgtagctgggcccagctcttaggttatgtgatctcttttttttttttttttttttgggccggatctcggaaactttggtttggggatttttttggcggggcccacccctgggttttttgggtccccggaaaggggcccggtcacgaaggcggtttttttgactcttctccttttgtttctccatccccttaattggtggtggactctcctttttggactagaccctgtcacaagcggttattggtggaattttctggnacccagcccctaggtgatgttgactctccttttcggcgggtcccccataatgggggttcggggctctttgggtgagaccccctcgggggggggacgtccttttttgaccttaacccaaggagtctgggggaattttcccggctcccgtgacctaaactctgcgactcggcggtcccgggcggccccgtctaacgaaaaagttccgtcacaaaaacgaaacagcacaacaacaaagggggggccatagaactccgagggccattcgccacccctttggaaagggcccaagggggcttaaacagcacgggcagctaacgcggaacagtccggttgtagaccgctggtgtatggaccaccagtacggataatgtagtaacgtgccagtgtactctaagactgct

SEQ ID NO: 232623 - DNA, 343 bp, Homo sapiens
ctctgcctcctgggttcatgccattctcctgcctcagcctcccgagtagctgggactacaggcacctgccaccacgcctgacttattttttgtatttttagtagagacggggtttcgctgtgctagccaggatggtgtcgatctcctgaccttgtgatctgcccgcctcggcctcccaaagtgctgggattacaggcgtgagccaccgcgcctggccaaatgccactttgaatgtcaaaatatgactgttcttcagatgaaaaaatagcctttttagacaccaggcaccaaaataactttcagaaaaagtagtgttcttctagagttctcatagatagaaaag

SEQ ID NO: 232624 - DNA, 423 bp, Homo sapiens
gtatagttgtaatatctgagttttctgaaataaagaaaatagttaatatgtaggatgtttaaaactatgtaaaaacaaacttatgaacatcgttcatttagtgtatgataatcaagtcctagatattgaaatcacaatgaggtatgtaagtgtatataaatatctgtaacactgatttaagaaaagttggtgtgggttgactgttatagcagcaaacagaaatttctttcaaattatgccaattttagtaatttaaagtattgggggcctttaccagggctaaactattaatttcagagatgaaatatctgtagtctctctgatttaagctaattctagcagtttttcatggaacacctagctattcaaaattttcctgctgtttttaatcttaacaattaaaaagcaaattaaacatgcatc

SEQ ID NO: 232625 - DNA, 550 bp, Homo sapiens
gggttaattcccttcttcaagagcctaatttttatttaagtgcaatttggtggaaggttatcagcctacacactggagcattatcagaaagaagtctattgcatttgctttggagatgttactaaacattcgtttctttgtatggtcatgtcactcgtatgatcaattataaggtaaatttttctctggtcattttaccaagtaaagttatatttcccttgagaaaaacgtgcttttttttttttgttatagacactatgaatcatacacaaatcagttttcactcttttgttttgaattttaatgaatatagaggtggctttgcattatgtttttatcatacatatagaatgttctggcattcatcttgcatactaacttcactgctgatttattatattttctgaccttcattttcctttctccatgctttcttcaattacaaattcttataatggctatatttcttcaaataaaagaaattattttgttttggaatgaggcaaggttagaagcaaacatataaataaatgcgactttgaacaattaa

SEQ ID NO: 232626 - DNA, 274 bp, Homo sapiens
ctgagtcatgaacttccatgagctccattcttctcacctttaaaatgaagatcacaactcctaccttcttggcttgttaccagaattaaatgagtttttatgtgtggagggctcatgagagtggctgtcccaaataagcattctctaaatgttagatatgactgtcatccccttaaaactgcaagagttagttgaaaccatagcaagccgagccatgaatgccatgttaatgcatgttaatgccattattataaaggtaccaaaaagctgctga

SEQ ID NO: 232627 - DNA, 305 bp, Homo sapiens
caaacctacttgttttcctaaacccttttttcttctcaagctatgattctcgcctttagagacagaacaatgatgatttacctcttatatgactaacggaaactgctttcttcccctgcaaagagtttaggtccaattttagtctgcacagtcaggcctggggaaggggacctaagccattagtttagcatcagagcacaagacattgatttctaacaccagaatttcataatggtcttgatactccctaacggtaagaccttgggaacggcacttacatgcagactgtcagcctcctcttctat

SEQ ID NO: 232628 - DNA, 301 bp, Homo sapiens
aatgtctgccagggacatgagaagggcaggttgtgcacatatgacagatacttgccacacctgaccaaatggttaacactgtgaaaaatgcccagctagaaatagatgcaaagcaataacagactgatcgtcctgaggcgacatgtcactatgaaaacagaccaaggttggccaggcgtggtggctcacacctgtaatcccaacactttgggagtccgaggcagtggatcatgaggtcaggagatcgagatcatcctggctaacatggtgaaaccccgtctctactaaaaacaaaaacaaa

SEQ ID NO: 232629 - DNA, 451 bp, Homo sapiens
tccacaggccccaaacgtaggcagactggcttccaaaacccgaatattgtcatgaaatgaacccagtcccaggacaacattaaagctgcatctcaacaaccaaaacaattcagcctagctccctccacaacctctgagttctgtctgcaacagccgggctggctgagcagcagacacgcgggcctgtgatggagccacctgccttcacaaaggcccagagcagctgagaccatgtggtcccggcccgctggggccagcggcagctgttactgaccagggtgataccgagccagctgtgatgtgcaacaggatcgtggctgatggcctctagaggcacacacagggcacgacagcagacaaggcagcctcaacgtgggcaagtgcgaggggcacccgtgccctgctatgcctggtctatgggagacgctcacagtgcctgctgggggattca

SEQ ID NO: 232630 - DNA, 358 bp, Homo sapiens
cgagtgtaacttaatcttatttgatggagctttgttcacaaagcaagtggcctgaaaactagttctttgcattctaatgagagtctttggttttcagtcagaagcgatttgacatctttatgctcctctccctttgttgtggaaaaaaaacatcctttcccaagcatgtgatacatctcgaatttaacctggagtcacttaagtctggacatggcttgtaggatgttttattgttcttcattttccccttttaggtgaatcgtgactacagttttagtcattctatctctaataactgattgaaagacaccatttttttaagaattcagaagaaatctacattaaaaaatctacatta

SEQ ID NO: 232631 - DNA, 370 bp, Homo sapiens
gtaattgatttttttgtgaattccatatgccatctgctggatgacacgattttcttgttcagcatgaagtttgttcttgcagacaatatgtgttttctttacacatatcagtaaagacgtgttcattagttagagtaggcaaatgaataacatgtaaagccatattttctaataactgtcatttaattggatattttgtttcatctttcttctcttagatgcataataaacatatatacgataactcaatatagaaattagatttagtatccttctaggtaactgaaattaccctgccatccttataaaacagtattttttattgttcttacactgtaaataaatgtactggcaataaagaattaacagc

SEQ ID NO: 232632 - DNA, 455 bp, Homo sapiens
ggatcagcattttggtgggttttaactccacaagatattagacttctccctgaagacttcatggggaatgaagacattaaacaaagtctctctgggtcatatctccattgcccctgaagattccctctgacttcagtcagacactttgcctcccctttctcagatataacacccaaacaacacaccaaatgactttttgcagtaaacagttttaaaggattggtataatattgcttttgaaattattttgctagaagtgacttataataaaattacatttggctctgattgtactgcattaatcataacttatggattcttgcaaagtgagaaaatataacctaaaattgttctcatgcatcatgacattttttatgaattcaaattttaacaattaatgaagttgacataggttatgcatttgtaggcatttaattaaaatttaattaaatatt

SEQ ID NO: 232633 - DNA, 690 bp, Homo sapiens
gatgacaatgtgccccaaacagatctacacattctatgcaatccatatcaaaattcaaactgtcttttatgcagaattggacaagccgatcctaaaattcatatgaaattgcaaaggatccagaaacaaaacaaacttgaaaaagaggagcaaatggtgaataactaccacttcctgagtttaaaacttatcacaaagctataataatcagaacagtgtggtactggcacatatacaccaatggaacaggagagagagctcagaaataaacccttacatatattgccaattgattttggacaaaagtgccaagaccattcagtggagaaaaagcagtcttttaaacaaatggtgctgggaaaactggaaatccacatgcaaaagaataaagtggaccctcacctaataacatatacaaaaattaactcaaaatggatcaaagacctaaatttaacagctaaaactacagaactcttagaagaaaacataggtgaaaatcctcataactatggatgaggtggtttcttaaacctgatgacaaaaacataggcaataaagaaacaataaattgcactgcatcaaaatttaaaatgtttgtgcatcaaaggacactatatcaagtgaaaagacaacccaaacaatgggagcaaatatctgcaaactatatacttcataagggatgatatccag

SEQ ID NO: 232634 - DNA, 467 bp, Homo sapiens
agctgctaagtctgtgtggaactgttcaccacgacagtggctgaagaggtagactgaggggatttgaagtgatttgcaagtgctgttcaatattggcccttggccagaataagtggtttgcaactggctggtgaaggagatagatgtccagatggcagagtgccaccttggtcatgtgaccatgcagtgaggtttgcagagtaacaagcacggtatgtttctccatgcagacctcattgttctctctcttccatgagaaaggagaaagctgtcattttgttcctcttatgtcgtaaatggtgtacttaatgcctaatgatgagcccttttaactgggaaatacttaccaccacatttgtcctcagctttcggtcttaattaccatttttaaagtttaaggaaaaaatcaactatgatactgttaataagtataagcatctgggtcattcacatggtcaccacattac

SEQ ID NO: 232635 - DNA, 283 bp, Homo sapiens
taaaacagggtctggctctgtcacccaggccagagcgtgattctcctgcctcagcttcctgagtagctgaggcagaaggatcgcttaagcccaggagctggaggctgcagcgagctatgatcgcgccactgcactccagcctgggcacagcgagacctccgtctctaaattagaggattaaaagcacacacacataaaaccccagatcactatcaagacgggcctataaatcttagaagcttgtcttatagggccatatcctcaaaagcctaggataactcca

SEQ ID NO: 232636 - DNA, 126 bp, Homo sapiens
tttttgtcctagcccatatattaagaaggcccatcgttgttgtggcagatacaatgttaagagactcaggtggagaaggtaagttcctcaaagagatgtgttgtattcatgacacagaaagcatag

SEQ ID NO: 232637 - DNA, 477 bp, Homo sapiens
aaatttgtcttgtttaaaccacccagtccatggcattttattgtggtgccaggcagactaatacacttccttacctatttgtcaagcactgtgttagacagtagggatacaaaatcgagtaaagcagagcccttatttgctcagaattaatggcggtgaggaagatagagaagaggaggtgtgatcagtggaactactgattgtaagtaaagtgctacgatggcctcgagaagaaaagattaattctacctaaaaacgttagataagtcttaacaatagaggtaaattttatgttgggtcttctagaaaaaaatagtagtttgggagaggaagaaataaggtagtttagactgggaaaaggaataatatgagaaaaggtaaagatatgggtattgcatttgtgtttagaaactgacaatctgtttcaattaattagaatatgggtggtgatgggagatgaaggaatctgcattgaaa

SEQ ID NO: 232638 - DNA, 184 bp, Homo sapiens
gatgacagtgaagtgccaaatttttgttttaagagctcaatcagcaaatctttaatatgaattgcttgatttgagatatggaaccatttaaaaatattaacttccaagtacattcttacagtactacttttatgagaaacctccaacacattttactagtctcactttcctcatcttctctgga

SEQ ID NO: 232639 - DNA, 421 bp, Homo sapiens
aagtacatcgtgatttgttgattgataaatcttggaattaaagctcattttaaggatcctgagcaagtaagaggcttagggaatattcagtctcctcagtgccctctcccaaccctggtctcagtgtggcccggggcgggagaggttcgaaagtcaggcagtgccaggaaatgtgtgtttgcaggttctgcttaacgttccctggctcgctcctctcagttctgtgaagcccaaatgtgaatgcaatgaaaatctccactggggatgcactcatctcccctgccacataggcccacagcctggagcatggtggcagcggcagccaactcatttcctgaagaagcccagaggaaaccgagaatgtattgcccacaccacttgcctgactcaacaacaatgagcatcaggttcaatgaaaata

SEQ ID NO: 232640 - DNA, 112 bp, Homo sapiens
agtacattatgatagcactgtataaagtatatgacaaatcatcaattttactgatcgttgaaaactcatcttaactatgcaaatcctaaaataattcagtacatatgtttga

SEQ ID NO: 232641 - DNA, 358 bp, Homo sapiens
tatagtatcacgcggaatagtttgactgccctgaaaatccttagtgctcctgttcatccctttcttccgacaacacctggcaaccgctgatctttccactgactgcatggttttgacttttccagaatggcatataatgggaatcttggagtggctagccttttcagattggcttctttccttatagtaatatgcatttaagctttctccatgtcttgtcttgagagttcatttctttttagtgctgaataatattccattgtcaggctgtaacagtgtttattcattccccaactaaagggcattctggttgtttctgtgtttgggcaattatcaataaagctcctacaaacatctg

SEQ ID NO: 232642 - DNA, 605 bp, Homo sapiens
atcttagtttcaattgctttgacaaatgctatattcagtttgtaaaaatcatttatggaagtaaaactgcatttttttggtcaaaataggtggcaaaagaggtactttgacaatttaaagaacatcagaaaatgtagaactattttttaaaatcggcaaataagtggtttttaggatttatgtttcttttgcttatttgccatgagaaactgttagctaaacttaaagaagattttattgtgcacctactgtggaagggtgtggaccgtgtcttgagaagtgtgatgcctctgaacagagcattttcattctgggctttgctgctcctctggtgctcagggcagatggggatacttctctggcttcgtgctgcctactctctacatgtactgtaactgacaccacacactctgtggagctatcctttccacctttgccctgatgcaggtaacaatgacaaagaataaaaaggcttgaggcagggcatggtggctcatacctgtaatcccagcactttgggaggccgcagcgggtggatcacaggtcaggagatcaacaccatccctgctaacacagtgaaactccgtctctactaaaaatacaaa

SEQ ID NO: 232643 - DNA, 152 bp, Homo sapiens
tgcattaacctgaagaagctgtgaaaatagcagattgcttatccaagcacaacattatgaggcgtggcgtgtctaatcacgaacccactagaacatgagaaagaagaaattgaacaagactgtaatgagttgtttggaatggaagcccataa

SEQ ID NO: 232644 - DNA, 318 bp, Homo sapiens
agtaaaattttgtaaagctgctcctcatgagattctttgaaattcatttataacaacgagactggatacttaacatctgctgcaaatgttttctaggagacttagttactcctgttccctactttctgtagtttatttccattctatgattgtttatcttttgaaataatttcaacaattgactctgtttaatttgtctggttctgagaaaacattagctagatgacaaatttaacagtttaatccaacaggccttgagtggtatatatcggcatgtgttaccaaaggagtcaagaaattaactccagctcttaaaca

SEQ ID NO: 232645 - DNA, 468 bp, Homo sapiens
aacagctagtgcttcagtcctaggaattatgtctctgctgtgggcagttgtcataaactcttctcacaatccgagctgctctttgtcctctgtgaatgaaggtacttttgcttccatttcatccaaggatgaatgaaaatgtatagcatctgcccaaacctaaaaagtacagtgtgtttatcacgagagctttgtaaggtacttcacttccactttaaaattctttagtgctcaaaaccaactattgtgggtttttgtcaataaatactaatttttcaagatgaagtatggtgatttctattcatattgtggtcaattttctcaattttgtttcccatagatagcgtgatggaacttaaattttattttttacacttaaataactgtgctttttgtgatgcgtaatcatgattttctcttttccttgagattttaacagaccttatattagtgcatatgtcaaaataa

SEQ ID NO: 232646 - DNA, 398 bp, Homo sapiens
ctatgaaaattggctacagggggtaggaagcaagggtgaaacattctaagcgtttcaggaggaagaactggatcaaaactgcaagaatcaatattaagaagttctatgtacaccatgtatttgtgttctacgtacaccatgcaaacacaaaatacaaagccaatcttttattctaagaaaatctataaacatgtttatatagcaatctagacttgatcacctcaagaactagggcataaaaatctttgaactgcctaaaatatttagcctacgacaacttttgtagtctaagactctaaagaaaatttgatacacaaaccacattccaaaaatatacttgagacttagaatttttctactctggttttaaagttaaatactgtattataagagtattg

SEQ ID NO: 232647 - DNA, 412 bp, Homo sapiens
aaaccagaaaatgtgtgtggaatcagttggcaccatgcccaacactggtcaacactcagtaaatgttctctcattcctcctctgggtgtctattgtctttaaagaaacttcatgaaagattccaacttacaccataaaataaggcttcccagcaccaaaagagcagaagcccaaggataaccatcataacagagttcctgtgagtttcatggtcgttataaactataatcctacttaactcttcctaagaccttccagaatccagagctctcacattggaatttttgtcactaaatatttctctaattatttcagacatgttggactctccttcccaaccagatttaagttctagaccatgaagcttaatactgtaagctgaaacaagcttaatactgcagagaatacagga

SEQ ID NO: 232648 - DNA, 466 bp, Homo sapiens
aaaccagaaaatgtgtgtggaatcagttggcaccatgcccaacactggtcaacactcagtaaatgttctctcattcctcctctgggtgtctattgtctttaaagaaacttcatgaaagattccaacttacaccataaaataaggcttcccagcaccaaaagagcagaagcccaagaccttctggataaagcttctgctctttccatttggttcccggctcaagattttggataaccatcataacagagttcctgtgagtttcatggtcgttataaactataatcctacttaactcttcctaagaccttccagaatccagagctctcacattggaatttttgtcactaaatatttctctaattatttcagacatgttggactctccttcccaaccagatttaagttctagaccatgaagcttaatactgtaagctgaaacaagcttaatactgcagagaatacagga

SEQ ID NO: 232649 - DNA, 476 bp, Homo sapiens
tccatgccccccatctggacctgtgccagcccctcctcgggctcctcctgctccccccactctctcctccacccacgatggcccagctcctgtcagcagctacaggaggtttgaaaatcctaaatcagacctcccctgtcccagacctccctgcatctaccgtgaccctcagaataaaaccctctctcgggctaggcgtggtggcttacgcctgtaaccccaacactttgggaggctgaggcaggcgggtcacttgacgtcaggagttcgagaccgtcctggccaacgtggcgaaaccctgtctctactaaaaatacaaaaattagctgggcgtggtggcacatgactgtaatcccagctactcgggaggctgaggcaggagaatcgcttgaacccagaggcggaggttgcagtgagctgagatcccgccactgcactccagcctggatgatacagcaagactccctctcaaaaaa

SEQ ID NO: 232650 - DNA, 451 bp, Homo sapiens
cgtggtgtctggggcaccaccctcccaggtgcattgatgtgttcgccaaccaggaagcctggacatcattgttcaagtttttattgaagtttcattatataggcaccatcgattaagtcatcggccactggtgactgggctgagtcttcgatccctctcccctccctggaggcgatgggggagtaaaagctctaaccctctaatgacgtggttggttctttcgatagcccccaattgccccaattgtgaagctgtctatctaggggcctgccaggagtctcctcattagcataaactcaggtatgattgaaaggggcgtattttgaataatttcttgaatgattcaagaaattccaagaattttaggaattctcaccaggaactggagacaaagacaaaatatctatttactgttataccatagtctgtgattgacttcatctcctaatta

SEQ ID NO: 232651 - DNA, 389 bp, Homo sapiens
ctactgctagaagtttgagaaaaggtgtttgaaacaatacaagtgaactcattcaataaattaataaatggacctctaaattacaaaggatcactcttccagtgagactgctgattaattattaatttccattattttatagatacattattggttttgttcatccttttaaaatatcttcttgatttttttaatagtaaatgtaggtaatatatctagttaaattaggtgaaatgagcttcaaatgtgctttaaaatatattgtactgtacatatttaaagaaattcaaatgatgtcatgttctctctcgagtttttgtataatgctgctagtggcatattttgctttaaaataaattttcagttctaaaatctctgaagtacttctc

SEQ ID NO: 232652 - DNA, 582 bp, Homo sapiens
actatgttttagttatttaagatagaaattatgacttatgctaccctcacattcccccatactaatagatacacagagataacttatcatggatccattttttaaaatgaaatagatcaacatgtactgacctgttcagctatatatgatacattaaatggaaacaaagcaagttgcacaaagaaaattgagtgcttaagaataaattttaaaagaaatgtataaaacacatctgaggaaaactttaaagcattcttaaaaagacacaaatgaagagtttaaccacagacatctcttatattcagatagaacaagttaacataaaaatgtcagttcatcataaatttagaaatttaatgtaatcctcataaataaaccaagtttttttaatggagacatacaattgatactgagccttgtattgaaaaataaatgtgcagtaacagccaggaaaacactaacacactagagggaaggccgagttcttccagacattaaatcacagtctaaagcctccatgatgaaaagtgtcttactgacacatgaatagacagacaaaccaacagaataatacagaaagtt

SEQ ID NO: 232653 - DNA, 178 bp, Homo sapiens
aaatgtgtatttgaggatttgatcagcaaatggaacattctcagcagagggaaaatgaacacaaagatagggaagtgagaaatttaatggcatgattagaggctaacacatattttacagaggatgaaggacatgggagacgggactggctctgtaatttgcagggcctcgtgcaaga

SEQ ID NO: 232654 - DNA, 483 bp, Homo sapiens
cggctagtgcgcgccgagggctcaggggccggcgccgcgaggggctgcaggccgcgctcggccgctgtccgggccgcaggtgggagccgctgtctgggtcccagggctggatggcagccggcggcggggactgaacgcgggagggctgcagggtgcgcgccggcgaggggcttctcgttggaagctgagggacagacgtggggacccgtggctgctcggccccaccgtccagccgcagggcgagtgctgctccgtggaggtgacacggcgccaagagcggcgcgaggctttctgctggaggagggtaacggggaattcgaaggcgactgttctatgctggaggacaaggggcactgttctctcggggcttcgcgtcggcgccgaggaggggttcgctcgctgcctctgcgtcctgagctcggcctctggctcctggggccggggacgcagagaggggctggagccggtcgacccacggcccag

SEQ ID NO: 232655 - DNA, 958 bp, Homo sapiens
gtgagaccctatctcttatttaaaaaaaaaatagtaattttaaaaaaaagtatatgggaagagcagtgcaggttttatgcaaatactacaccatttttatataagggatttgtgcatctgcagagtttggtatctgggtaactaatccccagcagattcagagggacgactgtacttaagggaatgatggaagccagcctagcagagctagagaatcaaacaccagatgaggaggaactggaatcccaaggcagtttcactgtcttcatacatagttccctgggcccaatccagaagcccccaagccagcaaagctcctatgcctgctaaaccctagcacctgagagccaaagaggttttgtagagaacctggtctcttagtgatggggacatggtaccttaggagtccagtgagcaaaagaatgaacctctgattgtgcttctcatgtgtcccccaaacccaacaggttctgtttggattctgcaaagcagactcgtcagaaagttgctgtgaactggaccaacttcagcctcaagaaaaccactcctagcacagctcagtgaggccctgcccaggctgagctgcttcagggcatcctgaggccctgactgccagctgaaggcgtataatttttccctccgtgtgccccacctacccgtccaagaccctctgtgctccccaccatcctggaccaaccaaaagctgaacggatgccacactgtgctggggccccttgacctcagcagagccgcttcctggtgctacgcagcctccacactcagagcccgtggactgggctggcctaagggccagggctgatggtactgctggcccaacactgctctctttgtgtttggtttttttgtttttgtttttattttgtttttttccaattctttacttttgatactgtgaagatctttcgtgccgaaagataaagcaacatttggacacaga

SEQ ID NO: 232656 - DNA, 4603 bp, Homo sapiens
  misc_feature (29)..(29): n is a, c, g, or t
gcggtagcggcggcggcggcggcggcggnggcggcggcggcggcgcggcgtgtggagcgagggagcggcgcgagcggcggcatgacgcggaggcggagcaggccgagcggcggtgcgggcaggcgcgagcgggctcgggccgcggggccgcagaagccccaggcgcccgagcccccgccgccgccaagcctggaggcgggagcgggtgcaggccctccggaggcgccggcggagcccgaccacgacggccccagggaggatgacgaacccaacctggtgcccggcccgcaggtaggagcgagcggggagacttcggcggctcgggcgctttcaccttccccgagcgggagcgggagtggggcggggttggggatgggccatcctgccgcggctggggtagcagccttcccccgggtccggcgccgaagctttctcccccggggcgggaatggaggctggacccctctccccaaagccgaggctcggtccgcgctcctgcgactaggctgaagctgctcccctctccccgccgcctccgggcgttccggccgtacacccacactgggactgggactgggactgggctgtgatcccgaggccgcagctccgctctcggcccgccacctcccccgggcccacctgctccctcagccacaggccatctcggggctctgggactggacgactgcagcctcttccctctgcccccgggaacggctccactccgtcccctgcagcgcctgcagccgcggccccctcagcagctgtgtctcctggcgcctcctcgccatacccagcagagcagttggagcagacagccaggctgcccggaggagtttttggtggggtttctgcactgaggtggaaacccagcagaacctgcccttcttccctcccctgctccgcaaggcagcccaccccgaccttgagatcccaggtttggagaatcctgctgagagcgaacagtaggaggattccccaaagcttccagcttgccacctggaagaaggtcactttcttttgagcaaaggagataacgggaggtaccctgccaaagttcactgagaggcgggggtgacatgggccacggttgctctgggagggttgtggcactcggggctgggtggctctccctaagcttgctctgacaaaagagttttgagttggtcttttggctgagcctgcccaggaaggcaggctcctgcaggagtcttggagggtcggatgcggcgccggatgaggatgaggcgtggcggaagatgcgtttggctctgcagacactgcatcgggcagcaggggactctgggaggctggtgcagccagaaggcatggctcttgacagccttctagtagaatctctggaattgtgcatatgaagaaacagaaactcagagcaactaaacatttgcccaaatgactccaactgtaggtgtcagacaaaagaaaagaaaaggacttttaggtcccccccgcctccagccagcctgtgcagacttgctgcctgctgtgtcaccgggaacgcaaaggctgggaagaaggcccttctcaaaatggactggtgttgcagggtgagaagctgccccctgacttcatgccaaagctcgtcaagaatctcctaggcgagatgcctctgtgggtctgccagagttgccgaaagagcatggaggaagatgaaaggcagacaggtcgagaacatgcagtggcgatctccttgtcacacacatcctgcaaatcacagtcttgtggagatgactctcattcgtcctcgtcttcctcctcatcatcctcatcctcgtcctcctcttcctgccctgggaactcgggagactgggatcctagctcgttcctgtcggcacataagctctcgggcctctggaattccccacattccagtggggccatgccaggcagctctcttgggagtcctcctaccatccccggtgaggctttccccgtctcggagcaccaccagcactcagacctcactgctccccctaacagccccaccggccaccacccgcagccagcatctctaatcccgtctcaccccagctcctttggctccccaccccacccacacctgctgcccaccaccccggcagcacctttccctgcccaggcttcagagtgccctgttgctgctgccactgccccccacactccagggccatgtcagagctcccatctaccctccaccagcatgccgctcctgaagatgcccccaccattctcggggtgcagccacccctgcagcgggcactgtggtgggcactgcagtgggcctctcctcccacccccgagctctcagccactccctagcactcacagggatcccgggtgcaaggggcacaagtttgcacacagtggcctggcttgccagctgccccagccctgcgaggcagatgaggggctgggtgaggaagaggatagcagctctgagcgaagctcctgcacctcatcctccacccaccagagagatgggaagttctgtgactgctgctactgtgagttcttcggccacaatgcggcaaaaggaaaggaaatggcagagagaaagctatgattctgatgagtatgtatacgtgtgtaatcccagagaagtgaacgcttgggagtgatgaaggcagagtggaagcaaaaaggctctcagtcccccaagtgtgacagccagccgagggacaggccgtgagcacagacggcgccaggaaggaggctcagatcagagggcatgctggctctggccagggggaggaagcagtgcagaagtctcataagccacccgctgccccgacgagtcggaactataccgagatccgggagaagctccgctcgaggctgaccaggcggaaagaggagctgcccatgaaggggggcaccctgggcgggatccctggggagcccgccgtggaccaccgagatgtggatgagctgctggaattcatcaacagcacggagcccaaagtccccaacagcgccagggccgccaagcgggcccggcacaagctgaaaaagaaggaaaaggagaaggcccagttggcagcagaagctctaaagcaggcaaatcgtgtttctggaagccgggagccaaggcctgccagggagaggctcttggagtggcccgaccgggaactggatcgggtcaacagcttcctgagcagccgtctgcaggagatcaaaaacactgtcaaagactccatccgtgccagcttcagtgtgtgtgagctcagcatggacagcaatggcttctctaaggagggggctgctgagcctgagcctcagagtctacccccctcaaacctcagtggctcctcagagcagcagcctgacatcaaccttgacctgtcccctttgactttgggctcccctcagaaccacacgttacaagctccaggcgagccagccccaccatgggcagaaatgagaggcccccacccaccatggacagaggtgagggggccccctcccggtatcgtccccgagaacgggctcgtgaggagactcaacaccgtgcccaacctatcccgggtgatctgggtcaagacacccaagccgggctaccccagctccgaggagccaagctcaaaggaagttcccagttgcaagcaggagctgcctgagcctgtgtcctcaggtgggaagccacagaagggcaagaggcagggcagtcaggccaagaagagcgaggcaagcccagccccccggcccccagccagcctagaggttcccagtgccaagggccaggtcgctggccccaagcagccaggcagggtcctagagcttcccaaagtaggcagctgtgctgaggctggagaggggagccgggggagccggccaggaccaggttgggctggcagtcccaaaactgagaaggagaagggcagctcctggcgaaactggccaggcgaggccaaggcacggcctcaggagcaggagtctgtgcagcccccaggcccagcaaggccacagagcttgccccagggcaagggccgcagccgccggagccgcaacaagcaggagaagccagcctcctccttggacgatgtgttcctgcccaaggacatggacggggtggagatggatgagactgaccgagaggtggagtactttaagaggttctgtttggattctgcaaagcagactcgtcagaaagttgctgtgaactggaccaacttcagcctcaagaaaaccactcctagcacagctcagtgaggccctgcccaggctgagctgcttcagggcatcctgaggccctgactgccagctgaaggcgtataatttttccctccgtgtgccccacctacccgtccaagaccctctgtgctccccaccatcctggaccaaccaaaagctgaacggatgccacactgtgctggggccccttgacctcagcagagccgcttcctggtgctacgcagcctccacactcagagcccgtggactgggctggcctaagggccagggctgatggtactgctggcccaacactgctctctttgtgtttggtttttttgtttttgtttttattttgtttttttccaattctttacttttgatactgtgaagatctttcgtgccgaaagataaagcaacatttggacacaga

SEQ ID NO: 232657 - DNA, 1873 bp, Homo sapiens
  misc_feature (29)..(29): n is a, c, g, or t
gcggtagcggcggcggcggcggcggcggnggcggcggcggcggcgcggcgtgtggagcgagggagcggcgcgagcggcggcatgacgcggaggcggagcaggccgagcggcggtgcgggcaggcgcgagcgggctcgggccgcggggccgcagaagccccaggcgcccgagcccccgccgccgccaagcctggaggcgggagcgggtgcaggccctccggaggcgccggcggagcccgaccacgacggccccagggaggatgacgaacccaacctggtgcccggcccgcaggtaggagcgagcggggagacttcggcggctcgggcgctttcaccttccccgagcgggagcgggagtggggcggggttggggatgggccatcctgccgcggctggggtagcagccttcccccgggtccggcgccgaagctttctcccccggggcgggaatggaggctggacccctctccccaaagccgaggctcggtccgcgctcctgcgactaggctgaagctgctcccctctccccgccgcctccgggcgttccggccgtacacccacactgggactgggactgggactgggctgtgatcccgaggccgcagctccgctctcggcccgccacctcccccgggcccacctgctccctcagccacaggccatctcggggctctgggactggacgactgcagcctcttccctctgcccccgggaacggctccactccgtcccctgcagcgcctgcagccgcggccccctcagcagctgtgtctcctggcgcctcctcgccatacccagcagagcagttggagcagacagccaggctgcccggaggagtttttggtggggtttctgcactgaggtggaaacccagcagaacctgcccttcttccctcccctgctccgcaaggcagcccaccccgaccttgagatcccaggtttggagaatcctgctgagagcgaacagtaggaggattccccaaagcttccagcttgccacctggaagaaggtcactttcttttgagcaaaggagataacgggaggtaccctgccaaagttcactgagaggcgggggtgacatgggccacggttgctctgggagggttgtggcactcggggctgggtggctctccctaagcttgctctgacaaaagagttttgagttggtcttttggctgagcctgcccaggaaggcaggctcctgcaggagtcttggagggtcggatgcggcgccggatgaggatgaggcgtggcggaagatgcgtttggctctgcagacactgcatcgggcagcaggggactctgggaggctggtgcagccagaaggcatggctcttgacagccttctagtagaatctctggaattgtgcatgtgagtggggttgccgtttggggtaccttcccacaaagcctcccctgacctccccagttgcgtcaggtgccctctctgtgcccacagccctctgtgcctccctctggtagcactcccctttctgtgatgaaacattgtgttgatatgtctgttgcctgccctggactgtgaactccacagggacacaggctatgccatctttctctgatcttccacgcctcgcccagggccttgctaacacagaataaaaataactaggtgaatgagagagaaaatgaatcggtccagaacccgtgcttattgtaacccagttttcatgctgatttcctttgtgtctcagatcacaataaggtttttaattaatgtctcctatcctaggctgacacttccgtaggagactccccaggttggacccccaacccctactgggtctagcttccaaccccaaagctgcttcccccaccagcctactctgggacccccgtgggagtgctgttatcc

SEQ ID NO: 232658 - DNA, 4265 bp, Homo sapiens
  misc_feature (29)..(29): n is a, c, g, or t
gcggtagcggcggcggcggcggcggcggnggcggcggcggcggcgcggcgtgtggagcgagggagcggcgcgagcggcggcatgacgcggaggcggagcaggccgagcggcggtgcgggcaggcgcgagcgggctcgggccgcggggccgcagaagccccaggcgcccgagcccccgccgccgccaagcctggaggcgggagcgggtgcaggccctccggaggcgccggcggagcccgaccacgacggccccagggaggatgacgaacccaacctggtgcccggcccgcaggtaggagcgagcggggagacttcggcggctcgggcgctttcaccttccccgagcgggagcgggagtggggcggggttggggatgggccatcctgccgcggctggggtagcagccttcccccgggtccggcgccgaagctttctcccccggggcgggaatggaggctggacccctctccccaaagccgaggctcggtccgcgctcctgcgactaggctgaagctgctcccctctccccgccgcctccgggcgttccggccgtacacccacactgggactgggactgggactgggctgtgatcccgaggccgcagctccgctctcggcccgccacctcccccgggcccacctgctccctcagccacaggccatctcggggctctgggactggacgactgcagcctcttccctctgcccccgggaacggctccactccgtcccctgcagcgcctgcagccgcggccccctcagcagctgtgtctcctggcgcctcctcgccatacccagcagagcagttggagcagacagccaggctgcccggaggagtttttggtggggtttctgcactgaggtggaaacccagcagaacctgcccttcttccctcccctgctccgcaaggcagcccaccccgaccttgagatcccaggtttggagaatcctgctgagagcgaacagtaggaggattccccaaagcttccagcttgccacctggaagaaggtcactttcttttgagcaaaggagataacgggaggtaccctgccaaagttcactgagaggcgggggtgacatgggccacggttgctctgggagggttgtggcactcggggctgggtggctctccctaagcttgctctgacaaaagagttttgagttggtcttttggctgagcctgcccaggaaggcaggctcctgcaggagtcttggagggtcggatgcggcgccggatgaggatgaggcgtggcggaagatgcgtttggctctgcagacactgcatcgggcagcaggggactctgggaggctggtgcagccagaaggcatggctcttgacagccttctagtagaatctctggaattgtgcatgtcccccccgcctccagccagcctgtgcagacttgctgcctgctgtgtcaccgggaacgcaaaggctgggaagaaggcccttctcaaaatggactggtgttgcagggtgagaagctgccccctgacttcatgccaaagctcgtcaagaatctcctaggcgagatgcctctgtgggtctgccagagttgccgaaagagcatggaggaagatgaaaggcagacaggtcgagaacatgcagtggcgatctccttgtcacacacatcctgcaaatcacagtcttgtggagatgactctcattcgtcctcgtcttcctcctcatcatcctcatcctcgtcctcctcttcctgccctgggaactcgggagactgggatcctagctcgttcctgtcggcacataagctctcgggcctctggaattccccacattccagtggggccatgccaggcagctctcttgggagtcctcctaccatccccggtgaggctttccccgtctcggagcaccaccagcactcagacctcactgctccccctaacagccccaccggccaccacccgcagccagcatctctaatcccgtctcaccccagctcctttggctccccaccccacccacacctgctgcccaccaccccggcagcacctttccctgcccaggcttcagagtgccctgttgctgctgccactgccccccacactccagggccatgtcagagctcccatctaccctccaccagcatgccgctcctgaagatgcccccaccattctcggggtgcagccacccctgcagcgggcactgtggtgggcactgcagtgggcctctcctcccacccccgagctctcagccactccctagcactcacagggatcccgggtgcaaggggcacaagtttgcacacagtggcctggcttgccagctgccccagccctgcgaggcagatgaggggctgggtgaggaagaggatagcagctctgagcgaagctcctgcacctcatcctccacccaccagagagatgggaagttctgtgactgctgctactgtgagttcttcggccacaatgcgccacccgctgccccgacgagtcggaactataccgagatccgggagaagctccgctcgaggctgaccaggcggaaagaggagctgcccatgaaggggggcaccctgggcgggatccctggggagcccgccgtggaccaccgagatgtggatgagctgctggaattcatcaacagcacggagcccaaagtccccaacagcgccagggccgccaagcgggcccggcacaagctgaaaaagaaggaaaaggagaaggcccagttggcagcagaagctctaaagcaggcaaatcgtgtttctggaagccgggagccaaggcctgccagggagaggctcttggagtggcccgaccgggaactggatcgggtcaacagcttcctgagcagccgtctgcaggagatcaaaaacactgtcaaagactccatccgtgccagcttcagtgtgtgtgagctcagcatggacagcaatggcttctctaaggagggggctgctgagcctgagcctcagagtctacccccctcaaacctcagtggctcctcagagcagcagcctgacatcaaccttgacctgtcccctttgactttgggctcccctcagaaccacacgttacaagctccaggcgagccagccccaccatgggcagaaatgagaggcccccacccaccatggacagaggtgagggggccccctcccggtatcgtccccgagaacgggctcgtgaggagactcaacaccgtgcccaacctatcccgggtgatctgggtcaagacacccaagccgggctaccccagctccgaggagccaagctcaaaggaagttcccagttgcaagcaggagctgcctgagcctgtgtcctcaggtgggaagccacagaagggcaagaggcagggcagtcaggccaagaagagcgaggcaagcccagccccccggcccccagccagcctagaggttcccagtgccaagggccaggtcgctggccccaagcagccaggcagggtcctagagcttcccaaagtaggcagctgtgctgaggctggagaggggagccgggggagccggccaggaccaggttgggctggcagtcccaaaactgagaaggagaagggcagctcctggcgaaactggccaggcgaggccaaggcacggcctcaggagcaggagtctgtgcagcccccaggcccagcaaggccacagagcttgccccagggcaagggccgcagccgccggagccgcaacaagcaggagaagccagcctcctccttggacgatgtgttcctgcccaaggacatggacggggtggagatggatgagactgaccgagaggtggagtactttaagaggttctgtttggattctgcaaagcagactcgtcagaaagttgctgtgaactggaccaacttcagcctcaagaaaaccactcctagcacagctcagtgaggccctgcccaggctgagctgcttcagggcatcctgaggccctgactgccagctgaaggcgtataatttttccctccgtgtgccccacctacccgtccaagaccctctgtgctccccaccatcctggaccaaccaaaagctgaacggatgccacactgtgctggggccccttgacctcagcagagccgcttcctggtgctacgcagcctccacactcagagcccgtggactgggctggcctaagggccagggctgatggtactgctggcccaacactgctctctttgtgtttggtttttttgtttttgtttttattttgtttttttccaattctttacttttgatactgtgaagatctttcgtgccgaaagataaagcaacatttggacacaga

SEQ ID NO: 232659 - DNA, 4326 bp, Homo sapiens
  misc_feature (29)..(29): n is a, c, g, or t
gcggtagcggcggcggcggcggcggcggnggcggcggcggcggcgcggcgtgtggagcgagggagcggcgcgagcggcggcatgacgcggaggcggagcaggccgagcggcggtgcgggcaggcgcgagcgggctcgggccgcggggccgcagaagccccaggcgcccgagcccccgccgccgccaagcctggaggcgggagcgggtgcaggccctccggaggcgccggcggagcccgaccacgacggccccagggaggatgacgaacccaacctggtgcccggcccgcaggtaggagcgagcggggagacttcggcggctcgggcgctttcaccttccccgagcgggagcgggagtggggcggggttggggatgggccatcctgccgcggctggggtagcagccttcccccgggtccggcgccgaagctttctcccccggggcgggaatggaggctggacccctctccccaaagccgaggctcggtccgcgctcctgcgactaggctgaagctgctcccctctccccgccgcctccgggcgttccggccgtacacccacactgggactgggactgggactgggctgtgatcccgaggccgcagctccgctctcggcccgccacctcccccgggcccacctgctccctcagccacaggccatctcggggctctgggactggacgactgcagcctcttccctctgcccccgggaacggctccactccgtcccctgcagcgcctgcagccgcggccccctcagcagctgtgtctcctggcgcctcctcgccatacccagcagagcagttggagcagacagccaggctgcccggaggagtttttggtggggtttctgcactgaggtggaaacccagcagaacctgcccttcttccctcccctgctccgcaaggcagcccaccccgaccttgagatcccaggtttggagaatcctgctgagagcgaacagtaggaggattccccaaagcttccagcttgccacctggaagaaggtcactttcttttgagcaaaggagataacgggaggtaccctgccaaagttcactgagaggcgggggtgacatgggccacggttgctctgggagggttgtggcactcggggctgggtggctctccctaagcttgctctgacaaaagagttttgagttggtcttttggctgagcctgcccaggaaggcaggctcctgcaggagtcttggagggtcggatgcggcgccggatgaggatgaggcgtggcggaagatgcgtttggctctgcagacactgcatcgggcagcaggggactctgggaggctggtgcagccagaaggcatggctcttgacagccttctagtagaatctctggaattgtgcatggcagaagaggaaagaaactaacgggtattgagcacctactttgtgccaggcccaggccaggtcccccccgcctccagccagcctgtgcagacttgctgcctgctgtgtcaccgggaacgcaaaggctgggaagaaggcccttctcaaaatggactggtgttgcagggtgagaagctgccccctgacttcatgccaaagctcgtcaagaatctcctaggcgagatgcctctgtgggtctgccagagttgccgaaagagcatggaggaagatgaaaggcagacaggtcgagaacatgcagtggcgatctccttgtcacacacatcctgcaaatcacagtcttgtggagatgactctcattcgtcctcgtcttcctcctcatcatcctcatcctcgtcctcctcttcctgccctgggaactcgggagactgggatcctagctcgttcctgtcggcacataagctctcgggcctctggaattccccacattccagtggggccatgccaggcagctctcttgggagtcctcctaccatccccggtgaggctttccccgtctcggagcaccaccagcactcagacctcactgctccccctaacagccccaccggccaccacccgcagccagcatctctaatcccgtctcaccccagctcctttggctccccaccccacccacacctgctgcccaccaccccggcagcacctttccctgcccaggcttcagagtgccctgttgctgctgccactgccccccacactccagggccatgtcagagctcccatctaccctccaccagcatgccgctcctgaagatgcccccaccattctcggggtgcagccacccctgcagcgggcactgtggtgggcactgcagtgggcctctcctcccacccccgagctctcagccactccctagcactcacagggatcccgggtgcaaggggcacaagtttgcacacagtggcctggcttgccagctgccccagccctgcgaggcagatgaggggctgggtgaggaagaggatagcagctctgagcgaagctcctgcacctcatcctccacccaccagagagatgggaagttctgtgactgctgctactgtgagttcttcggccacaatgcgccacccgctgccccgacgagtcggaactataccgagatccgggagaagctccgctcgaggctgaccaggcggaaagaggagctgcccatgaaggggggcaccctgggcgggatccctggggagcccgccgtggaccaccgagatgtggatgagctgctggaattcatcaacagcacggagcccaaagtccccaacagcgccagggccgccaagcgggcccggcacaagctgaaaaagaaggaaaaggagaaggcccagttggcagcagaagctctaaagcaggcaaatcgtgtttctggaagccgggagccaaggcctgccagggagaggctcttggagtggcccgaccgggaactggatcgggtcaacagcttcctgagcagccgtctgcaggagatcaaaaacactgtcaaagactccatccgtgccagcttcagtgtgtgtgagctcagcatggacagcaatggcttctctaaggagggggctgctgagcctgagcctcagagtctacccccctcaaacctcagtggctcctcagagcagcagcctgacatcaaccttgacctgtcccctttgactttgggctcccctcagaaccacacgttacaagctccaggcgagccagccccaccatgggcagaaatgagaggcccccacccaccatggacagaggtgagggggccccctcccggtatcgtccccgagaacgggctcgtgaggagactcaacaccgtgcccaacctatcccgggtgatctgggtcaagacacccaagccgggctaccccagctccgaggagccaagctcaaaggaagttcccagttgcaagcaggagctgcctgagcctgtgtcctcaggtgggaagccacagaagggcaagaggcagggcagtcaggccaagaagagcgaggcaagcccagccccccggcccccagccagcctagaggttcccagtgccaagggccaggtcgctggccccaagcagccaggcagggtcctagagcttcccaaagtaggcagctgtgctgaggctggagaggggagccgggggagccggccaggaccaggttgggctggcagtcccaaaactgagaaggagaagggcagctcctggcgaaactggccaggcgaggccaaggcacggcctcaggagcaggagtctgtgcagcccccaggcccagcaaggccacagagcttgccccagggcaagggccgcagccgccggagccgcaacaagcaggagaagccagcctcctccttggacgatgtgttcctgcccaaggacatggacggggtggagatggatgagactgaccgagaggtggagtactttaagaggttctgtttggattctgcaaagcagactcgtcagaaagttgctgtgaactggaccaacttcagcctcaagaaaaccactcctagcacagctcagtgaggccctgcccaggctgagctgcttcagggcatcctgaggccctgactgccagctgaaggcgtataatttttccctccgtgtgccccacctacccgtccaagaccctctgtgctccccaccatcctggaccaaccaaaagctgaacggatgccacactgtgctggggccccttgacctcagcagagccgcttcctggtgctacgcagcctccacactcagagcccgtggactgggctggcctaagggccagggctgatggtactgctggcccaacactgctctctttgtgtttggtttttttgtttttgtttttattttgtttttttccaattctttacttttgatactgtgaagatctttcgtgccgaaagataaagcaacatttggacacaga

SEQ ID NO: 232660 - DNA, 3175 bp, Homo sapiens
aacgggtattgagcacctacttgtccaggcccaggccaggtccccccgcctccagccagcctgtgcagacttgctgcctgctgtgtcaccgggaacgcaaaggctgggaagaaggcgggggggacatgcacaattccagagattctactagaaggctgtcaagagccatgccttctggctgcaccagcctcccagagtcccctgctgcccgatgcagtgtcggcagaagaggaaagaaactaacgggtattgagcacctactttgtgccaggcccaggccaggtcccccccgcctccagccagcctgtgcagacttgctgcctgctgtgtcaccgggaacgcaaaggctgggaagaaggcccttctcaaaatggactggtgttgcagggtgagaagctgccccctgacttcatgccaaagctcgtcaagaatctcctaggcgagatgcctctgtgggtctgccagagttgccgaaagagcatggaggaagatgaaaggcagacaggtcgagaacatgcagtggcgatctccttgtcacacacatcctgcaaatcacagtcttgtggagatgactctcattcgtcctcgtcttcctcctcatcatcctcatcctcgtcctcctcttcctgccctgggaactcgggagactgggatcctagctcgttcctgtcggcacataagctctcgggcctctggaattccccacattccagtggggccatgccaggcagctctcttgggagtcctcctaccatccccggtgaggctttccccgtctcggagcaccaccagcactcagacctcactgctccccctaacagccccaccggccaccacccgcagccagcatctctaatcccgtctcaccccagctcctttggctccccaccccacccacacctgctgcccaccaccccggcagcacctttccctgcccaggcttcagagtgccctgttgctgctgccactgccccccacactccagggccatgtcagagctcccatctaccctccaccagcatgccgctcctgaagatgcccccaccattctcggggtgcagccacccctgcagcgggcactgtggtgggcactgcagtgggcctctcctcccacccccgagctctcagccactccctagcactcacagggatcccgggtgcaaggggcacaagtttgcacacagtggcctggcttgccagctgccccagccctgcgaggcagatgaggggctgggtgaggaagaggatagcagctctgagcgaagctcctgcacctcatcctccacccaccagagagatgggaagttctgtgactgctgctactgtgagttcttcggccacaatgcgccacccgctgccccgacgagtcggaactataccgagatccgggagaagctccgctcgaggctgaccaggcggaaagaggagctgcccatgaaggggggcaccctgggcgggatccctggggagcccgccgtggaccaccgagatgtggatgagctgctggaattcatcaacagcacggagcccaaagtccccaacagcgccagggccgccaagcgggcccggcacaagctgaaaaagaaggaaaaggagaaggcccagttggcagcagaagctctaaagcaggcaaatcgtgtttctggaagccgggagccaaggcctgccagggagaggctcttggagtggcccgaccgggaactggatcgggtcaacagcttcctgagcagccgtctgcaggagatcaaaaacactgtcaaagactccatccgtgccagcttcagtgtgtgtgagctcagcatggacagcaatggcttctctaaggagggggctgctgagcctgagcctcagagtctacccccctcaaacctcagtggctcctcagagcagcagcctgacatcaaccttgacctgtcccctttgactttgggctcccctcagaaccacacgttacaagctccaggcgagccagccccaccatgggcagaaatgagaggcccccacccaccatggacagaggtgagggggccccctcccggtatcgtccccgagaacgggctcgtgaggagactcaacaccgtgcccaacctatcccgggtgatctgggtcaagacacccaagccgggctaccccagctccgaggagccaagctcaaaggaagttcccagttgcaagcaggagctgcctgagcctgtgtcctcaggtgggaagccacagaagggcaagaggcagggcagtcaggccaagaagagcgaggcaagcccagccccccggcccccagccagcctagaggttcccagtgccaagggccaggtcgctggccccaagcagccaggcagggtcctagagcttcccaaagtaggcagctgtgctgaggctggagaggggagccgggggagccggccaggaccaggttgggctggcagtcccaaaactgagaaggagaagggcagctcctggcgaaactggccaggcgaggccaaggcacggcctcaggagcaggagtctgtgcagcccccaggcccagcaaggccacagagcttgccccagggcaagggccgcagccgccggagccgcaacaagcaggagaagccagcctcctccttggacgatgtgttcctgcccaaggacatggacggggtggagatggatgagactgaccgagaggtggagtactttaagaggttctgtttggattctgcaaagcagactcgtcagaaagttgctgtgaactggaccaacttcagcctcaagaaaaccactcctagcacagctcagtgaggccctgcccaggctgagctgcttcagggcatcctgaggccctgactgccagctgaaggcgtataatttttccctccgtgtgccccacctacccgtccaagaccctctgtgctccccaccatcctggaccaaccaaaagctgaacggatgccacactgtgctggggccccttgacctcagcagagccgcttcctggtgctacgcagcctccacactcagagcccgtggactgggctggcctaagggccagggctgatggtactgctggcccaacactgctctctttgtgtttggtttttttgtttttgtttttattttgtttttttccaattctttacttttgatactgtgaagatctttcgtgccgaaagataaagcaacatttggacacaga

SEQ ID NO: 232661 - DNA, 4372 bp, Homo sapiens
  misc_feature (29)..(29): n is a, c, g, or t
gcggtagcggcggcggcggcggcggcggnggcggcggcggcggcgcggcgtgtggagcgagggagcggcgcgagcggcggcatgacgcggaggcggagcaggccgagcggcggtgcgggcaggcgcgagcgggctcgggccgcggggccgcagaagccccaggcgcccgagcccccgccgccgccaagcctggaggcgggagcgggtgcaggccctccggaggcgccggcggagcccgaccacgacggccccagggaggatgacgaacccaacctggtgcccggcccgcaggtaggagcgagcggggagacttcggcggctcgggcgctttcaccttccccgagcgggagcgggagtggggcggggttggggatgggccatcctgccgcggctggggtagcagccttcccccgggtccggcgccgaagctttctcccccggggcgggaatggaggctggacccctctccccaaagccgaggctcggtccgcgctcctgcgactaggctgaagctgctcccctctccccgccgcctccgggcgttccggccgtacacccacactgggactgggactgggactgggctgtgatcccgaggccgcagctccgctctcggcccgccacctcccccgggcccacctgctccctcagccacaggccatctcggggctctgggactggacgactgcagcctcttccctctgcccccgggaacggctccactccgtcccctgcagcgcctgcagccgcggccccctcagcagctgtgtctcctggcgcctcctcgccatacccagcagagcagttggagcagacagccaggctgcccggaggagtttttggtggggtttctgcactgaggtggaaacccagcagaacctgcccttcttccctcccctgctccgcaaggcagcccaccccgaccttgagatcccaggtttggagaatcctgctgagagcgaacagtaggaggattccccaaagcttccagcttgccacctggaagaaggtcactttcttttgagcaaaggagataacgggaggtaccctgccaaagttcactgagaggcgggggtgacatgggccacggttgctctgggagggttgtggcactcggggctgggtggctctccctaagcttgctctgacaaaagagttttgagttggtcttttggctgagcctgcccaggaaggcaggctcctgcaggagtcttggagggtcggatgcggcgccggatgaggatgaggcgtggcggaagatgcgtttggctctgcagacactgcatcgggcagcaggggactctgggaggctggtgcagccagaaggcatggctcttgacagccttctagtagaatctctggaattgtgcatgtcccccccgcctccagccagcctgtgcagacttgctgcctgctgtgtcaccgggaacgcaaaggctgggaagaaggcccttctcaaaatggactggtgttgcagggtgagaagctgccccctgacttcatgccaaagctcgtcaagaatctcctaggcgagatgcctctgtgggtctgccagagttgccgaaagagcatggaggaagatgaaaggcagacaggtcgagaacatgcagtggcgatctccttgtcacacacatcctgcaaatcacagtcttgtggagatgactctcattcgtcctcgtcttcctcctcatcatcctcatcctcgtcctcctcttcctgccctgggaactcgggagactgggatcctagctcgttcctgtcggcacataagctctcgggcctctggaattccccacattccagtggggccatgccaggcagctctcttgggagtcctcctaccatccccggtgaggctttccccgtctcggagcaccaccagcactcagacctcactgctccccctaacagccccaccggccaccacccgcagccagcatctctaatcccgtctcaccccagctcctttggctccccaccccacccacacctgctgcccaccaccccggcagcacctttccctgcccaggcttcagagtgccctgttgctgctgccactgccccccacactccagggccatgtcagagctcccatctaccctccaccagcatgccgctcctgaagatgcccccaccattctcggggtgcagccacccctgcagcgggcactgtggtgggcactgcagtgggcctctcctcccacccccgagctctcagccactccctagcactcacagggatcccgggtgcaaggggcacaagtttgcacacagtggcctggcttgccagctgccccagccctgcgaggcagatgaggggctgggtgaggaagaggatagcagctctgagcgaagctcctgcacctcatcctccacccaccagagagatgggaagttctgtgactgctgctactgtgagttcttcggccacaatgcgccacccgctgccccgacgagtcggaactataccgagatccgggagaagctccgctcgaggctgaccaggcggaaagaggagctgcccatgaaggggggcaccctgggcgggatccctggggagcccgccgtggaccaccgagatgtggatgagctgctggaattcatcaacagcacggagcccaaagtccccaacagcgccagggccgccaagcgggcccggcacaagctgaaaaagaaggaaaaggagaaggcccagttggcagcagaagctctaaagcaggcaaatcgtgtttctggaagccgggagccaaggcctgccagggagaggctcttggagtggcccgaccgggaactggatcgggtcaacagcttcctgagcagccgtctgcaggagatcaaaaacactgtcaaagactccatccgtgccagcttcagtgtgtgtgagctcagcatggacagcaatggcttctctaaggagggggctgctgagcctgagcctcagagtctacccccctcaaacctcagtggctcctcagagcagcagcctgacatcaaccttgacctgtcccctttgactttgggctcccctcagaaccacacgttacaagctccaggcgagccagccccaccatgggcagaaatgagaggcccccacccaccatggacagaggtgagggggccccctcccggtatcgtccccgagaacgggctcgtgaggagactcaacaccgtgcccaacctatcccgggtgatctgggtcaagacacccaagccgggctaccccagctccgaggagccaagctcaaaggaagttcccagttgcaagcaggagctgcctgagcctgtgtcctcaggtgggaagccacagaagggcaagaggcagggcagtcaggccaagaagagcgaggcaagcccagccccccggcccccagccagcctagaggttcccagtgccaagggccaggtcgctggccccaagcagccaggcagggtcctagagcttcccaaagtaggcagctgtgctgaggctggagaggggagccgggggagccggccaggaccaggttgggctggcagtcccaaaactgagaaggagaagggcagctcctggcgaaactggccaggcgaggccaaggcacggcctcaggagcaggagtctgtgcagcccccaggcccagcaaggccacagagcttgccccagggcaagggccgcagccgccggagccgcaacaagcaggagaagccagcctcctccttggacgatgtgttcctgcccaaggacatggacggggtggagatggatgagactgaccgagaggtggagtactttaagagcactttgggaggccgaggcgggtggatcacctgagatcaggagttcaagaccagcctggccaagttggtgaaaccccgtctctactaaaaatagaaaaataaggcaggttctgtttggattctgcaaagcagactcgtcagaaagttgctgtgaactggaccaacttcagcctcaagaaaaccactcctagcacagctcagtgaggccctgcccaggctgagctgcttcagggcatcctgaggccctgactgccagctgaaggcgtataatttttccctccgtgtgccccacctacccgtccaagaccctctgtgctccccaccatcctggaccaaccaaaagctgaacggatgccacactgtgctggggccccttgacctcagcagagccgcttcctggtgctacgcagcctccacactcagagcccgtggactgggctggcctaagggccagggctgatggtactgctggcccaacactgctctctttgtgtttggtttttttgtttttgtttttattttgtttttttccaattctttacttttgatactgtgaagatctttcgtgccgaaagataaagcaacatttggacacaga

SEQ ID NO: 232662 - DNA, 4588 bp, Homo sapiens
  misc_feature (29)..(29): n is a, c, g, or t
gcggtagcggcggcggcggcggcggcggnggcggcggcggcggcgcggcgtgtggagcgagggagcggcgcgagcggcggcatgacgcggaggcggagcaggccgagcggcggtgcgggcaggcgcgagcgggctcgggccgcggggccgcagaagccccaggcgcccgagcccccgccgccgccaagcctggaggcgggagcgggtgcaggccctccggaggcgccggcggagcccgaccacgacggccccagggaggatgacgaacccaacctggtgcccggcccgcaggtaggagcgagcggggagacttcggcggctcgggcgctttcaccttccccgagcgggagcgggagtggggcggggttggggatgggccatcctgccgcggctggggtagcagccttcccccgggtccggcgccgaagctttctcccccggggcgggaatggaggctggacccctctccccaaagccgaggctcggtccgcgctcctgcgactaggctgaagctgctcccctctccccgccgcctccgggcgttccggccgtacacccacactgggactgggactgggactgggctgtgatcccgaggccgcagctccgctctcggcccgccacctcccccgggcccacctgctccctcagccacaggccatctcggggctctgggactggacgactgcagcctcttccctctgcccccgggaacggctccactccgtcccctgcagcgcctgcagccgcggccccctcagcagctgtgtctcctggcgcctcctcgccatacccagcagagcagttggagcagacagccaggctgcccggaggagtttttggtggggtttctgcactgaggtggaaacccagcagaacctgcccttcttccctcccctgctccgcaaggcagcccaccccgaccttgagatcccaggtttggagaatcctgctgagagcgaacagtaggaggattccccaaagcttccagcttgccacctggaagaaggtcactttcttttgagcaaaggagataacgggaggtaccctgccaaagttcactgagaggcgggggtgacatgggccacggttgctctgggagggttgtggcactcggggctgggtggctctccctaagcttgctctgacaaaagagttttgagttggtcttttggctgagcctgcccaggaaggcaggctcctgcaggagtcttggagggtcggatgcggcgccggatgaggatgaggcgtggcggaagatgcgtttggctctgcagacactgcatcgggcagcaggggactctgggaggctggtgcagccagaaggcatggctcttgacagccttctagtagaatctctggaattgtgcatgtcccccccgcctccagccagcctgtgcagacttgctgcctgctgtgtcaccgggaacgcaaaggctgggaagaaggcccttctcaaaatggactggtgttgcagggtgagaagctgccccctgacttcatgccaaagctcgtcaagaatctcctaggcgagatgcctctgtgggtctgccagagttgccgaaagagcatggaggaagatgaaaggcagacaggtcgagaacatgcagtggcgatctccttgtcacacacatcctgcaaatcacagtcttgtggagatgactctcattcgtcctcgtcttcctcctcatcatcctcatcctcgtcctcctcttcctgccctgggaactcgggagactgggatcctagctcgttcctgtcggcacataagctctcgggcctctggaattccccacattccagtggggccatgccaggcagctctcttgggagtcctcctaccatccccggtgaggctttccccgtctcggagcaccaccagcactcagacctcactgctccccctaacagccccaccggccaccacccgcagccagcatctctaatcccgtctcaccccagctcctttggctccccaccccacccacacctgctgcccaccaccccggcagcacctttccctgcccaggcttcagagtgccctgttgctgctgccactgccccccacactccagggccatgtcagagctcccatctaccctccaccagcatgccgctcctgaagatgcccccaccattctcggggtgcagccacccctgcagcgggcactgtggtgggcactgcagtgggcctctcctcccacccccgagctctcagccactccctagcactcacagggatcccgggtgcaaggggcacaagtttgcacacagtggcctggcttgccagctgccccagccctgcgaggcagatgaggggctgggtgaggaagaggatagcagctctgagcgaagctcctgcacctcatcctccacccaccagagagatgggaagttctgtgactgctgctactgtgagttcttcggccacaatgcgccacccgctgccccgacgagtcggaactataccgagatccgggagaagctccgctcgaggctgaccaggcggaaagaggagctgcccatgaaggggggcaccctgggcgggatccctggggagcccgccgtggaccaccgagatgtggatgagctgctggaattcatcaacagcacggagcccaaagtccccaacagcgccagggccgccaagcgggcccggcacaagctgaaaaagaaggaaaaggagaaggcccagttggcagcagaagctctaaagcaggcaaatcgtgtttctggaagccgggagccaaggcctgccagggagaggctcttggagtggcccgaccgggaactggatcgggtcaacagcttcctgagcagccgtctgcaggagatcaaaaacactgtcaaagactccatccgtgccagcttcagtgtgtgtgagctcagcatggacagcaatggcttctctaaggagggggctgctgagcctgagcctcagagtctacccccctcaaacctcagtggctcctcagagcagcagcctgacatcaaccttgacctgtcccctttgactttgggctcccctcagaaccacacgttacaagctccaggcgagccagccccaccatgggcagaaatgagaggcccccacccaccatggacagaggtgagggggccccctcccggtatcgtccccgagaacgggctcgtgaggagactcaacaccgtgcccaacctatcccgggtgatctgggtcaagacacccaagccgggctaccccagctccgaggagccaagctcaaaggaagttcccagttgcaagcaggagctgcctgagcctgtgtcctcaggtgggaagccacagaagggcaagaggcagggcagtcaggccaagaagagcgaggcaagcccagccccccggcccccagccagcctagaggttcccagtgccaagggccaggtcgctggccccaagcagccaggcagggtcctagagcttcccaaagtaggcagctgtgctgaggctggagaggggagccgggggagccggccaggaccaggttgggctggcagtcccaaaactgagaaggagaagggcagctcctggcgaaactggccaggcgaggccaaggcacggcctcaggagcaggagtctgtgcagcccccaggcccagcaaggccacagagcttgccccagggcaagggccgcagccgccggagccgcaacaagcaggagaagccagcctcctccttggacgatgtgttcctgcccaaggacatggacggggtggagatggatgagactgaccgagaggtggagtactttaagaggttctgtttggattctgcaaagcagactcgtcagaaagttgctgtgaactggaccaacttcagcctcaagaaaaccactcctagcacagctcagtgaggccctgcccaggctgagctgcttcagggcatcctgaggccctgactgccagctgaaggcgtataatttttccctccgtgtgccccacctacccgtccaagaccctctgtgctccccaccatcctggaccaaccaaaagctgaacggatgccacactgtgctggggccccttgacctcagcagagccgcttcctggtgctacgcagcctccacactcagagcccgtggactgggctggcctaagggccagggctgatggtactgctggcccaacactgctctctttgtgtttggtttttttgtttttgtttttattttgtttttttccaattctttacttttgatactgtgaagatctttcgtgccgaaagataaagcaacatttggacacagagttggcatgttggtgatttgtgggtctgggcggggagggagttgagggtgtgctcagaagcatgggctctcccttagtcactaaccctagcatgcaccatgcatcagcagtttggtgctattgtcccattttacaggtgaggaaactaaagccgataggaaagtgactcagctcaacttagtctggctgattagcattgagcgcagactggtatgattatggcatctgtgcccttttctccttttgggaggtctctggtatgtgagcctggggcagccccttccccactctttcctgtttccctctttgcaagatgggtgagt

SEQ ID NO: 232663 - DNA, 537 bp, Homo sapiens
tgtaatttcagcactttgggaggccaaggcaggcggatcacttgaggttctgtttggattctgcaaagcagactcgtcagaaagttgctgtgaactggaccaacttcagcctcaagaaaaccactcctagcacagctcagtgaggccctgcccaggctgagctgcttcagggcatcctgaggccctgactgccagctgaaggcgtataatttttccctccgtgtgccccacctacccgtccaagaccctctgtgctccccaccatcctggaccaaccaaaagctgaacggatgccacactgtgctggggccccttgacctcagcagagccgcttcctggtgctacgcagcctccacactcagagcccgtggactgggctggcctaagggccagggctgatggtactgctggcccaacactgctctctttgtgtttggtttttttgtttttgtttttattttgtttttttccaattctttacttttgatactgtgaagatctttcgtgccgaaagataaagcaacatttggacacaga

SEQ ID NO: 232664 - DNA, 3596 bp, Homo sapiens
  misc_feature (29)..(29): n is a, c, g, or t
gcggtagcggcggcggcggcggcggcggnggcggcggcggcggcgcggcgtgtggagcgagggagcggcgcgagcggcggcatgacgcggaggcggagcaggccgagcggcggtgcgggcaggcgcgagcgggctcgggccgcggggccgcagaagccccaggcgcccgagcccccgccgccgccaagcctggaggcgggagcgggtgcaggccctccggaggcgccggcggagcccgaccacgacggccccagggaggatgacgaacccaacctggtgcccggcccgcaggtaggagcgagcggggagacttcggcggctcgggcgctttcaccttccccgagcgggagcgggagtggggcggggttggggatgggccatcctgccgcggctggggtagcagccttcccccgggtccggcgccgaagctttctcccccggggcgggaatggaggctggacccctctccccaaagccgaggctcggtccgcgctcctgcgactaggctgaagctgctcccctctccccgccgcctccgggcgttccggccgtacacccacactgggactgggactgggactgggctgtgatcccgaggccgcagctccgctctcggcccgccacctcccccgggcccacctgctccctcagccacaggccatctcggggctctgggactggacgactgcagcctcttccctctgcccccgggaacggctccactccgtcccctgcagcgcctgcagccgcggccccctcagcagctgtgtctcctggcgcctcctcgccatacccagcagagcagttggagcagacagccaggctgcccggaggagtttttggtggggtttctgcactgaggtggaaacccagcagaacctgcccttcttccctcccctgctccgcaaggcagcccaccccgaccttgagatcccaggtttggagaatcctgctgagagcgaacagtaggaggattccccaaagcttccagcttgccacctggaagaaggtcactttcttttgagcaaaggagataacgggaggtaccctgccaaagttcactgagaggcgggggtgacatgggccacggttgctctgggagggttgtggcactcggggctgggtggctctccctaagcttgctctgacaaaagagttttgagttggtcttttggctgagcctgcccaggaaggcaggctcctgcaggagtcttggagggtcggatgcggcgccggatgaggatgaggcgtggcggaagatgcgtttggctctgcagacactgcatcgggcagcaggggactctgggaggctggtgcagccagaaggcatggctcttgacagccttctagtagaatctctggaattgtgcatgtcccccccgcctccagccagcctgtgcagacttgctgcctgctgtgtcaccgggaacgcaaaggctgggaagaaggcccttctcaaaatggactggtgttgcagggtgagaagctgccccctgacttcatgccaaagctcgtcaagaatctcctaggcgagatgcctctgtgggtctgccagagttgccgaaagagcatggaggaagatgaaaggcagacaggtcgagaacatgcagtggcgatctccttgtcacacacatcctgcaaatcacagtcttgtggagatgactctcattcgtcctcgtcttcctcctcatcatcctcatcctcgtcctcctcttcctgccctgggaactcgggagactgggatcctagctcgttcctgtcggcacataagctctcgggcctctggaattccccacattccagtggggccatgccaggcagctctcttgggagtcctcctaccatccccggtgaggctttccccgtctcggagcaccaccagcactcagacctcactgctccccctaacagccccaccggccaccacccgcagccagcatctctaatcccgtctcaccccagctcctttggctccccaccccacccacacctgctgcccaccaccccggcagcacctttccctgcccaggcttcagagtgccctgttgctgctgccactgccccccacactccagggccatgtcagagctcccatctaccctccaccagcatgccgctcctgaagatgcccccaccattctcggggtgcagccacccctgcagcgggcactgtggtgggcactgcagtgggcctctcctcccacccccgagctctcagccactccctagcactcacagggatcccgggtgcaaggggcacaagtttgcacacagtggcctggcttgccagctgccccagccctgcgaggcagatgaggggctgggtgaggaagaggatagcagctctgagcgaagctcctgcacctcatcctccacccaccagagagatgggaagttctgtgactgctgctactgtgagttcttcggccacaatgcgccacccgctgccccgacgagtcggaactataccgagatccgggagaagctccgctcgaggctgaccaggcggaaagaggagctgcccatgaaggggggcaccctgggcgggatccctggggagcccgccgtggaccaccgagatgtggatgagctgctggaattcatcaacagcacggagcccaaagtccccaacagcgccagggccgccaagcgggcccggcacaagctgaaaaagaaggaaaaggagaaggcccagttggcagcagaagctctaaagcaggcaaatcgtgtttctggaagccgggagccaaggcctgccagggagaggctcttggagtggcccgaccgggaactggatcgggtcaacagcttcctgagcagccgtctgcaggagatcaaaaacactgtcaaagactccatccgtgccagcttcagtgtgtgtgagctcagcatggacagcaatggcttctctaaggagggggctgctgagcctgagcctcagagtctacccccctcaaacctcagtggctcctcagagcagcagcctgacatcaaccttgacctgtcccctttgactttgggctcccctcagaaccacacgttacaagctccaggcgagccagccccaccatgggcagaaatgagaggcccccacccaccatggacagaggtgagggggccccctcccggtatcgtccccgagaacgggctcgtgaggagactcaacaccgtgcccaacctatcccgggtgatctgggtcaagacacccaagccgggctaccccagctccgaggagccaagctcaaaggaagttcccagttgcaagcaggagctgcctgagcctgtgtcctcaggtgggaagccacagaagggcaagaggcagggcagtcaggccaagaagagcgaggcaagcccagccccccggcccccagccagcctagaggttcccagtgccaagggccaggtcgctggccccaagcagccaggcagggtcctagagcttcccaaagtaggcagctgtgctgaggctggagaggggagccgggggagccggccaggaccaggttgggctggcagtcccaaaactgagaaggatgagactgaccgagaggtggagtactttaagtggccctgtttggactctggggtaccgagct

SEQ ID NO: 232665 - DNA, 1926 bp, Homo sapiens
  misc_feature (29)..(29): n is a, c, g, or t
gcggtagcggcggcggcggcggcggcggnggcggcggcggcggcgcggcgtgtggagcgagggagcggcgcgagcggcggcatgacgcggaggcggagcaggccgagcggcggtgcgggcaggcgcgagcgggctcgggccgcggggccgcagaagccccaggcgcccgagcccccgccgccgccaagcctggaggcgggagcgggtgcaggccctccggaggcgccggcggagcccgaccacgacggccccagggaggatgacgaacccaacctggtgcccggcccgcaggtaggagcgagcggggagacttcggcggctcgggcgctttcaccttccccgagcgggagcgggagtggggcggggttggggatgggccatcctgccgcggctggggtagcagccttcccccgggtccggcgccgaagctttctcccccggggcgggaatggaggctggacccctctccccaaagccgaggctcggtccgcgctcctgcgactaggctgaagctgctcccctctccccgccgcctccgggcgttccggccgtacacccacactgggactgggactgggactgggctgtgatcccgaggccgcagctccgctctcggcccgccacctcccccgggcccacctgctccctcagccacaggccatctcggggctctgggactggacgactgcagcctcttccctctgcccccgggaacggctccactccgtcccctgcagcgcctgcagccgcggccccctcagcagctgtgtctcctggcgcctcctcgccatacccagcagagcagttggagcagacagccaggctgcccggaggagtttttggtggggtttctgcactgaggtggaaacccagcagaacctgcccttcttccctcccctgctccgcaaggcagcccaccccgaccttgagatcccaggtttggagaatcctgctgagagcgaacagtaggaggattccccaaagcttccagcttgccacctggaagaaggtcactttcttttgagcaaaggagataacgggaggtaccctgccaaagttcactgagaggcgggggtgacatgggccacggttgctctgggagggttgtggcactcggggctgggtggctctccctaagcttgctctgacaaaagagttttgagttggtcttttggctgagcctgcccaggaaggcaggctcctgcaggagtcttggagggtcggatgcggcgccggatgaggatgaggcgtggcggaagatgcgtttggctctgcagacactgcatcgggcagcaggggactctgggaggctggtgcagccagaaggcatggctcttgacagccttctagtagaatctctggaattgtgcatgtgagtggggttgccgtttggggtaccttcccacaaagcctcccctgacctccccagttgcgtcaggtgccctctctgtgcccacagccctctgtgcctccctctggtagcactcccctttctgtgatgaaacattgtgttgatatgtctgttgcctgccctggactgtgaactccacagggacacaggctatgccatctttctctgatcttccacgcctcgcccagggccttgctaacacagaataaaaataactaggtgaatgagagagaaaatgaatcggtccagaacccgtgcttattgtaacccagttttcatgctgatttcctttgtgtctcagatcacaataaggtttttaattaatgaaaatgtcagcacttactgagtgtcagaagctccaccttcatccgcatccccatctcctatcctaggctgacacttccgtaggagactccccaggttggacccccaacccctactgggtctagcttccaaccccaaagctgcttcccccaccagcctactctgggacccccgtgggagtgctgttatcc

SEQ ID NO: 232666 - DNA, 1785 bp, Homo sapiens
  misc_feature (29)..(29): n is a, c, g, or t
gcggtagcggcggcggcggcggcggcggnggcggcggcggcggcgcggcgtgtggagcgagggagcggcgcgagcggcggcatgacgcggaggcggagcaggccgagcggcggtgcgggcaggcgcgagcgggctcgggccgcggggccgcagaagccccaggcgcccgagcccccgccgccgccaagcctggaggcgggagcgggtgcaggccctccggaggcgccggcggagcccgaccacgacggccccagggaggatgacgaacccaacctggtgcccggcccgcaggtaggagcgagcggggagacttcggcggctcgggcgctttcaccttccccgagcgggagcgggagtggggcggggttggggatgggccatcctgccgcggctggggtagcagccttcccccgggtccggcgccgaagctttctcccccggggcgggaatggaggctggacccctctccccaaagccgaggctcggtccgcgctcctgcgactaggctgaagctgctcccctctccccgccgcctccgggcgttccggccgtacacccacactgggactgggactgggactgggctgtgatcccgaggccgcagctccgctctcggcccgccacctcccccgggcccacctgctccctcagccacaggccatctcggggctctgggactggacgactgcagcctcttccctctgcccccgggaacggctccactccgtcccctgcagcgcctgcagccgcggccccctcagcagctgtgtctcctggcgcctcctcgccatacccagcagagcagttggagcagacagccaggctgcccggaggagtttttggtggggtttctgcactgaggtggaaacccagcagaacctgcccttcttccctcccctgctccgcaaggcagcccaccccgaccttgagatcccaggtttggagaatcctgctgagagcgaacagtaggaggattccccaaagcttccagcttgccacctggaagaaggtcactttcttttgagcaaaggagataacgggaggtaccctgccaaagttcactgagaggcgggggtgacatgggccacggttgctctgggagggttgtggcactcggggctgggtggctctccctaagcttgctctgacaaaagagttttgagttggtcttttggctgagcctgcccaggaaggcaggctcctgcaggagtcttggagggtcggatgcggcgccggatgaggatgaggcgtggcggaagatgcgtttggctctgcagacactgcatcgggcagcaggggactctgggaggctggtgcagccagaaggcatggctcttgacagccttctagtagaatctctggaattgtgcatggcagaagaggaaagaaactaacgggtattgagcacctactttgtgccaggcccaggccaggtcccccccgcctccagccagcctgtgcagacttgctgcctgctgtgtcaccgggaacgcaaaggctgggaagaaggcccttctcaaaatggactggtgttgcagggtgagaagctgccccctgacttcatgccaaagctcgtcaagaatctcctaggcgagatgcctctgtgggtctgccagagttgccgaaagagcatggaggaagatgaaaggcagacaggtcgagaacatgcagtggcgatgtcgcccttctcaaaccttcttgatgcattcctgctttcctgtagctgcgtgtgcacgtccaaagaagcaagagcagagagacaatgattctctactatcctccccg

SEQ ID NO: 232667 - DNA, 433 bp, Homo sapiens
gaagggcagctcctggcgaaactggccaggcgaggccaaggcacggcctcaggagcaggagtctgtgcagcccccaggcccagcaaggccacagagcttgccccagggcaagggccgcagccgccggagccgcaacaagcaggagaagccagcctcctccttgggtgagtgcaccaggaactgagcggctgaccccctaccccagccagtccacggggtggaggggcagcctttgtgtgtagacagcgctgcccccagagcataaccccaaaggcctggccatgggcactgagccctcctggctgtgtcttcctagacgatgtgttcctgcccaaggacatggacggggtggagatggatgagactgaccgagaggtggagtactttaagaggtaggtgtgggctgcctgctctcccacttgtggaggactcc

SEQ ID NO: 232668 - DNA, 4444 bp, Homo sapiens
  misc_feature (29)..(29): n is a, c, g, or t
gcggtagcggcggcggcggcggcggcggnggcggcggcggcggcgcggcgtgtggagcgagggagcggcgcgagcggcggcatgacgcggaggcggagcaggccgagcggcggtgcgggcaggcgcgagcgggctcgggccgcggggccgcagaagccccaggcgcccgagcccccgccgccgccaagcctggaggcgggagcgggtgcaggccctccggaggcgccggcggagcccgaccacgacggccccagggaggatgacgaacccaacctggtgcccggcccgcaggtaggagcgagcggggagacttcggcggctcgggcgctttcaccttccccgagcgggagcgggagtggggcggggttggggatgggccatcctgccgcggctggggtagcagccttcccccgggtccggcgccgaagctttctcccccggggcgggaatggaggctggacccctctccccaaagccgaggctcggtccgcgctcctgcgactaggctgaagctgctcccctctccccgccgcctccgggcgttccggccgtacacccacactgggactgggactgggactgggctgtgatcccgaggccgcagctccgctctcggcccgccacctcccccgggcccacctgctccctcagccacaggccatctcggggctctgggactggacgactgcagcctcttccctctgcccccgggaacggctccactccgtcccctgcagcgcctgcagccgcggccccctcagcagctgtgtctcctggcgcctcctcgccatacccagcagagcagttggagcagacagccaggctgcccggaggagtttttggtggggtttctgcactgaggtggaaacccagcagaacctgcccttcttccctcccctgctccgcaaggcagcccaccccgaccttgagatcccaggtttggagaatcctgctgagagcgaacagtaggaggattccccaaagcttccagcttgccacctggaagaaggtcactttcttttgagcaaaggagataacgggaggtaccctgccaaagttcactgagaggcgggggtgacatgggccacggttgctctgggagggttgtggcactcggggctgggtggctctccctaagcttgctctgacaaaagagttttgagttggtcttttggctgagcctgcccaggaaggcaggctcctgcaggagtcttggagggtcggatgcggcgccggatgaggatgaggcgtggcggaagatgcgtttggctctgcagacactgcatcgggcagcaggggactctgggaggctggtgcagccagaaggcatggctcttgacagccttctagtagaatctctggaattgtgcatgtcccccccgcctccagccagcctgtgcagacttgctgcctgctgtgtcaccgggaacgcaaaggctgggaagaaggcccttctcaaaatggactggtgttgcagggtgagaagctgccccctgacttcatgccaaagctcgtcaagaatctcctaggcgagatgcctctgtgggtctgccagagttgccgaaagagcatggaggaagatgaaaggcagacaggtcgagaacatgcagtggcgatctccttgtcacacacatcctgcaaatcacagtcttgtggagatgactctcattcgtcctcgtcttcctcctcatcatcctcatcctcgtcctcctcttcctgccctgggaactcgggagactgggatcctagctcgttcctgtcggcacataagctctcgggcctctggaattccccacattccagtggggccatgccaggcagctctcttgggagtcctcctaccatccccggtgaggctttccccgtctcggagcaccaccagcactcagacctcactgctccccctaacagccccaccggccaccacccgcagccagcatctctaatcccgtctcaccccagctcctttggctccccaccccacccacacctgctgcccaccaccccggcagcacctttccctgcccaggcttcagagtgccctgttgctgctgccactgccccccacactccagggccatgtcagagctcccatctaccctccaccagcatgccgctcctgaagatgcccccaccattctcggggtgcagccacccctgcagcgggcactgtggtgggcactgcagtgggcctctcctcccacccccgagctctcagccactccctagcactcacagggatcccgggtgcaaggggcacaagtttgcacacagtggcctggcttgccagctgccccagccctgcgaggcagatgaggggctgggtgaggaagaggatagcagctctgagcgaagctcctgcacctcatcctccacccaccagagagatgggaagttctgtgactgctgctactgtgagttcttcggccacaatgcgagaagtgaacgcttgggagtgatgaaggcagagtggaagcaaaaaggctctcagtcccccaagtgtgacagccagccgagggacaggccgtgagcacagacggcgccaggaaggaggctcagatcagagggcatgctggctctggccagggggaggaagcagtgcagaagtctcataagccacccgctgccccgacgagtcggaactataccgagatccgggagaagctccgctcgaggctgaccaggcggaaagaggagctgcccatgaaggggggcaccctgggcgggatccctggggagcccgccgtggaccaccgagatgtggatgagctgctggaattcatcaacagcacggagcccaaagtccccaacagcgccagggccgccaagcgggcccggcacaagctgaaaaagaaggaaaaggagaaggcccagttggcagcagaagctctaaagcaggcaaatcgtgtttctggaagccgggagccaaggcctgccagggagaggctcttggagtggcccgaccgggaactggatcgggtcaacagcttcctgagcagccgtctgcaggagatcaaaaacactgtcaaagactccatccgtgccagcttcagtgtgtgtgagctcagcatggacagcaatggcttctctaaggagggggctgctgagcctgagcctcagagtctacccccctcaaacctcagtggctcctcagagcagcagcctgacatcaaccttgacctgtcccctttgactttgggctcccctcagaaccacacgttacaagctccaggcgagccagccccaccatgggcagaaatgagaggcccccacccaccatggacagaggtgagggggccccctcccggtatcgtccccgagaacgggctcgtgaggagactcaacaccgtgcccaacctatcccgggtgatctgggtcaagacacccaagccgggctaccccagctccgaggagccaagctcaaaggaagttcccagttgcaagcaggagctgcctgagcctgtgtcctcaggtgggaagccacagaagggcaagaggcagggcagtcaggccaagaagagcgaggcaagcccagccccccggcccccagccagcctagaggttcccagtgccaagggccaggtcgctggccccaagcagccaggcagggtcctagagcttcccaaagtaggcagctgtgctgaggctggagaggggagccgggggagccggccaggaccaggttgggctggcagtcccaaaactgagaaggagaagggcagctcctggcgaaactggccaggcgaggccaaggcacggcctcaggagcaggagtctgtgcagcccccaggcccagcaaggccacagagcttgccccagggcaagggccgcagccgccggagccgcaacaagcaggagaagccagcctcctccttggacgatgtgttcctgcccaaggacatggacggggtggagatggatgagactgaccgagaggtggagtactttaagaggttctgtttggattctgcaaagcagactcgtcagaaagttgctgtgaactggaccaacttcagcctcaagaaaaccactcctagcacagctcagtgaggccctgcccaggctgagctgcttcagggcatcctgaggccctgactgccagctgaaggcgtataatttttccctccgtgtgccccacctacccgtccaagaccctctgtgctccccaccatcctggaccaaccaaaagctgaacggatgccacactgtgctggggccccttgacctcagcagagccgcttcctggtgctacgcagcctccacactcagagcccgtggactgggctggcctaagggccagggctgatggtactgctggcccaacactgctctctttgtgtttggtttttttgtttttgtttttattttgtttttttccaattctttacttttgatactgtgaagatctttcgtgccgaaagataaagcaacatttggacacaga

SEQ ID NO: 232669 - DNA, 4413 bp, Homo sapiens
  misc_feature (29)..(29): n is a, c, g, or t
gcggtagcggcggcggcggcggcggcggnggcggcggcggcggcgcggcgtgtggagcgagggagcggcgcgagcggcggcatgacgcggaggcggagcaggccgagcggcggtgcgggcaggcgcgagcgggctcgggccgcggggccgcagaagccccaggcgcccgagcccccgccgccgccaagcctggaggcgggagcgggtgcaggccctccggaggcgccggcggagcccgaccacgacggccccagggaggatgacgaacccaacctggtgcccggcccgcaggtaggagcgagcggggagacttcggcggctcgggcgctttcaccttccccgagcgggagcgggagtggggcggggttggggatgggccatcctgccgcggctggggtagcagccttcccccgggtccggcgccgaagctttctcccccggggcgggaatggaggctggacccctctccccaaagccgaggctcggtccgcgctcctgcgactaggctgaagctgctcccctctccccgccgcctccgggcgttccggccgtacacccacactgggactgggactgggactgggctgtgatcccgaggccgcagctccgctctcggcccgccacctcccccgggcccacctgctccctcagccacaggccatctcggggctctgggactggacgactgcagcctcttccctctgcccccgggaacggctccactccgtcccctgcagcgcctgcagccgcggccccctcagcagctgtgtctcctggcgcctcctcgccatacccagcagagcagttggagcagacagccaggctgcccggaggagtttttggtggggtttctgcactgaggtggaaacccagcagaacctgcccttcttccctcccctgctccgcaaggcagcccaccccgaccttgagatcccaggtttggagaatcctgctgagagcgaacagtaggaggattccccaaagcttccagcttgccacctggaagaaggtcactttcttttgagcaaaggagataacgggaggtaccctgccaaagttcactgagaggcgggggtgacatgggccacggttgctctgggagggttgtggcactcggggctgggtggctctccctaagcttgctctgacaaaagagttttgagttggtcttttggctgagcctgcccaggaaggcaggctcctgcaggagtcttggagggtcggatgcggcgccggatgaggatgaggcgtggcggaagatgcgtttggctctgcagacactgcatcgggcagcaggggactctgggaggctggtgcagccagaaggcatggctcttgacagccttctagtagaatctctggaattgtgcatgtcccccccgcctccagccagcctgtgcagacttgctgcctgctgtgtcaccgggaacgcaaaggctgggaagaaggcccttctcaaaatggactggtgttgcagggtgagaagctgccccctgacttcatgccaaagctcgtcaagaatctcctaggcgagatgcctctgtgggtctgccagagttgccgaaagagcatggaggaagatgaaaggcagacaggtcgagaacatgcagtggcgatctccttgtcacacacatcctgcaaatcacagtcttgtggagatgactctcattcgtcctcgtcttcctcctcatcatcctcatcctcgtcctcctcttcctgccctgggaactcgggagactgggatcctagctcgttcctgtcggcacataagctctcgggcctctggaattccccacattccagtggggccatgccaggcagctctcttgggagtcctcctaccatccccggtgaggctttccccgtctcggagcaccaccagcactcagacctcactgctccccctaacagccccaccggccaccacccgcagccagcatctctaatcccgtctcaccccagctcctttggctccccaccccacccacacctgctgcccaccaccccggcagcacctttccctgcccaggcttcagagtgccctgttgctgctgccactgccccccacactccagggccatgtcagagctcccatctaccctccaccagcatgccgctcctgaagatgcccccaccattctcggggtgcagccacccctgcagcgggcactgtggtgggcactgcagtgggcctctcctcccacccccgagctctcagccactccctagcactcacagggatcccgggtgcaaggggcacaagtttgcacacagtggcctggcttgccagctgccccagccctgcgaggcagatgaggggctgggtgaggaagaggatagcagctctgagcgaagctcctgcacctcatcctccacccaccagagagatgggaagttctgtgactgctgctactgtgagttcttcggccacaatgcgccacccgctgccccgacgagtcggaactataccgagatccgggagaagctccgctcgaggctgaccaggcggaaagaggagctgcccatgaaggggggcaccctgggcgggatccctggggagcccgccgtggaccaccgagatgtggatgagctgctggaattcatcaacagcacggagcccaaagtccccaacagcgccagggccgccaagcgggcccggcacaagctgaaaaagaaggaaaaggagaaggcccagttggcagcagaagctctaaagcaggcaaatcgtgtttctggaagccgggagccaaggcctgccagggagaggctcttggagtggcccgaccgggaactggatcgggtcaacagcttcctgagcagccgtctgcaggagatcaaaaacactgtcaaagactccatccgtgccagcttcagtgtgtgtgagctcagcatggacagcaatggcttctctaaggagggggctgctgagcctgagcctcagagtctacccccctcaaacctcagtggctcctcagagcagcagcctgacatcaaccttgacctgtcccctttgactttgggctcccctcagaaccacacgttacaagctccaggcgagccagccccaccatgggcagaaatgagaggcccccacccaccatggacagaggtgagggggccccctcccggtatcgtccccgagaacgggctcgtgaggagactcaacaccgtgcccaacctatcccgggtgatctgggtcaagacacccaagccgggctaccccagctccgaggagccaagctcaaaggaagttcccagttgcaagcaggagctgcctgagcctgtgtcctcaggtgggaagccacagaagggcaagaggcagggcagtcaggccaagaagagcgaggcaagcccagccccccggcccccagccagcctagaggttcccagtgccaagggccaggtcgctggccccaagcagccaggcagggtcctagagcttcccaaagtaggcagctgtgctgaggctggagaggggagccgggggagccggccaggaccaggttgggctggcagtcccaaaactgagaaggagaagggcagctcctggcgaaactggccaggcgaggccaaggcacggcctcaggagcaggagtctgtgcagcccccaggcccagcaaggccacagagcttgccccagggcaagggccgcagccgccggagccgcaacaagcaggagaagccagcctcctccttggacgatgtgttcctgcccaaggacatggacggggtggagatggatgagactgaccgagaggtggagtactttaagagtatttttggccaagcgcggtggctcatgcttctcatcctagcactttgggaggccgaggcgggtggatcacctgagatcaggagttcaagaccagcctggccaagttggtgaaaccccgtctctactaaaaatagaaaaataaggcaggttctgtttggattctgcaaagcagactcgtcagaaagttgctgtgaactggaccaacttcagcctcaagaaaaccactcctagcacagctcagtgaggccctgcccaggctgagctgcttcagggcatcctgaggccctgactgccagctgaaggcgtataatttttccctccgtgtgccccacctacccgtccaagaccctctgtgctccccaccatcctggaccaaccaaaagctgaacggatgccacactgtgctggggccccttgacctcagcagagccgcttcctggtgctacgcagcctccacactcagagcccgtggactgggctggcctaagggccagggctgatggtactgctggcccaacactgctctctttgtgtttggtttttttgtttttgtttttattttgtttttttccaattctttacttttgatactgtgaagatctttcgtgccgaaagataaagcaacatttggacacaga

SEQ ID NO: 232670 - DNA, 4211 bp, Homo sapiens
  misc_feature (29)..(29): n is a, c, g, or t
gcggtagcggcggcggcggcggcggcggnggcggcggcggcggcgcggcgtgtggagcgagggagcggcgcgagcggcggcatgacgcggaggcggagcaggccgagcggcggtgcgggcaggcgcgagcgggctcgggccgcggggccgcagaagccccaggcgcccgagcccccgccgccgccaagcctggaggcgggagcgggtgcaggccctccggaggcgccggcggagcccgaccacgacggccccagggaggatgacgaacccaacctggtgcccggcccgcaggtaggagcgagcggggagacttcggcggctcgggcgctttcaccttccccgagcgggagcgggagtggggcggggttggggatgggccatcctgccgcggctggggtagcagccttcccccgggtccggcgccgaagctttctcccccggggcgggaatggaggctggacccctctccccaaagccgaggctcggtccgcgctcctgcgactaggctgaagctgctcccctctccccgccgcctccgggcgttccggccgtacacccacactgggactgggactgggactgggctgtgatcccgaggccgcagctccgctctcggcccgccacctcccccgggcccacctgctccctcagccacaggccatctcggggctctgggactggacgactgcagcctcttccctctgcccccgggaacggctccactccgtcccctgcagcgcctgcagccgcggccccctcagcagctgtgtctcctggcgcctcctcgccatacccagcagagcagttggagcagacagccaggctgcccggaggagtttttggtggggtttctgcactgaggtggaaacccagcagaacctgcccttcttccctcccctgctccgcaaggcagcccaccccgaccttgagatcccaggtttggagaatcctgctgagagcgaacagtaggaggattccccaaagcttccagcttgccacctggaagaaggtcactttcttttgagcaaaggagataacgggaggtaccctgccaaagttcactgagaggcgggggtgacatgggccacggttgctctgggagggttgtggcactcggggctgggtggctctccctaagcttgctctgacaaaagagttttgagttggtcttttggctgagcctgcccaggaaggcaggctcctgcaggagtcttggagggtcggatgcggcgccggatgaggatgaggcgtggcggaagatgcgtttggctctgcagacactgcatcgggcagcaggggactctgggaggctggtgcagccagaaggcatggctcttgacagccttctagtagaatctctggaattgtgcatgtcccccccgcctccagccagcctgtgcagacttgctgcctgctgtgtcaccgggaacgcaaaggctgggaagaaggcccttctcaaaatggactggtgttgcagggtgagaagctgccccctgacttcatgccaaagctcgtcaagaatctcctaggcgagatgcctctgtgggtctgccagagttgccgaaagagcatggaggaagatgaaaggcagacaggtcgagaacatgcagtggcgatctccttgtcacacacatcctgcaaatcacagtcttgtggagatgactctcattcgtcctcgtcttcctcctcatcatcctcatcctcgtcctcctcttcctgccctgggaactcgggagactgggatcctagctcgttcctgtcggcacataagctctcgggcctctggaattccccacattccagtggggccatgccaggcagctctcttgggagtcctcctaccatccccggtgaggctttccccgtctcggagcaccaccagcactcagacctcactgctccccctaacagccccaccggccaccacccgcagccagcatctctaatcccgtctcaccccagctcctttggctccccaccccacccacacctgctgcccaccaccccggcagcacctttccctgcccaggcttcagagtgccctgttgctgctgccactgccccccacactccagggccatgtcagagctcccatctaccctccaccagcatgccgctcctgaagatgcccccaccattctcggggtgcagccacccctgcagcgggcactgtggtgggcactgcagtgggcctctcctcccacccccgagctctcagccactccctagcactcacagggatcccgggtgcaaggggcacaagtttgcacacagtggcctggcttgccagctgccccagccctgcgaggcagatgaggggctgggtgaggaagaggatagcagctctgagcgaagctcctgcacctcatcctccacccaccagagagatgggaagttctgtgactgctgctactgtgagttcttcggccacaatgcgccacccgctgccccgacgagtcggaactataccgagatccgggagaagctccgctcgaggctgaccaggcggaaagaggagctgcccatgaaggggggcaccctgggcgggatccctggggagcccgccgtggaccaccgagatgtggatgagctgctggaattcatcaacagcacggagcccaaagtccccaacagcgccagggccgccaagcgggcccggcacaagctgaaaaagaaggaaaaggagaaggcccagttggcagcagaagctctaaagcaggcaaatcgtgtttctggaagccgggagccaaggcctgccagggagaggctcttggagtggcccgaccgggaactggatcgggtcaacagcttcctgagcagccgtctgcaggagatcaaaaacactgtcaaagactccatccgtgccagcttcagtgtgtgtgagctcagcatggacagcaatggcttctctaaggagggggctgctgagcctgagcctcagagtctacccccctcaaacctcagtggctcctcagagcagcagcctgacatcaaccttgacctgtcccctttgactttgggctcccctcagaaccacacgttacaagctccaggcgagccagccccaccatgggcagaaatgagaggcccccacccaccatggacagaggtgagggggccccctcccggtatcgtccccgagaacgggctcgtgaggagactcaacaccgtgcccaacctatcccgggtgatctgggtcaagacacccaagccgggctaccccagctccgaggagccaagctcaaaggaagttcccagttgcaagcaggagctgcctgagcctgtgtcctcaggtgggaagccacagaagggcaagaggcagggcagtcaggccaagaagagcgaggcaagcccagccccccggcccccagccagcctagaggttcccagtgccaagggccaggtcgctggccccaagcagccaggcagggtcctagagcttcccaaagtaggcagctgtgctgaggctggagaggggagccgggggagccggccaggaccaggttgggctggcagtcccaaaactgagaaggagaagggcagctcctggcgaaactggccaggcgaggccaaggcacggcctcaggagcaggagtctgtgcagcccccaggcccagcaaggccacagagcttgccccagggcaagggccgcagccgccggagccgcaacaagcaggagaagccagcctcctccttggacgatgtgttcctgcccaaggacatggacggggtggagatggatgagactgaccgagaggtggagtactttaagaggttctgtttggattctgcaaagcagactcgtcagaaagttgctgtgaactggaccaacttcagcctcaagggcatcctgaggccctgactgccagctgaaggcgtataatttttccctccgtgtgccccacctacccgtccaagaccctctgtgctccccaccatcctggaccaaccaaaagctgaacggatgccacactgtgctggggccccttgacctcagcagagccgcttcctggtgctacgcagcctccacactcagagcccgtggactgggctggcctaagggccagggctgatggtactgctggcccaacactgctctctttgtgtttggtttttttgtttttgtttttattttgtttttttccaattctttacttttgatactgtgaagatctttcgtgccgaaagataaagcaacatttggacacaga

SEQ ID NO: 232671 - DNA, 4229 bp, Homo sapiens
  misc_feature (29)..(29): n is a, c, g, or t
gcggtagcggcggcggcggcggcggcggnggcggcggcggcggcgcggcgtgtggagcgagggagcggcgcgagcggcggcatgacgcggaggcggagcaggccgagcggcggtgcgggcaggcgcgagcgggctcgggccgcggggccgcagaagccccaggcgcccgagcccccgccgccgccaagcctggaggcgggagcgggtgcaggccctccggaggcgccggcggagcccgaccacgacggccccagggaggatgacgaacccaacctggtgcccggcccgcaggtaggagcgagcggggagacttcggcggctcgggcgctttcaccttccccgagcgggagcgggagtggggcggggttggggatgggccatcctgccgcggctggggtagcagccttcccccgggtccggcgccgaagctttctcccccggggcgggaatggaggctggacccctctccccaaagccgaggctcggtccgcgctcctgcgactaggctgaagctgctcccctctccccgccgcctccgggcgttccggccgtacacccacactgggactgggactgggactgggctgtgatcccgaggccgcagctccgctctcggcccgccacctcccccgggcccacctgctccctcagccacaggccatctcggggctctgggactggacgactgcagcctcttccctctgcccccgggaacggctccactccgtcccctgcagcgcctgcagccgcggccccctcagcagctgtgtctcctggcgcctcctcgccatacccagcagagcagttggagcagacagccaggctgcccggaggagtttttggtggggtttctgcactgaggtggaaacccagcagaacctgcccttcttccctcccctgctccgcaaggcagcccaccccgaccttgagatcccaggtttggagaatcctgctgagagcgaacagtaggaggattccccaaagcttccagcttgccacctggaagaaggtcactttcttttgagcaaaggagataacgggaggtaccctgccaaagttcactgagaggcgggggtgacatgggccacggttgctctgggagggttgtggcactcggggctgggtggctctccctaagcttgctctgacaaaagagttttgagttggtcttttggctgagcctgcccaggaaggcaggctcctgcaggagtcttggagggtcggatgcggcgccggatgaggatgaggcgtggcggaagatgcgtttggctctgcagacactgcatcgggcagcaggggactctgggaggctggtgcagccagaaggcatggctcttgacagccttctagtagaatctctggaattgtgcatgtcccccccgcctccagccagcctgtgcagacttgctgcctgctgtgtcaccgggaacgcaaaggctgggaagaaggcccttctcaaaatggactggtgttgcagggtgagaagctgccccctgacttcatgccaaagctcgtcaagaatctcctaggcgagatgcctctgtgggtctgccagagttgccgaaagagcatggaggaagatgaaaggcagacaggtcgagaacatgcagtggcgatctccttgtcacacacatcctgcaaatcacagtcttgtggagatgactctcattcgtcctcgtcttcctcctcatcatcctcatcctcgtcctcctcttcctgccctgggaactcgggagactgggatcctagctcgttcctgtcggcacataagctctcgggcctctggaattccccacattccagtggggccatgccaggcagctctcttgggagtcctcctaccatccccggtgaggctttccccgtctcggagcaccaccagcactcagacctcactgctccccctaacagccccaccggccaccacccgcagccagcatctctaatcccgtctcaccccagctcctttggctccccaccccacccacacctgctgcccaccaccccggcagcacctttccctgcccaggcttcagagtgccctgttgctgctgccactgccccccacactccagggccatgtcagagctcccatctaccctccaccagcatgccgctcctgaagatgcccccaccattctcggggtgcagccacccctgcagcgggcactgtggtgggcactgcagtgggcctctcctcccacccccgagctctcagccactccctagcactcacagggatcccgggtgcaaggggcacaagtttgcacacagtggcctggcttgccagctgccccagccctgcgaggcagatgaggggctgggtgaggaagaggatagcagctctgagcgaagctcctgcacctcatcctccacccaccagagagatgggaagttctgtgactgctgctactgtgagttcttcggccacaatgcgccacccgctgccccgacgagtcggaactataccgagatccgggagaagctccgctcgaggctgaccaggcggaaagaggagctgcccatgaaggggggcaccctgggcgggatccctggggagcccgccgtggaccaccgagatgtggatgagctgctggaattcatcaacagcacggagcccaaagtccccaacagcgccagggccgccaagcgggcccggcacaagctgaaaaagaaggaaaaggagaaggcccagttggcagcagaagctctaaagcaggcaaatcgtgtttctggaagccgggagccaaggcctgccagggagaggctcttggagtggcccgaccgggaactggatcgggtcaacagcttcctgagcagccgtctgcaggagatcaaaaacactgtcaaagactccatccgtgccagcttcagtgtgtgtgagctcagcatggacagcaatggcttctctaaggagggggctgctgagcctgagcctcagagtctacccccctcaaacctcagtggctcctcagagcagcagcctgacatcaaccttgacctgtcccctttgactttgggctcccctcagaaccacacgttacaagctccaggcgagccagccccaccatgggcagaaatgagaggcccccacccaccatggacagaggtgagggggccccctcccggtatcgtccccgagaacgggctcgtgaggagactcaacaccgtgcccaacctatcccgggtgatctgggtcaagacacccaagccgggctaccccagctccgaggagccaagctcaaaggaagttcccagttgcaagcaggagctgcctgagcctgtgtcctcaggtgggaagccacagaagggcaagaggcagggcagtcaggccaagaagagcgaggcaagcccagccccccggcccccagccagcctagaggttcccagtgccaagggccaggtcgctggccccaagcagccaggcagggtcctagagcttcccaaagtaggcagctgtgctgaggctggagaggggagccgggggagccggccaggaccaggttgggctggcagtcccaaaactgagaaggagaagggcagctcctggcgaaactggccaggcgaggccaaggcacggcctcaggagcaggagtctgtgcagcccccaggcccagcaaggccacagagcttgccccagggcaagggccgcagccgccggagccgcaacaagcaggagaagccagcctcctccttggacgatgtgttcctgcccaaggacatggacggggtggagatggatgagactgaccgagaggtggagtactttaagagtgctggcccaacactgctctctttgtgtttggtttttttgtttttgtttttattttgtttttttccaattctttacttttgatactgtgaagatctttcgtgccgaaagataaagcaacatttggacacagagttggcatgttggtgatttgtgggtctgggcggggagggagttgagggtgtgctcagaagcatgggctctcccttagtcactaaccctagcatgcaccatgcatcagcagtttggtgctattgtcccattttacaggtgaggaaactaaagccgataggaaagtgactcagctcaacttagtctggctgattagcattgagcgcagactggtatgattatggcatctgtgcccttttctccttttgggaggtctctggtatgtgagcctggggcagccccttccccactctttcctgtttccctctttgcaagatgggtgagt

SEQ ID NO: 232672 - DNA, 2091 bp, Homo sapiens
  misc_feature (29)..(29): n is a, c, g, or t
gcggtagcggcggcggcggcggcggcggnggcggcggcggcggcgcggcgtgtggagcgagggagcggcgcgagcggcggcatgacgcggaggcggagcaggccgagcggcggtgcgggcaggcgcgagcgggctcgggccgcggggccgcagaagccccaggcgcccgagcccccgccgccgccaagcctggaggcgggagcgggtgcaggccctccggaggcgccggcggagcccgaccacgacggccccagggaggatgacgaacccaacctggtgcccggcccgcaggtaggagcgagcggggagacttcggcggctcgggcgctttcaccttccccgagcgggagcgggagtggggcggggttggggatgggccatcctgccgcggctggggtagcagccttcccccgggtccggcgccgaagctttctcccccggggcgggaatggaggctggacccctctccccaaagccgaggctcggtccgcgctcctgcgactaggctgaagctgctcccctctccccgccgcctccgggcgttccggccgtacacccacactgggactgggactgggactgggctgtgatcccgaggccgcagctccgctctcggcccgccacctcccccgggcccacctgctccctcagccacaggccatctcggggctctgggactggacgactgcagcctcttccctctgcccccgggaacggctccactccgtcccctgcagcgcctgcagccgcggccccctcagcagctgtgtctcctggcgcctcctcgccatacccagcagagcagttggagcagacagccaggctgcccggaggagtttttggtggggtttctgcactgaggtggaaacccagcagaacctgcccttcttccctcccctgctccgcaaggcagcccaccccgaccttgagatcccaggtttggagaatcctgctgagagcgaacagtaggaggattccccaaagcttccagcttgccacctggaagaaggtcactttcttttgagcaaaggagataacgggaggtaccctgccaaagttcactgagaggcgggggtgacatgggccacggttgctctgggagggttgtggcactcggggctgggtggctctccctaagcttgctctgacaaaagagttttgagttggtcttttggctgagcctgcccaggaaggcaggctcctgcaggagtcttggagggtcggatgcggcgccggatgaggatgaggcgtggcggaagatgcgtttggctctgcagacactgcatcgggcagcaggggactctgggaggctggtgcagccagaaggcatggctcttgacagccttctagtagaatctctggaattgtgcatgtcccccccgcctccagccagcctgtgcagacttgctgcctgctgtgtcaccgggaacgcaaaggctgggaagaaggcccttctcaaaatggactggtgttgcagggtgagaagctgccccctgacttcatgccaaagctcgtcaagaatctcctaggcgagatgcctctgtgggtctgccagagttgccgaaagagcatggaggaagatgaaaggcagacaggtcgagaacatgcagtggcgatctccttgtcacacacatcctgcaaatcacagtcttgtggagatgactctcattcgtcctcgtcttcctcctcatcatcctcatcctcgtcctcctcttcctgccctgggaactcgggagactgggatcctagctcgttcctgtcggcacataagctctcgggcctctggaattccccacattccagtggggccatgccaggcagctctcttgggagtcctcctaccatccccggtgaggctttccccgtctcggagcaccaccagcactcagacctcactgctccccctaacagccccaccggccaccacccgcagctcgcccctgagttagcagctcgcccctgagttagcagctcgcccctgagttagcagctcgcccctgagttgcctgcagctcgcccctgagttgcctgcagctcgcccctgagttacctgcagctcgcccctgagttacctgcagctccccctgagtt

SEQ ID NO: 232673 - DNA, 2437 bp, Homo sapiens
  misc_feature (29)..(29): n is a, c, g, or t
gcggtagcggcggcggcggcggcggcggnggcggcggcggcggcgcggcgtgtggagcgagggagcggcgcgagcggcggcatgacgcggaggcggagcaggccgagcggcggtgcgggcaggcgcgagcgggctcgggccgcggggccgcagaagccccaggcgcccgagcccccgccgccgccaagcctggaggcgggagcgggtgcaggccctccggaggcgccggcggagcccgaccacgacggccccagggaggatgacgaacccaacctggtgcccggcccgcaggtaggagcgagcggggagacttcggcggctcgggcgctttcaccttccccgagcgggagcgggagtggggcggggttggggatgggccatcctgccgcggctggggtagcagccttcccccgggtccggcgccgaagctttctcccccggggcgggaatggaggctggacccctctccccaaagccgaggctcggtccgcgctcctgcgactaggctgaagctgctcccctctccccgccgcctccgggcgttccggccgtacacccacactgggactgggactgggactgggctgtgatcccgaggccgcagctccgctctcggcccgccacctcccccgggcccacctgctccctcagccacaggccatctcggggctctgggactggacgactgcagcctcttccctctgcccccgggaacggctccactccgtcccctgcagcgcctgcagccgcggccccctcagcagctgtgtctcctggcgcctcctcgccatacccagcagagcagttggagcagacagccaggctgcccggaggagtttttggtggggtttctgcactgaggtggaaacccagcagaacctgcccttcttccctcccctgctccgcaaggcagcccaccccgaccttgagatcccaggtttggagaatcctgctgagagcgaacagtaggaggattccccaaagcttccagcttgccacctggaagaaggtcactttcttttgagcaaaggagataacgggaggtaccctgccaaagttcactgagaggcgggggtgacatgggccacggttgctctgggagggttgtggcactcggggctgggtggctctccctaagcttgctctgacaaaagagttttgagttggtcttttggctgagcctgcccaggaaggcaggctcctgcaggagtcttggagggtcggatgcggcgccggatgaggatgaggcgtggcggaagatgcgtttggctctgcagacactgcatcgggcagcaggggactctgggaggctggtgcagccagaaggcatggctcttgacagccttctagtagaatctctggaattgtgcatatgaagaaacagaaactcagagcaactaaacatttgcccaaatgactccaactgtaggtgtcagacaaaagaaaagaaaaggacttttaggtactttgggggattttcaacaaggcatttttttttaaactatagccccaaagaagggaaacaaactggtaaattcggttctagttatgccccactttgaccgggggtggggtctggaagcaggcttttgtgccctggtgcaaagcacctagtgtaagggtagggttcagtcattgctctgcctacaagcgtgtttttggtgaggaactctggctcccattgccactcataaccctgtcttacatctacagagtggataaggaagatgaaactcagtgtcatataccaaactgaatccaaaggtggcaaataagaccacttccagtccacaggcttgttgtaatgccccagctcacatattgttttgtttctgtttttattttcatttgagccaatattttaaagatcaaaaggtttcccacacatttggatttggggctcttttttaaactaaagatatggtgatgctgggtccacttttccacaaggcagtaatcagtagtctctgagtagcatttggcccttttagacagcgtatgctccttaggcatctttggttctttccaggccccttcactcattggcataacctgtacacatttaaagcaggaccttgagtttaattgggatcccaaatggctttcaattgtttcaggccactaaaccacattgatctgtttcctaacaacccaaatcctcgtttatagcacaagaaggctgaaacagttactaccttattagcaaaggaaaacaaaacaaacaaaaaaaaaataaagaacaactgaaaaagcaattgtaggaggcagtggggaatagtgtttagagacttggattgaattcccagcttagcctcctagctttgtgactccgcaagttgcttctctctgaccccatcaggaacttcacaagaggccttggtcgcacgcctgtaatcccggcactttgggaggctgaggcaggaggatctcttgaggc

SEQ ID NO: 232674 - DNA, 471 bp, Homo sapiens
ccaaaatgaggtaatttaaaaaattatatcaaagttactcaggaaatgggttttcagttccgtatctttatatatgttcacttccaaatcttttgatgttgacatttgccattgtagtttaattttctttaaaaagttcgaaagaaaaccacacatgaaatgtaaaagtccaaatttctcttcttcagtataatatagcttattctttatttattattttacttagatccttgaagtatatgcatcattgatccaggtctatgcacaagatttataatgtaaataaagaatgaactaaataatactgtttgagatgaatatttgaattgagatgaataaacgttgcatctaatgcacaatgaaacttcattgacatctgatgaaattacagtacaagtgattttgttaacattctatggtgactaatactattaatcctttttaatcataccaataaaatatttctgcctt

SEQ ID NO: 232675 - DNA, 999 bp, Homo sapiens
ctgaaagatgaatatgagggcagaaaatgaatctaaatctttggtttaaatgataaagtctttacacattgtagagaattaaataagcagttggtcatacttttatttatcttcaggatcttttgctctctgataaaagtagaaagctttagggaatagattgtgtagaaagtaaatccgacttcaagattcagttcctttttgataatttattgttttaaatcctaaatatctgaagcagtaatgccatgactcaccaaacatatctttgtgaaatgatttccagagattgggagaaaaaaatactaatagttgattttgctttaagtgttttttatttctcacaacattccaaatgtttgttttaggagatacaagagtttatcattttttcttttaattgctaagaagacttgttacaactttcaaaaaaagtcctcatggaacctgataaataagaagttcaatgtcttatttcattacgagctatctaaatatttttgtcagattcagaatatgtaactgaatgtatgtaattcttttttgtagcagccaagaataatttaagtttcacaactaatactgatatgcctttatcatatttttgctaaccagccaaatctgtattcccatgatcatccttaatgtttgtactagtagaggactatagtggtgcaaactgaaccaaaatagcaactaataagaaggaataaatgaggccgggcacagtggctcaagcctgtaattccagcactttgggaaactgaggtgggaggatcacttgaggccaggagtttgagaccagcctgcccaacatgttgaaaccccgtctacactaaaaatacaataattaggcaggcatggtgttgcacacctgtaatcccagctgcttaagaggctgaggcaggagaatcacttgaacccgggaggtgtaggttgcagtgagcagagattgcaccaccacattccagcctgggcaacagagcaagactctgtcta

SEQ ID NO: 232676 - DNA, 194 bp, Homo sapiens
ctgattttgagccatcagattacatgcgttggtacagttttcctcatgtttcttgtacatagaactggttaagcttctaaaatcagtgggtttatagttctcatcaattttgaaatgtttctgccattaagtttccaaatatttttctcaactcccctcctttagaaacaccaactacatcactgataccctgt

SEQ ID NO: 232677 - DNA, 400 bp, Homo sapiens
gagtgcttaggacactcttagagccagatgagctcaagggtctgctttgtcatttttagagaacctcatggttgtgaaagctcactcagctttgctcagaggtttatatcctcctcattacttcacagacacctaggactctgttttattacagggttgaataaatattagctttgcaattaaagataacagtgtccattacatgtcagacacgagggccaagcgttgcatatattacctaatttgtttttcattgcagaactattattctctttttaaaaatcaggaaaccgggctttgaaaggtaattttacccagcttacccagcaaatacagtgtagacctggacttccgactcaggtctcattggctctgaggcccctgggctcgccactgctct

SEQ ID NO: 232678 - DNA, 773 bp, Homo sapiens
aggaaagggattagaagtgagactttgaattttcattttattttatttatatatttttttcgagacagggtctggctctgtcacccaggctagagtgagggcagtggcacagtctctgcagcatctgcctcctggcctcaagccatcctcctacttcagcctcccaagtagctaggactacaggtgcacaccaccacgcctggctaatttttgtagagatggggttttgccatgttgtccaggctggtctcaaactcctggactcaagaaatccaccctcctcagtctcccaaagtgctgggattataggtgtgagacaccatacccagacagaatatgtttttaaaatatttttgactttggaatcatccacatatttagcccttcaaagaaaagtaagtcaaaaacgtgaaaagcatattgagattttttaacttactagctgggaaaagaaaaaaaaattggctccttttggttctttagtttttttatttatttattttttattttgttatactttaagttctagggtacatgtgcacaatttgcaggtttgttaaataggtatgcatgtgccatgttggtttgctgcacccatcaactcctcatttacattaggtatttctcctaatgctatccctccccccaccccctactccccggtgtatatgtgccacaatttcttaatacagtctatcattgatggacatttgggttggttccaagtctgctattgtgaatagtgccacaataaacatacgtgtgcatgtgtc

SEQ ID NO: 232679 - DNA, 746 bp, Homo sapiens
tagaactctaaccaaaagtaataattgaccaagtgtgaaaaaaatattcagttatatagttcatatgtattagtctgttctcatgctgctatgaggacatacccgagactgggtaattctaaaggaaagaggtttaattgactcagttccacatggctagggaggcctcagggaacttacagccatggtgaaaggggaagcaaacatatccttctttgcaaggcggcaggagagagaagaatgagagctgagcgaaggaggatgcccgttataaaaccatcagatctcgtgagaacttaccatcacaagaatagtatgggggaaaccaccaccatgattcagttacctccgacggggtccttctcacgatgtggggattgtgggaactacaattcaagatgagatttgggtagggacgcagccaaaccgtattatcataatagcaaaaaaaaaaaaaaaggaaaaggagcaacgtaaatttccagtagagaagtagttaattaaatattggtaaatttacacagtagaatactgtgtatcatcaaaaatgttgctgtgtaaatctatatgtattaccatggaagaatattttgccatattacagtgaataatagacaatgttatggaacatataaaatacaaatgcatgaggaaaagtctggaattatggaccccaaaatgttcatggtcattatctttggttaatgagatcatggaattctttaatttgcctctttctatattct

SEQ ID NO: 232680 - DNA, 1418 bp, Homo sapiens
  misc_feature (206)..(206): n is a, c, g, or t
ttttccagaaggattttaagtggcagagtccctggtgatggttcagctgtgggagagaaggcctggaaagaaaaccaaccaggatcagttactcagtggaggtaggaaacaggccaacacttggcctaaaaagtagagcttccaatttgaaatattaactggtctagcccccaaatccaagcaatgttaacatgtgtcaacaatanacacaagcaaaggcccaactactaacagtgtaaaagacatcaggcagtggaacaaatgtaaagcaggcaactgatttaaggaaaaaagtgtaatatctaaatcatgcagctagtaaatggaatgtctgtatgactacagatctaccatgctgcctttctagacaaaatgaaaatagctcctgggcccctacattcttcaaattccagcactcctaagtcaccgtggacacagtacaaatttcttccacctacgtcattcattcctaaaagaattggatgtggggaggagttaaaagttttggtgacccagagaagggtctctacacagatgctaaccctactaagggcagagaccagctttcaaagtcagttcattcttttgaacagcaaaagtcacttggttatactgtaaatagagtttcagaaggtataagggactactaaatctatgaatctgaagtaaaggtctcaaggttgcttttcaatcactcctcctaatcctaacttatttgccttgtttcatagacatataaactgttagaactgaaagcccccttaaaagtcggaaaatctaaccctctaaacagatagaaaaaaacagctgaggctcagcaatggaagggactggacaattgaattattttgatttgagatagaaggaatgggagctacctgtagagtatggcatcaatatctgtgataagatttttgtgatatttgtttctctctacctgatttctccagaatttgtaaactatttgtgagtattcttatggtaatatagttatttgcataagtgcaataagaatctgttttcatttgtaacaggatacaattggagaaacagattattttaccaagctttgactggaatagtgtgctttcttttaagaaatcaaacttgacttatagagccaataaaagccccttgggcctgggcatggtggctcatgcctgtaatcctaggactttgggaggccaaggtcggtggattacctgaggtcagcagttcaagaccagcctgtacaaagtggtgaaaccccatctctaccgaaaatacaaaattagctgagcatggtggtgcaagcctataatcccagctacttgggaggctgaggcaggagaatcacttgaacctgggaagtggaggctgcagtgaagtgagaccacaccattgcactccatcctgggcaacaagcatgaaactatctc

SEQ ID NO: 232681 - DNA, 496 bp, Homo sapiens
gggaccctgcaggtcacccaggtggggacactcagagtaagctaccacttattgagcacctagtatgtgctggtcactctgccagatgcgtcatatgcaccttttcatttaatcttgataatagcacttcaaggtagaggctcttactatccccatgtacagttgaggaaagaaaagcttagagggactttgaaacctgtctaaagatctcagggctggaactggaacccaggcagattctaaagcacctgttcctagccacaaccgtggcaaacaagagtatagcaggtcgttgtttggctcaattgagaaaaatccatgtaaagtgcttaacattgtgtctaggtatgtaaaagaggctcattacatggtgatgctgattatctgtattttcaacatcattactttggaagcataaatcatgtaagagattaaaaatactaaagagttgtaagaaaattaaagtgtgaaatctcctaggatgaggtttaattta

SEQ ID NO: 232682 - DNA, 694 bp, Homo sapiens
tggtgagactgcccccttcaggttctttcatgaagtgcaggtttcattttgggcttggctcctttctgtctcttttggaagccctttgttcctgattgcactttctagcctgtgtacagtctaaacctctgcgggaaacagtgtgtgcttctgaaaagggctccagcatagcaaactcactagaaagccggacctcagagcttgaccaaacttggctggagtcctagttctgtatttacaagttgtttgatcttggacaagccatgtaaactctctggacttaagtgtcctcgcctgtacattggggaaaactatacccaccttgcagtgctgttgtaatgtgtagaggtcaggtgtgtttgtgaagtgccaagaacagcaggttgtcagtaagaatagtgctgttggctgggcactgtggctcatgcctgtaatcccagcactttgggaggctgagacagatggatcacctgaggtcaggagtccgagaccagcctggccaacatggtgaaacctcttctctactaaaaatacaaaaaattagccaggcgtggttgcaggcgcttgtaatcccagctactcaggaggctgaggcaggaaaatcacttgaacccaggaggcggaggttgcagtgagccgagatcgcaccattgcactccagcctgggcatcaagagcaaaattttgcctccaaa

SEQ ID NO: 232683 - DNA, 468 bp, Homo sapiens
aagactggtcgttaaaggctggttcgttgagtctttcatcgttgagtgataccacctctgcagatggctcagtgggcagccccgtaccacagcctgcccttgaggttgtgtagtttagataggtcacagagttgctgggcctaccgcaggtctcctgaccctggtgcagttttacttcaattacaaccaccaaaatagctacagtcaaaaattccaaagttcctacaccatcaacctccaccccacttccgtccaaagtccacttagaggctctcagttttggaccttagaaacacttagggagctttttaaaaagatcgattctgtatttttagtagagatggggtttcacccagctactcaggaggctgaggcaggagaatcacttgaaccggggagttggaggttgcagtgagccgagattatgtcactccagcctgggcaacagagtgcagactccgtcttagg

SEQ ID NO: 232684 - DNA, 336 bp, Homo sapiens
tttcaacccccaaccccacccccaggaagatgaaagcaaggcaaactcccgagccacaactacctcatctacaaagtgggctaccttcctctcgcagggcagcagctcaccagggcctgggctcggaggccagaccagcttcccttgctgcgaagctgggagcatcctactgtgatgggggtgtggctgaccctctctgggcacatatcctacccttcctcctccttcacagcctgcttaaggaggactgggatcattaggcagatccaaactgtggtttggagctttcgggaaaacaagccccatcaatgcaatttccttgttaataccgtgcca

SEQ ID NO: 232685 - DNA, 348 bp, Homo sapiens
  misc_feature (150)..(150): n is a, c, g, or t
  misc_feature (160)..(160): n is a, c, g, or t
ctgaactgtcactcccctccttaaaaccccttcaaagtttctcatggccttggaataaagcccacacaggctcacctgttcacaaagtccttaggatacagcctcactttcagcctaagctccagacacaccaaattcctggcacctccntcccaccctngccttgtcactggctttttctgtgcctttgagcacggtgtcctgtctgcctgggaagtctccatcccttccccctttcacctttgagctcctactcatcattcaagatgcaacacaaaagtatttcctctccgaagctctccctcatgcttggggcagttagtcatcccttcctgcgctcccacagca

SEQ ID NO: 232686 - DNA, 335 bp, Homo sapiens
agctgaaatcatatgaagtgttcaattttataccctgctttttttaaacggaagattatgacacagcttttttacaatgttattagaagcttttcagaaacattccttttaacggctgcaaaatgctataataatattgtcatatcccaattccctactgtgaaacactcaggcgttattccctgttgaaaacaaagctgggctaaacatctttatgcacatttttttctgtatttcggactggacatgatatatgtggctttttgggctgtcggcacataacaattaaaatccaaaaagagaaaacattaattgctgagcaaaactttgcattt

SEQ ID NO: 232687 - DNA, 379 bp, Homo sapiens
acagacatcaaaggtacaggcagcaaaagcaaaaaataaacaaacaaaaatgagactacatcaaacaaaaaaaagcttcttcactgcaaaagaaacaaaaatgaggctgggtgtcatggccccagcactttgggaggccaagggcagtgaatcacttgaggccaagagtatgagatcagcctggccaacatggtgaaaccccgtctctattaaaaatacaaaaattagctgggcatggtggcacatgcctgtaatcccagctactcgggaggctgaggcaggagaatagcttggagctgggaggcagaggttgcagtgagctgagatcatgccattgcactccagcctgagtgacagagtgagtgagactctgtctcca

SEQ ID NO: 232688 - DNA, 1064 bp, Homo sapiens
tcatgggctgggagaaagcatgaccacctaagggttgcagggctaagtatcttgctgacacataatactgacatcacaatgctaggtggtgcctctctggttttggctggaaggctgacttagcatcaacagtacagagctatgtgggtacccggctgtatttgccaaagtgattgacacactgaagtgcttaaattaaaatctgggctagaggtgtatttctatgggacaaagtctaaatttagccttgaatgcgttgtttttaggtgtgtaacatctgaatatatttttagatggactaattttcaataaacatatatagggtttgtgctggctgtagaacactgattttgggtgcagcatgattaagatgagtcatacatcttggctccagtctcatagaggaacggtctccaaactttttggcaccggggaccagtttcgtggaagacaatttttccatgggctgggggtggaagttggagagatggtttcaggatgaaactgtttcacctcagatcatcaggaattagattctcataaggagggtgcaacctagatttctcagatgtgcagttcacaataggatttgcactcctatgataatctaatgcggccgctgacctgacaggaggcagagctcaggtggcaatgcttgctcttggctggctgcacatctcctgctgtgtggccccattcctaacaggccacagactgctaccggtccacagcttgggggctggggacacctgtcacagaggatatcagttcagtgattactaagtagtttagtaagcataagacagtttactactaatataacctgtaaagtagaagactctccctagaaatagattatcatctagatttcttctaaaggagaaaactctgggactaatcctcagaactgggtatggaaagttctaggagaagaaaagggtagtaagtagcaggaagggtgagtaaattgtgcacctaaaagggccagtctgtccacattggagggtaaattactggctgaagagctttcgatgctggtcagagttgctattttatatatttag

SEQ ID NO: 232689 - DNA, 942 bp, Homo sapiens
ccaagtctgtgggcttggtcctgcttgacacatgggtgggagtggcctctggttgtcccacagccagttgttcttcggggacacccctcctgcagctccgtggctgctccagggctgaggagccaggactcacaggagtgtgggcgtggccatccagaaagctttggtctttgggggttgctggaaaagcaaaaccaggttggtggggcagaaggcaccctggccacgcacaggcatcaccacctctggggtccgcagagtctgtgtaacaacctggttcctcaatctagcagtgcttttgaatgaacgtgtgacagcttaatgaagcagccgagtaccttgatttgaatgttggagccggggttcacagggggctgtattagtcagtacaggctgggttatgccactgtgacaaagagccccagatctcaaaccccgtccttgtgggtcagctgaggtctctgttccaggccatccccacttggaaccaggtctgtttccacaactaagaaagcagaggccgggtatggtggtggctgacgcttgtattcccagcatttggggaggccaagttagattatttgaagccaggggtttaggaccagcctggaaagcaaggcaagaccccatctctacaaaaaatgaaaaaattagctggacctggtggcacatgcctgtaatgccagctgcttgggaggctgaggtgggaggatcacttgagtccaggaggtggaggctgcagtgagctgtgattgccactgcactccagcctggattacagagcaagaccctgtcttaaaaactaagaataatggccgggcgcggtggctcacgcctgtaatcccagcactttgggaggccgaggcgggcggatcacgaggtcaggagatcgagaccatcccggctaaaacggtgaaaccccgtctctactaaaaatacaaa

SEQ ID NO: 232690 - DNA, 431 bp, Homo sapiens
gggctggcgccagtcgcctggtccctcgctcgccgcagcctagacggcggacgctccctgtcaaggcctaattcctgcaactcgccggcccccggtaaccgttttccttccccgcctaagaaaaacagttttttcctctagaccacttcggcggcctcttctgacagttttgcttctcctatgccagcgggtctccgcgcctttagggggtgctcgtcatcctttgccccccaaccccccgccacatcctcgtaactgatgtacagtccgtcagttcggcttcagttcttttgacggatgaaaatggcatatttgtgcattctctggatgcgttataatgaggacactcagtacgtccgttgtttcatctttctgaaaaagtaaatcacattaaatcctcaggcttgtaaaacctcatagctaattttcaa

SEQ ID NO: 232691 - DNA, 444 bp, Homo sapiens
aaccaaatatcccgcaagaaaagctggaagcaagctatctgtgaaaatgctttatgatgcatgctttcatctcagagagttatactgttctttcatttcagccagtgagaagcactctttttgtagaatctataaggggacagtgcggagcccattgaagtccatagtgaaagactgaatatcccatgataaaaattagaaacaagctgtctgtgaaaacatgttgcaatgtgtggattcatctcaaagaatgaaactttcttttgattaaacaagttggaaacactctttttttagaatccacaatgggacattttggagtccattggggcctattttgaaaatccaaatataccgcaataaaaactagaaagaaactatctgtaaaaatgctttgtgatgtgtgaattcatttaacataaataaaactttttgttattcagc

SEQ ID NO: 232692 - DNA, 176 bp, Homo sapiens
cgcccccgtcctcgcccgcgctggctccgccagccccggggcgcgcgctcctcgaccccgaccccgaacccgctgaacggcgcgcgcgcctgagcgcccctcccggcccgctcccctccaccgggcgagagaaccggggcgcgcccctctccagctctccccggtacgagcggccg

SEQ ID NO: 232693 - DNA, 406 bp, Homo sapiens
gtgaaacctgctttggggattcctgtaggtgagagtagctctggcttagagctgaagtctctcctccataggccccacagtagagctaagctttcatttgaagtggattagaaacagccttggtttaccaggctaaagatgatccaggtcaggaaaactgtgtgctttaccaaaggccagaaaattctaccattcttccaagatttcttgctaaaattcaaagtaatgtggtcttgaaggggtgacaccaaagcagctgcaaaggaagaggaaaacccggctgccacagtggagaaatagattgtcattcttttgcacagcttttccctgggtaatgtcaggattatatttttggctccctggaaaccagaattaaaataggctaaataagattggaattgttgaa

SEQ ID NO: 232694 - DNA, 521 bp, Homo sapiens
atggaatgtgagcctaattacatgttcctttggaataagatctcaccagcccaggagtgtcagaaaccctctatcatatatacgtatcttgtttccaaaatgatcttcccaagccaccctaacaggcccccttcagaatgcttcctgctgacaagtgaatctgctttttgcctttcacccaatctcagctcatgctttctctgtgaaaatatcacagaccacatctgacagtggtccagctaattaatgtactccaatgtctagcaagcatttgacaggaaaaataatctatacagtatttattgcaaaatcttcaccaatgtgacaaagatgaatgtaaactttacataatcatttttcatttgttatccaaagttgaaagtgattttcaaatgctaactttaaaattatgatgaggaagataacagctctgctttaaaactgcttggcaatggaatttctatagtataatggtttagcaatgagctagaaaaataaactctcttgctaatgtagtaaat

SEQ ID NO: 232695 - DNA, 428 bp, Homo sapiens
tgcagttccactagaatgcttttcagaaccttggtcgtaccttctcacattcacatagatctctcactgaaacacctcctcctttttcccctgcttaatcctcactctttccttggagctttttagacaaagccttcgaagcccagattaagttagttttgcctgtcataccttcttatattaggctgttctctccttcttagcaaccgttatggctgctgactttattcaccaccggaagatatttgccttattcactactgcatgcccagggcctacaacagtacatggccccaggtaacttctcaattgttttctcccccgtttctaaataatgagtaaatgtatgcccaacttctgacccaaggactgggcacttaggaaatacaattttaggagcagccctgcaaaatcttttctctcacccc

SEQ ID NO: 232696 - DNA, 743 bp, Homo sapiens
gtgggttccaagatagatggcagaaagtgggaaatgtgatttttcttgattgggtaactaagaaccacacagcatgcgggagccattttgggccaaagagctgttcatttaaagtgtttattgacacctggaaatagggtttaaacttcaaatgctattttcacatcaagtttatgctatataatttcataatggtgataaaatccaggcagctaccaaaaggagagctcccaagtgatcttactactgggtttccgtagtacagacattcaggatcctggacccgctgaagccaggggaggaagcaccctggcgggtcactggctgatggaaggacaggcgccgtgatggttaagtgtgtccatgttggctacctgatttcttttcagccagtctcagctttggttggtttgtttgactgcctcaaatcctcggtggtcacccttattttttatctggaatgtgttccccactctgtagaggactgagcagggagattgctgtgcatccttgaagggttccattttgaccctgatcatcctcagtagacatggaagctactccaagcgtggccttggaggtttggggaccctggacagcatacaaatggaggggtgaggggcagccgagggaaagaaattactcagaatatgcagtaagaaccatgtctggtttctggtttctgtgtttggcaacacagtaatgggattccttgcatttctcccagaaaagcattggagggg

SEQ ID NO: 232697 - DNA, 322 bp, Homo sapiens
gtccccagatcccaatttggtattcacatgtttgggaagagtggggggaaagtaaaatatttgtgtcttactaaatttgagcaaaggaaataaaatctttgtccattttttttcagtggtaacttatgttagtacttagcactgtgatttcataattataagtatctcatttgattgctcaaccaatcagttctcccatcttacagatgaagaaagttaagtacagggcacaggatcctacccaaactcacgtaactcagaatcatggaatctctggattttgaagtcctaatgtgtgccaccacctgtactgggcactgcc

SEQ ID NO: 232698 - DNA, 327 bp, Homo sapiens
taagttggttttatacaaagacatctggcacaaaatacaatgatatttcaatatagaatcacagcaggggatgagggtggagaaggaagagattaccagttctaagaggggagacaacagaagtatttttttaatgtcttattttaagagtaaaacacctgctttttttttgagatggagttttaggcgggagtgcagtggaacgatctcggctcactgcaatctctgcctccaggagaatcacttgaacccgggaggcggaggttgcagtgagctgagatcacgccactgcattccagcccggtgacagtgtgagactccatctca

SEQ ID NO: 232699 - DNA, 358 bp, Homo sapiens
tctcgaaagaaaaagaaaaaaaattttcatggtaattgccttattcaagtttccagctctagttgtacatagcattctcatttttaatctgtgttaagtaattatttcatattcttaattctaactttgatggcttttttcctttaaaaaaactttattgaagtataatttacatataataaaatgcacctattaagttgtacagtttgatgagctttcacaaatgccaccaccataaacaagatatagaacacttccatcactcagagaagtacactcatgcccctttgcagacaatcacttctacctctgcccaaggcaaccactgatatactttgtcaatttagatgaagatctc

SEQ ID NO: 232700 - DNA, 1696 bp, Homo sapiens
gacttgcctgatggtcactgccaggctgccttgcctgccttcagagctctagacagaggcccctttaaacttcctcctcggccgggccaagacgctgcaacagctcagcgcggctcccagcgaaccccgagtgaaccctcggggctttattttcatttcttcttggcaggacgtaacttcctgcttctaagaaaaacatctttaaacagagccacgaacggttccagggtgtcccgcacatcccccgctagacggaacaatagcgcaatgagctgcgtggagtggattggaagcacatggagcctgtttcctttcaaaatcccccaggggctcagcctggaggagccagggtgtttgataaatcatgctggaacttttatcaggtccagtgtgtgtgagcaaaagccagaaggggagggagggggtcccctagggcccccagaatccgggccaactggaggcctagacaagaggagggatctgagtcttgagcacctactgcatgcgcctgaggtgctgactcatccagggccagcgggagaagtgccccaggacctgccctgagccctgtggaggcagagacacagctgtcatagaccaggcgccactggggaatgtggtaaccaggaggaagggtcactgggtaagggggcttcactgttacctgtgcactctcctagtacgtgcctcttcagaccaagcagaggggaatttgtgcaagcccaggaggagccttctggattcttttcctttcttttcctgcagtaccggtatatcagggcctggcctcagcccaaagcgtcagggagctcagagcgaagtctggccttgggtcctggggaaaacatggaggcatggagtagggcgggaaggggcagtgaggagccgaggaaggaggctctgggagtcttaggggtcttggcagcatggaagtgagaggtgaagccagctggtcttctgggtcgggtggggacttggagaacttttctgtcttgctaaaggattataaacacaccaatcagtgctctgtgtctagcttaagttttgtaaatgcaccaatcggcactctgtaaaaatggacaaatcagcactctgtaaaatggaccaatcagcactctgtaaaaatggaccaatcagcaggatatgggcggggccaaataagggaataaaagctggccaccggcccaactgcagcaaccctgtagggtctgtttcgagtttgtggaagctgtgttctttggtcttcacaataaatcttgattctgcttagtgttgggaactgtgctatgtttgtgagctgtaatactgccaaggtgtgcagcttcactcatgaagccacagagaccatgaacccatcaagaccacgatcctaccgggaggaatgaataactccagacacgccacctttaagagctgtaacactggccgggtgtggtggctcacgcctgtaatccctgcattttgggggggctgaggtgggcggatcacaagttcaggagatccagaccatcctggccaacatggtgaaatcgtgtctctgctaaaaataagaaaaattagccaggagtggtggcaggcgcctgtagtcccagctactcggaggctgaggcagtagaatggcatgaacccgggaggtggagcttgcagtgagctgggattgcatcactgcactccagcctgggtgacagagcgaggc

SEQ ID NO: 232701 - DNA, 479 bp, Homo sapiens
agacacttggatgaagagatttatgactctggggggctgtgaattcctaatgtccttttgagacatgtagatcttccagagcgatgctgcccaatgcagtagccactagccaagtgcaaatggtcacttgcaatatggctagtctttgagatgtgttttaagtgtaaaatacacactgaattttaaagacttagcgcaatacaaagaatgtaaaatatctcattatatcttgaaattatactattttggatatatggtgttcccttggtgtctttggggactggttccaggatcctagaggatacccaaatccccagatgtcaagtccgctatataaaatgtcctgtagtatttgcatataacctacacacatccttctgaatactttaaatcatctctagattccttgtaattcctaatacaatgtaaatgttatgtaaatagttgttatactatattaaaaagttttttattcttta

SEQ ID NO: 232702 - DNA, 329 bp, Homo sapiens
acattaaaatgtgtggaagaaggtactatagtgctacacatttcactaattttgttttgggaattacagttggtttttataaaaatatttatgttaatatgggaatttactttttttgccattactttcagtggcaaaaactgcagttacttttgcaccaacctaacatatgaattgataaatatttttacaatttaatttctaatatggtaaatatcagtaaatataacacaaatctttgtagtcttcaataagtgtaaagcaatctcaaaaccaaaagtttgaggatcactggtataagggaataaaggaacttcatgtaaaagcct

SEQ ID NO: 232703 - DNA, 419 bp, Homo sapiens
ttcatctcctccccttcctggctgcattcctgctatccctggaacgccctaagtattctcctgccccagggactttacacttgctgttcccttggcttgaaatgttcctctcagacattggctccttcctccccgtcaagtccttcaggtcttggctccaatgtcaccttttcagcaatgccatcctaaccaaaccatttaaacctgcatcctggctgggcgcagtggctcatgcctgtaatcccagcactttgggaggccgaagcaggcagatcacttgagctcaagagtttgagaccagcctgggcaacatggtgagaccccatcgctaccaaaaatacaaatattagctgggcttggtagtgcacaagcctgtagtcccagctactcaggaggctgaggtgggagggtagcttgaa

SEQ ID NO: 232704 - DNA, 300 bp, Homo sapiens
agcttacagtgaatccttctgaaggctttattgagtactgtgtaaaaactcttgtaaaaatatagaaagattaactgtagaactacaatgagttttgccctttcgccttgcttatatggagatttatttgtcattgggattctatttctaaagctggcactttgctactaaaatgggatattacaaacatatttttaaatttaatatcaaagcctgttaattctcatgagactcttaaaattattttctcttgacatttaaagagcaagcacaccaaatatactgaagtatgttaaaata

SEQ ID NO: 232705 - DNA, 526 bp, Homo sapiens
tctccaaacactgacaaatgtaaaaaacaacaacaaaaaaacacctcctgttagaacgactgatttagaacacagaaaaacttgcaaacttaaaaaagcagttcatttgcttatacaccttatgtctccctctatgctacttatggatttagaaaaattctctaattcagtctcttttagtattcaaacaagcatagtattgtgtaaatgagaaaatgttcttaacgactaaaccataaaatattgttaaggatatcaagaaatgaagatactttaaggagctacctatcatcccacattaatcgacataccagaaaacaaagaatatatcctatatttaaaccattctaaaaaagaacccaggtatcctactaattatttaacattgtaagtaacaatggtaagttaagtgcaatgtttaatatctctctggtacaatataagattgttatgatatgtgatatgtatataaaaagtatttaatatgatattgactaataaaaatagtctttttatcttctgcaaa

SEQ ID NO: 232706 - DNA, 235 bp, Homo sapiens
tgaggtgaggtggcttatgcatgtaatcccagcccttgggaggatgagggtggaggatcacgtgagaccccgtctctacaaaaaagtttgtgaaaattagccagccatggtggcgtgtgcctgtggtccccactactgaggtgggaagattcctgagccaagaagatccaggctacagtgagctatgatcatactactgcactccagcctgggtgacaaaatgagaccctgtctc

SEQ ID NO: 232707 - DNA, 180 bp, Homo sapiens
ctgcgggtaagggacttgtcttcgtcacttctgtattcttgaaaatgtttacttatttattttagagacagggtcttgccctgttgcccaggctgggacctcagcctcccctgtagctgcaccactacatgcaccactatgcctaatttatttatttattttttgtagagacagggtctt

SEQ ID NO: 232708 - DNA, 805 bp, Homo sapiens
aaaaaaaaaaaaaaaaaaagagagaaagttacatcttattctataaagcttctttcagacccaagggtcaccataacctcaggatctcagaccttgcatctctgtcttattaactgctctctcaaccagaaagacattccttaggggcagagttcacaaaccaacagtccagaggcctgggtatgggtgtgttttttactgatacctggcgctaaaatggtttgagttagctgccacttttgagatggtagatatttcctatgaagttttggatctccggctttgattgaaaaagtgggcccattgaggactctgagtcagggttttcccttggctatggactttgtgagttgcaaagtgccttgggttcatcatggtttctctaaccttctagttaattcttatgtccagccagcttcattcatttctgtttggtaactggttcctgaagctacctgaagctacattcctgtttgctacctggtcctgcagactgctgagtttgagacccctctacctttgaggagatcttgaatgatccactgaggaacatgaggcaggtgatggaacccatggttggaaactggggggaatccctggtttgtgcagcttcttctcttctgtgtgctgcagggcctctccctgggatgtggccttatttggcaggtgtaagtgcattggccagtttggagggagatctgccccctactagctgtgtgaccttgggcaaattgccttccctctctggtcctctctcttctcttgtataaggtgaactggttggagtacactgatagtttagtta

SEQ ID NO: 232709 - DNA, 120 bp, Homo sapiens
cttcatacacgttacagcatatgccagttgtttgtttttattgctgtatagtattccataactgttgtagagttatatatgtatggaatctcacgtgtggaatgtataaacatcttgtgt

SEQ ID NO: 232710 - DNA, 428 bp, Homo sapiens
ataataagataaaagaaacaaattagaggcatttggaaacagaatttacaggatttagcttctgcctgcatctaccgtgagatacgaggaccgtgcctaaataataatggaggtggggacaatgatggtaagaagaggtagatttggatggagagaaagaaatagccatccaaatggatgtatccagtgagagttggacagcggagatgtgggatcatatagtagggctatgtaacaagtccctctatagcagggtttgtttaagctagactgtaagtacccagagccagtgagggtctggtttatttctgcatccccagagccaggacagtccttggcactcaataaatatttgttaactttgaaactggataaagacctttaaggatggtagaattttttgaaaaatgttcaaagacagaaagcaa

SEQ ID NO: 232711 - DNA, 94 bp, Homo sapiens
gaggagtccatgggctgcttgctgtctctaaggggctcggccatgtgccttgtaatgccctatctgctgactcttagcccctgctgttggcctg

SEQ ID NO: 232712 - DNA, 387 bp, Homo sapiens
gaccagggatgctccacaaagcaccggccggccgccgcgaagtgtcaaagtcatgggagacaacgggaagctaagaacccgtacagactgcagttgcctaggagacgtgacaactaagcgctctgtgccagccgagatgagaccccgggactgaaaaaaagctgcaagtgaggaaactgacaccattcaaaaaacgtctgtcgttaatatcagtgtcaatttactggtttcaatcattgtacttaaaaataccaccatcagggaagacggatgaatgatctgtatgtctgtagacatacaggggcattctgtactattcttgacattttttttctgtaactttaaaatcatttcagaataaaaagcttaaaacattgaggttgtaaa

SEQ ID NO: 232713 - DNA, 586 bp, Homo sapiens
atgaagtgagtcttcactgatctctccatattttgacattttacagcacttattatctctactttgtattttgaaactgaatccaaaatagttttgcatttgttgtttaacagtcatgtatgtagttttttttttttttttctttttttttggagacagagtctggctctgcactccagcctgggtaaaaaagcgagattccatctcgaaaaaaaaaaagtgtatatgtatagtgtatgcatgcacagaatactttacagcaataagaatgagtgttctgcaaatatacacaatattgctgactctcccaatgttaaacaaaagcatccagacacacaacaatgtgtacagtatatgattccattgatagaaagcttaaaaacaggcaaaattaattcacccttatggagtcttaagtaaggggaacaaaaggggccatctgggcagtgataatgctgtttcttgagctgggtgctgggttcacaggtgtgttcagtttgtcacattcatcaagcttacacttctcatacatcttcttttctatatgtatgtcatccttcaataaaaagtttttaaaaaataaata

SEQ ID NO: 232714 - DNA, 580 bp, Homo sapiens
ggagactagttatatcctttccttttcactcctagcattcaatgattaaaataattttttctcactcgtgacttttcattttaagttttcctgatcatgatatattgttttcttatctttcaaatatttgggcagaaataatgtgattgtgtagtacatttatcttggaatgtgtaatatatttaaattatatttatataatgaaccattaaactttaatagcaattaacattttgtgagaaaattttcacagctaccaataaataattgctataattagattattttgtggtaatggtaaaggaacgttacttattatagcataatttacatcataatactatgaaagtattcttaaacttaaattggaaatgccacagcatctttttagtaaaataaatgccaaatgctatgaactaataaatgaaacacaaaatttagtaaaatattaccaataaggattttttctttctttattttaaggtattttctcaggagtacatgaatgaaaaataacttctaatattagaaacattgtttattgttacatcaataaaatcttttgcttgttgaatttgtt

SEQ ID NO: 232715 - DNA, 496 bp, Homo sapiens
cagtttcatcccctgtggtgggagtggtctgggcaccctacttttcaatcaagacgaatagagtgggggaactcttcaaacttagaaagggccaggggctgtgctaacatgtgttcacctcctcaggtttcgaagcgtgaggcatcacttccatggagggttccaggctttgaaacctagcaagagtgtaaagggcttttgctgaagttatcccaaacccagccagttggtaaccctgaagatgggctccagtgtccttttgtcatatttctgtcagttttgagtattttcttgatttatggcacaccaaagtgttccacattctccctggactttcccagtccctgtctgtaaccagctgtatcttcaaggaatgatagttctttttttagtgaggaatggtatttagaaaccaaaatctggactctagctgtgctcattcacactaaatgttattgcttctaggcatttcagtgagcagagttagaaaaaaaaa

SEQ ID NO: 232716 - DNA, 371 bp, Homo sapiens
ctttttttggtaccattactcattttttaaaaatctcgtgtgttctacttcaataacgcctttgttcttttcagtgctgaagttatcccaaacccagccagttggtaaccctgaagatgggctccagtgtccttttgtcatatttctgtcagttttgagtattttcttgatttatggcacaccaaagtgttccacattctccctggactttcccagtccctgtctgtaaccagctgtatcttcaaggaatgatagttctttttttagtgaggaatggtatttagaaaccaaaatctggactctagctgtgctcattcacactaaatgttattgcttctaggcatttcagtgagcagagttagaaaaaaaaa

SEQ ID NO: 232717 - DNA, 365 bp, Homo sapiens
cagtttcatcccctgtggtgggagtggtctgggcaccctacttttcaatcaagacgaatagagtgggggaactcttcaaacttagaaagggccaggggctgtgctaacatgtgttcacctcctcaggtttcgaagcgtgaggcatcacttccatggagggttccaggctttgaaacctagcaagagtgtaaagggctttgtaaggcattcagtgattcgtttcctctcgtgggccagctgccatgtcagggaccaaggatacagaagtgcagggcagccccgtccttgagtaattctgcagctcatgggacagagaaacacacgaagcccagcaccatctgtctgccggagcttggtgctgtggg

SEQ ID NO: 232718 - DNA, 531 bp, Homo sapiens
caatgatacatttcaaatgagttgtgctcagtgaaagaagctagtctcaaaaggatacacactgtctgattccacttatttgactttctggaaaaggcaaaattataaggacagaaaacaaatgaatgttttcccaggggctggaggtgattgggagggtccactacagggggacttgaggtaactttttgggatgttgaaactgttgtttatcttgattgtggtggtggttacataattgtatgtgtttgtccaaactcatagaattacacattaaaaagggcaaattttactgtatggagattttatcttaatgaaaaaatctgaccaaaaaacccatttgataaaaatgattaataagccttttggattaacagcgatatgtttaggatacaatactatcttcactaaccggtctaggactgtgaactgtaactctttagaatgtgataacacaggaaaattctgagtcatagtttactgaatggaaatacttttttgatttttcaggtcttatgaacttacccggaa

SEQ ID NO: 232719 - DNA, 523 bp, Homo sapiens
ttttttttgttttgtttttgttttttgccaatggtcacagtttgttattgccttaaaatttagcaattggcagcagaggacagctgagataatgagactttgcagtgtctttccctgacgaaggagattgtcatcactccatttaatgtgttcttttccactagaagcaggtgcagcagcctgttgcaatggaaacagcagctcacctggagccaggcagatcaccattctaatcccagctctgccacctgccagctatgtgaacttctgcaatctacttggtctatctttacctcagtttcctagtacacacggctgctgtgaagattaattacaaacgagtaagataatgatggaaggatgctcagcaatagtggggtctcaataactgggtgtttctccttctcttcctgtttttagatctgactgttttcaccatgggcattaatgattgtgttttcaatcactagcatgaagttcaaggctctgttactagtggtaatgggagatttaatggtaatat

SEQ ID NO: 232720 - DNA, 475 bp, Homo sapiens
atggaggttgagtgctgatctgccatatccacatcatatctcctttagactctgacacaagaggtggcctttccctgaaccctatgttttagaagatcctgaataccacagatgcaatatgagtaaatttataaaaacacatttgtgctcctatctcttgggaacctatattcaacaatggcacagcacaactcataaaccaaagcattagctcacagacattgttcgggcctcagagaagtgtttctcaaggtcacttaccatatattcttgaaaggaaagatggccaagtccaaattccatgtaagtttgtgaatggagccacttcagactttgggggtggacacaactttgcacagaagacctgaaaagtgaaaatatttgggaaagagaaaagataaaattactaccttgtgaattttttcctctcatgaataattttttggcattattaaagcaccagatttccaggaat

SEQ ID NO: 232721 - DNA, 532 bp, Homo sapiens
acattttctttagtacactcaataataaagattttattctttccaaattgatctacagagttggtgtaattccaatcaaaatctccacaaggatcataaaatgtacataaaagtgaaaaggatcaagaacagtctcgacctcttgcagaaatattacatgggcagatttccccaatcagacatcaagtattattacaaggctatggcaactagaacggcataatcctgtggcatgaagataatcagaaattcaacagaactgagcccagaaacagacccacacacggagacactcaacatgtcagaagaggatagcattctcagtggacaatactaaggcaacaggttctccacacggtgaacaagaaactgaattccctcactcaaaaaccataaacaaaattcagtgccaggtagtatcaaagggcaaaatcataaataaaacttttagaagacaaagtgtttatcacctcaggctagggaggaattcttcctttatgttttctttttctccttctcatgtaacacttta

SEQ ID NO: 232722 - DNA, 223 bp, Homo sapiens
aagcagggtgttttggaagacatttcacacgtctccaccaacgggtggatctaccctcaatagacagtacaggtgggagcctttccaacccactgcacacctgatctgtgatggctgcgactggcgagtgtgtctgttttggaaaccttagcagtacacatgttttcctgtgtaataaaacattttgacagttcagactatgccaaataaaagttttcatctg

SEQ ID NO: 232723 - DNA, 392 bp, Homo sapiens
gctaaaagtgaacctaatatctttaaatgcctatttctgcacagtacctttataatgtaatagcagctaggaaatggtatcatagagtcactgtttccacagactgtgggcaagttaaagatggggtaggtattgtgtgcataacagcatgggacacctccattgccccagaagggtgtcagaacagcttttcccaacacgcagagtctgccccttggcccctgaagtttcctctgttacaggaagggatatgctgaagaaagtaaaaaaagactggccaggagcgatggctcacgcctgtattcccagcactttgggaggccgaggcgggcagatcacgaggtcaggagattgagaccatcgtggctaacatagtgaaatcctctctacta

SEQ ID NO: 232724 - DNA, 331 bp, Homo sapiens
  misc_feature (13)..(13): n is a, c, g, or t
ggatacagaatcntgctctgtcacccaggctggagtgcaagcacaatctcggctcactgcaatgtccgctgcccaggttcaagtgactctcgtgcctcagccccccgagtagctgggactacaggcgccaccaccatgcccacctaatttttgtatttttagtggagacggggtttcgccatgttggccaggatggtctcaatctcttgaccacgtgatccacccacctcagcctcccaaagtgttgggattgcggatgtggcccatcgcgctcggcctattctagcttttcttaactgtactccccttctgtcgtcttcagcagctttaa

SEQ ID NO: 232725 - DNA, 349 bp, Homo sapiens
gtttacatcattaatattattattgaaaataaggtggaaatgctgaggaatttggattctactccataggcagtggtcaaacatgcttgaggagctgtaatcaagttgtccttagggaaaaatatttgcacagcacatagaagacaaataggagaggaagctgctatttattgaacacctactgtatgtagcacatgctgaaattatgcacacattttctcatttaatcttcaaaaggaacatattaagtacattttacaaatgaatctgacaagtgatttcttgcatttccaggtttaaacttagatctatctgactggaagaaaccagcgggaggttttttgtgtgt

SEQ ID NO: 232726 - DNA, 423 bp, Homo sapiens
atctagtagtaatagaataattggtagataaacaagttttattacatttttccccaaattatttaaaatagtaaaccatagcatattaatcaaaggtagttttgtattatttgtgataattttgagtaaaatagaaatgatgacataattacctatttggctggttttattcatagggagcatcaggtacatgtgcatcacacatctttggttcctctttttttaggtgaatattagactgtttaagtataatttttattgtagatcaaatattttgtgttgaaaaatagctccaacattaattatggtgaaagtcattgtcaaactatattttgttgtataagttttccttttacaagttcatgatgaatacaactgtgaaagctgctattttactgggattttaataaactgttcaatcta

SEQ ID NO: 232727 - DNA, 381 bp, Homo sapiens
cttagtatatcgagagagtgaaagttgatcccccttcttgaagaggggagtgatgaggggagagtgcaatggcaagatctggaagaatggcaagagggtccaagggtctgtcatcctccaccaaggttcaagacagaaccttttgctgggtcacctcaatctgccagcaatggaagatgagtagctgtggggacatttcataaaagcaagtggtttttttgttttgttttgttttgttttttgtttttttttctagaacaaggctgtgcacagtggctcacctctgtaatcccagcactttgggaggctgaggcgggaggatcacttgagctcaggagttcgagaccagccagagcaatataaggagaccccatctctaca

SEQ ID NO: 232728 - DNA, 794 bp, Homo sapiens
gtgatgtttccaactttagatctgttggaagaaagaagaaaggacaccctctctccctccatattctccccctcctgtagaaatttcttctgtccctggtgtattaactccgggcgagcgtagcataaatcaatcagcaggtagagattagtttagaattcaccagctgttcctccctgtaattggatgtaactatgcaggacaccttttgaaacagttatccagttactaaatgccagacctgtcatgggtcttcagctgactgcgacggattagcccctaaagagctagcgatttagcagcctgcatctccgccccctttgccagggagagcctgggaatgggctcagtggtatgctggatgcttctttcagcttgcagaaaagaaagctaagatagatcatagggcagggtttgcctttctttggaggaggtttttgtagcctttccccattcctcagcttcatacagtgagtgagggtctatggaagtgttctgtgcttctagtgttttttgtgttctctggcactgcttcctgacatggggtagctcctaggaaacacttgatgagaatggttttaggagaggtctagattgcagacagctgcagagcctcactgtagggctggtaggcttctgccttcagacagtcttggaaatgtgaggtggggttgcttatggcagggtcttttatttatttttcttggattactcactgcccattctctgcctctacaatccttccttttccatgtcagtatttctcccttgccccatgccttgaaggagagaaa

SEQ ID NO: 232729 - DNA, 411 bp, Homo sapiens
aaagctgtgcttacaatataatagccaccaaacccaggcaagtctctctggaacacctgcagccctcagtgaggatcagccaccactgtcacccagactcctacgcaagtacaagtgcatcatatgtcattattctgaacattaaggactattcttcattatgttagggattaaacattcaagcatcttgcctttcccttttcctcccagttggccagttaactagaaagtaggaaggggccaggcacggtggctcttgcctgtaatgcctataatctctattaaaaaccaaacaaatcaatcagatatggtggcacgaacctgtggtcccagctacttgggaggctgaggtggggggatcgcttgatcccagaggatagaggcagcctgggtgacagcaagaccctgtct

SEQ ID NO: 232730 - DNA, 484 bp, Homo sapiens
cagctggtggtgatggcagtcacggtgacagctggtgatgatgttggcgagggcactgatggcagggtggaggtgacagtgttggggttaccataatggcagtggagatgcagcagtgggaggagccccaaaggacctcgagtgacccttctcttcccttggaaattccaggccatcaccgtacccacccccccgccagggccttgccgctcacactctcagatcagtagattctggcctctgaaaattaacctgccattatcttggcaatttctgcagtttcaggttaaaattaaacaagttcaggcctctgcaagaacagactattaatcctttgatcctttcaacctgtaggtaattatttcagtaattaaagtattatgatgtggtttcttgtgaaaattgcatggcaaattgctttgtaatgaagttttcacacatattcaaattcagcaagcttaataaaggtgcaagcctctaaaag

SEQ ID NO: 232731 - DNA, 720 bp, Homo sapiens
cagacatccaaaagattaggagacactataaacacttctacaattaaatttcaccttttatgtgaaacagacaaatttcttgaaaaatagaacttgctgagtttcacgaaagaagaaatatacaaaacagttgaatatctactaaagaaattgaatctactattaaaatccttcccatagaatatgttaaggatgataaatatattgtggatatgaagaagaatgaccctatattctagagatataaactacacaacggtagtaaaggccacgatgtctctaatttacttttaaatttgctaaatatacctaatctaagaaaaataaaaatatatatacaggcatatctttggagatattgtaggttctgatccagaccactgcaaaaaagtgaatttgatgataaagcaagtcacacattctgtttcccggtgcatataataattacgtttacaccattcatagtgtactacgagtgcaatagcattatgtctttaaaaacaatgtacataccttaatttaaaaatattgctaaaaaatgacaacgatcatccgagccttcagtaagtcgcaatctttttgctgttagagggaatactgcttttatgttgctggctgccgactgatcagggtagtggttgcttaatcgccatctaccggatggcagcccaaacttcaacatcaaaaatactttgcaaccctgtgaaaccaatgccaaga

SEQ ID NO: 232732 - DNA, 529 bp, Homo sapiens
cactatataaatcattttcataatgagagctgttcataatctacctctccaatattaattttttaagttaggtctgtgtaattatgaatcaggaaaatattcttaatttcagtttttgtaagggaacacctatttgtttttatgctgtgttttatcattgtttttccttagtgaatttaataaaatgttagatttctaatatcgatcttccagtatatatattagacttttaattagatctctttagttaacccttattcatctttgtcaaagcgtattttctactgcaaggaattatgatgttttcacctgtgttgtacctgattagtagcatcaggatactaatgggaattacgccatttgagctatagtaaaattgctttagtgttttctgctggttatataggtcatgggatacttgtgaagctaagtcaccttcagccagctaactgaagactaaaatgcttttgcagatttaaacacaaacagatgtggagttaataaaattattttgtgttccacaagttta

SEQ ID NO: 232733 - DNA, 377 bp, Homo sapiens
gcgaggcagtctgatggctctgccattaactaatgagagacttcaggcaagtcccttctcctctctggacctcagtagctccgcctttacaataagagggttagatgagacttccaaccctgaaatgttttattttccctgatagtttctatacaaaggacagtagacaataaaaaagataactgacctctggttcaaatctcagcttgaccacctatgagccaatcgaatttggacaagttacttaacctctctgcaacttaatttcctcatctgtataataggaatactgttttacctacctcagagggttgttgttaaggattaggtgagataatgtatgtaaagtgtttaacacagtgtttgtcactttcagt

SEQ ID NO: 232734 - DNA, 455 bp, Homo sapiens
tatgtaactcaaagagcagtgacaatctgagcccatggcatgctggatctgtaagtccacagcatcactgctgaacaggaaagcaagcttgacaacctgcttgtccctcctccagaaatagtgatgttgccctgacttcttgatattttaaattctgaccttaaatagttcttgctctcaggtgtaatgtcaggtggctcacacctataatcccagaactttgggaggctgagatgaaaggatcgcttgaaaccaggaggtcagaccagcctgggcagcaaagtgagatccccatttctacgaaaaaatagctggacacagtggtgtgtgctggtaatcccagctattcaggaggctgagacaagaggatcacttgaacccaggaatttgaggctgcagagagctatgatcacactactgcacttctgcctaggtgacagagcaagaccctgtca

SEQ ID NO: 232735 - DNA, 452 bp, Homo sapiens
actttgctgtattataaactacacattcaatgctatggtgactacctgtttttaaaagctaattttacttttttatgattttaagagatttacaagtcaaaaataaacttttttgttgggtaaatttattattaaagttgaggggaaaaaagtaatgaattaagtatgcatttctcaaactgtactttagttcttttggaaacagtgatccattccaaaaaacactttctctctgaagcctttctccactccctcaggtggtgttacggctctcaatgctgtgttcctctggtactctgtataaatcaatgtataattatatgctcctcattttttgtcactataattgttaatatgtttttttgcatcaccttatatgtcttaaccatccttgtatattgtcacaaaatcccatatatagtaagtgtcattaaagacatttcactcccttt

SEQ ID NO: 232736 - DNA, 482 bp, Homo sapiens
tacctccctgacccattttcctcactaaccgccccttcagtccctcctccccgtcttctctcccctcctcccgcacccacccatccctcttccagggccccccccaggcgcgaggcggaaatgggtcaccgacccgcgggtggaatgggcggcctggggttactgggacggtgagtaactgccggcccccgtccgcaatcgggctccctccgtcgggcgcgagggggcaccccagggctggggggactaggttcctccaaccccggggggcccctacacccagccctgggctcccgattgcggtcccatcaccccctcctggcggcagaagtctcccttgcaatgtttcaggcggggacctccctaaaggggtcctcgggggctgtgccccaagtcgaggacaccctctccagcctgaaaggggactctgctgcagggccggggagatgggatctcctaggggaagaggcgcggtgcggccg

SEQ ID NO: 232737 - DNA, 360 bp, Homo sapiens
tgtattaattgagctgcagtcatcctcctggcgggcaggcagccagcacggggcgtaccgccctgtggatacagttccttcaggctaccagaactatcgtcagatgtctatgcctacccatatcaactggaagtcccactgccctggaccaggcacccaggcagggcatgtggtttttgatgcccgtcagagacggttggcagtgggcaaggacaagtgtgaagctctgtctcctaggcgccttcatcaagaggcacccagcaactcggggaaaccatcaaggagtggggatatcagaatgtgatgagaaccttggacaaagaggggacaaaagtgcatcaggaataaagaggcgagaga

SEQ ID NO: 232738 - DNA, 409 bp, Homo sapiens
cagcaggaatcacttgcatggaagtctgtggacaaactaggctggctcacctgcctgcctatgcaaacacccacctcccacccgggagtcctggagggagatatggtgctatcagtccttcacatgctagtgagaattagcatcatcttgctcctagaagagagtcattactccgaggattgagatcagccttctcagcagagtggcaggggaagaggagataagtaatttgaatgtggtgtgttttatggggacggggcaggcctccatggtgtgctagaggtccagggtcccaggagaggggtgatggggctatttaccaactaccatggaagttattttaatattgtgacagtgcacggcttgccagtgcatacccactgcacatcagagctgcgggcccacttgg

SEQ ID NO: 232739 - DNA, 485 bp, Homo sapiens
tagcaggcactagcaaggttgcattttcaggcctccgttgagataagtcagcttcatttatttattgcctttgtcattcttctcaggattcatattccgaggacaaagtttctgattggtttggctttggttgtatggttagcccagaggtaggggagaggagcacatcaggctgtagcacacagtgggacaagagcagttcttctatagcaaaatcatggggctgttaacaggaggtggaatggctgtgtagtggctggaagaaaacagcaaaggctgtgaccagagtctgctctgctaaggtgcaaaggagcttgaactatgttggagtaggatcattctcctgaatgtggccaagaacaaccatcaaaccaaaatcaaacccccttgttagagactgaaagtgtggtgaaatggaatacaagatagtaacatgactcctcttgaaggattggataagctagtctaggtttgaaatctgagga

SEQ ID NO: 232740 - DNA, 298 bp, Homo sapiens
cttctgattggctggaatgaagacagccctcgtcagacactaaatctgccagcaccttgacgttgagcttcccagcctccggaactatgaaaaatcaatttcaggactttataaattattcagtctaagaaattttgttatagcagcaggaaaagctcaggacagtattcaataactatttgctgaatgagtgaacagtagtattttcgtagcacatttagctatattctaatattgttgttattcaaatattctgtattcctatttgtatgttaaagtaatattttcataatctaca

SEQ ID NO: 232741 - DNA, 1514 bp, Homo sapiens
catccaagattagaattcctaatacactttctatagaagcgggttgtaggtaattggacatacaaattgtttatataggaagctaatagttacaataattatattttgagttagggcagtctacttattgtattataagattttagttaataaacctaattgtttgagtaagaataagtcaagaagtgtattcaatcacttagatcagaggttattttatatgaaattaataaaagtagaaatggttggttgaaggtagggaaaagcccagagttttatttggtcatgctcccaatcaccctcctccatattgggggtggggagtagcagtggtgattacttcttctctattaatagttgcagcccttgagcaataataaataaatcaatgtgatataaatattagaaacatgaactgggcagaagttttaaatgaatgaaactttatttgcaggacactcacttatcttgtattatccccatcatggtggttcccacccctctggtatctagtgatgttatgtatgcttcctgttttctcatggtattcttcaaattacccagctcttttcttttcctcttcttatttccatacaaatataactggcctgttttgtcactagttgacctgctaatctctggtaagctgtttaccaatgatactgttactctgaagaacgctatttgcatatcaagacgctggtcttgcagaagtagtaaattaaattcaaaatggtcacattattaagattatggaatgttgggtgggaaactattttgagcaggataattttttcattttttatgaattttagcatgtaatccacaagccatttcatatttatgaaaacagctgtagtgacctaacatgtataaattgaagtaacattaataatgaatattataacctttatgaaataaggcagaactattcctattttaatttgttcatctgtgatcttttatctgtctcctatggcagatttgcaaaagtagtgtttgtagtctgtatcatcattgttatttcatagattctcaaatcataatgctgagtggtttaataaaataatccagtggtacgaattaaggtacatataataatttcatttgaaagttttcatttcctttttaaaatgtgaatgattaggtatgtaaactttatgtgaatgcaggccacttttttgaacaaataatagaagattttaaagaaaaataaagatatcatctcatagaaatttaaattcttactggaagctgggcatgatagctcacgcctgtaatcctagcactttgggaggccgaggtgggtggatcacctgaggtcaggaattcgagaccaacctggctaacttggtgaaaccccatttctactaaaaatacaaaaaattagccaggcgtggtgacacgtgcctgtaatcccagctatttgggaggctgaggcaggagaatcgcttgaacccgggaggtggaggttgcagtcagctgagatcatgccattgcactatctcaaaaaa

SEQ ID NO: 232742 - DNA, 392 bp, Homo sapiens
aacagaaggctttaaagcaaaaaggtttcatgacccacctgagtcatgtggacttttgatctaaaagacatagcctgctcatagtcacatgtcatccacagtgttatagtggagtagaatgtaattgtcagaaactgaggtgtaggaaaatgggaagaagagatacaatacaataaaaacggaaacgcatgcagtaacttccgtaagcaatgagaagcctgcaaaaattactacttagagcaatgccaatcaaatttgcattttaagaatattattctggccaggcgcagtgactcaggcctgcaatcctaacactttggcaggttgaggtgggagaattccttgaggacttcttgaggttcttgaacaacatagtgagacactgtcccaaa

SEQ ID NO: 232743 - DNA, 366 bp, Homo sapiens
tgcactttgctttttttcagctaacattatatcttgggatttccaaatcagttcaaagagattcctgaagttcttctctacagctgcataatatatgtagatataccatatgttattcgtgtgctctcctctgtatggacagttagtttttttctaatattttgttttaataaaaatgctgcagtgaataatattgtgaatatgtatttttgaaatgttgaagatgtcttcagcatagattttcagaagtgggattgtgggtcaagaggtaagtgcatttgtggagctactgggtgtgatcaaattttccttcagaaggattgcaccaatttgtactcctaccagcaatacataggagcatctttc

SEQ ID NO: 232744 - DNA, 538 bp, Homo sapiens
agaaaagtgggttcgagtaagtagaatttatatagagagaacatttcaaaaaactgttaaagagtatcctcaaagagataagagaaggtgttactttcatgaataaaggcagtaaactacttgaaaagaaagaacgaaaaaaaatgagttcttggaaaataagaatatagtagttgaaatgaaaaatttagttttaaaaagatgataaaatagaggcaaactcccagaaagtagagcagaaagacaaagaatagaaaatttgaaagaaaagaaaggggtcatgttcaggaggcccaatatccaaataataggaaattcagaaagagagaacagaaaaaagtagaggatagcaaatcctcgaacagtattttctagaactaaattgatgagttttcagttgacaggcctctcaagagctcaatacagtggataaaaatattcccataccagcaggtatcattactaaaatgcagtgctgcaaacagtggaagattctgcaagcttcctgagaaaaaaaattaaagcttcctgaggaaaa

SEQ ID NO: 232745 - DNA, 205 bp, Homo sapiens
atgtaatgaattaattttattttgcctgctttcatttttttctttgactgtctttgattcttttcttacagtgcgcttatgtaattgtcaaaagacaattttcatatttccaagcttgggcagctctgttcagaccgttcttcaccctcctgcttcaggactcatttcacgtaggcaacgctgtctaaagttcccaagggattga

SEQ ID NO: 232746 - DNA, 420 bp, Homo sapiens
tcagcctccccgcaggctcacacagggcacaggcctgaaagccctgagcccttctgccccccacacacctccacgtcccgcagggaacctgccccgagagcctgcgctggctgtgggagatgggaaggcctccccagggttcttggacctcagtctttttggccgtgctaaaaaaaatcctaggccaggcacggtggctcatgcctgtaatcccagcactttgggaggctgaggcgggtggatcacaaggtctggagttcaagaccagcctagctaagatggtgaaagcccgtctctactaaaaatacaaaaattagctgggcatggtggcatgcacctgtaatcccagctactcgggaggctgaggcagagaactgcttgacccggggtggtggaggttgcagtgagccgagtctcaaa

SEQ ID NO: 232747 - DNA, 425 bp, Homo sapiens
gtggagtattagctctattacttagcagttgtgtgatattgaccaaagaagtcggttccatgtcactgaactggggataacgacatctactccatctaactcatgaagtggttgtgagacttggatgaggtcaagagtttataaactctggagtatggagccctctttctgtcttgagcaaccagaaacatttttgtgcctatgaaagaacttaaagaggaaatacaagtggttaagagctggagtacaggagtaaaacagacctgaatttgaatgctgttttgccgttttgtaaaaccttactcagacaatttgcttaacccttccaagcattagcagagtgtttgacacatagtttagtgcacagtaaatgttagtattaccatattgatggttttagatagttttgtagttaaaggtgtgtt

SEQ ID NO: 232748 - DNA, 439 bp, Homo sapiens
ggctgggcttgaactcctgacctcaagggatccacctgcctcagcctcccaaagtgctgggattatgggcgtgagccactgcacccggcctactcttgaacatttgcagtctgttcttcacactaaatttagaatgctttttttatacttcttttttttttttgagacagggtctcactgtgttgcccagtctggtctcgaactcctggcctcaagtgattctcctgcctcagcctcccaagtagctgggattatagataatgtcactgtgcctgtctgattcctttttaaaaaataaaatcctgtcactcctctgctccaaaccctttggtggctctccatttcacacattaggaaatctagacttttgtttggcctacaaagccctctgagtcccagctgtcactcagatcccatattctactgtaatccctgtctt

SEQ ID NO: 232749 - DNA, 2090 bp, Homo sapiens
acgcccagctaattttttgtatttttagtagagatggggtttcaccgtgttagccaggatggtctcgatctcctgacctcgtgatccgcccaccttggcctcccgaagtgctgggattacaggcgtgagccactgcgcccggccgacacgacattcttatggacccagagaatactgcaggatcctgataagaccttgagtgatatgtcactagtctaatctgttgcccttaaaatagcccttttttcaaacacaggaaattaagaaacaccacagacctctattatttagaatagattctatgtgtcagtatgtgatgtactcttttagtttgactgacttcaataccattcaaaaagatcctcaatggagttacagggtttataggggaaaaatacatgtttatgagacattgggcaattcaaatcaacatgtgttacataagcaagcaaagcaaaacaccagtggggtctctggaaagtaaaaggacagactacagtagaaggactgatcccagagtgcctgtacaaggcctaaatctggcaggcaaaagcatcccacactgtctgtcagcacccacatggcctttttgcctgccttctataacgggtaagtggacctacccttggagatagagaagaaaaattatcttctctgatattcggatgtaatggtcatctcagttcagccccctaggaaacatgttttattttccatggggaaaatatcagcgttaaagctctatcaaatcaaaacaactttgccaacatcttctctctgctaccttttaaaccaattaaatacctttctctgaatattttgtccattcagatccgaagacctttaaagactgtggttttatttttgtgtttacattcctttggtttgaataatttgcttgatttattgcatttttagtatttattttaagccagatgttttcatctttgattcatttttatgacattaatttgtagacacttagtaaagtcttatgagaagcaagtggatgaaattatctccaagtccactcagtagactggagttttttaaaaatataaatttccaaaaagtttgcaatcaacagatggctaaaggttgccatctgaattattttataggatattttaattgactccattgtatggaaaccaagtgtgaatgttaagatgaatttgccgtataccctttatcattcggtgtccttgtactcagactttcatgtccctgggtgacctcaatgtgttggtttgtctccatttagaaaggttgataatatattgaattgttcaagatcaggagttccagactgaccctccaggaaaaaaaaaaatcgcaaagaacaaattctttttctgtgtaaaaaacactgatcctttgggaatggggcgggaaatgggagtaggacaacattaactttagctgttttagtttctgagatttcataacctcagtagacaccagcaaaattttcagtttctaactccaccaccaatctctcctcaatgaataagactttagcaatttatatagaatttgatcaggtaagagcgaaccacaattctcctgaaccctgctagagattaagtggtggttctcacttcctcaatgaaaacttgcactggggacagcgcttgccttggtcagaccttcccacatctacatactctcaaatacatgaccaggtgatcaagcaatggaaaaatttgcaccaccgtgtcccatgaaattgtttcaatgtttagtttagatattgctaacttgtgctattaaccttttgacaagcgtgtagtattgtttgttttgggtttctttttgatttataactatttagtagtccccagctagctaccagtacagattttaccccatgggtaggattctattgttaagccacataacaaagcacactaattctgacaacactgcaaatggaaaatacgaaccaaaaaaaagttacaccgataagttcaacaaactgtccatttttgatatttgcatgctcccctatggactggctgtggcaatgtaatgcctgtataatgttttcaaataaaaataaatgctttatgaaagcaccgaattcttgg

SEQ ID NO: 232750 - DNA, 371 bp, Homo sapiens
tgatgacggttagcaggcccaagtctgaggccttccaaagaaacatggtgcagcagtgggcctgagaggtacagaagagagggggtgacctgacaagagctaggtggatggacttcctccgacccaggaggggactgagtacctggtgctgccacaaggtgctctgcatgaggccagaggcttgaagtgggagtaggtgattgcaagtggtagctaactggcattctctgaaagtcagattgaatcactagattctgtttattaagagtaggactttcaatacagttttaaaaagctaccccttttcttaatttctcaggaaaatggcagctccttctttgtcgtcaaaataaatattcagccaagcctta

SEQ ID NO: 232751 - DNA, 307 bp, Homo sapiens
atgaaaatgccattggaactatagcccatagaagcagaccaagattacatgataaacctgggtgactgcctacaaaaataagagatttatataggacctgggaccttctgacaagctactataaaaaaaccacccatcattttaaaaaccacaaaaatcacaacttgaatgagaagagataatagatcagatcaacactgggatgaatcaggtgttgaaattatctgacaaaaattttgaagcagtttttttctttctatgagatggagtttcactccagcctgggcaacaaagagagactgtctca

SEQ ID NO: 232752 - DNA, 469 bp, Homo sapiens
aagacgaggagtagggacctattgaaagcccaggtcccccagtgacctgagtgcagaacgtaggctggtgatcagatggtcaattatgtgtttgtcaaaacacagtgggctgcattccaggctgccagctttggaagcccagcttctgccaaccaaatgtcatctgggaacatgcaacactgggcactgtgaaggagtttgaaatagaccatgccacagccaacctactgccagtcttatagcaccaatatggcatgcacagccgggccccatgtttcagagctcaggaattcactgtactaaattcaagaggtcagatgggttcatgttttcaaagcctatgttctttgctttgaacactgtgacttgctcctcagcaatttccaagggatttttccagtcacatctctgtggaaaccactctttttgtgatggttataagatccttgtaaatgtcccagaggatagg

SEQ ID NO: 232753 - DNA, 159 bp, Homo sapiens
ctgcctctttttctccatctgcttaacatgccctcactcccaaagctcagctgagggacctgttaagcctgaaggcttggcacttcagcacttccttttcagaaagtctcatctgtcagtaacctttgaagccttcaaaatctccatatccttccctga

SEQ ID NO: 232754 - DNA, 397 bp, Homo sapiens
  misc_feature (43)..(43): n is a, c, g, or t
cgctcgatctcgaggatcccttccagcaacgccaaacttccanccaacgccaaactaatgtttgtattcttagtagagatggggtttcactatgtttgcaaggctggtcttgaactcttgaccttgtgatccgcccaccccggactctcaaagtgctgggattacaggtgtgagccactatgcctggcctcagtttcttaaaaggttttaaatcacaccaactggtaccagtgcctctgattgccttgatttttctgtgatcccacttggaagtttgttaatgccacactccactatactccacacattagattgcagtgggggctggagagtggcccagcctttatacataactcccttctgtcgttctgctgtgggaccagtagggtccctgtgc

SEQ ID NO: 232755 - DNA, 364 bp, Homo sapiens
gagatggtcttgctctgctgcccaggctggagtgcagtggtacagtcagctcacttatgtggctcaggccggtcttgaactccggggctcaagtgatgctcccgccttggcctctcaaagtgctgggattacaggtgtgagccactatgcctggcctcagtttcttaaaaggttttaaatcacaccaactggtaccagtgcctctgattgccttgatttttctgtgatcccacttggaagtttgttaatgccacactccactatactccacacattagattgcagtgggggctggagagtggcccagcctttatacataactcccttctgtcgttctgctgtgggaccagtagggtccctgtgc

SEQ ID NO: 232756 - DNA, 344 bp, Homo sapiens
gtagagatgaggtaattgctggggtaggggtgatggtggagtggaggggtagtttcactatgtggctcaggccggtcttgaactccggggctcaagtgatgctcccgccttggcctctcaaagtgctgggattacaggtgtgagccactatgcctggcctcagtttcttaaaaggttttaaatcacaccaactggtaccagtgcctctgattgccttgatttttctgtgatcccacttggaagtttgttaatgccacactccactatactccacacattagattgcagtgggggctggagagtggcccagcctttatacataactcccttctgtcgttctgctg

SEQ ID NO: 232757 - DNA, 94 bp, Homo sapiens
cgcgcacttggcaactaaggagagttagcctgcaaagagaaatctgggatgggtggaatctgtgacttcagttatgacggactttcaggtgaaa

SEQ ID NO: 232758 - DNA, 563 bp, Homo sapiens
tttctattatgttagtccagcaatagagccgacctgacagtcttcagccataaccacagaagccagcattacaacccagaagctaaagttccaaatgtataacatgataaaaacatatcaagataagcttgattaatttagtaaaacattaccagtctctcggccaatacagccaacttcccagcagagacagcgagtcaggcctttaggctccctgggtttggccccgaatccccatacctcagccaacggcgcagcgtactgaccccagtctctgggtcagttcattttagacaacagggttgccgggctgccacagagatcagcaaacaaaatagtccacctgcaaggaacaggccttccttgtgacaaccgtgctacaggaaaaccagccaagttgccggaaccacagagtacaacaaagtttgggtaaaatagttgtggcaaaaatgaaattctggggctacatttccatcctgtatgaaactattgaacatccttggtcaacactctctgtagagatttgttttatgtaagttgtagttccaaaatgtgtggggttt

SEQ ID NO: 232759 - DNA, 726 bp, Homo sapiens
  misc_feature (639)..(639): n is a, c, g, or t
  misc_feature (690)..(690): n is a, c, g, or t
  misc_feature (711)..(711): n is a, c, g, or t
agttcggttttgctttcactgtgacaaagcagcatcaaattcaatgcaatgtctcacaatagctgcgctctccctcttccaagcacagagattctctctctacgccacaaagccactgccatgggatggggacaggtggcatcagcaactcaagactgtcttccctaccctcttcattgcctctttcaacagtatgaagttaaaatcagactacccaggcagggggagctgcaaagaccttggtttctctggcccttccaacagcaagtatcgccaggagcagctccctaatctacatactacagatctatccacaagaagacagatggaaccactcttttcttctgaattctagaaccttaaggaagttaacctgagtggctcagcttggatcaagtgcccatcctggtccaaacaactgtagcagcacatctgtgtatttgtgtatcttgttcctccataatcttgcagtccggggaaagtgtgcagatggatgggtccctgaaaagcaagagttgtttagacaacgctagaggtgttcagttctgggagacaagagttgggccaaggttgataactagcctaagagagtccggatcagatgaataagaactaagatcttgggtgacaacctagatnaagagtcttgaggttcagtcatttcaaaaaagctcaagtctcaatgcttcntgggcttcctgggtaaagatnaaggtgcaagtatcc

SEQ ID NO: 232760 - DNA, 707 bp, Homo sapiens
  misc_feature (421)..(421): n is a, c, g, or t
  misc_feature (453)..(453): n is a, c, g, or t
  misc_feature (471)..(471): n is a, c, g, or t
  misc_feature (488)..(488): n is a, c, g, or t
  misc_feature (495)..(495): n is a, c, g, or t
  misc_feature (522)..(522): n is a, c, g, or t
  misc_feature (565)..(565): n is a, c, g, or t
  misc_feature (578)..(578): n is a, c, g, or t
  misc_feature (591)..(591): n is a, c, g, or t
  misc_feature (614)..(614): n is a, c, g, or t
  misc_feature (630)..(630): n is a, c, g, or t
  misc_feature (667)..(667): n is a, c, g, or t
  misc_feature (688)..(688): n is a, c, g, or t
  misc_feature (702)..(702): n is a, c, g, or t
agttcggttttgctttcactgtgacaaagcagcatcaaattcaatgcaatgtctcacaatagctgcgctctccctcttccaagcacagagattctctctctacgccacaaagccactgccatgggatggggacaggtggcatcagcaactcaagactgtcttccctaccctcttcattgcctctttcaacagtatgaagttaaaatcagctctgaagatgacaatgcattcaaattcaccagatcacccccagctctgaagatgacaatgcattcaaattcaccagatcacccccagctctgaagatgacaatgcattcaaattcaccagatcacccccagctctgaagatgacaatgcattcaaattcaccagatcacccccagctctgaagatgacaatgcattcaaattcaccagatnacccccagctctgaagatgacaatgcattcanattcaccagatcatctantgaagtttcacttctgnttcttancacctccctgactcttctgttccctanagtggaaggagggtctgggaaaggacctttgcctgaaactaanaagtcaacatggntacccctcaatancccacctgggaagggagctgccnatgagccggaagcagntggggaggagatgaaactggggctatcggctttgcangctgggagccccctcctgtanctgccttatcttcnggtat

SEQ ID NO: 232761 - DNA, 425 bp, Homo sapiens
ggctggagtgcagtggcgcaatctcagcctcactgcaacctctgcctcctgggttcacgccattctcctacctcagcctcctgagtagctgggactacaggcgcccaccaccacgcctggctaattttttgtatttttagtagagacagggtttcatcgtgttagccaggatggtcttgacctcttgacctcctgacctcgtgatctgcccgcctcggcctcccaaagttgtgggattacagatgtgagccactgtacccagccttttctttttttaaacggagccttctattctagccacaagtgattaacgctacaaggctaaagcaataaattccatatagggctttagatctacttgcacaagtattgtgtcatttaatcctcccattaatcctgtgtattctgttaatatatgtggaaac

SEQ ID NO: 232762 - DNA, 515 bp, Homo sapiens
aataacttcatcagaactgccacggtggttgtaggaccattctgattccagaggtattaaaatgcaaaacacaatgttgaaatgcaaaacccaacaaaataataaacagccttgtacctaccgcctcccttaagaactaaaacaattcccaacaccactgaaagactgtgttcacctccttgatccaacctcttgcctttccaccccagagaaaaccactgtcctgaattttttcccactcccttggttttgttttaccaaacatgtatccaatatgtaacatattatttgtatttgatcttgtttttgaattgtcctgtaggtagaattatatcttattctgcaatttgctttttaaagtttttgaaagagcaaaacttatctatgctaatacgctaatgtgtgtagctgccatttatttgtcactgcatatacccctctcaattctgttgatggaaatttaggcagtttccagtattattttgctataaacattctcatggctgtctcctgca

SEQ ID NO: 232763 - DNA, 327 bp, Homo sapiens
agatgtcattgcttccaggaaccacatgtgaagacttgtcttcagattacccagtgaaaccacagaagaaatggagaggtcagagttccaacaagcaggatcatcaagaagagaggatattttctctgctgggttcataagatagttttgcaatcctaccaagtagggaggctggtgaattcaaagaagacaaatctatctatctttgtgctaattccgattttgaaaaaaacctatttagagacacatggcaatttaagaaagcaggaaaccaaagaacctggcattcttggaacaataaataaaaagctccttaaaagttaacaa

SEQ ID NO: 232764 - DNA, 158 bp, Homo sapiens
aaagaactgcatgtacacatgatgtttacattcatcttaagtaaaattaattgaccacattgttcctgaaattccttacatgcagggccaactcccttgaatcacttttttctcagttgtcgaagtcagtgacaaatgactacctttaccctctatcc

SEQ ID NO: 232765 - DNA, 311 bp, Homo sapiens
cctagctcatatagccagtggacattgtaaaagaaatgtccatgatattttaaacataaatgttcaatacactgaagttgacacggttttcacctacctgtattttcacatacagggctctgcagctttttttttttctgatagctaaagaacaaaatacatcattgattcaatcatgcatttattcaacaggtattttattgagtgcctactatgtaccagacactgttctaggctctggagagaaaaatagtaaacaaaacataccaaatccctgtccttatagatctttactaagacaataaacagta

SEQ ID NO: 232766 - DNA, 476 bp, Homo sapiens
ctaaccgattgcgacgagtgaaataccagaacccttcatgccaaagaaagcacttagcgcggggttgccacccagtaggttttcataaacgattgtttagtctgctttccttaaataaattggccatcacgtctcccgttagggtcttaatgagaccccaagaggcgtcatttgtataaaaagaaactctgtatatgcagtagaggaaagaaaacatatagaaaggagactggaaaagtgtgctcaaaacgctggtaacggttacctccagagaagagaacgatcgggacgatggtcaaagcggaccttacttcgagtttcttatttatctttttatttttaaacaaacattattggccgggcgcggtggctcatgactgtaatcccagcactttggaaggccgaggtgggagaatcgcttgaggcaaggagttcgagaccagactgggaaatatatcaagaatccatctcaaaaa

SEQ ID NO: 232767 - DNA, 737 bp, Homo sapiens
gccggccgcggagggcgcgccttggagggagaggactttaggtgacgccgccaggaggcgaaatttcacctgccagcagctctggaggtcaaaagaaatgagactgctgggctaagatcaaggtgtcagcagggctgtattccttcccaaggctccaggggagaatctgttcacttgcctttcccagcttctagaggttgcctacattccttggcttgcggacccttcctccatctccagaatcagtaacgaaagatccaaagccatatcctggctgagttggctgagttgagcaggacactgacaaggaggctgctgagcctgcaactcgactgttctgtttgaggagctctgtgctttatcatagaaatggatctggtgagtgcagagcccagggaatctacggaagcatttgcactgtggtatttcagcgtcgtcagtgctcaatcttcataaccctaaaaaacttactgagattggaaaaataactttcctactgtaagtctgaatctcttgaaccccttctcctaccttcacccactgaatccattgtttttatagttctgtgcttgacaacgtggattttcgtaagaatgccactgtcttttttttttttttagacaatatctcagtctgttgctcgggctggagtgagtggcatgatcatggctcactgcagcctcagtctccctgggctttggagatcctcctaactcagcctcccaggtagctgggac

SEQ ID NO: 232768 - DNA, 461 bp, Homo sapiens
gccggccgcggagggcgcgccttggagggagaggactttaggtgacgccgccaggaggcgaaatttcacctgccagcagctctggaggtcaaaagaaatgagactgctgggctaagatcaaggtgtcagcagggctgtattccttcccaaggctccaggggagaatctgttcacttgcctttcccagcttctagaggttgcctacattccttggcttgcggacccttcctccatctccagaatcagtaacgaaagatccaaagccatatcctggctgagttggctgagttgagcaggacactgacaaggaggctgctgagcctgcaactcgactgttctgtttgaggagctctgtgctttatcatagaaatggatctgaggtggggtgttgctttgtcttgtgatcgcagctcacggcagccttggactcgtgggcacgagcaatcctcccacttcagcct

SEQ ID NO: 232769 - DNA, 527 bp, Homo sapiens
agtatattaaagtatgtcaaatgtttatttttttccaacagaaagatccaaagccatatcctggctgagttggctgagttgagcaggacactgacaaggaggctgctgagcctgcaactcgactgttctgtttgaggagctctgtgctttatcatagaaatggatctggtgagtgcagagcccagggaatctacggaagcatttgcactgtggtatttcagcgtcgtcagtgctcaatcttcataaccctaaaaaacttactgagattggaaaaataactttcctactgtaagtctgaatctcttgaaccccttctcctaccttcacccactgaatccattgtttttatagttctgtgcttgacaacgtggattttcgtaagaatgccactgtcttttttttttttttagacaatatctcagtctgttgctcgggctggagtgagtggcatgatcatggctcactgcagcctcagtctccctgggctttggagatcctcctaactcagcctcccaggtagctgggac

SEQ ID NO: 232770 - DNA, 433 bp, Homo sapiens
gaatctttgctggttctcactcggggacacaacaagatgcagcacctcctaggtgtcatctagctgtttggaaagaatagaaggaacatttggaaacttaccaggtgctagaaggtgcttagtaacattcaacaacctatattctcctaggattatggactgctggcaatactcacggggaaggttttaaatggcttctcttcccatggtaataacatggaacttctgaaataaacagtcattagctctctgagttctgtctcagcttcaatcttctcttccttatttgaactttaggcatagaaataagagtaagaaggcattttggttaaaggatattttctccttttttaatcttccattcccttagagggaggtttatttctagtcagagaacataaaagatatacttttatttaagcaagcctgtggt

SEQ ID NO: 232771 - DNA, 855 bp, Homo sapiens
cagagctcagagactggatgtgagggaaaggggaatgaggtcatcgggcccaagcaactgggtggatcatggtgctgttgattgagactgagaaggctaaatgaggagcaggtactggaggtgtgggcacgagagcattgaagttgtatttcggccatgctgtatttacgatgtctaccaggcacccttctagagtctgcagctcagtagacaggtcaaggtgggataaaatttgggaatcattggtatgtgtgtggtattcagggaactggatgaatcactgtgactctaggtcttagagtgttggtcctcagctacgggtgatcttgcccccttcttccaggggacccttagtgatgtctggagatactttctgttactggtgatgggaagaggtacagtttgcttccggcatccactaggcagaggccagggatgccactcaacatagcagtgcacaggccagctccccacacatagagttacctggccccggacgtcagtggtgtcaaggttgagaaaccccctaccctagagtgagtgtagataaagcagaaaaaaaggaaagtaagcccgggggcattcttccatgcagagctggagaggaacagtctgcaaggaagaagggaagcttggagagtgctttttcttgggaggggagagtgtctggggaagaaacaatgctcagccgtgttacatgctcctaagaggctgaggcgtttgagcccagagggaagtgaccaatggcttaggcaagatggacattgttgatgactttgatacagagcagtctttgtggtttggtagggttggaagctccaggggaaccagcctgggcaacatagtgagacccca

SEQ ID NO: 232772 - DNA, 396 bp, Homo sapiens
gaaaaggagcaaaaagtgtgagaaaaattaccactgccgattctgctgcggactgtgggcctcctattctcatggctcagattcctcaacacattttcccgttggcccttttcttatctgacattgcatgatctaaaaatgtttggtgaattgtaaggtacttggtaatgttgttgttgctgctattgtaacaggtacagggcgatgaggtgtccttctcccaaccctcccacaggtccaaggacttggaagttaacttttgagagctgaacaataaaacaataaataattgatgacatttgtttaaagaaatgaccttaaaatatagaagaaataacaaagccaaaacattttcccatgagtttgcctaaatacaaagtaaaattttggcctcct

SEQ ID NO: 232773 - DNA, 417 bp, Homo sapiens
atttgttaagtgctttactagtgcccagcactgggcttagtagctttctcacatgattgtgcatgtacgtaatcctcccaagcaagttaagtattttattttctattttttacaagaaaccaaacaacagccctctccctcagagaggttaaatatattgcagaaagtcacacagtaagatgcagagctgaaaagacgtaattgtttttaggcttgcttctcagtgttatgtctgtatgctttaaactattttagctattgaaactattgctatttcaaatatagtatgctagtttatgcccattttatataaagaaattaggttatgtattaaaatgcaatggttgttttaagggagtggagctttgagtcattgtatgtattaatgctactatcatttaatgttcttatagcact

SEQ ID NO: 232774 - DNA, 368 bp, Homo sapiens
gagagcttcatgttgaatatcggcgaaagtaatttcaatgactaggcattctctggctattgtaaaacctcttctccctttttgttgatgggcttccaggtatgaattaggagctctggaagtgttttcctattctagctcttgagaacttgagttaaatctgtgtagttgtttatgtaccccaaagagtagcttagtgtttagttaaaacactcacagttctgatgccaaccactgtgacaccaaggcagccattcaaagtgcagggataagatgactgtgttattgctatatgcctgtgaagttgttggaacaatattgtaacaggatcttactctatctccttgaatatcaccaatttctgactc

SEQ ID NO: 232775 - DNA, 356 bp, Homo sapiens
ctatgatttggattttgacttttacagagctttctttttaaaataaattgtgtatcaaagtaacaaatactcagctgggtgcagtggctcacgcctgtaatcccagcacttttggaaacggaggtgggtggatcacttgaggtcaggaatttgagaccagcctggccaacacagtgaaactcccatctctactaaaaatacaaaaattagccgggtgtgggtggtaggtgcctttaatcccagctacttgggaggctgaagcaggagaatcgcttgtacccaggaggcggaggttgcagcaagccgagatcgcgccattgcactccagcttgggcaagagtgagactctgtctcaa

SEQ ID NO: 232776 - DNA, 184 bp, Homo sapiens
acaaaataaatgaaactaatactagttttatgggagctgaatgaaagtatttgcagttgatagaaagtattatctcatctttgaaacgaatgataaaatcaatacaaagagctcattgccaccttttccctaattccctatttacccatataagactttcactttaagatatcccagtcaaata

SEQ ID NO: 232777 - DNA, 443 bp, Homo sapiens
gtgatctagcaaacaaagtcttcaaaaaaaaaatacatgaggggaaaaacaataagctgaacatgagcagaaaacacattttcttgcatttgtggtcatcttctatgaagcacagtaagaatctttggaagccagtcttcagggcaaaaggatggaggatgcagcatcatgagtatccagagagtcaggatgaagttgttcttgggaactgcagagacaagcagttctatatggtttcaacacaaatgggctaggaagaaccctggcaccgggagcaataatagtgtcactacctttttctagaggtgggagacaaaaacttagccagacacattcaacagtaagactcaacaaagaatcttcatattcatggacagaaactaaatctgccacatttctagtaaggttctttcttggttaattaaatgtattaatctcttcca

SEQ ID NO: 232778 - DNA, 515 bp, Homo sapiens
gaaaagcgggtttattacagatttatttagcattaataagaagtggttaaaaattgcagagtaaccatatatatgtttgttgtaggctatgggataaaataatttcagtttcaactatatgtcatatccacatttacatatatgtatatgtgtatgtggacatattgtataaatgtacagatatgtatatgtgtgtttatataaatagaaaagataaggaagtccatcaaaatgttttgatagttatcattatctttagaaggtaggactacagcatatttatttcatcttcatactttcctatatttttccaattttatacaatgatcatccttttcttttatgatacaagatcttacaaccacagtaggacaaatgatgagaagtggagatgcttagtagagaggattataatacaatgaaataagttttaaaagggagagggctgcctcttctgcccttcactgagagattgtaaaaactggataacactggccaggcctggtggctcatgc

SEQ ID NO: 232779 - DNA, 382 bp, Homo sapiens
ggcctgggttaggatattttgaattcaggcattgtacaactggatagtgtccacttttgtgtagcagatcttaccgaattatttttaaagtacattgctcctgagggaaagatcagtaaaggtaaagaaaacaaaatatctgtaagaaatgcaggagacaggcttatggcaagtatccatgcctcatcagtgtttacctatgtaagcatggggattcagacaggagatagttgttacaggtaagtattaaggtacttactggaattgaaaaatgaagtcagatagaaagtaagtctgatgtggaaaattagtttgacgatgaggactggatttgctcattaggttatgacagacattttccatgaactgaacaagctaacaa

SEQ ID NO: 232780 - DNA, 518 bp, Homo sapiens
gaggaccacagctgcatggacatctttgcagcggccgcataggcaccactggcctgggtaagaatgctgtgctgccctgctcaggggccttggggagtcatttccgcctccagcttccagccttctgcagaggaacttccatggcatgagccgtcccctcactgtcctgggtctccttgcctccttcatcgagctggggaggcttgtgtcagccacaccactaggctgctgtaaagaagccccaagcaggagacttgttaacatcctcagatttcccaaacacatttttttctaattaaaaaaaaagtcacatgcacattacggaaactagaaaataggaaacaattatgcctagttccaattacccagagacacaccattaactttgcaaagtcctgccctctgatctttccagaggtttttaaaagagtacttgatcttctctatgcaggtttcttaatcacgctttttcatttaaggttcctaacacatttcccatgttgctcagactccaaaca

SEQ ID NO: 232781 - DNA, 343 bp, Homo sapiens
ttgtttccaggtttctgtagaagagtctttgtgtgaaccatgagggcgtaaaactgtaggatgccacccagaagaggatggctgggtgtgcccttggtgcagtcctcagagtccccgcagtggccgtgcacggctggttcccaggcagccacgagggccgagagcttccatctgtgtggatccagtagcaaaatgtggaatccttgctctgttcgtgtgtgtttctttgatttcagagtaaaactacactttaaaagccttttgaaatgttattctataaaatgccaacttagatatgttgctcattttttctctgtagagattacatttttttgtttgtttg

SEQ ID NO: 232782 - DNA, 127 bp, Homo sapiens
tagatgagttctcagattttaaagatctgcaaatgtctgttgtagaaattgcttcaggtggtttcatgttaactctgaagtactccattcttgaaggcatgtggttgttaatagcttcctaccaatc

SEQ ID NO: 232783 - DNA, 443 bp, Homo sapiens
aaacaaatgcctacaaaaacaaaaaatcaaaaagaaaaatcttaaatttcaacattgggctaacaccaaaaacatgaaacttaatagagataaatgcaaagtttgctaactaggttcagtaattctcctaggacaagattggaaagacctagcttggttgccattgaatcttctgccattggttgcagaaaatctgggggatttaggtgcccccaggctgactgagccagtagtgtgatgtcttttgtcagagccagcacagacggagctcaccttgatgatcatagaatgtctaggaaggggtgatgcgtcccctgtggtccgtcctggttagaccgtattagttattcaggaaaagagtgatagactgatagaatgtgaattgatttttattttcagggtatctggaaatatgtcctccctgaactgttgaaattactttg

SEQ ID NO: 232784 - DNA, 665 bp, Homo sapiens
tcatagaccgcgggacaaggtatatttaccatatagctctgtattttccctcttgtgttataatgttttctgtaattaattactctaacccttttagcaaagtctaatacacttcagcattgtctcgtgatgatatacagactaaatggacaggtgagtaaaagaaaaaattaaggcgtcctcactggtgggagcagaatcccaggcagagaactatgcacagaagtttcaggcagtgatcagctgaaagtcagattgcagtccattgtattccatggtggagacaagaacagggagggagcacccatacttaaaagaaacttctaggcttggagcagtatggtattttatacacatcacctctgttagtcaagctttggatgggggctagatagcagcccactgaaagacctggagtccctgtattcttaattgctatgtcggaaagttccatatttagaaatcagatgggcagcaggtaagttaggcattcttctgaaaaaaattaagcctctaccaggactctcgcttggtttataaaatgagccacagaagaaacagcaaactcaagttttcctctcaaaaagtcctgtgtcacttgaaaagttgcttcatacacattgtgtcctaaatatgaaatctaaagttgttactgttttgaaata

SEQ ID NO: 232785 - DNA, 437 bp, Homo sapiens
gcctgcttaagaatccccgtatctttttttatctctgtatatttcctaaaaatctttcttgaaatactgtgtaaaatgctactataaagcatttttaatttaaaagattaatttcaaaagtcatgtaataaattctattgaagaaaaacagtaaggtaaaaggctcatttagcataatgagaatcatttatttctatgtgtcttatggacaaatggtattatgtacaagattataacatattccttatttgtctctaatatttttcattggaaagtatatgggaagcctctagtttgttccaattgtgcatatgataatgattttacattaaatgtttattactgtttggcaaccacctaaatagcctattctaggctgtgtgggtgcatcacctgtctgtattcagcgatcaaaataaactaaggagtaaccaggc

SEQ ID NO: 232786 - DNA, 1109 bp, Homo sapiens
ccagcctggccaacatggtaaaaccccgtctctactaaaaatacaaaataaaaattaactgggtgtgtggcaggcgcctgtaatcccagctacttgggaggctgaggcaggaaaatcacttgaacccaggaggtggaggttgcagtgagctgagatcgcaccattgcactccagcctgggcaacaagagtgaacctccgtctcaaaaacaaaacaaaacaaaaagtagattctaattcaggaggttcggagtgtgtgcatttctaatgcgctccaaggtgctgttgctgctgcttagaaccatcatttcagtagtaagggtctaaaacaacacgactcacaagacctcaacccaccagcccaggtggaaaccaattcacaaacgtctcagtgaaatgattctgttgatgctggtgcgcacttctacatttatgtggggaaggaggtcaggacagaagttgagggacttgggaccccaaagcagataaggttgtggggtgcagatctggctctaggatcctgaagcgagtctctggaggaggtcaggcaaaatggtggcaaacttttatttctgtacggatcaagaaggagctgacagcagcggagagatggagtttacagtaatgggggaaggggtggtctagtggaaagaagctggtttggcatgtcaagggacttgggtttgattcccacttgctgtttactggctttagggctttgggtaaatgacttaactagaatttctaaacaaaattttctttgcccagagaagaaataacagtacaccaccacccgacatacatacgaattaccaaatagaatcgaaacaaaccgcgtggccgccccagagagttcgcgacccacgcgggaggaaggaagcaccaccccttggggggacaacaaactggtgaaggtgtgagacccctggtacgagatagaaatagggggatcaaccacgactttttcgcggctaccaaaactgccgcacaaaggttcgagacaccactcgtcgaaacaggcgcttgtgctgacgcttagggctgcaggaatcaagtgactgaagagctcccaacaagtcgtggagtgaccgacgttactaagtgaggaagc

SEQ ID NO: 232787 - DNA, 1258 bp, Homo sapiens
cacaggcccagctggttcgttatttatttttatttacatagcgaattctctggcatttgtcttccctgctggaaccactcagactggccaagatttccaaaacagtgttctattgtggaaacaagtgccagagacttggtacgctggatcgggtttctgtgacaggcttcagaggggcccaggtcacaagctggagcgtattgtttctgcctcaaagccttgaggttgggcctgagtgctgcacttcaacaaccgcaaagctgggtccttcttggaccacagcaccccaactgacattcagtagcccaccttttgctgcactcagaggtccacttgtccgtgggttttcacaaaggctagggtcctgtggtgatgtacttcctatagccagaattagctcagcactaggtgacaggtgagtgggttaaggaagcaggagttggtcagctttgtggttcagtcatcccagaatatgtcaagagcaaggggccctatctgggcattgctggcagtttcttggctgctctaagcattgccaagaaatgccagggatgatgggtttactactttcccagggagagctgcccttgggacatggaaaactgacctttgagggctatgctctgagatgggaagaagatcgtgtaggtgaagactgcttctgaatatgcttctaaatacgtagcagcatcagggtctggtggagccctctcttttggccacattgaaggccctgccttatttcaggttttggccagagaggttggggaagacatcaacgttcagcagctcctatcttcgccagggacctggaggggtcgggctcaacaaattcttgttttgcagagcaaggtgagtgagtcatcagacttctcctggcctgaacaaaggatttaaaacaccccagaaagagctgccctgacccccttagagacctaagcacacagtacccaaaaaaggcctttaggtctcacagtgcactcgtgcggggttgttgttttaccttctcgccaaccagcctgattttaatttgttatttaatgaacaagctcttatataacacttagcacatgccaggcactggagcttaacaaatgccaacgcctttggtttgatttattttactccaggcatcttttttttttcttagtttatgtagatttgcgtgactgttgtaattgtaagctttttccagttttgtccagatgcttgtagtcttttgaaagtttaattacccaataaaaatttagccttgtct

SEQ ID NO: 232788 - DNA, 713 bp, Homo sapiens
ctgagaatcacagtgtgcaaagcacacccgggtggtgtgtgcctggttggcggaggccgacagggtgcatcctgtcatctctgtagagctaatgagtccctgcacttaggctgtggtgtgtttggttcaagagctgtttatgtgctgccccggacaggggctggtcctcagcagcgtactctcccgtgtaggggatggggaggcttttgttgagagggagaagtctgggcggcctggtctggggaattcagtgggtgcatggtggtgccagttagtgaggtggacaatgtgtgtgggaacacactatgtgggctcgacttccacaggagatggccaggaggctctggagtcgctggcctggagctcctccaagagcaccaggtggcactaacaggtcaaagagtggccagcttagagggaggaggacatcaagggaggactgccctcgggaggactgctcgcagtgtctagggaggagggcaggcaggagcgctgggggccccgaaggggaggggtcgcgggtccctgggacctgaggggtgtcatcggcttcctgcgtgaggaaggttcccgagacaggatggggacagagactggattacagagggtgtagagtgtaggttttatgaaaaaatagagaaaaaagcagactattttccaaaaattttaccatgagggacagaggagagagaagtggcagttggtgggggata

SEQ ID NO: 232789 - DNA, 477 bp, Homo sapiens
ccacctgccttggcttcccaagtgtgagccaccactgaaatacttatatttttaaacttaatttatttatatttattatatttttatgtttttatattttaaaaaatatttttatactcactagacccaattttatactcctaaaccagggaataactgtttttttttctcttacataggcatgataccatagacaatgattaaaattgtaattaccattcatttcttagttttgtggctgggacactgatgtcttcaaatgttagtttgcaaatacagtcagccctctctatccatgggttacacagctgtgaattcaaccaaccatggatccaaaatatatgggaaatacgctggggctgtgggtcacacctgtaattccagcacttagggaggctgaggcagatggatcacctgaggtcaggagttcaagaccagcctggccaacatggcaaaaccctagctctactataagta

SEQ ID NO: 232790 - DNA, 386 bp, Homo sapiens
catgtgcttactggcttgtgcatttcattcctcaggttgtttgggcttgataagtgtaaattacgtagccagtgcatgaatgatcagggatacatactttgacctgcactggggcaggaacacaggacttcctcctggacctggcttccactggagcagagcccaaggcagggcttttcctacgcataaagctctgttgtggtttttagaaaccacccccaggaagaggaatggccaagggagcagaaaggaggaaatgtcagccccaaagttgcatcttgagttggtctcctccatggacaactgaggctctgtccttcagtgaccctctgaggagctggggagaatggagcttgtctgcacatgccttgcttataggagtgctg

SEQ ID NO: 232791 - DNA, 483 bp, Homo sapiens
aataaaacagttgaaaccaaaggcataacacagatcataacagcagctagaggaaaagagaaaatactagaatagatgactaaggtggatacaaaactggttaatgttctactggcaatgaaatcctcacctttggggttattttttttttcttagcagaaagttgcaaacattacttgtaacatattaatgttctacaaattaacaactactctcccagagtctgagccctaatcactagcaaagtcagataaaaatacatttccctagagctgggctgttcatttcggtgatggccttgagcacttgaaatgtagctggtctgaattgaaatgtgctgtaaagtgtaaaatacatgccagaattcacaaacattgtattaaaaagatgtaaaatgtctcataacaatttcatattgattacacattgaaatgatagtattttggacatattagcttaaataaaatattgaaattaaaaaaa

SEQ ID NO: 232792 - DNA, 333 bp, Homo sapiens
ggtcaggggcttggacaggaagttgctgggcaggtgtcctcacagaagtattatttgtgtcaggttgcaacagcctttgtgcaaatttgtgggttttgcagtcttccgtgatagcttttgttatcaggcattcgtgcatgggaaccctgcctaggtggccctccacagctctatttgtcaggtttttggatttttgtttgcttgaacaacaagtgactccatcttgattctgaaacctttcacaaccatacgggcaagccaaagtctaattgtgaggcccactccaatgcgacctgcttctgggcaacgtgatagactggccatggcttatat

SEQ ID NO: 232793 - DNA, 772 bp, Homo sapiens
ttttcagactggaatctcaccattttgcctaggctggcctcaaactcctgagcgccatctatcctctcacgtcagccttccaagtagatggaactacaggtgcaagtgactgtgcccagctaaacgtttctgaaagtttgttctctgaacccttttttcatgaaaataccatgttctagctgttaggaaacactgtatagcttagtagcctcttagagatgaaattacaattggtaaatatctggctttgagaagtctctctgtaaagaaacctctttaactttgtttaacccaatagaccccaaatctattttaacctttaaaagatgcgttagcaagttaccagtgtctgtgttcctggttttctttactccagtagacgtcttaggacaagacctttatgctcattctaatcctgactcatgacattgccaggttgcatgtcatttatgacctcagaaaataaatctgctgtgctagggttaagctgccacttaaaagaataacttggccgggcgcggtggctcacgcctgtaatcccagcactttgggaggccgaggcgggtagatcatgaggtcaggagatcgagaccatcctggctaacaaggtgaaaccccgtctctactaaaaatacaaaaaattagccgggcgcggtggcgggcgcctgtagtcccagctactcgggaggctgaggcgggagaatggcgtgaacccgggaagcggagcttgcagtgagccgagattgtgccactgcagtccgcagtccggcct

SEQ ID NO: 232794 - DNA, 400 bp, Homo sapiens
agtcatacaaaattttaaaattttttcctagggttttttccgccctcatttggcttcagaatcaagactgagtttgtgcatccagttttagatggaacattgaaaaacttgcagatatatgaggcagtgggggaagcaacaaggattatggctaatctagtgactaagtcctaggagggaaggttgaagaagctggattcaacactcaatagagtgatggtactcctccaatatgccagggactgaaccatgctctggggagatggtggtgagtaatgcagtagaatcccctccttcacagaactgccttttagtggtagagacagacaagtgaataaatgattttaatgtagtgcattaatatttataaaatagattaagagcagaatgccatgagagg

SEQ ID NO: 232795 - DNA, 352 bp, Homo sapiens
ggtgattcaaaaatcactaatctcagagtgcaaaacaatggtgctaaagctgccactttcaataaacacctttctccatggtgtattacattctatgcgaagggactatagttagaatcattccttttacctcacttgttttttatttttaattggaaactttagtgttagggagaaactgatcataagacgagttaccaatacctttgtgaatgcctttagtttttttcatagccagttgtgctagtacttttgcctggcagtttcattttttctggattaagtaactgactatcaaattctaggtcaagttcaacttcttctagcttttttttttttttaaccttggctt

SEQ ID NO: 232796 - DNA, 499 bp, Homo sapiens
gatacaggacaattccattaccccaaaatgtaatcaccacaaatccaccctcgctgtgcacctttgtcctcaatccaccctcatcccaacccctggcaaccactgatctattttctttccttacagctttgccttttctagaatgtcatataaatgaatcaagcagtatgtagccttttcagtcttgcttcattcacccaacaaaatacatttgaggccgggtgtggtggctcacgcctgtaatcccagcactttgggaggcggaggtgggcagatcacctgaagtcaggaattcaaaaaccagtctggccaacatggcaaaaccccatctctactaaaaatacaaaaattaaccggacatggtggcagacgcctataatcccagctgctcgggagactgaggcaggagaatcgcttgaacctgggagacggaggctgcagtgagccaggatcgcgccattgccctccagcctgggtgacaagagtgaaacttcgtctc

SEQ ID NO: 232797 - DNA, 366 bp, Homo sapiens
  misc_feature (365)..(365): n is a, c, g, or t
gatacaggacaattccattaccccaaaatgtaatcaccacaaatccaccctcgctgtgcacctttgtcctcaatccaccctcatcccaacccctggcaaccactgatctattttctttccttacagctttgccttttctagaatgtcatataaatgaatcaagcagtatgtagccttttcagtcttgcttcattcacccaacaaaatacatttgaggccgggtgtggtggctcacgcctgtaatcccagcactttgggaggcggaggtgggcagatcacctgaagtcaggaattcaaaaaccagtctggccaacatggcaaaaccccatctctactatacagaggcaggagatcgcttgacctgng

SEQ ID NO: 232798 - DNA, 375 bp, Homo sapiens
gcggaggttgctgtgagccgagattgcaccgttgtactccagcctgggcaacagaccgagactccatctcaacaaaacaaaaacaaaaaaaatggaaatcaaagtccctcaccagctcaacaacctcccatggctccccagtgccctgtggttcagcctaagccctgcgtgttcccctccctccagctgcctccacctggctgtctttgctggttcagcagtgcttgtctcgctgttccctctgcctggtggaggcggcctatctgagaagggctctatgtggttgccctgggctgctgttgtgagagccggctgggtgcctgtggcccctggggcagcttttcttccaaaatgggaactagtggcctgtgttct

SEQ ID NO: 232799 - DNA, 468 bp, Homo sapiens
gcatccagtcctaattcaatggagtgaagtaacagtgctcagtagcctcctttgctgtactgttttaggcttttgctagcttcagaaaatgaatttggaaatattttgtttttgttactatgttatgggtttattttgatccttgaaaacttaatgaaattcaattttctattaaaactggggtttaaggagatattggtcaaatgatatgacatttcaattaggtggaataagtttaagagatctgttgtacaacatgatgactatagttaataatacatgtattcttgaaaaataatgaatggatgtttactcagaaataactgtgaggtaatacatgtgttaattagctaaatttagttgttctacaaggtatgtatacttaaaaacatgttatacatggaaaatacatagaattttatctatcaatttttgaaaaaggaaattaaatagaatttgctcttgaac

SEQ ID NO: 232800 - DNA, 436 bp, Homo sapiens
gtccatgtctgtatcatagcctttctaactccagtcaaaatggagggtaaaaggacaattttaaaaccatctcgtaatattttcaaaacccttcccctgagccctgccccctctattttttctcgatttcatactggtgccaatatttgttcaataagttaattcatatcatcccctggagtttgaattataaaggaattattgtgattataatattttggcatatcctgttgatctctcatttgcccccatccttgatgttataggactgtatgatttttttaacctgagaagtgattaaaaacgttttaaaaatttagtctcctaaatgtagactgtttattgcagaagacagggaaattggcctgactgggggcatttgctaaaaatgcagagctcctgaaatcctgtgaaccttatggagtaagcaagtaaa

SEQ ID NO: 232801 - DNA, 709 bp, Homo sapiens
ttttttgactctggtggatttcttccttctaatctcaagaaagaaagaaagaaagagaaagaaagaaagaaagaaggaaggaaagaaggaaggaaagaaggaaagaaagaaagggtagggaagggaagaggtcagaaataccttgattttcttctctctgaagtcagaatgtgaattcataatatgaatgcaaatatttgggagtgcaaaaattacatattttcagataggattgtgcattttactaccaaattttactctttttggttccagttcaaggattctatgttcctcctaatttaattttttggtccccctagtggttttaggtgtctctgcagccacacacattcggcttttcctgcaaccacactaacctcagtggttttagcctaacttgggtttttcctgggatctttccactgtttttaaaagtcaatatcccaggctacttgtatccacactacctaaagtgcttgtgaaagcttcaaatacctggggttccccctcagacacactgaatcagactctagggcgtggggctctggaatggatttttaacaagctctctcaataatatgattcggggagccagatgctcacattgtatagatggaacctagggctatcttctcctttttctattcttttttttcacttattgggaagggttcagagaggaagagccagtagcagcaagacatgaaat

SEQ ID NO: 232802 - DNA, 422 bp, Homo sapiens
aaataattttattattttttatgggtatgtaagtgtatatatttatggggtgcatgagatattttgatacaggcatacagtacctaataatcacatcaggataacgggattatctgtcacctcatttataatttatttatgttacaaacattccagttatacttttagttatttttagatgtacagtaaattattattgactgtaatcacccattatgctatcaaatactagaacttattcattacatctaactatatttttgtacccattagccatccctgcattccttccctaacctttcctagcctctggtaaccatcattctactctgtctccatgagttcagtcgtattaatttgtagcatccaccaatgaatgcttataggtttttattgatttcctccccttctgtcgtcttctc

SEQ ID NO: 232803 - DNA, 1176 bp, Homo sapiens
agtttactgcaacctccacctcctgggttcaagcaattctcctgcctcagcctcccaagtagctgggactacagacatgcaccactgtacctggctaatttttgtatttttagtagagacggaaatctaatttcgccatgttggccaggctggccttgaactcctgacctcaggtgatccacctgcctcggcctcccaaagtgctgggattacaggcgtgagccactgtgcccagcctattttagtactcatcatattatgttaaagagcttgtctcctacactggactgtgatttccctatcattaagaactcggtatggtttttgtgcatctaacagctaatacttgataatgtttgtgtgccaactctgtataaacactattctaggaactcagtaaatgtttgcattgaattgagtttgtgttaggagttgtattagaactctacaccaccttatagtttataaaacatatgtatattcattgtcttatttaattttgaaatcaactgagtgctgcaaatgagaaaaatcaaagcccagagaaaactgtaactggtccataattacacagcagttaatggctgaacatccaggctgaactttgccagttagtggctgaatattcacgaaattctgatgcctccatagagcgggatagaattatggaggacttgtcattctggactgcggaatttggacctgtgtattgaaacaagaagagaaagggaagtgtttcttaagttatttttggatgaaggctttttgcgatccaaggcttcatcccctcaagctcaacaatagcattccttgggggagtgagaagatgatgaatggtcatcagtttgcttgcctcacccagattccattcctacctcccagaattttccctggtcccacccagctccacagtaacaatcaatcccaatcagtgactgtacttcattttttggatcaaggaatacccctcccttttctgtcttcctccttagggctttggataggagccctttaattgatgttgactaaactggaggccagcccctgcataccaggaatgccagtggctttgttagttgaggagggcgctgcattagcactgccctctaaatcccagagcaggtggaggaaatctaattagcatttagtaagccaaggtgccctggggagtttctg

SEQ ID NO: 232804 - DNA, 559 bp, Homo sapiens
gtcaaggactgggagtggagaaaatgacttatagtggtctttccaacatgaagtttgtattaatccgttttcacactgtgaggaagaaatacctgatactgggcaattataaagaaaagaggtttaattggctcacagttccacacggctggggaggcgtcaggaaacttacaatcatggtggaaggcacctcttcacagggtggcaggagagagaatgagagacaagcaaaaaaggaaaagccctttataaaactatcaccccctgcctcggtgcggtcgctcacacctgtaatcccagcactttgggaggccgaggtgggtggatcacgaggtcaggagatcgagatcatcctggctaacacggtgaaaccccatctctactaaaaaaaaaaaaatacaaaaaaattagccggacatggtggcgggtgcctgtagtcccagctactcaggaggctgaggcaggagaatcacttgaacccgggaggcggacgttgcagtgagctgagatcatgccactgcactccagcctgggcgacagagcaagactccgtctcaaa

SEQ ID NO: 232805 - DNA, 452 bp, Homo sapiens
agatggcatcaaatccaataatcatcacaggaatagaaaccaaggtccaagtttgggcatcaggaggtatcttcaggttctctcttcgtctgcttcctagtgtatagccacaagcctactatactgtgatacataaaacccagagatgtggcaaatgaaagtgggagcaacaaaactactacagcgtaagcctgtaatgcaaggcggaggaaggaaagtaaatgcttaaagttttcatacagctaactctgttgatagctgccaagtaaagaacctaaattcaagtgctttataattgttacaaattgtgccaaagtacagcgtgttacaataaattatgaagcttatctaaattataaaagtaattaaactttcctcagatactcataactctgccctccataaattttctgttcattgcatattcaatacctatgtgttccagtaaaaca

SEQ ID NO: 232806 - DNA, 794 bp, Homo sapiens
actaaaaatattggaaattaattttttattatttacatgcagattttttactagatacattaaaatgttagtaggctggtttttctttaaactcagtatgcttctgggttgctacttcttaccatttactagttcatgtgatatagattttaattttagtaatagccttctgaaaatgtagtgactcaccaaggaattaatttttacctagaaatccatgcctgagcaacatagtgaaagtccatctctacaaaaattacaaaaattagccaggtatggtgcctgtagtctcagctatttgggaggcagaagtgggaggattgctggagcctgggaggttgaggcagcagtgagctatgattgtaccactgcactccaacttgggcgacagcgcgaaacccagtcttaaaaaaaaaagaaaagaaaaaagagaaatcaaaagttgtgcatgtgaagcctcttgaagacggaacaaacctagaatactttttatacctttaaataaggtaatttaaaaattggttgataaatcatttacttggcagcagggtgggcatgctttgataagtcctatgtaaagagagatcaattgctcataaaatattaatacaatttccctttcccctggggtttagagctcagttttagttgaatcgtgtaactcctcacgaagtataaaataccacctatgatacctatttgacacttaaccattttagtgtataagaaaatacatgcatctctcaagagacaataatagtgattttaggattatctttgctcctatttactgt

SEQ ID NO: 232807 - DNA, 1357 bp, Homo sapiens
agcgcgcggcgggaaattgtttcccagagcccggattcgtgaagcagttgagtgctgcagcggcagtcgtcgcccctgccgccgctgccaccgaaggaagcatcccagacaccgggaagatggaagatggtaccccaaagcatatcatccagatgacaggatttaagatggaagaaaaagaagcgctagtcaaattacttttaaaactagattgcacttttattaagagtgagaaatacaaaaattgtacacatcttatagctgaacgcctatgtaagagtgaaaaatttttagcagcttgtgcggcaggaaagtggatactaaccaaggactatataattcatagtgccaaaagtggcagatggcttgatgaaacaacttatgaatggggatataaaattgaaaaagattcccgttattcacctcaaatgcaatctgcacctaaaagatggcgtgaagaactgaaacgcactggtgctccaggagccttccacagatggaaagttgtcctccttgttagaactgataagcgaagtgattctcttataagagttttggaggctggaaaggcaaatgttattttaccaaaaagttcaccaagtggaataactcatgtgattgccagtaatgcaagaattaaagctgagaaagaaaaagataactttaaggctccattttatccaattcagtatctaggggattttcttttagagaaagaaattcagaatgatgaagattcccaaaccaattctgtttggactgaacatagcaatgaagaaacaaacaaagatttcaggaaagatgcaggatttcttgaaatgaaaggtgccttaagagagaccatgtatagaacccagaaagaaatgcaaaatcatgaagatgttaatgttggttctattttgattcaacatcacaaaaaagaaaaattcagtggttccagtaaagatttgaaatttgttaaaatgagaaatacctttggaagccatacatatgaaaatcagaagggaaattaagaaaaaagatgaagatattcagaggagttatactttgaggagaaaacgcaagaaaggaaaagaaagcaattgcaagaaaggcgttgaacatgaaaaaataaaaagtaccttaagaaggcacatatataatagagatcagaaagaaatgaagaattctatttttgctgaatatgccaaagaatcaaaagccatggctattaagacagatgtggatgttgttgaaataaaaaataccttaaggaagcacatatatagagctcagagttttggaggctggaaaggcaaatgtcattttaccaaaaagttcaccaagtggaataactcatgtgattgccagtaataca

SEQ ID NO: 232808 - DNA, 1391 bp, Homo sapiens
agcgcgcggcgggaaattgtttcccagagcccggattcgtgaagcagttgagtgctgcagcggcagtcgtcgcccctgccgccgctgccaccgaaggaagcatcccagacaccgggaagatggaagatggtaccccaaagcatatcatccagatgacaggatttaagatggaagaaaaagaagcgctagtcaaattacttttaaaactagattgcacttttattaagagtgagaaatacaaaaattgtacacatcttatagctgaacgcctatgtaagagtgaaaaatttttagcagcttgtgcggcaggaaagtggatactaaccaaggactatataattcatagtgccaaaagtggcagatggcttgatgaaacaacttatgaatggggatataaaattgaaaaagattcccgttattcacctcaaatgcaatctgcacctaaaagatggcgtgaagaactgaaacgcactggtgctccaggagccttccacagatggaaagttgtcctccttgttagaactgataagcgaagtgattctcttataagagttttggaggctggaaaggcaaatgttattttaccaaaaagttcaccaagtggaataactcatgtgattgccagtaatgcaagaattaaagctgagaaagaaaaagataactttaaggctccattttatccaattcagtatctaggggattttcttttagagaaagaaattcagaatgatgaagattcccaaaccaattctgtttggactgaacatagcaatgaagaaacaaacaaagatttcaggaaagatgcaggatttcttgaaatgaaaggtgccttaagagagaccatgtatagaacccagaaagaaatgcaaaatcatgaagatgttaatgttggttctattttgattcaacatcacaaaaaagaaaaattcagtggttccagtaaagatttgaaatttgttaaaatgagaaatacctttggaagccatacatatgaaaatcagaagggaaattaagaaaaaagatgaagatattcagaggagttatactttgaggagaaaacgcaagaaaggaaaagaaagcaattgcaagaaaggcgttgaacatgaaaaaataaaaagtaccttaagaaggcacatatataatagagatcagaaagaaatgaagaattctatttttgctgaatatgccaaagaatcaaaagccatggctattaagacagatgtggatgttgttgaaataaaaaataccttaaggaagcacatatatagagctcaggctgtcagatacaactgcattagaatagataaacaaccagtgtacaacgtagaggttaaaaatgctgaatttcccagaggtgtattaaatttaattgaaagcctcatagaaggaca

SEQ ID NO: 232809 - DNA, 421 bp, Homo sapiens
tatggaagtctgtcaaaaaaaaccctcagtttatgctgtgaagcctcatggttgatattgccctgaaattaggcaatagcaatgggttaacactcaacacctacaaattgtaagcagttctcaaattctcatagtacttgagttatctcaaccaataagcatttctccaaaagtcaaaagttaaaaaaatttcttggattagccatcttaaatgtaaaataaaattaaaatgagaattcgttgactcttgactcttaagtgcaatcctgatagtaaaatcatgaggggttttgtttgttttgttttttcagcctttaaaggtgtgtgaatttggtattgacttgaatgaaggatgttagagcctgggatgctgaggcagtaagtatttagaggagcaacccttatatataggaatgaggga

SEQ ID NO: 232810 - DNA, 367 bp, Homo sapiens
ctttgaggttaataaaaagttgtttagcttcttagcacaaaagattgagaaaagtcaggtggaataacatgtgcattccaaaagaacaatctgcagatgcattcatcatggaagacaagcctttaaaggtgtgtgaatttggtattgacttgaatgaaggatgttagagcctgggatgctgaggcatgtgtttactagaatattttaagttacaagtgtggataccattctactggacagcatgcttttgggattagaactgcagaagccccacctctgcttcaaatataatagcaataaatgtgcttttgcatatgcagtatatttgaagaaataaagattattatgtggctaataaatatgtttg

SEQ ID NO: 232811 - DNA, 356 bp, Homo sapiens
aagactctgtctcaagaaaaaaacaaacaaaagcaggcaaggctctggggggcctatgctcaaggctgacctggactcagccctggcttgactctgctgttcaagcccccagccataagcagaaggcagctctcaggacaactcagaggtgggacttgagaggttgctgcctgctggtgaattctggctccaccattagtgttgtgaccctggataggtcacttaacttctctgagcctttgtttccatatctgcaaagtggggtcagcctcagggctgctgcaaggatggtagaggttgaagctgagggcaactgtcagtgctgagcgtgacaagcgcctgatggctggcggccg

SEQ ID NO: 232812 - DNA, 464 bp, Homo sapiens
cgtctctactaaaaatatgaaaattagcctggtgtggtggcgtgtaccataatcccagtactttgggaggctgaggccggtggatcacttgaggtcaggagttcgagaccagcctggccaacacagtgaaactccatctctactaaaaatatacaaaaattggctgggcatggtggtgcgagcctgtagtcccagcaactcaggaggctgaggcaggagaatcacttgaacccaggaggcagagattgcagtgagccgagatcacgcctttgcactccatctcaaaaagaaaaaaaatttacagttaggatttgtaaaattttaaaaatcttaaagaacaatagttaaatcttaccttctataattaaaataattaaatattaaggattctttggagttgcgtcattaggagctttacagtaagatatcttactagccaatattagcctgccacaggcaaatta

SEQ ID NO: 232813 - DNA, 500 bp, Homo sapiens
agttggcggggagggaatggctgaaattaaacatggtgattatcccaccatcagtggaagttatccagcagcagtggacatgactgcgaatcctccagaaaatggcttcgctgcgctccacggatctgctctcccaccccacctgcggcttgcacagcgacacacaagcgttgtgattggctcttccttggctgagacaagggtggggaccgaaatggcgtctctaacagctgatttttcagggcagcagctctgtgctaggagaagagaaggccgggctcactggcggtgcggagcccgccagggccaatccgcatccgggcggaggtgcaagcccgaccgcagtactgacacgtgccgcgacgtcccctcccggcagctcgcggggacctgggagcgggtggggtctctggctggcggggagccagggctgcgggaaaccgcacgaggtcgcgttcgcgagtggcggagaagcccagacccccgggcgcacgcggccg

SEQ ID NO: 232814 - DNA, 2818 bp, Homo sapiens
gaagagaaaagcataggaaaggaaacagtggtaataggaattggggtaaaatgaggatccttccccacaaacattgctattattcagctcatttcaaaggattccgctgctgccatttgtgagagccgctggaggctgagtgaaagtcattttgaaagactgatccaaagaagaatggaggccagagtggagcgtgctgtgcagaaaaggcaagtcttatttctttgtgtatttctgggaatgtcttgggctggcgccgaaccgcttcggtattttgtggcggaggaaaccgagagaggcacctttcttaccaacttggcaaaagacctagggttaggggtaggggaactgagagcccggggaactagaattgtttcagaccagaacatgcaaattttactgctcagttcgcttactggtgatctacttctaaatgagaaattggaccgagaggaactgtgtggccccagagagccctgtgtgctgcctttccagttgttattggaaaaaccttttcagattttccgtgctgaactatgggtcagagacatcaatgatcacgctccagtatttctagacagagagatttccttgaaaatattagaaagtaccactccaggggcggcatttctcctagagagtgcacaggattcagatgttggaaccaacagcctgagtaactacaccatcagccccaatgcctatttccatattaatgtccatgatagcggggaggggaatatctatcccgaattggtgctgaatcaagtgctggatcgggaagagataccagagttcagtttaaccctcaccgctttagacggcggctctcctccaagatcagggaccgccctcgtgcgcattctggttctagacgtaaatgacaacgcccctgattttgtgcggtcgctctacaaggtgcaggtgcccgaaaatagccccgttggttccatggttgtctccgtgtcagccagagatttagataccggaagtaatggggaaatagcctatgcattttcttacgccactgaaagaattctcaaaacgtttcaaatcaatccaacatctggcagtcttcatcttaaagcgcaattggactatgaggcaattcaaacttacacattaactattcaggccaaagacggcggcgggctttctggaaaatgcactgtagtggttgatgtaacagatataaacgataatcgacccgagctgctcctgtcttcacttactagcccaattgcagaaaactcacccgagacagtcgtggctgtttttaggattagagacagagattccgggaacaatggaaagacagtgtgctccatccaggacgatgtccccttcatcctgaagccatctgtcgaaaacttctatactctggtaacagagaaacctttggatcgagagaggaacactgagtacaacatcaccatcaccgtcaccgacttggggacacccaggctgaaaaccgagcacaacataaccgtgctggtctccgacgtcaatgacaacgctcccgccttcacccaaacctcctacaccctgtttgtccgtgagaacaacagccccgccctgcccatcggcagtgtcagcgccacagacagagactcgggcaccaacgcccaggtcatctactccctgctgccgtcccaggacccgcacctgcccctcgcctccctggtctccatcaacgcggacaacggccacctgtttgccctcaggtccctggactacgaggccctgcaggcgttcgagttccgcgtgggcgccacagaccgcggctcccccgcgctgagcagcgaggcgctggtgcgcgtgctggtgctggacgccaacgacaactcgcccttcgtgctgtacccgctgcagaacagctccgcgccctgcaccgagccgttgccccgggcggccgagccgggctacctggtgaccaaggtggtggcggtggacggcgactcgggccagaacgcctggctgtcgtaccagctgctcaaggccacggagcccgggctattcggcgtgtgggcgcacaatggcgaggtgcgtaccgccaggctgctgagcgagcgcgacgcagccaagcagaggctggtggtgctggtcaaggacaatggcgagcctccgcgctcggccaccgccacgctgcacgtgctcctggtggacggcttctcccagccctacctgcggctcccggaggcggccccggaccaggccaactcgctcaccgtctacctggtggtggcgttggcctcggtgtcttcgctcttcctcctctcggtgctcctgttcgtggcggtgcggctgtgcaggaggagcagggcggccccggtgggtcgctgctcggtgcctgagggcccctttccacgacatctggtggacttgagcggcaccgggaccctatcccagagctaccagtatgaggtgtgcctgactggaggctccgggacaaatgagttcaagtttctgaaaccaattatccccaacctgctaccccagagcacaggcagggaagtggaagaaaatcgcccatttcagaataatttgggtttctgataaagaatgtaaactaaatccgcgtctgtgaatacgtttctgattaggaacttattgcgaggttcccttaagggagtgtctttacatcatttcaaatatgtactcttgaagtcaagcaataaatttctatacataaaataggatcctgatttagtatcaagaacccttcacaaagcatgaaatgtatatgtgtaatgttttatgtcaaacaattatgcttaatatacagtctattaaatgtaagtcttgtttgagatatttt

SEQ ID NO: 232815 - DNA, 3721 bp, Homo sapiens
gaagagaaaagcataggaaaggaaacagtggtaataggaattggggtaaaatgaggatccttccccacaaacattgctattattcagctcatttcaaaggattccgctgctgccatttgtgagagccgctggaggctgagtgaaagtcattttgaaagactgatccaaagaagaatggaggccagagtggagcgtgctgtgcagaaaaggcaagtcttatttctttgtgtatttctgggaatgtcttgggctggcgccgaaccgcttcggtattttgtggcggaggaaaccgagagaggcacctttcttaccaacttggcaaaagacctagggttaggggtaggggaactgagagcccggggaactagaattgtttcagaccagaacatgcaaattttactgctcagttcgcttactggtgatctacttctaaatgagaaattggaccgagaggaactgtgtggccccagagagccctgtgtgctgcctttccagttgttattggaaaaaccttttcagattttccgtgctgaactatgggtcagagacatcaatgatcacgctccagtatttctagacagagagatttccttgaaaatattagaaagtaccactccaggggcggcatttctcctagagagtgcacaggattcagatgttggaaccaacagcctgagtaactacaccatcagccccaatgcctatttccatattaatgtccatgatagcggggaggggaatatctatcccgaattggtgctgaatcaagtgctggatcgggaagagataccagagttcagtttaaccctcaccgctttagacggcggctctcctccaagatcagggaccgccctcgtgcgcattctggttctagacgtaaatgacaacgcccctgattttgtgcggtcgctctacaaggtgcaggtgcccgaaaatagccccgttggttccatggttgtctccgtgtcagccagagatttagataccggaagtaatggggaaatagcctatgcattttcttacgccactgaaagaattctcaaaacgtttcaaatcaatccaacatctggcagtcttcatcttaaagcgcaattggactatgaggcaattcaaacttacacattaactattcaggccaaagacggcggcgggctttctggaaaatgcactgtagtggttgatgtaacagatataaacgataatcgacccgagctgctcctgtcttcacttactagcccaattgcagaaaactcacccgagacagtcgtggctgtttttaggattagagacagagattccgggaacaatggaaagacagtgtgctccatccaggacgatgtccccttcatcctgaagccatctgtcgaaaacttctatactctggtaacagagaaacctttggatcgagagaggaacactgagtacaacatcaccatcaccgtcaccgacttggggacacccaggctgaaaaccgagcacaacataaccgtgctggtctccgacgtcaatgacaacgctcccgccttcacccaaacctcctacaccctgtttgtccgtgagaacaacagccccgccctgcccatcggcagtgtcagcgccacagacagagactcgggcaccaacgcccaggtcatctactccctgctgccgtcccaggacccgcacctgcccctcgcctccctggtctccatcaacgcggacaacggccacctgtttgccctcaggtccctggactacgaggccctgcaggcgttcgagttccgcgtgggcgccacagaccgcggctcccccgcgctgagcagcgaggcgctggtgcgcgtgctggtgctggacgccaacgacaactcgcccttcgtgctgtacccgctgcagaacagctccgcgccctgcaccgagccgttgccccgggcggccgagccgggctacctggtgaccaaggtggtggcggtggacggcgactcgggccagaacgcctggctgtcgtaccagctgctcaaggccacggagcccgggctattcggcgtgtgggcgcacaatggcgaggtgcgtaccgccaggctgctgagcgagcgcgacgcagccaagcagaggctggtggtgctggtcaaggacaatggcgagcctccgcgctcggccaccgccacgctgcacgtgctcctggtggacggcttctcccagccctacctgcggctcccggaggcggccccggaccaggccaactcgctcaccgtctacctggtggtggcgttggcctcggtgtcttcgctcttcctcctctcggtgctcctgttcgtggcggtgcggctgtgcaggaggagcagggcggccccggtgggtcgctgctcggtgcctgagggcccctttccacgacatctggtggacttgagcggcaccgggaccctatcccagagctaccagtatgaggtgtgcctgactggaggctccgggacaaatgagttcaagtttctgaaaccaattatccccaacctgctaccccagagcacaggcagggaagtggaagaaaatcgcccatttcagaataatttgggtttctgataaagaatgtaaactaaatccgcgtctgtgaatacgtttctgattaggaacttattgcgaggttcccttaagggagtgtctttacatcatttcaaatatgtactcttgaagtcaagcaataaatttctatacataaaataggatcctgatttagtatcaagaacccttcacaaagcatgaaatgtatatgtgtaatgttttatgtcaaacaattatgcttaatatacagtctattaaatgtaagtcttgtttgagatattttaaattgctttccattgttttcaatctctactgagacttcctgagttgattagaaagctgtatgagtgtacctaccctagtctcagaagcatagactgtagagtatctttttaagcatttttaaaaaatgcttttaatgcatcatacactattttaacacttttaatctgagaagaagcatatgaggcatggtattttaggaatgaacaaatagatggtcttagagattcagtaagttcactaagttccactaactaataagtgacaaaactgagcatccatcccagatctgtctgactctgggtcagtgaccctgctccgattccatactgttttctgtcattagatatcacctggcaagtttctgcctaattaaggagaagtcttttatcatatttatactgctgtccaatcttttctatatttagaaataataatgtacatatttatctatggttttattttcttatacaccaaaagtcctgcttttctgggtcaattttcaactattattactaatgctctgatctgtccaaactcaagcggaaaacaaaattgaaagggcaacctgtgccttctcctttcttcagaacatatgactttcatttcccagaaaaaagattaatggtcctgagtaggaatattacataattttgattgcatcattagttaattattttcttcatattgtagattttctgcagtcacccatacttaacatttgtaatacattttcctgatttgaaagtttgtttttaaaagttttctattaattatagtgcactattgaatcaggaaaatttaagaaaaagaatagttagttttaaatgcataatatcaaagagaatcatagatgatcattaaatttttagaaattctcggaagttaaggagaagcatgtttt

SEQ ID NO: 232816 - DNA, 462 bp, Homo sapiens
ttaagaagcatctgcagttgttgaatgggggctgggttgcgactgtccctgccttgggcgccaggttcatccccagggatcagccctctgctgacctgggaatatggtcagaatggagttgctggtcttgggagcaggcttgctctggacacaggtctagcctctacagaaaagcaccatcattcaggtgtccggccagcactgaggagtcaaagggggtctttctgaacttgtatccagtgatgtgttctcactctagctttgatggtcctcagtggagccaagactccgtatgttctaagagaatggcaaaggcctccttgtcttgtgttagctactgggtagaattttacgtagtaactaggtagacactgatttagaatccagatggaccttattctagaaataggaatctgcccaaaggtagaaaattggaattatttgtaaatcaggaggctgtaa

SEQ ID NO: 232817 - DNA, 673 bp, Homo sapiens
ctgtagtcctaactgttcaggaggctgaggcaggaggattgctttagcccaggagttcaaggccagcctgggcaacatagtgagttcccctctcttaaataaaaaagagttcccctttgctttgttccctttccttccctctccacagaagtacttttgttccactatggctgctttagctgccgctgcagtcatggctgcactaaattttagcattgtttcagctttaccccttccctattaactagtacatctcttatgttcctaactgtaaattttttcaagtggaagctcattgatttcagctcattgattttttaaaggttggatagtcatagttgcagattagtccatagatttgctgtactcctgtgttaataatagcaaatattattattaaataatgttgttattaaaatttttagtttttatcttgagcacttactggccaggcactattctaagcagcttttcttttatgtaaaattgtgtattatgtatagaaggagcaggactgaaaaaaaaactaaacaaaaaattgtgcattatgtattctcacagtcactttatgaggtaggaatactgttgttccaatttgcaaataaggagtctaaggcatggggtctgggtccaaggtcactcagctaattaagtggacagagtgaggctttga

SEQ ID NO: 232818 - DNA, 471 bp, Homo sapiens
ttcatctcctccctgagctccagcctgatggtgtcctcctcccagtgctgcatctttggcacggccccctggttctgataaaaggtggtccataaagctgctctggagccaaaatattgcagtcacatctcggcagcgacctgccctcaggtggcattttcaagtcatggagaaggtggagagagaagcaatcagcagccacccactgcagctggagaccccagaacttggtgtctgcctcccatggcactgggaaggctggagacaggaagaggaagacagagctcttaccagggggaggcagagatggcacagcaagagacatgcccccagaatgccaccaatgccccaggacaggcccacccatgggaccaggttatcggggccctgaggggatggggtggaatctgaagggtgagccttcttccagcagtcatgttgcaaggaaacgaaatcacgttacttcttcca

SEQ ID NO: 232819 - DNA, 349 bp, Homo sapiens
gtaagtcgacaggcaggctttcctggccagctgtccctggtgacctgatgtaacctgggacgtacctagagaaaaagaacacaactctgatttcagaataaaaactaggctcctgtagcaaacatcccacatccatgtttgttaggaaactgtgtctgtgaattccagatccagggagggggccaggagtggggtgcagcctcagggcccctcattcactttttgccaagtgagcttttctttctctcagtgattttcctgggaaccaccttcccttttccctctggagcctgtttatgtcccctgagtgtccttgccacaggaacctctctcctgggacacccaggtc

SEQ ID NO: 232820 - DNA, 548 bp, Homo sapiens
acgggaggcgtccctgctctgatcgtgcgcctggcttggctgcctcctgcagcccagcgctacctgcacagcttctaggagaggcggcgcctcccacgcatcctaatcacatgtctacaggaattcagaggccaaggagcccatggaggcctggagagaggaggcagggtgtcccggagaaggaggagggcagagcacaagctgctgcgtttctactctgcctcctgtgtcagcaactctccccatccacaggaaggagtctgggcagaactgaaggttgtcacaaggagctgctaaacagatcaaaaggcattgaaggatggagtgacatgatatatgacctgcccaatccttgactgcacatcacataagcagtcctaaggatgtgaagtatatgatgccaccagttgaatggattgaagctcctacacgtacactgttggtttcagattctctactctacaacatcagaaaagaatctatttttggtgagataacaaatgtgctatgttactctagaataaagacatctgtttacttacaatttt

SEQ ID NO: 232821 - DNA, 606 bp, Homo sapiens
cattttaatgcatactttggggattcccatatcccaccaaagcttatgctttgatctttaggtggaattgctttatgataaaagggttcttttactgttcattttggatgatgtggatgagtcttagagttttattctggtctttacaaatatgatttgctattttctaaacttatctaatgactaacttaaggcttgttatgataagattataagaaaacactttggggaatcttgagagttttctttgtaattataatttataattctgtaacatagagaacatgattaacatgaagctctaaatgtatccaatagttttgctttcttatcagtgaatctatcagtatactagtagtaactggagaatttcaaagatatgcttacactttaaaccctcaatttccagtgcttcaggtgggtttgcacatatgacaagacaggcaaggagtaagaaggagccagtataagaattaaaaaggagaccgggcacggcgacttatgcctgtaatcctagcactttggtggccgaggcgggcagatcacttgggctcaggagttcgagaccaccctgggcaacatggctaaaccctgtctctactaaaa

SEQ ID NO: 232822 - DNA, 394 bp, Homo sapiens
agcccccagcacctgccagcacacaggtcctcagtaaaagtgcatcgtgagtgaacccctgcagctcgccatactctgattggcagcaccctcattttccttttctcatcatgaaatagctcaaacacccgcatttgacttttctcattgtgaaattttcaaacacacgctaaactaggagagtaatgtaaagagcccatgtgctcaagaacaagccaatcctaacatcgggccacacttgcttcaaatgtttaagacatgaatattgcaatacagttaaagcccctggaagccttcctcatgtcaccccgagtactcttccaaagcatcccattcctgtttttatactattactgcatatgcgtgtgttcataagtcatacagaagattttta

SEQ ID NO: 232823 - DNA, 548 bp, Homo sapiens
caagtagctggaataacaggttcctgccactgtgcccagctaatttttgtatgtttaatagagacagggtttcaccatgttggccaggctggccttgaactcctgacctctggtgatccgcccacctcggcctcccaaagtgctgggattacaggcgtgagccaccatacctggcctgaaattcttatctagaccctgttaaggttaaagaattccagattgttgttgctaccattatttgatttttttaatgcatccagagtgtcatgtttcctaaacctcaaactctattctaattttatacagttttattgtctcactgaaattatagattcttgagatcgagaccatcctggctaacacggtgaaaccccatctctactaaaaattcgctgggtgtggcagtgggcgcctgtggtcccagctactcgggaggctgaggcaggagaatggcatgaacccgggaggtggagcttgcagtgagccgagatcgtgccactgcactccagcctgggtaacagagcgagactccgtctcaaaaaaaaaaa

SEQ ID NO: 232824 - DNA, 230 bp, Homo sapiens
atttcagataaactgacacaccttcaataatgcaggtttattatgtaagtttttactgatcctacaaaggatacaacaactacatgtccaaagatgtaaattcggggctaatcttctctatttaatcctttactgtttggggagaagaattactcatctgggattcatgaattgtatggtcactcaacctgttttcttgcaccattttttatcataagataggttcttct

SEQ ID NO: 232825 - DNA, 511 bp, Homo sapiens
tcttctgggatataatatctaacatttatctcattatctttatatctaaacctctcctttgtacaaatccagtaagcctagcctggaaagctgagttcattcctcccttactccatacccagctaattagcaaatcttatctctccaactctctgacaattctcatgctaattcaccttacattgcagccatatcagaagaagaaacatagcgagtatttccctctcattcaaatcctccctcacctggctacagcgacttcttcctggtcagccttagcatgattgccctccttctcccactgcatagacggcagtgtcttgttctcttgattatgaaggttgttatttaatggagccatagttctttctctattattgtagaactattattggacagctaaaacagaagagatgaaaatagaccagcttcagtaaataagaatatcaacttaataatatgacattctcctggaggaaaacaaatgaagtatgctccagggtctgggaaa

SEQ ID NO: 232826 - DNA, 355 bp, Homo sapiens
gagaatcgcttaaatcctcgaggtggaggttgtggtgagccgagaacatgccattgccctccagcctgggcaacaagagtgaaactccatcccaaaaaaaaaaaaagaacgaagacatttttctgtataaccataataccattattatacctaagaaaattcatttttttaaatttatttttaatttttgtgggtacactgtaggtgtataaaaagtgactattgtaattgttattttgaatcccagtctaatcaagtttatcaatcaagcacattaaacaagtctttaatcagtcaagcccctcacctgtttttttccccttgaaactgactttgaagaatctgagccagtttt

SEQ ID NO: 232827 - DNA, 546 bp, Homo sapiens
accaagaaaattagtgtgttatcactgatgttattgcagattgcctagatattccatagggaggaaaataaagtacaattaaccaattattgaaaagaaatcaattatatattaatatgcaggcattttctaaagtaacagaaatagctctagcaagcttatggtcatcaataagaatgattatcataaaagtaaatttaaaagtcttttaatccattgtgtttaatctggaactggtcctctaaattgaaaatgaaatcatgaagtataaatgggcccaggcactgtggctcacgtctgtaatcccaacactttgggaggccaaggcgggtggatcactttaggtcaggagttcaagatcagcctggccaacatggcgaaatcctgtctctattaaaaatacaaaaattagtctggcatgatggcgcatgcctgtagtcccggctactcaaaagactgaggtaggagaattgctttaacccaggaggcagaggttgcagtgagccgagattacaccactgccctccagcctgggtgacagaggaa

SEQ ID NO: 232828 - DNA, 607 bp, Homo sapiens
taccctcctccaacgaaaggacgaactgatccaagagacggcgggaggcaggagaaagcggagctccgcatcaggcaggcccggacaggcaccctccaaagagggtttcattagggatgcaaaatgaatctggctttacagctggtgtagaccaggctcctgccccatcctgggctacccaggcccagccggtgctgacagcaaagacagaaggtcggtttctgcctaaagcaaacgctcagcgaggctggaacagaggggagtgctgcgtggtaggggcgagggcgcttggaggggcctctgcctgcagcgtctgggtccccagcccagggctgcttctttaaagacaaacaaaggcgaagatgcggaggctcggaagccggagatggggaaatcagttgtcataaaagagagattcagagagggacaccgccagagtgcgaggcagagagaagccgggagaggaattcaatgccgtgtgcgcagcaataaaataatatgaccgctataaaagtttatagcgtataaatttctgaaggttaagaaactaaacagcagcaaagcaaacagcgaggggaaactttccggagctgagagagccgcagct

SEQ ID NO: 232829 - DNA, 218 bp, Homo sapiens
gaaacaacattggaagcagtttctcctctgcctctttaatcccttggccaacgcaatcttgagttaagcacagtctcactattaagtcttgtagggtgaatacatctttacttccagttttcatccactttatcttcatctcggagaattattgtgaaaaaaaaagttctcagtgtataactcatattaagtaaaagacatgtaatacattgtaataa

SEQ ID NO: 232830 - DNA, 391 bp, Homo sapiens
gaacggttcaaggagctgcaatcggcaggaggaatcggaaattttaattgcattattaccaattataagaatttttgtgctatgagtgggttttgtgctatgaggggacccaaaaaagggctgataaaacaccaaaaccactggtgaggagaacttaagagggaaccaggcttcaagctcctaaactcaccatggactgccacagaatttaaagcacagtccatattcctcagaaagctaaccaagcccaccactgggtgtcctaccaaaggccgttccctggcattattctagacagaacaacccagacggcaaaaatgtactgctgtggagagatgaatcaattcctaggaggactggacagacattctcaaaagtttgttggaaagat

SEQ ID NO: 232831 - DNA, 382 bp, Homo sapiens
ggattttctctaatctgattttgttgcttctacccataatcgtactcttgatgctgaatgctgattggcaagtcagaaacttggccaggcatggtggtgcacctgtaatccaagctacttgagaggcagagtcaggattgttagagcttaggagttctgggctgtgatgcactatgccagtcggatgtctgtactctttggcatcagtatggtgacctcccaggagcagggaccaccaggttgcctaaggaggggcgaactggcccaggttggaaagggagcaggttaatactactgtgccgatcagtagtggcattgtgcttgtgattagccactgcacttcagcctgggagacataggagatcttcatctcttaaaaaaa

SEQ ID NO: 232832 - DNA, 425 bp, Homo sapiens
tgcatacatatatacgtacaaatatttcatagtaagtaccatttcttcttggacccttcctggcactgtgctaactactttctacaaacttagcttacataaactcttgatatacccttgaggtgagtaggtattatctgtagtttacataagatgaaatagagcctcccagcagttaagtaacttgtgtgaagatgggacccttgttcatgatggttctagaaccttcatcattaatgataatgctgaagtaagtacatgaattgcctgaagaagtggtcagagtttatcatagaaaatctagctagtactcagtgtgtggaaaatgtatacactcttgcatttatggaaatgataatgttcagtatttctgatattctattaactattttttaaattagcaaaaataaaatacaaattggcaa

SEQ ID NO: 232833 - DNA, 503 bp, Homo sapiens
caaagatgagagttatttttctgtgtggtgcctggcacacagtgccggtgtgcaaaatcaccaacgcttggattgtcgatgtaacatttgctcacggaaagctgacctcacccatgttgaagctccctttcctcatctgctgagtcaggatgcagatggggtggctttcagggactgctatacagacagagttctagaaggttgtgtggcccggaagcggtgctgtgccgatgttaggggcctctacctctgaactacaagcaaattctcccctccaacaagagcacattgtgttctggccccggtctcccactaaggctactttaaatgcagatccttctgccaacagctacttttagcaagggcagactatcataaggagagaaacttgcaagaaaatagcaaaatggaagcattgttcccgagggtttggagcaggctcagggaacggtggggtgggagagccctggagacgtgctttgccatcacaaataagttgtgca

SEQ ID NO: 232834 - DNA, 734 bp, Homo sapiens
agaattcctaaggatgaagatatttttccgttgtctgctgaatccctgaagcctagcatgtgtaagaagacacagaatgcatattcactgtatcatttagtcctgggctgctgagagaaaatgcaatctctatgacaaagccagctccaccttctatcggtcccctactgttgggtgaatagtcctccaaatgctggcaggaaggggattgactgctaaggaaggaaatctcaggcacttctcatatctgaaaggaaggcacaggaagagccgcaggatggaactcagactggatgaaactgggaagattttgctagacagaaattagaaacgctcctacaaagaaactgaagttccatgaacatgctgttgccaccctgcaatttagtgtcatactctacttgtaactctcacctaacaatgtgtcatctttactttttatgttatttatttacaagtgcattttcagtatcaaccccttcattcattaatcctaatgtggccttttccaatgtctacttaccattttaaatacttaccataatttacagggctttcttgaacatatccaaggtatattatatgagtctagcttaatggaaagtcttgtataccaaagcaggaaaaaaaacacatttaatttatgatggctttgaattttgatcataatttactcctggagacctattcacacaaagcaataccaatacaatttttcagaagcaataaaaaat

SEQ ID NO: 232835 - DNA, 400 bp, Homo sapiens
catgaactaaatgatatgaagataacacttccagttcttaaattctgcaccagaaatgcctgctgcacagccagtcaccagtgcttccatctccacatcttcacgaaagagcaaaagaaaagacatggaagtaacttaattgctcagtgcctcagtttcctcatctgcaaaatggaaatcataacagcatctgcctcatagggttgtcttaagaattaaacgagctaacaaaagtaactggcacacggagctcaaatgtcagcgagaattatttccattatggtcactcttattactaattctatatcaaccaataaaatattcctgccagtatttttcctaacccaataaactctgcactacagaacttttagagctaatataaagtactcttgtcaaa

SEQ ID NO: 232836 - DNA, 321 bp, Homo sapiens
ttaacatttcttccaatctcctcctgataaagtctgagcctcctttcaaggctcatctccaaggccatctctaaggcaatttttcgtccctccttacactcttaaagtaacttctccctcctttcggccagtacttaactacattcggccttgtataataccttattgcatatggttcttaattctcctttcagaatcttggctccttagaatgatccccttcactcctttatatgtgagagaggagaaagtaccagagacagggtttccatgccatataatcttccttttttatttgggacaaggagtatactatattgt

SEQ ID NO: 232837 - DNA, 387 bp, Homo sapiens
gagactcatacagaagaaaacagagattaaaattgagagaattcccacggaaggacacagagctccccccgcctcagcctttctctgaatgtgactcagtagtgttcacggcataagccgtcctccttgcttcatgccaccctcatcctcaacacaggttcctgcacaggcagaatggctggaagctctggatagagcacaattccaagatgtccctatcctaaagtcagggaaagaccactctgtgaaacagactctagaagaacagcaattggatgcctttgttgtttgtaaagtaacccatgggcaatggattataactgagttgctgatgggatcatcctgtttctcagtccagtcaatagaactcttcattgtattgtgatc

SEQ ID NO: 232838 - DNA, 417 bp, Homo sapiens
ctgtaaagctgagctcattgactaacgcttaggaagtggagggccttacattctagattccaaccttcgcctacaacaaaggaaactgccggtattttcccattgctagtgacctctgctttcttgtgaccaacaagtaagcaagtcaagtccatttgttaagctctgtgactcttttcattgttaggaaaatttggacttcaaagtgagggagttttgggggatgcttggcctctttgggaccgagagggtgaggacagctgttttcttgttcaattggcagccctggattaaatttctaattttcttcctcacctatttcctccctgtttcctataagcttagcccttttcctggcacatagtaggtgttcaataaatatttgctgaatgaatgaataaagtgcattgtgtgaac

SEQ ID NO: 232839 - DNA, 555 bp, Homo sapiens
ttagacaaatggtgttggaacaactggaaatcaatatgacacagatccattagacacagatcttacaccctttacacaagtgaactcaaattggattatattcctaaatgtaaaatgtaaaactatatgaacccatagaagacaaccaaggagaaagcttagatgacattggctatggtgttgactttataagtagaacaccaaaggcacagaccatgaataaaataattgataagccagggtttttgaaaaattaaacacgtttgttctgtgaaagacactatctagagaatgggacaagcagcagcgactctcattcattgctggtggaaatgcaaattgctacatccactttggaagacagtttcacagtctctcacaaatccagcaactatgcttcttggtattacctaaataacttaaaaatttatatctatacataaatctacacatcagtgtttatagcacctttatttataatagccaaaacatggacccagccaagataaccttcagtaggtgaatgaatacattgtgggcatccagaaaatgaaa

SEQ ID NO: 232840 - DNA, 746 bp, Homo sapiens
ctggaatagctagttccttgctgtgtggccttgggcaagccactcaagtgctctgggctgtcatttactcacctgtgaactaagagggctgaactggatgatattgaaggtccctattagctctaagtcagggcccagcatgcaggcatatcaagtttcttttcttcattttcaaaaagtaagcttctgagaatatttttgaccatattgcaaagtcaaataattattgagtgagtctgttatttcatgccattccttttctactagctaatctagtttgcaaaataccctatgctgctggtgaaaggaaaaaaaaaaacaaagtgtgaacccaaaactcatgattcattctaagttagttcaacagattagttcctcattctctcagatctccagggaagagacatcaacaccagcccatcgctgataccctttgtcctggcctccggagcgctccctgcacagtcccaagtctgcaagaagggggatcttttcttgaaaacctacagtgctaataattgtcaaaaatatataaattctaaatttaaaatttaaggtattggtgcctatgaaatgtccccaacacaaagaaatgataaatgtttgagatgatggaaatgctgattaccctgatctgatcactcactttatatgtattgaaacatcattatgaactccatgaatatgtataattgttattagtcagttaaaacaaataaaactaaaaatgtttaacgataagaaga

SEQ ID NO: 232841 - DNA, 466 bp, Homo sapiens
ctatatatgagttatattatgcctaagatatattaataaaaacaatgtttgtcaagtacttgctatatgccaggtactattctaagcacatatgttctaaattaatatatgtattactttaaggatacataacctagtgtctttttggggtccatggatgaagtgtatcttcactcacctttaattaaattcggttgtttcattcttcatttgtgaatgtagggcattcacaaattcacaaattcattctttcaattgtgaatgtagggcacaagccacagtagtgtcaggagtgcctggaactttgtcaccattagaaatcatagctatttttgtatcttgttataatgattatagatatctcaaaatattaacagtcatcatttgttttgacctaccactgatcttgttatttaatgtattagcaaagaagcatatatagtacaatatcaaaactgtgttcttt

SEQ ID NO: 232842 - DNA, 386 bp, Homo sapiens
aaaatgtggcagtgacagagtatggggtgagaaccacggagagaggaagtccccgaggcagatgatgggacagagagcggggaccagaattttttaaaacgcatctgagatgcgtttggcagactcatagttgttttcctttcacggagaaagtgtgggcagaagccagctctaaagcccaggctgcccagcctgcactggcagagctgacggaaggccagggcagagccttccctccctgtcacagacatgagccctggagatctggaatgaggcagatgtgcccagggaaagctgatccgccccgacccagggccccccgggtgcccctttgagcgtggaatcgttgccaggtcatggctccctgctatcgaacaccggacatg

SEQ ID NO: 232843 - DNA, 661 bp, Homo sapiens
ctgatttaggagagggttttcggtactttgaaatattaatattatgaaagttgaacactgatgtttcaatctgcttcactccatccccattacttcttgtcagctgtctatgagcattgggccacttgccacagttttacatgataaccatatttaagtggtaaaaaagatcagaacatatacagtgccttcttaagtcaggttcctgatttatttctggtactatccatttagatacatattaatttacctaatttcttaaatccatggaccagtactgatattcctgtttgtctttatttaggattttacatgtgtacgttaaaaaatacattggtaacagctgactgacaaccaaaaaagtaaaaaagcaaaacaaaaatcaccgtgctttgacaggtttgtcatgaagcaaaatgcatgagaaatttgatctgtttcagtttgcttgttatcagtcagaaatcacctttgctttgcccagagaagactcaggttcactgaattctcttcaccactccgtgaaagtgtgtagcagcatggacagcccatgttatgtacagagtaaatggtgcactgggtggcatgtggaatcttgaaaggacagtgtctcttagatgcttaacttactactgggagtgaagaagatcaatgaatctca

SEQ ID NO: 232844 - DNA, 438 bp, Homo sapiens
ggcgctcgcgctctgtctgccagacgggcttcccggtaactgaggggctgcgtcctgctagggctctggggaaagggacccccgtgagctagacagggaggagatgggagtccaggacggcgcgtggggtgttatgggcccgggtccccccgccccgctctggctctggcagcgaggcctgggcgcggcctttcctccgagctgcagtccttgggcctctgcttggagacgttggtgtttatgacctcgcctaggagggggacatgggctggggacagtcagggttcgactggcggctgctcgagccccggtgcctggcgggaacagggagagggcttttcgggcttcatccagttcccctctgctctccacggccgcttcaggcagagaccaaaatggctccccgtcatcgccctgagaggctgaaggggcctaatt

SEQ ID NO: 232845 - DNA, 485 bp, Homo sapiens
cacagtataagtaacaggaattgtgtggcataaggaagagtcctgagtgggttctcaaattggacaattctgacaggttacagaaggtcataaaataggctgaaaaaaggagaggggtggaggttatgaaaaaatacccaggtcagaggaataaaaggccacaaaaggcaaacttactactttataattgtgcctaagtcaggcccagtctacatttctattttgatgactgatttacatacacactcatatacattttaactctgaaagtagaagttccatatgtgttttatttactctcatttattttttatctttaccagttggcctatttttttttttcttcacatgacatcaggagatcatcattgcaacaagcaactcagcttagaagcgctgggataactccgaaagagacatgtgagacaagatgtagaactttgtattagagtacaataaaatttataatgcacaaaaaaaaaagc

SEQ ID NO: 232846 - DNA, 392 bp, Homo sapiens
atgccctgtggtgaggcctaccaggtcttaataataaaagtggtagactgttagccatcagtctaattcaagtgtccagactggagttattacaatgagtagcacagccatgtgaccagcattacttcctatatatacagtcttgaatgtttattcagaggaaatggattacaatttccctgacatttgggcataaaacatctgccatcctatgaattagaaaagtaatgaggtcttggatgatatgtcacttatctttattaaatgcagctctcagcacgtagtagcatctagtgctcaataaatgcttgatgaatgaattaaatgaatggactatcactacatcatagttcggctgtaaatacatagaataaaatgatttggcttatgga

SEQ ID NO: 232847 - DNA, 221 bp, Homo sapiens
caaacttcagaatatagtatctattgcttcactcccacttcccaagccctgcccaaatttttctcctggtccactctaactcagaaccacattgggaaggcaattccaggaaactatgtttctagcttagctaagttggcaaagccacttcaacaaccgtgagacaaatacagactggtagaatgtgactggccactattagagaaaaggataacacacag

SEQ ID NO: 232848 - DNA, 474 bp, Homo sapiens
gtcagcagggaatataatagtgtcactttcatttcacttctagagcaaagcttaacaaactttcttgagtgtgtgacactcacagaggatgcaaattcccaacaccctccacccagccccagcgtctacttctgtgggtctaatggggacccaggaatggctcttttaacggccccctcatgagattgatgtgggtagttcccaaatcctgtgaggtgggctgtcagtgcaatagagcctggggtatgcccatttgtgcttaggccactgagaaatttacaggctcgataggcctttggtatgttcaaaggtgagtgaaggataacaaggtgaagagatgcctgtgaatctgattttttggatggctgcaactaagagtcaatgggcatgaaaaacaatccaagagctcacatttatatgaggcccttatcagtactgagagagacattctcacttcacaagcttggatgtgca

SEQ ID NO: 232849 - DNA, 509 bp, Homo sapiens
gctcggcaaagcttctgatacgtggtcctaagcatcacagggagcatgtctcaaagctgtccccgactcatggctgaggctgttttgcgtagcttcacaacagggctctccagcactccccgagatcctatgagctatctaatatctttaatcaacttcttctctgcttaagagccagacccactctggctagtctcaagcagagaaaaagtgaaataaagaatgtcaggcaactaaggttcctgaccacagagggtttcaagctgggagctatcacatttttgccttcaaaaggccactctggcagcagaggtgtggatgaattaagaggaaaatcacaggctgtggcattaatttaagagctgatcaagacgggcctcgaccaagggagtgacaaaaggaaaaaaaaaaattaggagggaaaaggcaaaaaccacaaacctaaactataaatatgcagttctgtcagtaaacacataaaaacacacagataaataaaaatcaaaaag

SEQ ID NO: 232850 - DNA, 602 bp, Homo sapiens
cacacatgaaaatcaaaccaattcttgcctgtctaaattaatttccagggattctgtgtgtggggcaccatataataattccacaatatttagcacagtgctttgtccttaagcaactatgaacaactcctcagcactgttgttcttctttggaataagtctacataataggcctcaggaaataaatacaatattagagtgtaagaaaatcagttaatgaaaaataatcatgagtgaaactgatccttgttgatgtataaaataaattttatgctacatagttataaggttgccgatgagaaatatcttgaaataggttgtgaattttaagtttgcgcaagtttttttttttcagaatcaaaatgtgtttcattctgtgatcttcctgtgatgctaattcttctggggtcacaattttttcttgtattattcagtgggcagattaatttctcaatacgtgctaatctacaattgagatgcttaaatcttcacctgcactgatctcttccattttctgtggcacaaaaagtgaagtataatattcatttttctacatcagacaggtctttctgatatacctttcttcacagtcaccagtaaca

SEQ ID NO: 232851 - DNA, 444 bp, Homo sapiens
ttaaaataatattgattaatgttaccagaaaccttttgcatctcttaatatgtctgaacacaaaaggaaaacaccataatcatataaacccattctttgtctcttcttctaaatcatatgtataaccagtttttccttaagaatgtagcagcatataagctataaatttctggagtatatgcacacaaatttatctgggtgggtatgtaggtatatgtgagtttgtttcctcttccaggagctcaagaaataacatactcctgaaaaatagaatagaaatttctgtgctttatgtttttgccaggctattacattttcttatcatttaggatcacttataaaatgatcattgtttattttgttttataatttttacaggagtgagactgcaaacccacatgtttgatagttcctaccaaattaaaagtttagaaagcataaatc

SEQ ID NO: 232852 - DNA, 275 bp, Homo sapiens
ctgggtgacagagtgagacaccgtctcaaaaacaataaaaattaaaaaaaatggacatatggtttattcattgggaagagcacctagtgttggcatgagtgtaaaaatgttcttagcagccaagtcattgcagacctttctctcctactctgtgttctggtcttcatatatttttctttctcacaaattctaccattatgatcatagttgtattcatcttcttgagtcagctaaataatccttatattttgatgaaaagtaaccttcacttccaa

SEQ ID NO: 232853 - DNA, 453 bp, Homo sapiens
gactttgtctctctgggcctggtatttcttctgagagtattgacacttagccaaaagccacaatcttctagcctgccctgtgtgatttgatgtgtgcactaaataatgaggccttccccaaaggcagtcatccagcctgctgggcttcacctctccctgaggaaacaacaaaaccaaagatgtcattcacaaacaatggagaagaaaccaagagaggtatgcagcccattcgtgcacagaatcgagattccaaatgacgcaaaatctaaaacatagctcaatgtaaacaaggtcagcaagacagggaattccacagtcctcatttgaggaaactgcccactggggaaactcgtaccaacagcctgcaatagttcatttacttaaaagcagggatcctttgctgacactggtttctctcttattttgccccgccaataaaaaaagctgaagcca

SEQ ID NO: 232854 - DNA, 498 bp, Homo sapiens
gcatagattacctacataagaaatatcattgtttcagatgtctgttgctgtttaacaatccattgtaaagcttggttgcttaaaacaacaaatacttactattttcttctaattctgtgagttgagtgggctcttctgggtggttcttctagtcttcagttgcaagtaaatttgatttaattgattatgactgaggtcactcatgtagctacattcaatttcaactggactggggctggagctgcaagaatggcctttctccaaggcctcttttcagacaagctttagtcattcactggtctagcctggacaacatggcagctgggttctaagagagagacagtggaagctgctaatgctcttactgtatggtcccaaaagccctataaccattttcctttcaccttcaaattggtcaaatcagttacaaggccaacccaaatccaaggagaggggaaatagagggagacatatgcagatagagaaatggcaaaaaaa

SEQ ID NO: 232855 - DNA, 157 bp, Homo sapiens
tggtgcataaataattctggtagattcaactagattatggtctatggagatatcaaagaatgtagggtgtcaggacctagattcctagaaatttagaacgaggggaacaggcaatttgccaaagggcaaagagttcatacttcaacgttatctcctg

SEQ ID NO: 232856 - DNA, 668 bp, Homo sapiens
taacagttcagtaaggctgcagctgttattacaatcattttataagtgaaggaacagagaggttaagtaatttacttaagggcatacagcagttggccactggtggaatcagtatgcacaacccatcatgaccctgtgttcatgctcttaacttttgtaccattctgcttgttcaagggaacatacatccaactgagggaggtggggtgaggggcaagagtttctatctttctacacagtgaattttattaattctgtagagctcatcttacagtactaccaagtatggctgcccccaaatctgtgactcagccaagattatttttaaatatttcccattcttatgacctatccaccactttggcacctatcctcttccaagactatctcagcatctggctcgctacctttgaccataacaaacatttgaataacaaaccaagtttatgaagtatcatgggcatgacaaattagtttaagaaacattcattcagtaaattttgaacccccatagtattccaggcatacagattcaaagataaacgtgagcaaagcagcctctctggtgttcccatctggtgaagaaggccgacatgtcagcaaaaatccatatttaacctacgttctcttatattggttagtgttacctagatttgcctaagcattaa

SEQ ID NO: 232857 - DNA, 1865 bp, Homo sapiens
caagaatatatattgaatcttttccaacgttatgttgatgaaggtttacattttatcaataaaaagtgcagccaagcaattccacaagtggacatcagcaaagttactacactctgttgcttattggagtccttgatacttgggaaagatggagttaacttggcaatggaacaaacaaaattgaacactatactatgtcagacttttgtattctgttatttgtggtctttgggtggaaacctaactgaaaactactatgattcttttgatacatttattagaacacaatttgatgataatcctgatgccaggcttcccaattctggtgatctgtggagcattcatatggactttgacaccaaacggctggatccctgggaacgaatcatacctactttcaaatacaaccgagatgttccattttttgaaatgcttgtccccacaactgacacagtgcgctatgggtatctaatggaaaaactactggcagtcaagcattccgtgttgtttactggaataactggagtgggcaagtctgtgattgcaaaaggattgctaaataaaattcaagaatcagctggctatgtccctgtttatctgaatttttctgctcaaacttcatctgcaaggacacaagagatcattgagtcaaaactggagagaaaaagaaaaaatattctaggagcaccgggaaacaaacgaattgtgatttttgttgatgatttaaacatgcccagactggatcgctatggctctcagcctccgattgaattacttcggcagtatcaagattttgggggattttatgacagaaacaaactgttttggaaagaaatacaggatgtaacaatcatatcggcatgtgcacctccaggcggtggccgcaaccctgtgactccccgcttcatcagacacttcagcatgctgtgcctcccaatgccctcagagcacagtctgaaacagatttttcagttaaatggtttcctgagtgactttccaccagctgtaaagcaaactgcatcaagcattgtagaagcctcagttgagatttataacaaaatgagtgttgacctcctgccaacacccgccaagtcccattatgtctttaacttgagggacttatccaaatgtgtgcaagacaaacattttggaattgcaattgacctggaatattttttgaataagcccatcatatttggagatttcattaagtttggagcagataaagctgatcggatttatgatgacatgcctgatatagagaaaactgcaaatgttctacaggactatcttgatgattataatctcacaaatcccaaagaagtaaagttggtgttcttccaggatgctatagaacatgtttcaaggattgctcggatgatacgtcaagaaagaggcaatgccctgcttgttggagtaggaggcacaggaaagcagtcactcacgagacttgcagctcatatatgcggttacaaatgtttgcagattgaactcagccggggatataattatgatagttttcatgaagacctgaggaagttgtacaaaatggctggtgtagaagacaagaatatggttttccttttcactgacacccagattgtagtggaggagttcctagaagatataaataacatcctgaactcaggtgaagtgcctaatttatttgaaaaggatgaactggagcaggttttagcggccaccagaccaagagcaaaagaagtaggaatttctgaggggaacagagacgaggtaggatgtgccagagtagttatgtggctttatcacaaaaacgtttcttcaccttttatttaaccattcattgattgcctgaaggggtccatgaataaaatttttttcaatat

SEQ ID NO: 232858 - DNA, 910 bp, Homo sapiens
gtccggggaaacagagggaagcaaacagatccaagaaatgtgttcaagattgattttgcaggacagaaaatgggaggtgtataaagagacttccaagctcctgatctaagcttaggagggaatggccagctactgagatggggaagctgaagtgtgagggagttcaccattgcaagtaagtcgcatttaaaatatacatgaagatgaaagtctatgagagtggtggtcattcatccataaaagtgagagagagggtttctgttcatttccaggtgggtttgtgcccttcgtgatgaccccttggactcacctcaagcagaggtctaaattacttgagagtgtgttcatgtaaattcactagtcagatatgaatgccactcaggcatcacaaaacaatcacagaagacaggagtgagcgcattctcaagaatgttttctgaaatgagcagaagagctttgataccagaagactttgtgttggaatttggctttctattattagaaaacgttatcatccggagtatttaaaagatagatatttggtttaaaataaatctaatcctctcatattatgtttctggttctaggccatcttaaatggtttcctgagtgactttccaccagctgtaaagcaaactgcatcaagcattgtagaagcctcagttgagatttataacttgagggacttatccaaatgtgtgcaaggtagtgtactgaaccctcgttttctgatctgcaccctccctacttttccattggcccccaaatatctcagtaacattgtatgtatgcaggtgttggtgactcacccagaaatcccatcacctgttcctattcaggctgagtgcttcacaactatttcacatggccaacactgcctcccatttctcactcccagctgattacttgt

SEQ ID NO: 232859 - DNA, 964 bp, Homo sapiens
gtccggggaaacagagggaagcaaacagatccaagaaatgtgttcaagattgattttgcaggacagaaaatgggaggtgtataaagagacttccaagctcctgatctaagcttaggagggaatggccagctactgagatggggaagctgaagtgtgagggagttcaccattgcaagtaagtcgcatttaaaatatacatgaagatgaaagtctatgagagtggtggtcattcatccataaaagtgagagagagggtttctgttcatttccaggtgggtttgtgcccttcgtgatgaccccttggactcacctcaagcagaggtctaaattacttgagagtgtgttcatgtaaattcactagtcagatatgaatgccactcaggcatcacaaaacaatcacagaagacaggagtgagcgcattctcaagaatgttttctgaaatgagcagaagagctttgataccagaagactttgtgttggaatttggctttctattattagaaaacgttatcatccggagtatttaaaagatagatatttggtttaaaataaatctaatcctctcatattatgtttctggttctaggccatcttaaatggtttcctgagtgactttccaccagctgtaaagcaaactgcatcaagcattgtagaagcctcagttgagatttataacaaaatgagtgttgacctcctgccaacacccgccaagtcccattatgtctttaacttgagggacttatccaaatgtgtgcaaggtagtgtactgaaccctcgttttctgatctgcaccctccctacttttccattggcccccaaatatctcagtaacattgtatgtatgcaggtgttggtgactcacccagaaatcccatcacctgttcctattcaggctgagtgcttcacaactatttcacatggccaacactgcctcccatttctcactcccagctgattacttgt

SEQ ID NO: 232860 - DNA, 918 bp, Homo sapiens
gtccggggaaacagagggaagcaaacagatccaagaaatgtgttcaagattgattttgcaggacagaaaatgggaggtgtataaagagacttccaagctcctgatctaagcttaggagggaatggccagctactgagatggggaagctgaagtgtgagggagttcaccattgcaagtaagtcgcatttaaaatatacatgaagatgaaagtctatgagagtggtggtcattcatccataaaagtgagagagagggtttctgttcatttccaggtgggtttgtgcccttcgtgatgaccccttggactcacctcaagcagaggtctaaattacttgagagtgtgttcatgtaaattcactagtcagatatgaatgccactcaggcatcacaaaacaatcacagaagacaggagtgagcgcattctcaagaatgttttctgaaatgagcagaagagctttgataccagaagactttgtgttggaatttggctttctattattagaaaacgttatcatccggagtatttaaaagatagatatttggtttattaaatggtttcctgagtgactttccaccagctgtaaagcaaactgcatcaagcattgtagaagcctcagttgagatttataacaaaatgagtgttgacctcctgccaacacccgccaagtcccattatgtctttaacttgagggacttatccaaatgtgtgcaaggtagtgtactgaaccctcgttttctgatctgcaccctccctacttttccattggcccccaaatatctcagtaacattgtatgtatgcaggtgttggtgactcacccagaaatcccatcacctgttcctattcaggctgagtgcttcacaactatttcacatggccaacactgcctcccatttctcactcccagctgattacttgt

SEQ ID NO: 232861 - DNA, 651 bp, Homo sapiens
gggtgtggacccccaagcagttgaaaatccatgtataatttttgactccccgaaaacttaactaccaatagtctactgttgactgagaagtcttaccaataacatgaatagtcgattaacacataaacagcccagtatctgtatatatatttttatacattcatgatgtatctttttcttaatttttttgatatttctaggctacatggtttgtctatgttttttcaaattgttgcaaatctccaaaatttttctagcatatttcctaaaaaacagcatatgagtggacccacataattcaaacccatgttgttcaagggtcaactgtacttattaggttaattgcttatttcagtgaaaccatcactacttaaaacatttaatgaactcagtcacaaatatactcataaattaaagaggccaattttcatatgtggctcactagctttagaagacattaaaatgaacattttaagaaatggtaaccactgcgcccggccccaaaatctattcttagcaaattttcagtatagaatagtgttactaactaaagtcctcatgctgtacattagatctctaggtttattcatcactcataactgcaagtttgtgtcctttgaccctctcctcatttccttcccctcccaactc

SEQ ID NO: 232862 - DNA, 607 bp, Homo sapiens
gagacaggctcatagcaggatcgctttgctggcagacacacctggctttgaatccagccccgcaacttggggaaagttacttaacatctttgagccacggtttcctccttcataaccagacagcaacactccaagatgcttgtgaggctctcaagaggatttattccagcgctgagcgcagtgcctggcgcacattaagatgccaggaagccggatgggtgattgctcaggtctgtccagccagttgggcagccgtcagaaactgggagggctgacgagacaccagcccagagagctgtcagggagcggcagagcagaggagagggcccaggatggatcggcaggtgtcagccaggatggacgggaggagccgtgctcagagccagcagccccaggacgagcagctcctggctaggaacagaagacaggcactgtgggacaagtcaaagggtgctttcatgtatcatcattccacttgaggctcaaagcacaccaataacaagtacttgttcagaatgtataaacaaccctgagagatgggttttatcatccacattcaacaggtgaaaaaacaaagaaagaaacttgaccaaggactcatactcaa

SEQ ID NO: 232863 - DNA, 308 bp, Homo sapiens
tgcagccggcttccaggccgcccatgcctgctcaccaggtgccaccctacaaggctgtgtcggcccggttccggcccttcacattctcccagagcacccccattgggttggaccgtgtgggacgccggcggcagatgagagcatccaacgggtgctttcatgtatcatcattccacttgaggctcaaagcacaccaataacaagtacttgttcagaatgtataaacaaccctgagagatgggttttatcatccacattcaacaggtgaaaaaacaaagaaagaaacttgaccaaggactcatactcaa

SEQ ID NO: 232864 - DNA, 231 bp, Homo sapiens
gtgctgggattacaagcatgagctaccacgcccagccacatcttgcaattctatactgtttttcaatttacagggtgctttcatgtatcatcattccacttgaggctcaaagcacaccaataacaagtacttgttcagaatgtataaacaaccctgagagatgggttttatcatccacattcaacaggtgaaaaaacaaagaaagaaacttgaccaaggactcatactcaa

SEQ ID NO: 232865 - DNA, 407 bp, Homo sapiens
tctatttattatacttgtagtttcaaaattactgagaaacaaatttactacctagaatactgtgttaatatacaattttctttagttttacagtatccagtcaaaaggctgtcttccaaaattgcttaggtcagctacttctccatgcaactctttcagtgaggctgtatcatgcgtttgtaatattgttagattcatttgttatagcctgctttctccacaggacttcctaacagcctatttcttttttttttttttttttgagatggagtcttgctctgtcaccaggctggagtgcaatggcactatcttggctcacttgcaacctaggaggcagaggttgcagtgagctgagactgcatcattgcactccagcctgggcaacatgcaagaatctgtcgcaaaaa

SEQ ID NO: 232866 - DNA, 1491 bp, Homo sapiens
  misc_feature (506)..(506): n is a, c, g, or t
  misc_feature (570)..(570): n is a, c, g, or t
atccaacagttctgatttattccactcacacaacaagtcagttcttaacacaaaccacataggttcttccttaaataaaaagctgtggctatgaagaagtgagagttttttttttttttcctctccaaaccaccacgtgctcttgtgtgttattgtagtggcttcgcagagtatttatttggccagaaagtctatagtcaaattgctcttcattctcaagtgtagtatttatttctccagctcatgcagaattctgttttatatggaggttttaaatttgtgcagaaaagtattacgtgggtttcaaaggtactcttttttcttttttgagacagggtctcgctgtgttgcccatgctggagtgcagtggtgcgatcacagctttctgcagcattgaccttgtgggctcgagcagtcctcctgcctcggcctcccaggtggcttggaaccgcaggcatataccaccatacctggacatgtttttaactttaatttttatttttgtngagatgaggtctccctatgttgcccaggttgctctcgaactcctaggctcaagcagtcttcccnccctggcctcccaaagtgcaggcattttaggcatgacccatcgtgtccagcctaaatggcattcttggaagtaaaaccacaggggatctgttggaagtggcatgatggaggaattttaaaagaattgaacaaataaaatagtcagagctcaaaaattgagtactgcttcgtttctcccaaataaccatcaccagacaaacaggtgtgtgtgtgggtgggggaggtggcctggtggtacttcatgatcttggaagaaggaaggcgcccctccttcttagctgattgatgatgagatagaaagatagaaacagccccatcactatgagatggaaacccttctttccttcagctgacttccctctccttcattcccaaccaagtttgaccccgccgcagtggagattgtggcagatgggtcagatagcatgtgtcctgtcgctgtcacaactttttaataagggctgggggtcctcttgaagagcccaggaactgcagtccctcctctatgccttcccctgaacacagtgcgccctcactaataaattctgagggctgacactgcctgagccggctggtctttgccctcaatttcattgagatgggccgtgagtgactaaagtaatgcattaatggttgaatggctggccaccgtgcctcatgcctgtaatcccagcactttgagaggccagggcgggcagattgcttgaggtcaggagttcgggatcagcctgggcaatatggtgaagccccgtctctactaaaaatagagaagttagccaggtgtggtggtgggcgcctgtggtcccggctacgtgggaggccggggcaggagagttgcttgaacccaggagggagaggttgcagtgagacaagatgatgccattgcactccagcctgggtcacagagcgagacttcatctg

SEQ ID NO: 232867 - DNA, 1668 bp, Homo sapiens
  misc_feature (506)..(506): n is a, c, g, or t
  misc_feature (570)..(570): n is a, c, g, or t
atccaacagttctgatttattccactcacacaacaagtcagttcttaacacaaaccacataggttcttccttaaataaaaagctgtggctatgaagaagtgagagttttttttttttttcctctccaaaccaccacgtgctcttgtgtgttattgtagtggcttcgcagagtatttatttggccagaaagtctatagtcaaattgctcttcattctcaagtgtagtatttatttctccagctcatgcagaattctgttttatatggaggttttaaatttgtgcagaaaagtattacgtgggtttcaaaggtactcttttttcttttttgagacagggtctcgctgtgttgcccatgctggagtgcagtggtgcgatcacagctttctgcagcattgaccttgtgggctcgagcagtcctcctgcctcggcctcccaggtggcttggaaccgcaggcatataccaccatacctggacatgtttttaactttaatttttatttttgtngagatgaggtctccctatgttgcccaggttgctctcgaactcctaggctcaagcagtcttcccnccctggcctcccaaagtgcaggcattttaggcatgacccatcgtgtccagcctaaatggcattcttggaagtaaaaccacaggggatctgttggaagtggcatgatggaggaattttaaaagaattgaacaaataaaatagtcagagctcaaaaattgagtactgcttcgtttctcccaaataaccatcaccagacaaacaggtgtgtgtgtgggtgggggaggtggcctggtggtacttcatgatcttggaagaaggaaggcgcccctccttcttagctgattgatgatgagatagaaagatagaaacagccccatcactatgagatggaaacccttctttccttcagctgacttccctctccttcattcccaaccaagtttgaccccgccgcagtggagattgtggcagatgggtcagatagcatgtgtcctgtcgctgtcacaactttttaataagggctgggggtcctcttgaagagcccaggaactgcagtccctcctctatgccttcccctgaacacagtgcgccctcactaataaattctgagggctgacactgcctgagccggctggtctttgccctcaatttcattgagatgggccattgaaaactcattacaagctgtttagactctgactttgacttttgctcggcagcgaacaaaattaacagctcttggaggtaggaaaaaaggcgctcagccaaattaaaaaaaaaaaaaagaaagaaagaattgaaatgatgagaaaagacttttaatattaactccattagtcatgcaaacaagcgcacatgcgaagcgcatatgttctgcgtgtggctctcatttggagcctgatgagaactgtggtttctcccactggagggaaattcatacccaggtcttacacgtagctcaaaatgttttacatgtcaagcaatgagcctttgagtgtagcagaattgcttcataaatttaactatcactttcaaatttctgttttttttctaatttagtgcttgatagttttttatgtgataattttaaaatgctgtttgtagcaaaagttaccttgatagttcaggtgtgcagagaaaattcacagccatcaatag

SEQ ID NO: 232868 - DNA, 1209 bp, Homo sapiens
  misc_feature (101)..(101): n is a, c, g, or t
  misc_feature (165)..(165): n is a, c, g, or t
ccgggcgcggtggcgcgtgcctgtagtcccaggtggcttggaaccgcaggcatataccaccatacctggacatgtttttaactttaatttttatttttgtngagatgaggtctccctatgttgcccaggttgctctcgaactcctaggctcaagcagtcttcccnccctggcctcccaaagtgcaggcattttaggcatgacccatcgtgtccagcctaaatggcattcttggaagtaaaaccacaggggatctgttggaagtggcatgatggaggaattttaaaagaattgaacaaataaaatagtcagagctcatgtgtgtgggtgggggaggtggcctggtggtacttcatgatcttggaagaaggaaggcgcccctccttcttagctgattgatgatgagatagaaagatagaaacagccccatcactatgagatggaaacccttctttccttcagctgacttccctctccttcattcccaaccaagtttgaccccgccgcagtggagattgtggcagatgggtcagatagcatgtgtcctgtcgctgtcacaactttttaataagggctgggggtcctcttgaagagcccaggaactgcagtccctcctctatgccttcccctgaacacagtgcgccctcactaataaattctgagggctgacactgcctgagccggctggtctttgccctcaatttcattgagatgggccattgaaaactcattacaagctgtttagactctgactttgacttttgctcggcagcgaacaaaattaacagctcttggaggtaggaaaaaaggcgctcagccaaattaaaaaaaaaaaaaagaaagaaagaattgaaatgatgagaaaagacttttaatattaactccattagtcatgcaaacaagcgcacatgcgaagcgcatatgttctgcgtgtggctctcatttggagcctgatgagaactgtggtttctcccactggagggaaattcatacccaggtcttacacgtagctcaaaatgttttacatgtcaagcaatgagcctttgagtgtagcagaattgcttcataaatttaactatcactttcaaatttctgttttttttctaatttagtgcttgatagttttttatgtgataattttaaaatgctgtttgtagcaaaagttaccttgatagttcaggtgtgcagagaaaattcacagccatcaatag

SEQ ID NO: 232869 - DNA, 356 bp, Homo sapiens
agagagagagaaaagaaagaacgaaagaaagaaagaagaaaagagagagggatgaggagaaggagagagggagggaaggaagaaggaagaaaaagagggaaggagggagggaggaaggaaggaaggaaaaaaaaaaatacccagcttctctagaaccagcagatctgcaaactggaccctcagtgccacatggcacccatcggctagagcagagagctctgtctgtatctttcagacagagttatctgggtcaccagtgcactcatagccactttactcatttgtgttacctgtctggcccctgaaagtatttgtgattttgatccccaataaaaccataaagctttcttcaaatg

SEQ ID NO: 232870 - DNA, 630 bp, Homo sapiens
gaattttgtgggcttggggagattgtgggttctctgatttcaaggggaatgatgtgatcctagagttgcaaagaacaagtgacagtggaggcgcttatgctttgtgattgcactagagacaaggaagacacaactagaataatggggagcaggaatggagcggccaacagaatatctgactgttagggatctttgatgaaggctgattctcagggagtgaactagatcagtgaccaactatttgtctttatataactgggtaatgtggatggattctaataaagggactacttacagcacagcaggaaagacacaaagaaaccagacagaagagtgtaagtagtaaggggccaagcagtcacctgactagagagagtgccagcttgccaagaaggcaccagacagaagctgtgatcttcagcaaagggacacagtctgcctgtgctgaccctgcaggggcagaggtgggggataaacacactcttctctcacctgtcttctgccaccccctccattagctgaaccccaataaaagcatgagggtaagggagatctctgcagtatccaattcaggtgagcctcctaaggaacaaagcagaacgtagaaaaattaagaatgggtctagggaa

SEQ ID NO: 232871 - DNA, 564 bp, Homo sapiens
cagcccttaaccctatgctgtagccacagatgcagcctgagtccgctgcacggagactctggcgtgggtcttgacgaggtgctcagtgaactcctgatacagaagactttggagagatacagactccttccaaaggctgattctcagggagtgaactagatcagtgaccaactatttgtctttatataactgggtaatgtggatggattctaataaagggactacttacagcacagcaggaaagacacaaagaaaccagacagaagagtgtaagtagtaaggggccaagcagtcacctgactagagagagtgccagcttgccaagaaggcaccagacagaagctgtgatcttcagcaaagggacacagtctgcctgtgctgaccctgcaggggcagaggtgggggataaacacactcttctctcacctgtcttctgccaccccctccattagctgaaccccaataaaagcatgagggtaagggagatctctgcagtatccaattcaggtgagcctcctaaggaacaaagcagaacgtagaaaaattaagaatgggtctagggaa

SEQ ID NO: 232872 - DNA, 457 bp, Homo sapiens
gcctttagttctttccctcctcagattcatgagctgcttctcacctcttaaatctggtctacctatagtgacttgcttgaccaacagaatatgctaggagcaacattctggaacttccaaggcttggttgtaagaagctttgcaatatctgcctggatctcttagaaccttcaatatgggacacttgctctagaaatcagccaccatcctgtgagaagtccaagccacagagtgaggccagaaatagttgctgcagtcaagagccccagctgagctctcagccaacattcagcatcactgccagccatgtgagtgagtgatggtgaccttggatgtccagctcagtagaaccttcagatgatttcagccctagccgttccaactgcaagacatcctgagtgagctgagcccagtcaacagagatgtgagagataaaaatgcattgttttgagacact

SEQ ID NO: 232873 - DNA, 421 bp, Homo sapiens
cagcagaccgctccccagagccctccagagaggacgccccactgaagatgactctgttgggggtgcacgaggagggagaggccaccgagggctggagggcaccaggattggaagaagactggagtcagtgccctgccatgatccacaggctgcaggggccactgcccagtcaggcactgtcacccttgctcccagcttcacctgcgctttctccagtcacatccctgggaggctggctcggctgtgccagctgtgactctggcagtcactaacctaaccccttggagcctcagttcccattggtgcaatgaggccatgtcttctggaatcattaagagtcagcgtatgtgaacaactttcagaactacaggccactctgcaagtgtagtaagctgatgataaaaatctcaaactgatatct

SEQ ID NO: 232874 - DNA, 312 bp, Homo sapiens
tcagcccctcccctccctgctgggctgttggttcatgccccctgggtgggaggagggggagagggagagctccagtgagtggtctctggtttttcccctcagactcctcactttgggcaaaggacaagaggcagtgagggcccctccctggggtctgggccaagctgaccactcttctccagaatcttccctccctgtccccttcacactgtggctccagcttactatgcagaaaaatccttttctctctcaatgaggagcctagttttcaagatttttgtccaaaaatataatttgaaccatgaaccggga

SEQ ID NO: 232875 - DNA, 715 bp, Homo sapiens
ccagctacatgggaggctgaagtaggagaattgcttgaacccaggaggcagaggttgcagtgagccgagatcataccactgcattctatcctgggtggcaagctagactccatctcaaaaagaaaaaagaaccatgtgaaaaggcatttcagaaaagtgtcattccacctcatcccttctgtcacgtttcagtctcccattcttcccatctaccccgtaagtgaccagtttagtttctacttttttcttctgtatttctttttgcacaaataaacaggcacatatatgttttcttatacagagatgatattcagtgtctttttttgtgtggtactgggcaatttaaatgctgtttggtaattttaactcttaaggatactgtttataattgatctgtccttaatgccaatgtattagaaagcacactaaatgattgttttcttttttgtaaaatatttgtgagattttttaaaaaatgaaggtgacatgaattttgatgggcttattaacactgaactatttcttgataagagttgtctaaaaaaatgagaacatatgccaggcgcggtggcttatgcctgtaatcccagaactttgggaggctgagacgggcggatcacaaggtcaggggatcgaaaccatcctggctaacaaggtgaaaccccgtctctactaaaaatacaaaaaaaaaaattagccgggcgtgttggtgggc

SEQ ID NO: 232876 - DNA, 474 bp, Homo sapiens
tgactcttgtttttttatctgtaaactggaggtctcatttacctacttaagactacatctatagtgcctatcttgtggggttgttaagattaaatgagatcatggtttataataagtacccaatatatgttagttgttacagtattacctgtttataggttgtaaaaaggtcagattgagggtgggcgtggtggctcatgcctgtaatccccacactttgggaggccgaggtgggtggatcacgaggtaaggagatcgataccatcctggccaacatgttgaaactccatctctactaaaatacaaaaaattagccagacatggtggcaggcgcctgtagtcccagttactcgggcgggaggctgaggcaggagaatcacttgaacctgggaggcagaggttgcagtgagccgagatcatgccactgcactccatcctggtgacagagcaagactccgtctcaaaaaaaaaaaa

SEQ ID NO: 232877 - DNA, 407 bp, Homo sapiens
gtggctgttcacctcgccacagtgcctgcctggtggtgagcgctcagtaaatggaagcttctgttgcatcctcataagggccagccccttgctcctctctatctagaaaaagggttggccaaggcatcacaccgtggacatctgacccctcctcccacctgtgccggaagccacaggcctcaggcctgttcctgctctcctccagccctggggctgaaggctccatctctggtcctgcccgtgactggcctccctcctctgcctggcccttccaggatgtctgctggacactttgttccagaaccacttttttttttcttgggacagagtcttgctccagcctgggcaacaagagcaaaactcggtctcaaaaacaaaaaaaacaaaacttatagatgtatctacca

SEQ ID NO: 232878 - DNA, 518 bp, Homo sapiens
tctgatatcaacccatggtgccctcttgtggcaacagaaatgctgcatttgaattaccgaaagatcactgtagcccagccagagagttttggttggggaaatattttttgtttgtttcgggcaatgaccaggagcccgtgatgtgctacagaaggctcacagtggcttgtgagagccagcggttaaattttcgggacttctgcaaactggtttttaagcatagccattatggaaaattaaagtatttaggctgggagcagtagctcctgcctgtaattcctgcacttcgggagactaaggtgagaggctcgcttgagaccagcctgggcaacaaagtgagaccttgtctctacaaaaacattttaaacttagctaggcgaggtggcacatacctgtagtcccagctactggtaagggcgaggtgggagaatcccttgagtccagcagttcaagattgcagtgagctgtgaccatgccactgcactgcagcctgggtgacagattgagacgctgtctca

SEQ ID NO: 232879 - DNA, 473 bp, Homo sapiens
ccactgccgctaccaccactttccacttataccaataactccatgctctcacatttttaaagatttgactatgctatctgtccctcccttccctcctgatcattcttcccttcctttatggatcaacttaaatgttgttcacatgcaagctttttttgacttgacctctgtctgtgataagagaaaaacatactcctctaagatagcatttattattttatttgtaaaacttgtttaattttttccccactgagttataatctcagaagaaagtgtttatcttgctcaccacaaaatctccaggatttatcagagtgtccagaagacactattgtatgtttaaaaattgttaatggatgaatgaatgatgactgaataaagacacagagctacctcagtaacaacttcaaattaaaagatatatagcatatactgttagatagcctagaataaatattaatttcatatttatc

SEQ ID NO: 232880 - DNA, 496 bp, Homo sapiens
tagattccctggaatatgtcggagcttttcaaaggctcctcaggacatcttcttccccagtttttccttttaagttttttggtcagcctcttgttagcactaactggattcctgccccagacagctgtgatattaaacaattgccattgatttttaaaataaatgtcctagggctagggctttttgcatggagagagctatgagtcagatcaagtaaagataagacctgacaatgcaccttttcagggaactgccagacaaattaattagtgacagttttctgggatggagcttttgttgagctccaaacctgttctgcccctccattggctgccaggctgttggtggttgtcacagctattttagttgtaaggctgttgattttcaagtctaccatgaagctggggagagggggatgggaatggggcaagttgaaaaggcacaaagctcactgttcttacagagaataaacatttagattggtgtaagcctttga

SEQ ID NO: 232881 - DNA, 447 bp, Homo sapiens
aatcactcgtgtctcctgatggcaagttgttcacttgttcttactatgtgaattgacatttacaataatatcctctattagcacatcaaagcagggtaaattcaagacagatcagataaagatttctacatgtctagaacaccaaaaaactgtcagaaactcctcactaaatttaataaaataatttttgttccacattgataaaaaacttacatatctgaattttaaatggcttcttctagatgttctgactaaaaattctgattaagttcattgaagatagaagttattcctgcaggtcccaagaataacgtagtgctagattcactgtcaattctatattaagaattctgggccaggcgtggtggctcatgcctgtaatcccagcactttgggaggctgaggcaggtggatcacttgaggttaggagttcaagaccaccctggc

SEQ ID NO: 232882 - DNA, 429 bp, Homo sapiens
caggaaatatcttatgtaaagctgaggccatcttgactttggactcaaaataaaggtgatattcatgagccttattttaagaccataaatgttaggaagagatggtgtcctgtagaggaaggcactgtgaacaaagtttcaaatgctttgccgtggaatgtgttataattgccatcattatgattagcatcctcacttcaagccttgagttggttcatgagtcccagtaactctgaattatactgattgaaacccttcgttctgaaggacagctctttcgactgcgtctccacttcttgtttctttacgagaaataaaatcccttttcttccccagttctgtcttgtggtaacatgtgctcatgtgttttgtctcattgtagtctattgcatttctttctttaatgaaaaaaatagtaactacccttta

SEQ ID NO: 232883 - DNA, 367 bp, Homo sapiens
gcacgaggttcaattgggaggaattactggactctggaagttgaagactgtccatataattaaaatgtacaataactacccaggtttaccttgcaagtttcaacatacacaaaattaactttatatgactcttcaaaaacagtttgccatcatacctaataatctggtttaaattttaaaaactcatccattttactttttaaatcaacataaatattttgttaaatgatagatgatgaatgctctcactgtccaatcttcacacatcttatagactaagtataaagaatccaagatttatagtgctgagtagtttttatatgtttacgcattattgtcattactgcattttttttgcccattactc

SEQ ID NO: 232884 - DNA, 691 bp, Homo sapiens
aagagtcttggcagatgtgactaagatccttgagatgaggagataatccgtggtgggccctaaatgccatcacatgaatccttataagagagaggcagaggaatattaggaccagacacaaagaggagaaggtcattgaagacagagcagaggatgcttaccacaaggcagtgaatgccaacagtcaccagaagctggaagaggcaaggaaggggcttttgttgccttaagccatcaagtttgtggtaatttgtcacagcagacctaggtaataagtaaatactctatcatattctagaacctatcatagtttctaccatctgttctcttaatgaaaaaataattcatacatttattacatgtttattgaaaggctactatgtgccagactctgttcttgatactctgttcttgataccatctccctcactggcattagaggaaatggacaataagcatgtaaacaagtaagataattttagacagaagcacagtgaagaaaataaaggagtgaaaggaatagggaaagaatgagtgggaagggggctcctttagctcatagggtcaaggaagcactctcagaaaccatgatatttgagctgagcatcacaataatgagtgataaatgctcagataaataacaggagaaagatgctcctgacaaagagaatagcagggaaaaagtcttgcg

SEQ ID NO: 232885 - DNA, 637 bp, Homo sapiens
aagagtcttggcagatgtgactaagatccttgagatgaggagataatccgtggtgggccctaaatgccatcacatgaatccttataagagagaggcagaggaatattaggaccagacacaaagaggagaaggtcattgaagacagagcagaggatgcttaccacaaggcagtgaatgccaacagtcaccagaagctggaagaggcaaggaaggggcttttgttgccttaagccatcaagtttgtggtaatttgtcacagcagacctaggtaataagtaaatactctatcatattctagaacctatcatagtttctaccatctgttctcttaatgaaaaaataattcatacatttattacatgtttattgaaaggctactatgtgccagactctgttcttgatactctgttcttgataccatctcctagacagaagcacagtgaagaaaataaaggagtgaaaggaatagggaaagaatgagtgggaagggggctcctttagctcatagggtcaaggaagcactctcagaaaccatgatatttgagctgagcatcacaataatgagtgataaatgctcagataaataacaggagaaagatgctcctgacaaagagaatagcagggaaaaagtcttgcg

SEQ ID NO: 232886 - DNA, 549 bp, Homo sapiens
atttaaggcagtgttaggcacatatacaggttcacaattatttagtatcctgataaattagtccttctgtctttataatcttctttatctctacttacgctttgtttgccttacagtctattttgtgtaacaccaaatgtagctgctccagcagctacatttttgatttaagtagaaatttcctggtttatcagtttcaatgcatttaaacttttctctgtcattctctctgctctttgtctaaaattgtgtcttttagagatagtatagacctggacttacaaaaaacttccattcaatgagaatctctgtttattaattgctgcatttcatttacttacattcagtatgatgcctaatatatttaaaagtgtttaccatatcttattccatacgttcttttcactttgtttccataagccgccctgcacttctcctattttaatggtcaacatacctgcatttcttccctcctacccctactggcttgaaagctatacaggttatttcttgtttgttttgaccagtattaaaactttattaaagaac

SEQ ID NO: 232887 - DNA, 634 bp, Homo sapiens
tggccaggatggtctcgatctcctgaccttgtgatctgcccgcctcggcctcccaaagtgctgggattacaggcgtgagttaccgcgcctggccacaagaccccatctttacaaaaaactaaaaattagctgggcatggtggcatgtccctttggtcccagctactcaggaggctgagacaggaggatcgcttgagcccaggagatcgaggcagcagtgagctatgatcatgccactgcactccagtctgggcaacagaacgagaccttgtctctaaaaataaaaacaaaacaaaacaacaagaaaacaggaccatcactcacagcacctctgcctctgccctgcctacttgaatgaggtgcagggcatctcacctgctcagagcagcccttgaatgagccccagctatttctagggtcctcaaacgaaacctcccacggccaagtcatacccaacatgggcctcctcccctattctggcccctgctcggagatgctgagtgacagaggctggacttggggtgtttctggcaaagcctcactgcaggaagccccacagctcaggcccagtccttggttcacacggtcccacttccagcttcttttgcccttaagactgatttgtccctgggaga

SEQ ID NO: 232888 - DNA, 714 bp, Homo sapiens
ttaagctccggcttgtatttgtggaattgtacggataccatttccccagaaccgttatgccttattcgcagtctaaaataccctcattaagggaccaaagtggagttcacgcggtgcggccgcttagaatagtggatccccggctgcagaattcggcacaaggactgatgtgccatggtgcaatcatggctcactgtaacttcgaaatcctgtgctcaagctatcttcccaccttggccacccgagaagctgggactacaggcacatgctaccacatacgaccaatttttttacattttttttaaaggcagagtctttctatgttgtccaggttggtcttgaactcctggctcaagtgattctcccacctcagactccagagtagctgggattacaggtgctagcacccacttcactgacaattctctgaattgaaatcatttgttcaacatatactgaatccctatggtctcctaggcactgagtgaatgagtgttcacgctgatgaagaactcacactctaatggaacgacagataaactcaaacaatttgcaaagtgacacaattagatttgccttttgggccaggcatggtggctcacgcctgtaatcccagcacattgggaggccgaggcaggcggatcacaaggtcaggagtttgagaccagcctggccaacgtagtgaaaccccgtctctactaaaaatacaattag

SEQ ID NO: 232889 - DNA, 537 bp, Homo sapiens
aaatcaatcatgtagtggcttatgatacaaagttcaaaggaaatacctgtgagagcatgctcatataaataaataattgaatgagtaaataaatggagaagaggcaaatctttcttagagaagaatttcaaatatgtatagctattaccaccccttttcctgtgtctgcttcattctctccctcctttgaagggaaaacagccaaaaccagatagaggaacattctacgggatagccagcccaaacttctcaaaactgtcacgaaaaacaaggaaaaactgagaaataatgcagttttaggatacctcgggttgcatcttggaccagaaagatgtcattgatggaaaaagtggtaaaatcaaaacaaagtctaaagtttatttcatagtaatagaccaatgttgatttctcagttttggcaagtggtcaatggtagtgtaagatataaacaggaaactggctgggtgggggtataatcctttgcaacttttttgtaaatctaaagttattctaaaataaaacatttattaaaaaata

SEQ ID NO: 232890 - DNA, 416 bp, Homo sapiens
aggctggggattaacatgggagcagacggcttggctcagaaccaagtgtgactaattgagaggacaaacaggaaggcttttcacctgcccagacctcattcagggtttcctacgagacgatagcatcaggagccctggcgagtacaggcagttttgttccttgctctgagtctcttgtgctgatgacgtcaaaggggcctaagacagtgcccccaaacctggacagagtgtggaggagaaagaaagctggtgagcaagcattttggccttgaagaccagatcgctcatcccaaagcttgggtccctggcctgggaactgggtttactgattccccttgtgattctagctcctttaaccttaagacggagcctttcttctggcaattacccaggaatgggactttcttccagcacag

SEQ ID NO: 232891 - DNA, 720 bp, Homo sapiens
  misc_feature (695)..(695): n is a, c, g, or t
  misc_feature (705)..(705): n is a, c, g, or t
atactaacatgttttgggaggaagttttctcccttctgaggcacatgcctgtctctcagtaaacactggcctaaagcaaggttgggaagtgactttctccccgacaatatgtcaggctggtgggaagtctcctctcaggaacgtctgtgagaagaagcaagtgattacaagctggtggatgcataaggagctcttgatcttgggagtgggaaggggccactcccatctgcacatggcctcttgctgtttccctggcttgtagcatggagatttatgggcatgtaacttttacagtcactttttttttttttgaaacagagtctcgctctgtcagccaagctggagtgcagtggcacaatctcagctcactgcaacctccgcctcccgggttcaagcgattcttctgcctcagcctcctgactagctgggattacaggtgcacgccaccacgccagtctaatttttgtatttttagtggagatggggtttcgccatgttggctaggctggtcttgaactcctgacctcaagtgatctgcccgccttggcctcccaaagtgctgggattacaggtgtgacccaccatgccctgccatgatgtcacttttctagcaagaggtctccttgtctgtattcaagtggggggaggtagaatggggagcaacaggtgtgaccagaaaacagcttcccacccancccacccatntgtttccccatccca

SEQ ID NO: 232892 - DNA, 476 bp, Homo sapiens
tctgaagttggtttccagaagagtgagtctgctgtcaggaaaggggtaaaaacaagcacagttgcagcagcgtgattcagtgcacagaagtgagttgattaggtatcccatcaccacccctaaacaacgttaaggctgtgtagtaataagctcatcagtctttccttccccaggatgaatgggactcttgggagtcctcaatctctctttaagaaatgaggcattgaaagacaggacccacacagggatactgcttctcctcaagaatgtagtgaaatcactgtggagtgtttagaggaaagccaatgcctctgggatttaagaagggtgatcatctggccaggcacggtggctcatgcctgtaatcccaacactttgggagggtgaggcaggtggatcacttgaggtcaacagttcaagaccatcctgggcaacatggagaaaccccatctctactaaaaatacaaaaactagcc

SEQ ID NO: 232893 - DNA, 505 bp, Homo sapiens
gccgtggtgaagaaggcggcgaagaggagctccacagccgactcctgcaagacagccccgggctgcactgagtctcgggcggtggagtcgcccggggcgctgacccgacggccccgtggagatgaaaagcacccaaatttactattgcgaaaagccagggggcagggaagtgctattaccgccgcgactgtgtgtacggttttgaagtcgattaaatctcaagtccaccatttgggaaagtcagctgtagcaacaggcaacattaggatctatccacccgccttgcgatggttcccagagagaatgcgggaacttactctaagcactcttcttggtgctttaagcatattcactcattcggttctcacctcccctctgtgaggcacaattgctgctcttgttttatggagttgaaaacggagactccagagtagtgctcaaggtccctacagctagcactcccggcaggagtccagtgctcttcaccacctggtggtgcggccgc

SEQ ID NO: 232894 - DNA, 393 bp, Homo sapiens
gtactcttcatataaggtagcacagcaaaacagagaaaataactggcttaagtcatataaacatatttgctacagactccatgtctgtagatggtcacaaggctcagtttgtaatcacagctgcctccgtattggctacacggggttctttatgaagttaacctttaagagtttcattcctacaggatctcagtcttcggctgtgtttttattaggttgctgcagttttcctttactgaaactagaaggctttctggtatattttctgattctcagcagtcctcctggcttctgttgtgaaactgccacccaatttgctttttttctttccacgcttcagtgacatgaagaacacaaaatggccacacagtagtgttagctttcaattaactg

SEQ ID NO: 232895 - DNA, 369 bp, Homo sapiens
tagttccatatcgttatggtagccattcctgtgctaataagatctgagctggatgagggacatgaagaaagcagtgagaatgatgaagaaaaagagaaagattagatatgggagaaacatatataaacaatagcagatggagaggaaggcagacagaagaaaatgggtgatgagtgaaacagttaaggtggcatatgttaaattattaccacttactcacttgtaatgagggcatctgctgttactgttctttgaaattgtcattagctagttaaaattctccaggtattttttaatgttcaaatgtttactgctctcaaaatgaaagagccaaggtagggttgaaaaatctattgagctctagcttca

SEQ ID NO: 232896 - DNA, 379 bp, Homo sapiens
taattcagtgttgtttcattataacattgatgagaaaagaaagttggttttcttttacatcatttcacttaaagttgcagtttccaagagcctattgaggacacgaaggctgtcaaccttgaggctacataccttgaggctgtcctaggctaaactctggtgatccatttctgataacctctttcaaaccttcatttgaaatgctttttatcaccccaagtggaatgtatatgaaaccaaaccccttgtttttattcccctttccgacataccttttaagagtactaaatacataatagcgttttaagagtactaatatttctgccaaccagaaaacctcaccaccatcttacctagttctagatcgcgagcggccgct

SEQ ID NO: 232897 - DNA, 400 bp, Homo sapiens
taattcagtgttgtttcattataacattgatgagaaaagaaagttggttttcttttacatcatttcacttaaagttgcagtttccaagagcctattgaggacacgaaggctgtcaaccttgaggctacataccttgaggctgtcctaggctaaactctggtgatccatttctgataacctctttcaaaccttcatttgaaatgctttttatcaccccaagtggaatgtatatgaaaccaaaccccttgtttttattcccctttccgacataccttttaagagtactaaatacataatagcgttttaagagtactaatatttctgccaaccagaaaacctcaccaccatctttcggaaacttcgccatcggaaacttcgccatcggaaacttcgccatcgg

SEQ ID NO: 232898 - DNA, 276 bp, Homo sapiens
gggaatggagccggagaatgctcccagaggccatttgagtaggcagatgtgttgggcctggtccttgcaggttgtttcgtgggtcccagcaggaacaggagcctcctgcttgggagggctgtgagccttatgtgggtgtctggccactccatgtgctgctgcccgtgctgttggaccaggaggccttatgtctcccatcaggtgtgacagcccagggatttccaaggcttagggaggacagcagtttcttctctctcttctggatcccttccctgc

SEQ ID NO: 232899 - DNA, 484 bp, Homo sapiens
ccagtaaaagaatgtggtgaaactctcatatacatactttaggtttttatttagtgttgtcttcagggtcttcaggtttaagaaatggatcataaatagtggtttatgatacactgaattgtgttcatataccatcctttttgtgaaaaaagtatttattaataattattcatttatctaccattcagaaagataattgcaatactgacagtcacatccatcaccctcttgccactctgtcacgagtatcctgtgccataagtatgtcattttttttactgtaactactctgtaccctgagataaggagtcttcattgccgggcgcggtggctcatgtctgtaatcccagctactagggaggctgaggcaggagaatcgcttgaacacgggaagcggaggttgcggtgagccgagattatgccattgcactccagcctgggctacaagagcaaaactccatctcaaaacaaaacaaaacaaaac

SEQ ID NO: 232900 - DNA, 514 bp, Homo sapiens
cgtcctccccctctgtcttcacagtatcctgtctctgcgtggctgtctgtgttttctcttctcttcttataagacatcagtcatattggagtagggcccaccctaaccacctcattttaatttaatcacctctttaaagagccactccaaatatagtcacattctgaggtactgggggttagtattttaacatacaaatttagggggtggacacaattcaacccataacattatatttgctttatctctttctttctataatatataggcatattgatttgataatccattagaagacatattatagacattatgacatctcactcctaaacatgtcactttgcatcatttaagaataaggatgatctcctacataaccttaatgccattatcacatcgaagaaaatttaaatttgtattaatccatattcagttgtccaaatgtttttttatggcagtttttattttcctgcataattacccaataaagttcatacattggcattgggtgtta

SEQ ID NO: 232901 - DNA, 358 bp, Homo sapiens
ctaaatctcttcaacagcatcctttaccgaagcaacattgtcccagaatctgctgaagcagcaagaaaagaggtcagcagtaggaccaagctgcatatcttcttaggcaggagtgcatcactattgaggccaaatggacactcactagcaaggtggctggaaacaactgttccagaaagaacccaaggaaaaatttccaggaggaacccaaacagaaaaatctatgactgggaagctaagggatttgccaaggcatggggaaaagaggatctttatgtttgaagaatgatagaaaaaataaagctgttcattattacattctaccatgtttagccaattaaacaggttttactggagg

SEQ ID NO: 232902 - DNA, 395 bp, Homo sapiens
atggggtgtgattcagagatgtgagtttgaagtgatggaaccacatgatgtctgtcagacttccgcaaggggaactgaaactcagatgagtggcaggactgagaggaattaatgcagagatggttgttggaatcgatgctattttctctgttttaatttgcttttattatcaaattacattgctctgtagctatgaatgtttgtgtccccccaaaattcctttgttgaaatgctaagccctaaggtgatggtattaggagatggggcctttaggaggtgattaggtcatgagagcagagcctgcatgaatgaatcagcgcctttacacaagagacccaagacagaccccttaccccttctaccatgtgatgacacagaaggtgccaattatgaac

SEQ ID NO: 232903 - DNA, 470 bp, Homo sapiens
caatggcaattacaaaaataaaattaatagctgtaacccccattagcaaggatacacaaatcaaatcagggatagtgggtgaggaagtctgcctaacattcaaggaaggattctgaagtgatacaaaatcattgcctttgctatctttagaatggacactttcagccaggcacagttgctcagcctgtaatcccagcactctgagagccccagttgggtggatcacttgaggccagcagcttgagaccaccctgggcaatgtgcagaaaccccaactctactaaaaatacaaaaatagccagttattgtggcacatgcctgtaatcccaactccttgggaggctgaggcacaagaatcacttgaatctgggagccagagtttgtaatgagcgaagatcatgccactgcactctagcctaggcattagagtgataatctgtctgtggaaaataaaaacattcctcttcaaa

SEQ ID NO: 232904 - DNA, 802 bp, Homo sapiens
aaactgacaacactgctgctgacattttttcaatggcaatcccaaattcaaactgaaaccccactgaagagctaagcttcattagatctctacaggctgacttacatcaagtggaatttactgttgattctgggtataatacagaaacagctgtttatcttcagcttgctttctgatgcacatctgtttgggttacttcaagaggcatcatggaggattcaagtttagggaggatacagatgctcaaatctgatgaacaattggcttattcttcctcaatgaatatattcagaaagcttgttagccattgaataaacacgttgcattaggggatgattgtttacaaataccttatcttgtggaataaactgaagttgtgctttccttcattaacgtgcacagaagcagttggcaaatagaaagtgctcaaaaaagtttgtagtctgtgcctgccactattatatttcatcatcatagatgccagaatcccctcttcacctattgcccggaatctgcctaatgagatatttgctccaccccctgctgtaactacatcatagcaagagagccatcactcaggttggtagaaatgaacttgaacattgactctcatccctttttaggagatatttgccactaggggtctcatcaggtacctctatgctcttcttaggggttcttttcttttatgattgacagaattaataggtgagcgttctccaaagttctcagcatcaaggatatagtctcttcgtcacagagtattgttatataataaaaaaaggtttataccatgttataa

SEQ ID NO: 232905 - DNA, 532 bp, Homo sapiens
cttctactccacactaaattggcatgtggtcatattgtctgagacacagattatgccagcgtaaggcttcctgactcttcttcaccccgcaacacaccaaggcaggaatgtttgtgggtggggagggggcatgagtagtgggtgctagggagctagataacaagtttggcttggtgattcaggagttcaatagagatttcttgaaaggatgttttcagtaaaattttggaaaatacataataatgggggaggggagagaatttatatcaatgaacagccctgcaagcagtgtatgaaagtgcttactctgcgatgggttaaaatagtgtgttattttaattggcaattcttaaggttactaataacattgaacattaaaatttattttggtttatttttcctcattgaaaactgtcaatttatattctttgtccacttatgtttgggggatcattttaaaaaattgatcttgctgaattctgtatattcagtctatgaaatcatttagttagtaaatttgttgctaatactc

SEQ ID NO: 232906 - DNA, 486 bp, Homo sapiens
acgtatctgctaactctagaaaggtttggcccttctccaatgtcatgtatagtgacaaccctatattctgccaaatctaaattttcagaagtggaaaaattgagttcatgtaattgataaattcttcaaaaattgctaacacattgaatgtattacctataaatggccttatcagtgtggatattatccttaatactatgaatttccagcagtcacactgatgtgcttataggtattaagtgccattcagtcagatgttataattagaatgggcctaaatgaagataacttatcaggtataccatattacctaaccatgttaaatagatgcatacacaatgtctattgtaaagagaatttggattttttgaatacataacatacattatgtgtaagtataacatacattaagataaagaacacagtgagccaagattgcgccactgcactccagcctgggtgacagagtgagactctatctcaaaa

SEQ ID NO: 232907 - DNA, 402 bp, Homo sapiens
ggaggataatgggcagttactgatataagaggctgagatttctaattttattcaaatcttagatcatatattgatgagttgtaatggggtaacatagttaacagtttagaaatctgttgactatgtgcttatcagagctggagccctaatatgtttagtcattgttttaaaaatgtttttgcattgattgctgtttttagtgaatgccaaatatattgtctttaattttattttcttaggaaaattaagcgttgtaaaaacaaaagtacatttaagtttactagttgttatcaaggctaaaggctttattttattgtctttggtaatagttgttgataccaaacaatgagtacttccactttgttgtttagtgatcatattaaagtattgatattttaaaaa

SEQ ID NO: 232908 - DNA, 150 bp, Homo sapiens
gcaccgttctacattagggacattagtctgttttacagacacctttcaactccctggttaacttttaggtaatatactctgcactttagcaggaatggaacctataactctcacagaattaggaaagtgaggctgcctacagcctaaatt

SEQ ID NO: 232909 - DNA, 490 bp, Homo sapiens
tatgtttttgtgtttatctctccccagtgtccagaagaatgactgtttatttctttttaaaaattttgtgtggtggcagaagggctaaccaagggtttcctgttcactcatgtgagtttctggtggagaaaataacttttttcatgctgagatatggcaaagatgaagcatggtcagcaggaaaagtagaaattgtcccaagatgagaacgagttataaacttgtcatgaaccgtaagtgaggttgggtctagaaaggccaaatctactgtcagaaaatctcagtggaaaagtcagaatttgagaaactctgatttgaagaaaggcaaagtataactgatgtaagtattaataaaccccacaaagctctggactgtgaaaaacaaaatttaaagatgaagacagagagagaaaaaaaatggaacagaataggtggttataaaacactcgttttactgcagtttcagaaactttcctgggccgagctccca

SEQ ID NO: 232910 - DNA, 2018 bp, Homo sapiens
gagtggctcctaaaagcagcagccctaatcttctgtttctcaaaaaacctctttgtagtcattcttaattatgaccttgtgatacataggtcctattaattgattcaaccaattgagacactgaggcctaaagaaattattggctataataatgaggtgattgccttagctatcacgccagatttgctcttttgttttctcctgatattttaaactcttccttgctggaatattaataactcaaagataaaaagggtacaacttgtttccatgtgggaggtaggaagaacattgcttttggagtcagttctaggcctggtgactctttgacttgccagttgtgtgccatgatcactccaagcatccattttctcatgtgtaaaaagcatgttaaaaattttaaatgaggagtttaaaaattacactcccagtaggcttactatgaggactaaaataaataaaagtgtgaaatgcagtgccaagcacataatagctgctcaataaatggaagctaaattattttccacagttatctttcaaatttcactttgatcagttttcacagactatcttctaagcaaattctgtaggtgtttgccttcggaaaagtgcgtttgttgtcagtgaatggttacagggaaaaggagatacttgtcatgcagctggaaacatgaaaacttggccctgtgttcttaaaaatgaaaactccctgcaggatgggtcaagttgctaccataggctggagcctatgattctcagagcagcatcactcttaatggcactgttctgcatgcccttaccttgctcattttgctgggctcagtactaattttcatcccctaggcaggcaaactaagtgtcattgtggcagttccttccatactaagaggaagcattgatcactaagagtcagcatggtttactatgagtaaattaaaccagacctatcttgacctctgacaaggttgtcgtgatgaccatgtcagtttggttccttgctgtatgcccagtgtctgacactgatcctagcatatagtagacactctatatattaaataaatgagccaacaatgtccttgtgagcataatgaaaaattactggccagtgagagtttcgttggatggctttgtaatgaaagacagcacaaagagattgctagcacctgagctcaattggctttgtcttcaggccagttatacgcaattattttcaaaatgatgaattgattgaggacactgataactctacctgaagatgaagaaagagccaacgtgttaaatgtcagaaacagaatccaaagaaatcctaagaaagagcacagaagaatggcaagaactagtcatgtatagttagaatgcttaagatttgaatcttggtttcagccagcacttggagtgtgaccatcagcaatttgcttaatcttccaggcttagtttcatcaactaagttaggaggggaatctctacctcacagggctcttgcatgaatgaaacgtttggcgtaatacggaagccctcagagcagtacgcttcaagcagtttatgaagtccttagcgtctttcttatggccgaaaatagtttggaatgggttgaaacaatgggccaacctaaccagatgaaactgtaaagaagataaatgtaaagagtgtttaagtaccataatttaattatacaaatataagacaggagctatgtaacagaggagagattttagctgacagtaagcatggaatgatttggaagaaaaagaaaagccttggccaggcactggggctcatgtctgtaatctcagcactttgggaagctgaggtggaaggatcacttgagtccatgagtttgagaccagcctgagcaacagagcgagaccccatctctacaaaaaataaaagaattagcctggtgtggtggtgtgcacctcttttcccagctgcttgggaggctgaggtgggaggatgtggaggctgcagtgagctgtgattgcaccactgtactccagcctaggtgacaaaggaagacc

SEQ ID NO: 232911 - DNA, 492 bp, Homo sapiens
ttaggtgtgctaatgatattggttatggggagaatacgtgagtcccattaaatgcccacatttaggtaacacctgtattgaggagttgtattagtttcctagggctacggtaataaattgccacaagcaggatagtttgcaacacagaaatttggtctgtcacaattcaagtccaaaatcaagggctcgtggggccatgctctgcctgaaggactagggaggagtcttccttgcctcttccagcctctggtagttactggcaatccttggcgttccttggttggtgacaacataaacttcaatctctgtctccacagtcaggtagcctttttccctgtgtgtctctccgtgtcttcaaatctctctctcccttataaggatggcagttattggatgtagggcccactctaatccagcatgacttcattttgagtacctctgcaaagaccctatttaccactaaggtcacattcaaggtaccaggggccagga

SEQ ID NO: 232912 - DNA, 443 bp, Homo sapiens
taacacttagaaattttttatttctggaattttccattgactattttcagacagtgatggaccatttctgcaggtaactaaaacctccaaaacaaaaaccaagtttaagggaggaatactgcacatgctaactgaaagcacatattttgctggaaaagtcactctattttttaaaatctcatgagatgaatcacatcatttctcacttttgcaaactgttttaatgtctggcttaaaaaacaggtagatcctcatggctgcatgtgcagtcactctgctgcagtatcacatgctacaacctcaagaaaatccacgttgcctcacgagagatagcgagtgaaaaaggcaaatgacacttagtagtattacaaaaataatacatctgactccaccagccctttggacagggccttgagcacccccagagcccctggccacacata

SEQ ID NO: 232913 - DNA, 564 bp, Homo sapiens
cagtgtccactagacttgacaaggtaataacatttgtaggtatatataccccatgcaaatgcactaaaagatgtttatacaaatgctaatagcagcattattcataataaccccaaactggaaacaagccaaatatttatcaatggtaggataagtaaatatgttctgacaaaatcacaataaaatactttaaatccctgaaaaataataaacaacttcagtgtacaactacatggatgaatctcccaagcctaatgtttgtcacaaaatgccagacgcaagagtatgatgtatataattctatttatgtaaggttcaaaatagataggagtaatctatgtcgatagatgttatagcagtggataccatttttaggatgggtttgacacgggatgagggtgccagaagggctcctgaagtgttggtaatgttttatttctataaatgggtgttgattacatgaatatattcagtttgtgaacattatttgaggtaaaatagaatttgtatgcctttccgcatgtatgttattctgcaataaaaatttatttaaaatgttttgta

SEQ ID NO: 232914 - DNA, 501 bp, Homo sapiens
acctctgtggagagtggagcgtagggagaggtgactggggcacccgtgccttgacaccccactttcttctcctgctcccctataatgtcctcgctatggaagcaccttcctgggacttcagaatggaaactgctgcagggcccttctcatgcatcccagtgggcagcacgagcatggaccgccagtgatgcactccaagccacttcacctcaagcatcctatgcatctgccagacacgagtggggcctcaacactgcttgacagtttgtgaagtgctctaacattctggacatgaagctttcatggactgcactagtgtgctgtcctgccctgtctgtacacacgttttttgctcctacagctgatgggacccacgcatagggcagatgtcagccctgttgtaggctatggagctgcagagtccaagagacatcacttccccagcagccagcatggtccccgcaggctctcagtaaacgtctttgctcattactgacgaat

SEQ ID NO: 232915 - DNA, 452 bp, Homo sapiens
gggaggctctcctaagttcttagttcctccctcttcactctacctgccctttttaagacacatagtaatatagtgggctctaagtagtagacactttgttcatttgctacttctgtacccctgggtcctcttttactcttctgtcatttgttaaaaatctcggccgggcgtggtggctcacacctgtaatcccagcacttcaggaggccaaggcgggcagatcacttgaggtcaggagttcgagagcaacctggccaacatggtgaaaccccgtctctactaaaaatacaaaaattagctgggcatggtggtgcatgcctgtaatcccacctactcaggaggctgaggcacaagaatcgcttgaacccgggagatggtggctgcagtgagctgagatcgtgccactgcactccagtctgggcgacattctggaactctgtctcaaaactaaa

SEQ ID NO: 232916 - DNA, 378 bp, Homo sapiens
aagattccaaaacgcacaggaaagttgaaaggcctcaggctgtgatgtctctgaataagacaaaagagaatatcaaagttgttgtgatcaagggaacagatttcacaaactgtcatcaagaggaggccatcatggtatttttctaatgaaaagtattgcactgaacccaggttagaaggttcatctgagtgactcagagcttggtttgacaaagactctgtccttcaaagaccgtcaaagagggtctgggcgagctgcttgatcgtcctaagcagttttcttgccactcctaagaaatgggtttatgggctccttgaaaatagacaagaaaatgtccttatccatacattaaaacacaaataactgcttagacgtctg

SEQ ID NO: 232917 - DNA, 535 bp, Homo sapiens
ataatggctgtactcatgtacatttcccttaattgtaagggttcccttttctctgcatcctcaacacttcttatgttttgtctttttgataatagttattctaactagtgaggtgatgtctcattgtggtttgcctccaattttaagtattaagcctttggtatatgcagacaaatattcaccatcttcacattgtagctttagtcattttgttgacactggtacaagtttacttggcttaagacatttcatagccagcaccaggcgtgctggctcacacctgtaaccccaacacttcgggaggcttagccgggcagatcacttgagctcaggagttcaagaccagcctgggcaacaaggtgaaaccctgtctctaccaaaaatataaaaacttagcatgcacatctgtggtcccagctacttaggacactgaggagggagaattgcttgagctcgggggatagaggttgcagtaagcagagattgtgccactgcactccagcctgggtgacagaaatgccatcttaaaaaaaaa

SEQ ID NO: 232918 - DNA, 138 bp, Homo sapiens
cacgtttctctgaacatttatgcaatctcagataagagtaggattttccccaaaattctctcttcactaaaaattgagggcaaacgtcgtaagttaatctttcactttatccactaagcaaaggttggaaatggatgt

SEQ ID NO: 232919 - DNA, 445 bp, Homo sapiens
cctcccttaaacctactcggtatggctctgtctgccagcttccttaccccactctgtgggacaggtcagagggagaagggtcagcacagtgtgtgagggaggattgtcagcaggaaggagcacaggaccctgacatttgatgagatacagcagtttgtgatcctagcagcaaggaacgtgatccacataagcatgcaactcttcccatcaccgggtccctgccctctgtgagtgcctatgtgtctgagcacagctttagaatctgcaagacactgaactgcagttcctccacccacagcagactcaggctctacaacaaccacggaagtggccacagccaaacctaccttgaaggactccatgagggttaatttgatggtatgagtgggagtccctggcatggtacttgttttccacagtaaagataaattaattataggtactt

SEQ ID NO: 232920 - DNA, 246 bp, Homo sapiens
taaagtggtgtctctgaagtttctccactggaaagttgctattttccctttgtaattaataaatgtcctgtgggggagatgctttatgagtatgtaaatatcctgtttctcatcatatttttgcctactcattttagcatcggttgatgattcctggctgcaacagttattaccatagtttttagcaaatggtgattttctttgtatatcactctttctgtatttattgattggaattctactgta

SEQ ID NO: 232921 - DNA, 456 bp, Homo sapiens
  misc_feature (149)..(149): n is a, c, g, or t
gtgaactccttgcagtattattgtacagtgttttgctccttggggaaaacatcatctaggtttgtcagtttgtgcacaattctttctttcttcctttctttttttgagacggagtctcgctctgtcgccaggctggagtgcagtggcgngacctcacctcaccgcaacctttgcctccccggttcaagcgattctcctgggaggcagaggttgcagtaaggtgagatcactcagactccatctcggaaaaaaaaaagaaaaagaaagtagctgggcatggtggcatgtgcctgtggtctcagctactcaggagactgaggtgggaggattacaggcatgcgccaccacacccagctaatttttgtattgttgtagagatggggtttcactatgttggccaggctggatttgccaattttttaatggactgtttctctagatattttattgcctctt

SEQ ID NO: 232922 - DNA, 355 bp, Homo sapiens
ggagaagtcagcaccagcttaccctgggaaagtcaaggtgggcatcacagagaagtgatgtttaatttaggacctaaaggatagatgagatttgtcagacacattgaagagctcctgcctataggaagcatttgcatgcatttctctttttgcatgtcctacctgcttggtaaattttatagcctcaaagctttttccaaggacaaatatagagtcatttaatttaacatcaatatttttggaggacacattactatttaatagatgagtcaaaagcataatggtagatgatggatgctaggcttggaaatgcatcatctaaaggccaaactttgcttaagaaaaaaaaaacaat

SEQ ID NO: 232923 - DNA, 633 bp, Homo sapiens
aaaaccagtcctggaatcagatgtggggacaccctctgcaaagtttcaggcctgtctgctccactctgaaccattcacggtggggcagtgtttggtgggagtggggacaggagaaccagccagcgccccctccccctgccctgaaaacacggactgccgtgctgctggagccagggcttgccgtcttgcactgagaggcttggccagctcaggagggcagctccccgtccccatgcagcagagccctgccctggtatttatcctggaatagggcttggtgagacactagtgcgctggctcattgtctggtcatttatcccgtttgtgattgctcatatcagtgacccaggaagcccttcactacgtttcatatgtgcacaccactggtgcttcactctggctcaaggcgtgcctcaagccagccttggttctaagagagcatcaggtaccagggggatcacagttcacttccatgagggcatgaggtgggcagtaaagacaggtgggtctgatccaaggacagtggagacggtgggtaggaaaatgagccctaatgcaagggtctggacatacttccaccacaagccacagcgggaactgcctgaagaacagggcttgccaggagcccccaca

SEQ ID NO: 232924 - DNA, 745 bp, Homo sapiens
ttatcctcatagaactttgagcacagagactggcccaggcgggtgtgggctgcacctgtgcctgaggatcacggtgactccacctggtccctgtcctggagcacgtggcggcgactgggtacacgtgtcgtgggcacagtgcagcaggctaagccttcatcggattaaagtcgccggtttgatttaaaggccttaaaaatggtttaaacacacagcagcagcagaacacacaggagaagattcctctgggcttggccagcctcttctgtgcctgtgtctcatggcctggctcctgttcactcaggttgagatgaaaccgtggctgctgccatactgggcgcagaggaggctcccatctcctggtggcgctgaagcccacagccatccaagggaccaacatcttgcagcatcgcgcagggaggtaggagagaggcagggaaagtgggcatggatggccctggcttgctgcacagcctgggaggaagcagggggacaggctgtggatgtggcccttgccggtcctgttcaagtcccagctctaccatctggatccaggggctgagtcctcagcgcacggggcgaacggccgcgtctttgcccaccgtgcctcactcactgtcatgcctgtggctgagacttgaaggttagggatcaacttttacctaaaattacttctgtagaaaataacatttcatgattgagaaagcagcgcgtatgcacacattgcagaatagacaaatacgca

SEQ ID NO: 232925 - DNA, 431 bp, Homo sapiens
cagaatctcattcagaagtgcataaatattagataaaaaccagttttctcagtgtttcctggtaatattattgaagtgagcatgaatttttgtgtctctagttatataatttgtctcctaagtgaaacccaactccgtgaagtctggaaggaaaccctggcaacaatggcggcttcatcgtgtctgaggaggagccgcagagagtgccttctgtttgaagggggcctctcggaagcggcaatggcatggcaagcctgctgctttttacctcagctgtatgctgcggagtggtataaatatgataaatgtaaatagctaaagaaattctctttttttacccgaatatatgagctggtgtctaatggactgatcttaagggtttgaaccacaaaccaagttgaattaataaaaatggaggctttgttcacata

SEQ ID NO: 232926 - DNA, 465 bp, Homo sapiens
actttcctctgagcctctgaaattctttttcttcttgtctctggagatggccgctagtactcttctgctgttaggaacgtcacagagaaaagcttagtttatacagtttgtgttgcccaggtaagtcatttcccttcccataatgatggggaagagattacatttagaaatagtgaccccaaaaggccatgatctgattattgagtcctgacttctgatctgaaactttgaccctgtccttggatagtggagcctgggatggctgtctgtccctcttttacctcttttagccagaattttccctctgcctcctccttggcagcagccacttgctcgggtgttctgaaatgtgtgtggattgtggcagtggcaggacacagagatgatgggctattggaccaaaaccagtcctcctgcttcccagtggggcaggtgggctggacttaatccatgaaagagtacata

SEQ ID NO: 232927 - DNA, 494 bp, Homo sapiens
tctgctccaatgaagctgatacctcttcctctgcccggccatcccacctgcttttgcctctatctcttacaaaataatatatttggtgcccagaaatttggatatctcatatgttcctctgctttacatctctgctctaatatcacctttttaaataggtcttccctaatctctcttaaaaaaaaaatgaaacaaaaacaaacaaacaaaacccatagtggccaggtgtggtggctcatgcctgtaatctcagcactttgggaggctgaggagggggctcactttaggttgggagttcaagaccagcctggccaacatggtaaaaccccatctttactaaaaattagtaaatttttaaaattttaaaattacaaaattagccacgtgtggtggcactcatctgtagtcccagctacttgttaggctgaggcaggagaatcacttgaacatttggggtggaggttgcagtgagccaagattgtgcagagagagat

SEQ ID NO: 232928 - DNA, 625 bp, Homo sapiens
agagacaagttctcactctgttgccctggctggagtgcagtgactattcacagatgctattacagtgcactataggcccggactcctgggttcggcagttctcccacctcagcctcccacacagttgggactccaggtgtgcaccgctgccccggccccctgtctgtctttttgtctaagctgcatgccctcccacttctgcttctttttgtgttctgcttccttcctctatttacttatggtttctgtccctttgttactaagggcttgtatgtgactttcacttgctgtagctcctgacccttctgcccattactgttagattcagtttcttggtattccaactctgtgtttctgggagaggcaatgtaacaggctcaacttgggtccagtgtctggctccatcagtcatgatagggaagggggagcaattcccaagaaggagctgggcaggtacttcaaaacatggctactgtactgtgtaggggcctatggattactggtacctattaactaggtaatccttatgttagctgattgaggcttaaccccatacaggtagctttgatcatcagggtaggtccctgggaagacctgccagcagcatgcatttctttgggctgct

SEQ ID NO: 232929 - DNA, 278 bp, Homo sapiens
aggttgtagtccccaggcatccccaaccactttgtgaaacgatttagcaccaacatgtatttcatgcctaacacttcaacattgctgagcgctaaacattctaagcagtggtcagagctttcgttaataaccttgttaagagaagagagttgtatttagagaattattcagtaaatgctgttactttcaaggaatatcataactattgagaaagaccttggagaacccaaataatatagatattgctctcaaatagtagacttctcttaaagttaaaa

SEQ ID NO: 232930 - DNA, 455 bp, Homo sapiens
ggctgtgcccacagggcgattgagacatatctctgcacttatcctgaggtgatccaactcttgcctggtctctgcctactggggacattgtgacatatctctgcactgatctcccaggtgctataaatttagtataggctcaggctacatggcattgtgatatatcactgcactgatcacccaggtgatataactcttgtctaggctctgcctacagggggcttgtgacatatctctgcactgatcacccaggtgatataactcttctctaggatctgcctacagagggcttcgtgacatacctttgtactgatcacccaggtgatgtaactcatctaagttctgcctacaggagctttatgacatatctctgcactgatcacttaggtgatcagtgcagagacttgacaaaattccctgtaggcagtgcttttaaaagggttacatcacctaag

SEQ ID NO: 232931 - DNA, 512 bp, Homo sapiens
gtttaacacatacatactgaggatatattttaatatgtttgatgtattttaatgtgtttgatataatgtgggaaggggttgcctctagaaacgtgggcatttagggcctataagaaggtcttaaaatggcactgaccactgaaaattccccaagtactgtgtagaccatatatagggttgtgaattcacccctttactctttaagaacccaatttgaatccctttatcctagtgggaatcccaggtgcccatgaccaccagaaagggccctgagggatgtgaacagtggaggatgggttctgagaattccacaacccagagggactatgcttcaaaacaactagaccgctgagttttactgctgtgagatctctctctagatgtggaaatgggccagatgcagtggctcacacctgtaatcccaatactttgggaggccgaggcaggaggagcacttgaggccagcagttgagaccagcctgtgcaacatagcaagactttgtcgctaccaa

SEQ ID NO: 232932 - DNA, 407 bp, Homo sapiens
attccaattgttttgaaggcagaagatgctcgtggaggggatatcatgttgatgttatctcagggcatgcggtttatacttcttggtttaaaaaaagaacaatttgaggagagaaaatcatggacaacttaccagtcagtaagttttttaaaagtcttttaaagctttgactatccagtattcaaatcttgtgtaatacctattacagatcagttttcactgcataatatgttatatactaaagaatgtaacatagagaagtgatcattaagcacattattaatagtataaaccccctcctcatagagtaaatttgagttaatagacatagagtactttgagcaggatttggcattcttacagtttatttatattaactatatatatttttaagacctagtctcact

SEQ ID NO: 232933 - DNA, 1350 bp, Homo sapiens
ccaatatgaggaggaagactccgtaaatccaacaaacaggagaattagcaccaaaagaacttaagatcttaacagaatggtttcaaagaaaatgtagtatatgaagtcaaaagctcaatggacttgctaaatagcaaattagttaaaattcaatgaataagttaaaaacagcttaagaaaagaattagcgtttgaggctgccatgagcctcaaacatccagccttttatctctctgtagcataaagagataaaaaaagtagaaaaaattataggaaggttaaatattggaggactgaatgagaaagtcccacatacatctcataaggaatctagaacaagagagaaaataagaaaactaatttcaaaatgaaaatagatgagaattttccagaaattcaatttcattcctcaaattaaagaagcacaacacatccccagcaagttaaataaaaataaatccacagacatctccagtgaaactcaataccaaattcaaagatacaatcttaaaagaaccaaagattacctagtatgaatgcagactggcatcatgttttttgcaacatcaggggccagatgacaatggaataaagtaatatctttgaagtaatgagaaaaaatatcaatctagaattctatacccaccttagctatttttaagagtaagggtaaaataaaatttcactcttgcagaaaggacacccaactctagagttagaaaacagtaaccaaaaataaggtgggactcaaagactaaaatatgttggtaaatctaaatcagcaatgactgcataaaacaacattaatagttaacttaggaagttgttaagataaatgtaaaatactaggcaataacaacatagtacatgagaagaattgatggccattaattcttttttttttttttttttttgagatggagtctcgctctatcgcccaggctggagtgcagaggcactatctcggctcactgcaagctccatctcccgggttcacgccattctcctggatgaccattaattctaatgtcttagtatcattgaggacatgagtaggagttctgattaatattacaaatctttataaaatcaaatatgcatgctaaaaatttgatgcatattcctagattctgaggaattctagcaaagtggcaggaatgacagaattataaagttgctattttgcaactgctaacaaagtaactgatttaggcaaagatcaatggatgaaaccttttagctaaaaagttgatgggaaacttcacagtgagtggggaacacatggtcagtgcctgaacccactaagtgtgcactgaatgtggtattaccagagaatacagcaccacctac

SEQ ID NO: 232934 - DNA, 526 bp, Homo sapiens
agtcacttcgtctctaagttttaattttctcaactgtagaaaataaatgttggactagttattcaaagcagaagttctcacattctgggatttagattttatgtctggaagaactaaaaatcactcgaaccagaagttgtgaaactaatgagtcattacctacacttaagaaaaggagaaaattacagcacatgtgactacataaaagataaaacctttagtgaatataatgagacgggacactccccaccctgcaaagcagaaagtcaaaatttttctcctttgaaaaccaaagaaggaaaaatactcccaagtaaaataaaacaaaagcaaaagcaagaatgcctaacagtttctctctgtttctaacatcaagcactgacacttctgagaaggcagtgtctgtatttgtaccttctccccaatttcatttccaaattaggtgacaaaaatgagattttgttgctggttaggtggctcatttgttttaaaataaatatacattattttcaagaagaaaatatgt

SEQ ID NO: 232935 - DNA, 358 bp, Homo sapiens
taccataagctttgctaattgagattcctaaaattgggacacattttaaaattctttaaatatttaatgaaggccaagaattttaggtctttgggaaatttttcaattaactactaataatttcccgccaaattaaatttgacataatttgaaaacaaaacgctcacctcttgctgggtttcctttaccaaatccactttctctgcagtcccagctactcaggaggctgagctgggagaatcgcttgaccccaggaggtggagattgcagtgagccaagattgcaccactgcactccaacctgggcaacagagagagaccctgtctcaaataagcaaacaaacaaacaaacaaacaaa

SEQ ID NO: 232936 - DNA, 396 bp, Homo sapiens
cctaaattagctaggctttgaattaccatggaaatactatgaaatatcggtgtgtcctatgtctgaatatattgaaaagagattgatctagtatgtattcatttaggttttgggggtcccatattcaacaaattgtgtggataaatgtcaacacaatcttttatccgcaagattagtcaaagtagattcttgccataggtgtgatgcacccaaagaacctgactgttgtaaaaccatgtaatatttcagggaatgcaaagcaaatgtactacaattagttaagctagaattgaaccaggagtaaagttaaaggggtctagatctaatttcatacttattgctgatgaaagaaggccctgttaagtaaaaccttttcctgagaatctagatataagg

SEQ ID NO: 232937 - DNA, 430 bp, Homo sapiens
cagtgacatgatcttggctcactgcaacctctgcctcctgtgttcaagtgattctcctgccctagcctcccgagtagctgtgattacaggcacccaacaccacgcctgcctaatctttcatatttttagtagagatggggtttcaccatgttggccaggatggtcttgaactcctgacctcaggtgatctgcccgccttggcctcccaaagtgctgggattacaggtgtgagccaccgtgcctggccaaaacgctctttatttggccttgagaatacccacgtcctgcttttcctcctacttcttcagctgctcctcagtctgtctgctggttccctttcatttatttatccagcaggttgagacagaaggttaagtaggattgggattgggcacaggccctcctctccttttacccttcacactctttg

SEQ ID NO: 232938 - DNA, 509 bp, Homo sapiens
tccgatctacactggcgtgtgccagatccctccaggatgtgaagggcagccaaggtgctggggagtcctgagctctccagagagtgatgactagctggctacctcatcccactcccctactgtgtccctgagactatttgccttgtctccccccaccattgtgtggctctcctcaaaggcagagcagtcatagaactgtcattccagtctccagagctggcttgttggggccaggtgcggtatggctcacgcctgtaatcccagcactttgggaggccaagtcgggtggatcacctgaggtcagaagtttgtgaccaacctggccaacgtggtgaaacctcttctctactaaaattaaaaaatgagccgggtgtggtggcgtgtgcctgtggtcccagctacttgggagactgagtcatgagaatcgcttgatcccaggaggcagaggttgcagtaatccaacatcatgccactacattttagcctgggcaacagagcgagactccatc

SEQ ID NO: 232939 - DNA, 432 bp, Homo sapiens
caggtctcaggaaaggaaattagagccttcacagattcccccgccaaatggaaagcgagaaacacaagctagtcttctgatattgaaagctgccttttctaaatactgagttcaatttatttttaagctttccagattgtcagatggccagtcaagccaacttgctcaattgtaaaattcagctcagaagacagacttcccaggaacccaaacctatccttcctatgcctttgccctataacctcctagggtaatggagagaagccaaaaaggcagtgtgggtttggggcaccttcagtaccacatcatcaaaatatcttttcatggatcattcaaaatttgtggcaaaggagggtggaagggaatataccactgatgattgcccatagaaccacagtaattatacaaagcagaggacatttaattttgcaa

SEQ ID NO: 232940 - DNA, 312 bp, Homo sapiens
cagctttggcaagaaccaaaggaacggaacctctgcttccaagtgtacggtcaggagcagcgtgttaattaagtgagtcatcttccgtggcagaatcccagggtacatgggaccagacttcgcgaggctggcattaggaaaaggaatgtgagggatcctcctccccaaaccgtattctcattttcttgtaagagctgtacgtgttcatgaggaagatactgcattcaaagaacgaaatcaccagcagctttggcaagaattcaaatttgggctgatgccttcggccggataaaattttcagaagcagtgata

SEQ ID NO: 232941 - DNA, 454 bp, Homo sapiens
ccaagaaactattaattcagagccaccctggtgagttgaatttcttgaatgtcttcatggtcttgaaccaaagtcatttccacccaagggagagtcaggtgaaagtccccagggccctctctaggggaccggagacctccagactaagctggtggaggatgggctcaacctccatgagagaagagcagccaggatcagggggcattaacgttaattttcccaggacttttctgcaaatgggtattggatggaaatatttgttctcagtcagatgagtttctcctattttagtgagaccaaagaaagacaattttaattctgtccaagctgacttttttgaatgctctggaaatgttggaattccacatcaaagtacgtaactgttttaaactgataactaacccaatatgtgaaaatatatgcaagcatgaataaagggttgactaattccaga

SEQ ID NO: 232942 - DNA, 554 bp, Homo sapiens
ccctttgccccagaagaagacctagttgtgggagatacaagacagagcagagaggctcaaaccccagcttgccagccggaggggagagaaagcgccccctggtgtctaagagtgttggggaaaccacaaagaggagggagctcaagaaaggggtcccctgaagctgcattatgagttcctacgctcatccctacacacatgcattgaaatgacccagaagggtacacaagggcctcaggatctgaaatgctgtgtggcctgagagccaggtccctggatggctattgaggggtggatctgagcagcactacagaggctttgaaaattaaactgacactggaatgaaagctcacaggaggagagtcaggacttctggcctgaaactctgttaattgcctactaaaaaaaatttttatcagtattctccagaagaggttaagaggacagagtcttacaatattcaggtgtgcagaatacaatccaaaatcattcagcataccaagcaacaggaaaatctcaacaaactaaaatagaaaaagacattttagcccaaa

SEQ ID NO: 232943 - DNA, 421 bp, Homo sapiens
cgaagtttggggttcagggtttatatgggtgcaggatagagggcatggtgggccaaatggcaactttttgggtacaaaaccagaaattcctgttctcatttagggccgcagatatacaggcttgagggtgaagcctttgccagagaaccaccctcttgtatctgtatttccctgtgtcctgtccacatcagtagcactcttagagatcattaagatgaattctccctgccaacactcatttaataaatgagaaaacaagtgtcccagagaacgtatgtggcccattattatacagttgaatagtaacaggcaaaaaactatttatatccatgggctttggcctagaaccctggctccactttggttctcttcattgcatatcattatggccttggaatatgattttcctgaccttataatg

SEQ ID NO: 232944 - DNA, 513 bp, Homo sapiens
aggaggcacagttgagtgaggccacacaggccacccgagagccccgtcttgcagtctttccattctagcgagcgcgagggtcagcgttgcctgcgagaagggcttggttcctcggggcgacggggtccgggatcggagtctatttcactcaggatggaatcaatccaggcaagttgggccgagttaggaaaaggtttagaattagggttagggtcacagtagggtcaggggtcggcagtaaggtcaagggcgcccagtgagggcggggaaagcctggccagtctgatccagccccctccctccgttctgcttcttccttatccgcgcccccacccatggcgccccagcatcctttcgcgtctgagtcccaggcccatgaactcccggggcggggccacgcccaagtgcccgcccatcgccgcctccagggtgacgccctgtatgcaaataagcccgtcccgcccaatcagctcccgggggcaggaccgcccgctcccaaggcacctgcggccg

SEQ ID NO: 232945 - DNA, 616 bp, Homo sapiens
aaaaaaagcccgagaaaaaagtaaaggaaaaagaaatacatggggattataaaaataaatgaaatgaaaaataatagcttactcttgtgagcgtattacaaatatgatcccatttactccttgctttatgaagtaggtaccattatttttcccttttacagaggatgaaagtgagatactagaagtttccaaacctagcgagtctcagtaagaagtttcacttcacaaacagataggagaaatgatagtggatcagaagcatgatttaaaagaaataataaaaggccgggcgtggtggctcatgcctgtaatcccagcactttgggaggccgagggaggcagatcacttgaggtcaggagttcaagaccagcctggccaacacggtgaaaccgtctctactaaaaatacaaaaattagctgggcatggtggtgcgcgcctgcaatcccagctagtccggaggctgaggcaggagaatcgcttgatcctgggaggcggaagttgcagtgagccgagatcgtgccactgtactccagcctgcgacagggcaagactccgtctcaaataaataaataaataaattcaaaaaaattactggccgtcgttttccgtcgtgg

SEQ ID NO: 232946 - DNA, 2031 bp, Homo sapiens
  misc_feature (621)..(621): n is a, c, g, or t
  misc_feature (645)..(645): n is a, c, g, or t
  misc_feature (1230)..(1230): n is a, c, g, or t
  misc_feature (1512)..(1512): n is a, c, g, or t
  misc_feature (1568)..(1568): n is a, c, g, or t
gacttttgcagggctgtgcctcctttcctccccagacaaaatccatcacgtcagcagtcacagggcaccctggttccctctctgaatgaactgttaaatgactaagctggctcccaacagaggcagagcccagcaatatgcggcctgtaatctgtcagatgatacagcaacaggcccagtgaggggcccgacacaccccccaggagagtggagtctctcactgcatgtgacgtggaagacgccgaagaggtgagggaggcaccatatgctgcgggcctgccaagggagaataaacagcaccggcagcctggcacagagctctggcgggaacgtccaccaagatcggtcaggcactctcatggcgtcctcctggatacaggcttttgcttttgtttttaattttggagcagtgaagccgaaagtgaggagtgaggacaaggagaagacccatttgctcctgttcattcaaacagcatctcttcattttgaaattggcaagaggcagttcggggctgtggcaggtcctgtacaccacctgttgcctcccaagtcactgtgcctttctggctttctttacctatgtcctgtaaaacgccagatgaggacatagaaagatgaacntaaagctgaaaagtgaacttaaanctggaaaaaatgaagcaatctcagctatgatagctgtaatagaaaaatggagttttcctcagtttttcttcctcagaataaatgggatgatcctgatggctgtttaagtggagaggatttgtttgcaagaactctacatcttcaacattttgtagagcattccctgcgatgtggaaaattctgctgggctattccctgaggacacctctacctttcgtgtccagaattggtgggttcttggtctcactgacttcaagaatgaagccgcggaccctcgcagtgagtgttacagttcttaaaggcggtgtgtccggagtttgctccttctgatgttcagatgtgttcggagtttcttccttctggtgggttcgtggtctcgctggctcaggagtgaagctgcagaccttcgcagtgagtgttacagctcttaaggtggtgcgtctggagttgttccttcctctcggtgggttcgtggtctcgctggcttcaggagtgaagctgcagacctttgcggtgagtgttacagctcataaaggcagtgtggacccaaagagtgagcagcagcaagatttattgcaaagagcnaaagaacaaagcttccacagtgtggaaggtgacccgagcgggttgccactgccggcttgcagcctgcttttattcccttatctggccccacccacatcctgctgattggtccattttacagagagccaattggtctgttttacagagagctgattggtccgttttgacagagtgctgactacctcttgagagttttccaggcttcctaaggctttggagctttcctgagtcagggcctttgcacatgctatgtcttttgccagagaggctgattgctcagcnttatgcatgcctggttccttcccatcatgtaggtcttctggtcaagtaccccctcntcagagaacgtttctcccccacccttcccctccagtgcgcactgccaaaccctgctcgaaaccaccctgttctctgtcctatggtcactcagttgacatcacaatccgaaatattattcatttccctttctgggaataaacatcacaggaataatcagagttgtagaatgagatttgtatacaaggctgcctatgtctgtgtttttataatggcgaaatattagaatcagcttaaacattgacaaatatgtgtaaggctcagtaaattacagcatatcttgagggaagagcattagtgcaaagacattaaaattttgttgttcacgaatgattgtggggcacagtggctcatgcctataatcccagtactttgggaggccaaggtgggtggatcacttgaagccaggagttcaagaccagcctggccaacatggcgaaattccatctctagtaaaaatacaaa

SEQ ID NO: 232947 - DNA, 504 bp, Homo sapiens
ataaacagatctgtgtatctctatccctagaaatatgtatgtatcttattcaggcagaaaaacatggggtggctcaggagataaattattaatctattcaatacaaaagttgatttctacttgttagaagaaaaattaaaaaccagaagacaatgaaaataaaaccaagaagcttacttgcaattcagactaatttcaaattttatttaaactcagtttcttaactttaagttccacaagggcaagaactacgtttgcatggtgataacctaacaaattcaaaccttgctgatttatattggcaacccaaatgatacagaattttagagcatctcagaagtcatcttattcaaaaatcctctaatttaaagataagattaagaaaccactctggaaaaagggaagacacaaatgtcaccctgaagcagctcaggctccttatccccaaatttagggataatgttcagtaaatggcaacatttactgaatgtggctatgtgttga

SEQ ID NO: 232948 - DNA, 314 bp, Homo sapiens
agattaattcaatggctaccaaaattcacacatattgatgaagctgtaatcagggttacctgtgaagaaattatctctcaatccacaaacccaagaaatccaaaggaccaaaagcagggaggtagaagtaaagaggactgacccactcccagtccattctttcatacctctctacaaccctggccacaagtcatcaaaaaccatttcctgccgggtgcggtggctcacgcttgtaatcccagcactttgggaggccaaggtgggcagatcacgaggtcaggagatcgagaccatggtgaaaccccatctctact

SEQ ID NO: 232949 - DNA, 603 bp, Homo sapiens
ccaggtagctgggactacaggtgagcacctggctaattcttttgtagagatgggagtttgtcatgttgccttggctggtcttgaattcctggactcaagcgatccgctggccttggcctcccaaagtgctgggactacaggtgtgagccactgcacctggcctattactatttctacttaaacctaaacatgctgaagaatgacaatttggtcaccaggtgagtaggatagaactaccttcacctctgatgtaaatatatggaatctggatatgatgggcattataccctcgaattgctcaggcctaagtaacaccgtgtatgttgacagagtggttttttttttttttttttacttttaccaacagtatctttatttatttatttatttatttttttgatggagtctcactctgtcgcccaggctggtgtgtagtggtgcaatctctgctcactgcaacctctgcttcctgggttcaaacgattctcttgtctcagcctcccaagcagctgggactacgggcacacgccaccacacccggctaatttttgtatttttagtatttttagtagagacagggtttcatcatgttggccaggctgg

SEQ ID NO: 232950 - DNA, 348 bp, Homo sapiens
atttaagtttctgtgtgaataaatttcctcttccaaggaaattttattgtgtggtgacaggaaatttatattttattttatgctagggatggtggtcacattggttgcattgagactacaaaggggagagagtctgagggctctctctgaatgacatagatttcctacagtttatgggtctcttccatgtcatatatatttatacagggctaaggccgagagtttggtagatttaggttgccttgctatctcaggtccaggtagaataactttgattcccctaaagcagccatctccctaatattttttttcttcccaactcacagcagtgtctagacagatgttttg

SEQ ID NO: 232951 - DNA, 445 bp, Homo sapiens
gcatgttttgggcaggaaggatctgtcagcctccagctggtggaagaggaccagggcgggagctgagcagtgccttgactccgaaggacttggaagaggagggagagggagtggaggccggagtggagaggatagactggccctgaggcctctgcgttcccagcccggggcctggacttcctgtgtttggctgctgtttggagcttggtgatgattaatgaggaaatacgcactctgaagagcttatacctccctggactgtgaggccacatctgcatttataacacagtctgtgatgtgacagagccatttcttgaggaactttggttctggtgaggcagcatcaggactctctagaggccagacaagagtgtgtttctacatttgtatggagagaggacaagagccacgaagaggcctttaggaaatgaagcacccttgctga

SEQ ID NO: 232952 - DNA, 361 bp, Homo sapiens
gccatttattcttttgctcattcaataatcattaattgagtatccactctgttaacaggtcctgcctccaaggaactcatatgagatgggaaaatcagggattacaaatgtgtctaagacctcagacacagatggctgtagggaagggtggtcaaacagacaaaatggggattaattgtgcccagcactacttccaaaatggaccgaagactgaaaaaggattgtgaaggatggcaggaagtgaagttggagtgaggtgcagaggctaggtcatggatagcagggaatattaggactttgctggggtaatgaggaagtcatgagaaggttatgggacatgacaaaaatttgtgttttattt

SEQ ID NO: 232953 - DNA, 333 bp, Homo sapiens
aataaggatgtttcagtcatgtgctagaaactttgttgtcacatatgtataaatcaggggtgtccctggacttcggcctccctggacttttggcttccccagattaaaagaattgtcttgggccacacacaaaatacacgaacaataatgatagctgatgagctaaaaaaaaaaaaaagaaaaaagaaaattgccaaaaaaatctcatgtttaagaaagtttacaaatttgtgttgggccacattcaaagtcgtcctgggccgcatgtggcctgtgggctgtgggttggacaagtttgatataaactgcccatctttggagtcaacaaacatg

SEQ ID NO: 232954 - DNA, 451 bp, Homo sapiens
taaatatctctggaaaatctacatgtcatgtttaagttcctttcccaatctttgcagataatcagagagtcactagctgtcaactagaaagcttggtgtctctcttcctgtctttcccactttcacctgggtacggaataggagagaagaaatgtaagtttttgtttggtacaatcaatgaatttcctaaatccctccagacttcattgcagccctgtctctccctccctaggtactggacagtccactgtagcccctcattcatatactcagagtcactcttctggctgtggcgaggacatcctgtgacatgatgcctagagagtctggaagaatgttctccagaacttttccagccctatccaacagaattcttgggtgggaacttggaggcattggatattatctttaaatgaagagatcaaattaataaattatttttaaaattagt

SEQ ID NO: 232955 - DNA, 413 bp, Homo sapiens
ttccattctgacttgagtcagaatttaccatagttacttggttttattttatatgcacccttgtaggctgacttaaatacctccttttaaaaaataagacaaaaatgtaacatacattaattcatttattgctcacacctttttttttaaccatttgcctttatttttatccccattttgtaggtgagaaactgaggaacagaaaggttttaaaacttgcgtaaggcagcctagctccagagttcatgcttttaaccacgatgctagcttaatagagtcactaagctactcatttgtcccttcatttcctttgatgtttcctgtatgagacatctctgctagtatgtatttaagtaaaggagcattctccactctttaaacatatttttgtgataacccttccaaagcaaatg

SEQ ID NO: 232956 - DNA, 272 bp, Homo sapiens
tgaaggaattgagggaaggagagctttgtgttgaaattgagccttgggctcaacaggcggtgtgggaggaagagccgggtgtgggtcccagctcgacccttcccctgtgcgctccacatctccgagccttggtttcggaggctcccgaagcccaattcgcaggagagttggaaacaagtgggcgcgtgctgttaagggaggtcttggcatgacagaatttgcttggaatgattagcgttgcccaagggctgtcgctgtcagaaaaacaaaac

SEQ ID NO: 232957 - DNA, 681 bp, Homo sapiens
accaatcttgaaggcagaaagatagcaaaaagcctgacaaaatattttaaaaattcttatttttaaagcagtatacatatttttaagacagtttttcaaacacatttttaagtaaaactaagataaatttatgagtcattaaaatttatcttaaatattatgtttttaaacgttaattttgagttacattaaaatgttaacaaacgctgtattacttaacgtgatgaaataggaatgctaacaagaagccttgttaatgaatagagtttctatttttctaatgacagtacacattcgccaagctgttaactcattctaataattgcagatcctttgtctgttcatatgattgtagagaaaatatctgagaaagatattaatgaagttacataatttaggccaggtgcggtggctcacacctgtaatcccagcactatgggagaccaaggcaggtggatcacttgagcccaggagttcaagaccagcctggccaacacggcaaaagcccgtctctactaaaaataacaaaaattagccaagcgtggtgttgcatgcctgtactcctagctactcaggaggttgagataagagaatcacttgaacctgggaggcagaggctgcagtgagccgagatcatgccactgcactccagcctgggtgacagagcaagattctatctca

SEQ ID NO: 232958 - DNA, 411 bp, Homo sapiens
agtatgtccagtggaaggagggagcagcttatctgccttcagctccagccccttctgtggctccctagtacctccgcccagctgtgcactggcccgtcaacctcactgcatgccagcctgagagctgattcactccaggccaataggtagcaatgactgcagtttctatgtcaccaagcagaaagcaaaggtatcaggttctagtggattctttttgttcacctctgaacttaagccaggtgtatgtgttgacagcatcaggaagtaggcagtgcaggtacgggacggtgctgtgtgcaccaatcaagatctctagctccatggccctgatttttcctgttacgatcatggcataagagtggccactccattctacttctttttttttatttttttttaatgcatacttga

SEQ ID NO: 232959 - DNA, 436 bp, Homo sapiens
ctccaaccagagagtttccacaatgaacgtcaaatcctaaaaatgccgttttttatgaggtccctggaatattttctagggcaacatttctggggcaacatatacatacggttatctatccagttacctatattaagagaaagagatctggccaggcgcagtggcttacgcctataatccaagcactttaggaggccgaggtgagtggatcacctgaggtcaggtgttcaagactagcctggccaacatggtgaaacctcatctatactaaaaatacaaaaaattagctgtacgtggtggctcacgcctgcagtcccaactactcgggaggctgaggcaggagaattgcttgaacccaggaggcagaagttgcagtgagctgggatcgcaccactgtactccagcctgggcgaaagtgcgagacgactctgtctca

SEQ ID NO: 232960 - DNA, 414 bp, Homo sapiens
ccatattttggggtatcattttctgagccctaatactgtgacaggagaaaagtatttatccagcaagtaccatctgtcaaccttgttctctgcctgccagaagttgatttgctcagcataagggaaggagagaggcaggaccctagagatgtgggagggggcttctggattctgtaggggactttaggaactagggggcaggacagaaacgtctaattaggatgttttattaagtaattttgtgtgactccaaggaaaagctctcttctaactcctttcaaaattctcagaaaaattacctgttcactgatacttgaaatgtggatttggttttggggatttaagtctggtctcaagatggcaaccaggtcagcttactggggccagccacatgtaacagtttggttaaaaaaa

SEQ ID NO: 232961 - DNA, 422 bp, Homo sapiens
aatgccatgtctatatgcagaaatgccagcgtgaatgtcctccacaatgttagcaatggtcaggttggggatgggctgttgcgggtgatttctttacatggtatttgcttatagtgcttggattttttttctttctttttttttttttttgccaatgtatttaaattttcacaaaaacaaaagcctttttaaaagcaaaaagataggtcaggagttcgagaccagcctggccaacatggtgaaacccccatctctactaaaaatacaaaaattagccgggcatggtgacgcgcacccgtaatcccagctacttaggaagctgaggcaggagaatggcttgaacctggcaggcggaggttgcagtgagccgagctcacaccagtacactccagcctgggtgacagagtgagactccgtctaaa

SEQ ID NO: 232962 - DNA, 407 bp, Homo sapiens
tctgatgtggccccatgtgcaagtcccagcaagaccaccatctgcgggatggctcctccatggcccctccattcctgcccacctcctgcaggacgtggcttcctccctgccttgagcatccattccttccacctgggacttgtcattctagccactgcagccccgccatggtgcagtgccaaactctgctgtctccaagcagccccctcgtggaccttgagcctcactcagatcacctcctttctcctgcactcacctcccccgtgctcggcctcctcgctgacccagctgaaagtccatgggcacggtcaccccctcactatgccctcaagtcttcctgtcccctctggctccaccgtactcacagctcaaccctgcccttacctgcatcccactctccacctact

SEQ ID NO: 232963 - DNA, 514 bp, Homo sapiens
agtagctttccatctctgaaaaatgatgactgactcctagtattcctgcccacaccatgcatggaggaacattcatctctatttgttattgaggtgacttccatggctattgaatggaatgagtcgagcaggtgttctttcaggggtgctagggaggcgaggggtccagaagtctgcagctccggtggaagaggttaggcactagggaaggcagactggagctcagtgtctgtgacctgccggggcgcccactgcccgctcacttgagctgtgacctttccccaacctgattgatttatctactttcatgcctggtcccctgaaaccatttggggacgtggcctctgctagaaagtgtgaactgataactgcttatggtgttattcctcccagagtgatctgcacttatttacagtggttgaaggcagaaaatctctgaagactaaaggcatgaccctctaatgatcaatgattagtgtaacgatcaacgattagagctttgcaaacagtgagg

SEQ ID NO: 232964 - DNA, 519 bp, Homo sapiens
atctctaggggagaattcatttctttatggtcttctttcaggctgtcacctgagggctgttccaagtttctaaaagacatgcaaattcccagccttgtggcccccttcttccacctgcaaagccggcaatagcgggttgagtcctcctcacatcacatctctctgacccatcttctaccttcctcttccctgttaagaactcttgttattagattaggcccacttggataatccaggataatctctgcatctcgaggtccttaactttaatcacatctgcaaagttaacttctgacatacaaggtaatatattcataggttcctgggatgaaggcaagcacatatttaaggggccatagttctgcctaccacacaactcaaaaaattgtgcaaatgcttttcctctacatgagcattctatttggtatgccattcccattttctcatgtattatatttttaaaaatgtgttctcaaaggttaaattttaagaaactgaataaattctactgattcaata

SEQ ID NO: 232965 - DNA, 407 bp, Homo sapiens
catgattgtaagtttcctgaggcctcccgagtcattcagaactgagtcaattaaacctcttttctttataaattgcccagtctttggtatgtctttatagcagtgtgagaatggactaatacaacagttttgtcagtccccagttccgtccacacctttccctattcccttcatgcctggctatggaaggtcacacacacaatcctaactgccatctctatgcccagccaggctttcgctgctgctcatcagcccttgtgtagtgaagagaacccagcggcctcaaactaccagtgccctcaaaactacaaacttcccattccctttgcctcggtggactcactccctctctgctttacagaggagacagcagttatccaggggcacatccccaaattcttccttct

SEQ ID NO: 232966 - DNA, 429 bp, Homo sapiens
ctcggatgccacatcttccctcccactcccagaccaaatcctggggtttgaaaagggggttggtaccaaacctttgccatgtttgagagaaagacaggaagagagcctcacttttctcactggctttcccatgcatcctagaactcgaactctgatgaaagcatttctttagttccaagagctctctggatgaatagggtaatgggtttctttttattttctgcatcttttttttaactatttaatgtttacttcatattgatttataaacaacaacctctttgtgaatttccttcataatatagaaaatgtattttgaccaaatgtataatgcatttttattgtcttaattaactggaattccaacattcccttcccccatttctttgcttttaatgaaaagtagcaaatgaataaaaaccatacaaa

SEQ ID NO: 232967 - DNA, 800 bp, Homo sapiens
cagctattcgggaggctgaagcaggagaattgcttgaacctgggaggcggaagttgcagtgagccaagatcgcaccactgcactccagcctgggtgacagagtgatactctgtctcaaaaagaaaaaaaaaattcattatcaatctctaaaaatagaactcttttaaaatgtaactacaataccattatcacacctcaaaatatttttctatacaacatttacttggccaggcatggtggcttatggctgtaatactagcactttgagaggccaaagcaggagaatcaattgagcctaggaattcaagaccagcctgggcaacatagcaagatcccgtctctacaaaaaaatacaaaaattagccaggtgtggtagcacatgcttgtagtcccagctacctgggaggctgaggtaggaggattgcttgaccccaggaattccaggctgcagtgagctatgatcataccagtgcatgccagcctaggcagcagagcaagacctggtctcaaaaatgaataaagtataaataaaatatgtactcattacaacaaatcagaaagtacatggttgggtacagtggctcacacctcccagtgggaggccgaggtgggagggttgctaagactaggagtttgagacaaacccggcaacacaggagaccttaactctacaaaaaataagaaaaattagctgggcatggtggtgcacgtctgtggtcccagctactgagcagtgagctgtgattgtgccactgcactccagcctaagcaacagagcaagaccctgtctcaaaagaaaa

SEQ ID NO: 232968 - DNA, 545 bp, Homo sapiens
tattaacactttttaaatgtattcagtcagtgaaaccaatgattattatagcaccaacactttcattcaagaaagcatttgagtcttataatttgttttgccatggtacaatggttctactaaaatatacttgtgtaataggtactagatgatttaaaaacaaaaccggagaaaccatttaaaaagttccatagcttgttatacaaaatatgcattgctaatagtagaagccatatattgccattgtactgttgtaatacttaacagtgctcatctggtgctacctgtagactatttggtattaacgtctgctagacccttcttcctatttcttcttgaatgtataatgtgtgccttttaagttacttctagtgttgaatggtaaaatctttgtggtatttttgtattatactctgcactttacactttcttggaaaggaaaattccagactatccagtttaaatagtcttttaaaaatatttataatgtttacaataaatattttacatattttaattcaacatctgcaaattagaaaaaatat

SEQ ID NO: 232969 - DNA, 356 bp, Homo sapiens
aaagaaacaggaaagtatgacttataagcagaaaaaaaaatcaggcaacagaaactgcttataagaataacaaggtgttagattaacaaagatttcagatcagccattataaatatattcaaagaactaaaggaaactatgattaaagaatacatttgatgaatgacaacaacaatacaaagaacaggagggaggaataggaaccttttgatattataaggtacttgtactgtaccttatacactgtaaagtgatatcatgttctgtgaagatgggcatggattcgttatcaatgtgtattgcaaactccagggcaaccactataaaaagtaaaaatagaagtgtaattaatatgc

SEQ ID NO: 232970 - DNA, 449 bp, Homo sapiens
ttccatatctgtaaccattagatactgctagtttccttattcacaattacataagccaagtgaagtattaagctcaatttggtggttccaaagagagtaagagtctttgctgtggtttcctaccatgtctatcgccagagattggtggctttgcttatgcttgtgtcacttcctgatatgtgtggcacctttcttgaaaggaatgttagttttattccctgacttccgaaataaccgtcagcaacagagccaactgggcccttgtgtgtgctgaatgcttttctccagggagtcagtaagtagtgagcagtggcatggtttccttctccatttatggccttggaagggtgaaagggacatggttgggactctccatttacggtccttggaggagttgaaaagagtggttggggtgttcttggaggcagaaactagacattgtgagataa

SEQ ID NO: 232971 - DNA, 457 bp, Homo sapiens
tgactggcacttagagtccagcaccctgctgagaaaccagcaacccatgtgaggattccatggccagtaagcatgctctgcttcttgactttatgtagaggctgttggttaactttccagtgcaaattttgttcatttggatttccctattttgtctgtttttccttttcattcatgcacattttacagtccaccactctgtttcaccatgtaacgtgcctgctcccccttccctttctgccatgattgtaagcttccagagtcctccccagaaggcaagcagatgccagcaccatgcttcctctaaagcctgcagaatcatgagccaattaagcctccttttttaataaattacccagtctcagatgtttatagcagtgcaagaatggcctaatacagcttccatcctgtcacttttgataaatgtggaacaataaacaactcttctcctgcagcc

SEQ ID NO: 232972 - DNA, 529 bp, Homo sapiens
tgtgttgactttgtttattgtctgtctccaccagaatccaagctccaggaaggcaggtatttttgtccccggggcctagaattgtttcattggatgcatactgccctcggaaatggcatgaccttgggtgacatggttgtctccagctgggacagtccctaaggagggctgacagctgatggcagtcgtccaggggaactccttgcagccgatcgccagcacatggcagtccccagagccatatgtatgtgctgcacagttttaacctacacctaagggtggtctggtgccctgtttgagagtacacacacttgaggtggttagctagcatttcatcaaaaagacagagacagctagtacaagcacgtcgacaatcttaaatcaacagaagtgtcttcactaatggacataatagatattagaaatagtttttcactggtgaaattagtggtgtccaagccacctggattggagataatttttttgaaggcatttcctctcttgctggaacaggctataataatctaga

SEQ ID NO: 232973 - DNA, 237 bp, Homo sapiens
tgtttgtttggttagttttctaaaacaattgctcatttttattttattttgagccagcgttctctctctgagtggacctagacgtgcattccggggctgtttctatttgcagtctgaagtcaggcctggggcttgtggctgtttttgccatctggtctggggcgaaagggcaaatctgcaaagtctctctgttgtggccagcgagggagtcccatccccatgaagtctgtcttttgc

SEQ ID NO: 232974 - DNA, 603 bp, Homo sapiens
gaaagaacaataaagagtgtgcatcctctcctttcaaggagtgcccccaaagtcccatgctgcaagatgtgcaaagaaacataatgttttgggctaagcacattacctagagttcgcttgctaaggaagaaggaaacacatccagctctatgtcactttgataaagagataagcctaaatttacaaggaatggttgaaaataaagaaatgcacacccagcactttgagaggccgaggcgggtggatcacctgaggtcaggagttcaagaccagccttgctaacgtggcaaagccccatctctactaaaaatacaaaaaattgccaggcgcggtggctcatgcctgtaatcctagcactttgggaggccgaggcgagtggatcacctgaggccaagagttcgggaccagcctggtcaacagggtgaaaccccgtctctactaaaaatacagaaattagctgggcatggtggcatgcgcctgtaatctcagctacgtgggaggctgaagcaagagaatcgcttgaacctgggggagtggaggttgcagtgagccgagatcatgccatttcactccagcctgggcaaaaaagcaaaactccatctc

SEQ ID NO: 232975 - DNA, 206 bp, Homo sapiens
ggtccatgctccactcccacctcagtgcttgcccagcaaggaagggcccagagaacctgtctggacttcttccttctgagggttccaagggactggggccaggcccaccctggcacacggcagcactccatgagtcgctagggtttttgttcttttcaattgtggaataaatacaatttaccgaaaagtacataaaacataaatgt

SEQ ID NO: 232976 - DNA, 388 bp, Homo sapiens
atcttgctttgtgtcaaaatcaagctgtaaaattaatatttatgcccttacaagtccataaattagatttaaattaaataagtgaaacaaaagctatatggttgcctaaatcaaccaactgtaaagtcatgagtcataataattcccaaattccttttttttaaatatacttggcaacagattttattaagggacagtaaccattgtattcctagagccgtcatctttcttttttttattattattatacttgaagttctagggtgtacacatgtgtacaatgtgcaggtttgttacatatgtatacatgtgccatgttggtgtgctgcacccattaactcatttacattaggtatatctcctcatactacccctgccccctccccca

SEQ ID NO: 232977 - DNA, 513 bp, Homo sapiens
aatgagaaaatattttatgaatgcaaaattgggacatagagtctgaccaaggtttcctatgggagtttcagacatggtaattagaaaccaggaagactgagaaggaatcaaatttgcagcagctcagtaagtggtagactgggaacaagaagccagttctctgggctcttgaagcaaggccctgccacgttgtctttccccaggagaggaggtcataagacattcattccagagagagtcctgccccacctctgagaaggaaggaatgtacactcaagagagatcaagaagaatctaaacaaacaggcccttctgcgttttcccacaagagaaaatgatctaattaacattcgatcataactttttgtccaattatatttctacactgctgttcatactttatttaacctaggcataaaaattgacaatttttattgtatttttggctcttcattctgaaggcttccatgtatacatgttaaataaatttgtacaccttttctccaattaatc

SEQ ID NO: 232978 - DNA, 673 bp, Homo sapiens
gttaaaaggacaggggctagcttgaagggattcccactggccaaaaatggggcagagcatcaaagtaatgaaaataatataatcaattgaataaggatccatgagtccaaactcatataaatatataaatggatgagaagggaaagtttcccttacagtagaatgccaactaaaatataagaggagtgctagaattagaaaatcactttttgttaactgttgtagtagtaattgatttagtcagtaatcattaatagatcctcatactagtgggtgaaaagtttgaggaaataattggatagttaaatggtctcaaagtgtgtccccataataattagagaggaaaaacgaatacggtgtagaaacttggcaggtagcttcttacctaggtaataaaagttaacattaataatgggacaaattgccatgtgcctcttgatgtgatacactgaagacacaacatcacttgtagggtattcctgccaaaaagtcacgacctgaatcgagttgtgaagaaacaccagacaaacccacatgggggagcattttgcaaaataactggcctgtactctttaaaatgttaaggtaatgaaagaaaaaagagacaagctgtttcaaataaagattaaagataagaaaaatattgtttagagttggaaaaaaaagactaaaa

SEQ ID NO: 232979 - DNA, 378 bp, Homo sapiens
gtccagatcagcttcttccacatgggagggaaaatggctgctgacggctcccaagcctcaatcccttcacccttgccactggcaaactgcggtttaggttgctgccttggcagtcctggctgtcctcacggaagagcatgtgaaccacggacctggctgtctttttcattgggttggctctgcggtgcaggctggcagatgagcatgtgatgagcccgcccttgctggccgtgcaattcggctcctgtcatgctcttggccattgaatcggcctaatgcagcccctcagcagccagcctggtgttccctggggctgaggatctaatgtcagcagggcatgattcgattcacattaaagatggatattaagtcttttta

SEQ ID NO: 232980 - DNA, 564 bp, Homo sapiens
cagtcagaggtcaaaggtacacgcaggccacgtctcagaagatgaaatcatggacggaagccacacgtggtccccaccaagctttcacctggcatccagcccttccatacctccgtgcagtgagggcatctccagcgctgatggaggctggccagctgtgtacctggatttgttgggttccgagattagctgtgcatggttgttacattttgtcagtatcttaggaaaggacgctgaagtatgttagcatgggaaggaaggacagcgctcagtggctctttggttataaattcagaggctcagcctcagaactggaggcttccaccagggaggacacgcaggagtcctccgagcctcacagctggccctgtgcgtggcactcacagaggctggggaaagactgggccttgcctgaagcaaggttatcacagttccgtccctgtgactgtgggagttaacggttgagaaggactggccatggagtcccggctacttgggagactgaggtgggaggactgcttgagcccagaagttcaaggccagcctgggcaacatagacagtga

SEQ ID NO: 232981 - DNA, 625 bp, Homo sapiens
agagtgagaccctgtctcaaataaataaataaacagaattgaaatgaaattgcttccacttccacagctctattaattatggtttttaacaccaaaaagggagggagggctaaaaagtttaacattttgctaattacaaagaattctctccatacaatttaagtaatttgagtattttctctacagaactacttctttctagtctcattccaatctattaaaatccaatggtagagacactccacagtaaaaatgtcaattcttcccaaatttatctatagatgtaataaaatttttaccaaggatttttatagacataaccaaacttattctaaaacttacatggaaagacacaagaccaagaaaagctaaaacaatttttaaaataataaaattggagaaattctaccaaatttaaagacttattatatagccacagtaatcaagattgcgtggtattggtagacggacagacacagagatcgatggagtagaacagagaagccaaaaacagatccacacaaacatgtccaactaatttcttagaaaaatgcaaagcaattaaatggaagaaggatagccctttcaacaaatgcagctagaggaattagacatcaataagaca

SEQ ID NO: 232982 - DNA, 389 bp, Homo sapiens
taaggttttggcactagggatggaaaggagggggtggatgtaagagctatttggaaggtaaaatcaacaactattgataattgatagtgagagagaaagagagagaggtgtctaggaactgagcttaaccaagggcattcatttgttattgtgctgtatcttgcatttgctaacgtacattcatccgtagtagacaggacctcaaaaatctaggcggatgactttttactttgacagcggaattacccttctaaaaataaggaaacccagctaggcacagtggctcacatgtgtaatcctagcactttgggaggctgaggcaggtagattgcttgagctcaggagttcgagaccagcctgggcaacatggcaaaatcccatctctacaa

SEQ ID NO: 232983 - DNA, 462 bp, Homo sapiens
tgccagggaccagcgtcctcctcgtcagtgaaagccccacttcctgactctcaaaataaaaataactcgatgtcctgccagtctgagctgcagtcaggcagtggaagtggaactgggttgctgttgaaaacatatgttccaccagcatctgaattcccctaaggctgtggttctgaaacaggcttagcaggtacaatgctctgtgggcagcactgtgaaatactgataactttcctttcattatgtggagcagtagcagtttaactggtagaaaacctgtgtgttttaactagcataaagtaagaccctgcttcagagtcctactgcagcagggctgtggctgctacaggccttaagccccaaagcagatgtccacacacaaactggggaatggtttcttcaaagccctggggtcctcatcactgcccccaggcaaccctgcaacagtcctggttaaaagga

SEQ ID NO: 232984 - DNA, 477 bp, Homo sapiens
caggcatactaaattacagcattggaaatcaaaataggggttatgtttagggcagatggagtgataatgtgactggaagcaagcatcaggcggctctgggagggttggctgattttctgtttttttacttgtgtggcaattattatggtgttcactttgtgttcatttattgagctttgcatttttgttttgctgtggttttctgtttatatgttatgcttctcagtttaaagaatgttgaaatcttctaatacgaaattttttttcaatgagaaggattttaagcatccagaatcaattttaaaatctccaatttgctttatatgtaggtttatggactgcttaactgctactcattttttccttcatttatcaatagtgaaatatgaaattaaaataatgactatttgtggcaaaattagggactatgtagcatattaacaactttataaataaaagaataaatcaactcaaaag

SEQ ID NO: 232985 - DNA, 427 bp, Homo sapiens
cttgtttatccaatgaagctcaaatctcagtgtgtgtcagaagatggacctatatgcaccagaaggaaatctggtgcatacacacacccgcaaaaaaaaaaaaaaaaaaaaaaaaaaaaaaaaacatatctttcaatggatatatccacttaataagattcctctactctgggtcttccagaattggttgttacgccaaataactgaaataattaccatacataattaacaatacaagatgggttaatgtaagatagtcaacatttaactaataattgaaggacacgcacccaaggacaaacagcagaaataaaaaacaaaaacaaaaacaaagccatgccttggtcctttgtttttagatacacacttggatactcatccactgaggtcctaagcagtctggctcccttccagttgacctggtcaa

SEQ ID NO: 232986 - DNA, 431 bp, Homo sapiens
ccatttactcagctgagtgcctgctttctgtcaagtattttaccaataaatctctactccacaccaccgacaagaaatattttggagccatttaaaaaggaggaaacggaagcttctgccgctgcctgatcctccattgctccgagccgcgcgggtgcagcgggctgtggagccgcgggccgagccccgccggagcgcccgagagcccgcgcgtcccgggcgtccgtcggggtccgaggtccctccctcagggagtccccgctcggcagcgctctcgcgtttcacgcagcggccggggatctgggacaggcggggccccgaggccgagcctggcgctgcccagcggccggtgcaggcctcaagctgggccgggcggaggggaaccggcgagttgaagccccggggccgaaagccggagcctgtggcggccg

SEQ ID NO: 232987 - DNA, 656 bp, Homo sapiens
ttttccagaaacctgagcctgagaatttgcttatggattgtatatgatgccaggaaatggaatagaggactgggaagagtgagagaaggaagagaagccaggaggagagtatgttacgagctgtgaataattgggacttgattccactgagctcctttgaagtatctgagaatttgactgcagaattgtgaacctgaaaatcacagaaaagagaatatttatctattgaaccttctcttcatcttgcattggtcaagagttgtcctacgggatattaagacacttgcactttcaagtttgcagaagtatgggaacgaaagcatccaaaaagccctgaggcaggaagcaagctgagacaaggtgttggtgatgatggtacacctggatgaagctaacttcagcagcaatagttgctgaatgaatttttcatttcatctaagttgccacattcatcagcataaaattgttaatgatattcttttagaacttggagggtggtaggagagagaggagcagaaaaaaataactattggatatgagccttaatacctgggttttgacataatctgtacaacaaacctccatgaaacaagtttacctatataacaaaccttcacatgcacccccaaatctaaaataaaagttgaagcaacaaa

SEQ ID NO: 232988 - DNA, 457 bp, Homo sapiens
tctttctgctccccccatccttgtgccaagagttattgaggccttaccaggtgccaggctctatgctaataagcatttgtgtagactgactttacacatactatctgatataacaatgaatcgaggagtaccattttctgcatttatttgtatattctatttagaaatctgtttggtggccaggcgcagtggctcacacctgtaatcccagcactttgggaggccgaggcgggcagatcatgaggtcaggagatcaagaccatcctggcaaacatggtgaaaccctgtctctactaaaaatacaaaaattagctgggcatggtggcaggcgtctgtgatccaagctacttgggaggctgaggcaggagaatcacttgaacccgggaggcggaggttgcagtgagccgagatcatgccactgcactccagcctggcaacagagcgagactgtctcaaa

SEQ ID NO: 232989 - DNA, 442 bp, Homo sapiens
acagaacaaatatttttaattttgatgaagtccagtttattcattttttaaatttatggattgtgcttttgctgtcatgtctgagaactattctctaatcctgtatcctaaagattttatcttgttttctttcaaaggttgttttagttttgccttttacatttaagtctatgtaatttttgtgagttaagttttccattaataggtgtgaggtttaggttcaggtttttgcttgtggctatccaattgctctagcactacttattgaaaagtttatccttcttccatggagtcccttttgcacctttgtcaaaatatcagttggccatacttgtgtgtggctatttctgggttctctatttcagagagaaattttaagcccaagggtggctttggtgtctgggtgaattttaataaagattttctatgtgaaggaataatg

SEQ ID NO: 232990 - DNA, 523 bp, Homo sapiens
aatgctgtccactaaaactttttgtaatgatgaagatatcctatagccaagctgaccaatacaatagacattagtcatatgtgactgttgagcacttgaatatgggtagtgaaattgaagaactgaatttttatttttagattttaattattttaaatttaagtagctgcagatggctaaaattgaatggtgaacttccaggacaaaggatgtttttgccttcaacaatatcggaaaagcaggggtgagtggaatgtcagattgcaatgcaattgcttgtgtttctgcggagttcatggaagaaactcattatactcatttgtaatgcttgatggtaaatttgattttctctttagaatgtagagattaaatcttggtttaaaactgcctctctgtgagcagtttctccatcagtgaaacgggtgtaatttcaactcgttgagagtgctcagttatgcaatatatgcaatgtttcttatctgtgtctgaaaacagttaataaaaggttgctgtgcttgacgct

SEQ ID NO: 232991 - DNA, 497 bp, Homo sapiens
ttccttccattggtatcctatctcagttcaccactggtgaaagttttgacaattgcaccactaccacatagcaggttatcagtacttcctttaccaatagtgatgtagttcccatttctagccacctggcaggtaatcaagctccaaaatccaattttataatctgcctcatgaccaccgctaacaccaagtattaaactttaagttccctcagaaacagactctcatgaacaacacttgtaatggagtgattgaagtaggatccagcagagggagaatttatgaagacacatacagttacaacagacgcctcacctgatcccacgggatatctaaagttgggacagccattcagaaatgttctaatttgagaccggacacagtggctcacggctgtaatcccagcactttgggaggcctgggcaggatgattgcttgaggccaggagttggagaccagcctggacaacacagtgagaccctgtctctacaaaaaat

SEQ ID NO: 232992 - DNA, 761 bp, Homo sapiens
ctcatcaacactacaaatctaaagctgaaagctcagggtacggtaatgacagatggaaacttcattacagaaagcaatgaagaacacccaagtggtgtagaccagacccatgacttgctcctaaacaacagaatatgacaaatggaatggcacgtcactcccatgattatgtgatgttatatgactgtgtcttgctagctggctggctccacagacgttctctctcccttgctggctgtgaagaagcaagctgccagaactcctaaagccacatggagctcattgctgccaaaaggaattgggaagcaaatccttccctagctgagcctccagttgagagccagtcctggccaacaccttgaatgtagccttgtaagaccttctgaggaggaccaagctatgccgtatccagatgtgtgacctgcagaaactctgaggaatgttgaaaagctgttctgaaaaatagagctgctccccgtgccaaaccagttgggctggaatgaacaactgttgttataaatctccgctcctgccttcttcaacagccccagaaggttcaaaatagaatgtttcatgagaccagccagacggattgaatcagacctgcccagaagagcgctgtgccttaagagtatggaaacacccctttctctcctccctcctcccactctttttctttcagacaatttctgggactgctgacgagaggagggcatgtcagggttctctgtgttcataacaaattcttttgtgtctttaag

SEQ ID NO: 232993 - DNA, 145 bp, Homo sapiens
gaagataaatcggaaagggatgtgaacataaaaatttacaccaggataactcactttagcaatcaaccgagtgtattaatacttcactgcaaaaatcattacagttctgtagcaataaaattatgccattgagtttattttatta

SEQ ID NO: 232994 - DNA, 368 bp, Homo sapiens
ccctcattatcaaaagtatttccctgaaaagaatactgcctgttgtctctctgtttctccctgtcatcaacaacttctcccatttggccacgcagactccccacattgccagcttctatctcaggacatagggagtgaggcttgcttaggcatatacaggcatgctgcaggatgaatgaggtcaggaaatactggtccttttgagcctcggaggtactgtgtcttctcaagcccagggaaaagcctagcttctttgagaaaatccagaagtggtaactggacttcagtgaatagccctttaattttggttgataaatgtttactggtaaaagcatacttgagattaaaaacaaaggtaaatattctta

SEQ ID NO: 232995 - DNA, 439 bp, Homo sapiens
caaacagacttagtctacctgccgactaagatggggcaatcctgaaaaggtgaggaggacatggccggaagtggggcctgtcccctgcatatgctgagcatggagcttccccattgagctcagatgcaggctcaagagtcattcccagcacagctctgcagccagccacaatcaatcagtcagcccgtagggccaatccgtttgcaccctacaccccacactatccagtgaatgggccgagggctgcgggggacgcaggccaggagagggccgggcgcagcaaacagtgtgcgctgagaccctgggctgtccccgctgtggagcccacgtgcaatcgatttgagcagggccacgaggcaggcagagagggctggacatgcagaggccacagaagctgggtggcgtctatggctcgaggcggtgctgccgagcgaggcca

SEQ ID NO: 232996 - DNA, 169 bp, Homo sapiens
cagtacatgcttgaggactctccagacctcctctttccctcccccaatcatgtactaaagccagaatccacccttgaacattttctaataaaaatactgccttgaaggtggcaccaggagacagatttgagctggactcctgtctcctttttggttgaccttcaataaa

SEQ ID NO: 232997 - DNA, 112 bp, Homo sapiens
agggccatcccggctgggcagcagagaccgcatgggagggattcggggactggaatctgcaccagggtcactccctgctacccggatcccggcccccttcagacccttcggc

SEQ ID NO: 232998 - DNA, 452 bp, Homo sapiens
gagagtgattttttttttctatgaaggaatttatcttgtagcttcttccattagtactcaaagtatgaccacacgcttaagatctttgtagatgtgtgtattgtgcatcagagtgtgtaagtctaacccatctcaacatttgaaggcacttttaggttactctttaagagtgagactaggggaaaaggctgaaggttggggcaggatggtacaaggtattaataaaaagtggccacaagcaccaaatgtaaaactaaagtaatcatacaagtgttcaactacatacaaatgcatatgtaagaagactaatgaggccaggcgtgttggctcatgcctgtaaccccaccatttagggggactgaggctggaggatcgcttgagaccaggagttccagatcagcctgggcaacatattgagacctcatctcaacaaaaaagttaaaaaaaaaaaa

SEQ ID NO: 232999 - DNA, 315 bp, Homo sapiens
ctccttgtttacagcttcagagagctcaaggcacataaatcttgagggttctacagagcgcagagcacatttgtatgcatcgttaggactcgctaatacctaagcccattaaggagcgtgtatgcgcgtggtttccggtgtgtattaacttatagttaaattctggaggaaagggcattgtgaattaacatataccaaatccatcatgggcttttgtcatatcagattagtcagtcatgggtttgggggagcaacttgcctgggttggtgtgtacccacccttcaaactttgtggagcaggcccaggggtcttgg

SEQ ID NO: 233000 - DNA, 216 bp, Homo sapiens
ttccctagaaaagtttaaaatatggtaagctttgtgaactgacttctcctatttaattgcacacaaaattatataatttttcatagaaaataaattgtaagtaaataaaacatttctgagcattcttcagcttcacattctcaactcctacacctctgctgtgttttcttggtttaggtatttaaagtgtgataataaaagtgagaaacaatgtta

SEQ ID NO: 233001 - DNA, 470 bp, Homo sapiens
acttgtgagagtgtttccctctccgtaccaaaagagaaggatgactaaatcagaggaaactattatcaatggagaaggcacctactgaaatctgcataacaaacattactcttatttaccatacttgtcctgttcacctccccataactggcttcgcccacaatcttctctgtttttagttgaaaatgctttagaagctggagttctagatcacctctttcagaattactcattttcccctgggtatctcctatgtatacatgaagcatacatgttaacaaacttctgcttgtttttcttttgttaccctgttggtttgttatagtggttccaacccagaaattagaagggtagagggaaaatgattttttttctcccctccacttgaaatatgtattcttcctgctctatgaagttgtttggatgttcattaactcaccactctcaaatacataattagtttctgccta

SEQ ID NO: 233002 - DNA, 588 bp, Homo sapiens
accaagaatagacttccagccctgccctgccatttacttgctagctgagtcctggggaaggtaacttaatcactttaagcctcagctttatcatctgtaaaatgtgaataggaaaatctagcttgaaaggttgatgtccaggttaaatgaggtattttaagaggggctcaatacatgtaattctttttcctttgatgtacattttttagtcttttacatgaaatgtcacatctcatcttatttatgaatgtcttgctataaagatatatggttgatacttttagaagggagaataatcccaattttctttggtggtggggggactctggaaaggagtttataaaagacaactattattcttacccattttctttcccatatgttactagctttatcaagagagaaacttgaagttaaatgaatgagtagcatagacagcatgtgacttcaaaatcctatttcaagccgggtttggcgtcatgccctgtagtctcacctacttgggaggctgaggtgggaggatatggagtttcagcccagcatgagcaacataatgagaccccatctcaaaaaaaaaaatatatatat

SEQ ID NO: 233003 - DNA, 480 bp, Homo sapiens
tgaggacggaatggtgggcaaaagcagacagggtcctcgccctcctggggcttacagcggaaggcaagagatggcattcatctgatgatctccacaaacgtgaaatgtcaactgtggcttagaggtgcacagttatagagagccgcttctgtgaaggtgtttggcccagtcagggagtaagggaaggttttctggagatgtgacattttagccaagacccgaaggatgagtaagagcagcccaggtgaaagagggaaggaagagagttcagggcagagaaacccacctctgcaaagggaaggaggctggcaaacaggggaaagaaaagaaggtcattgtggctggagccgagggagcagagatgagtgagggtggtgtacggtggatgggaacacacacagaggccggacctcagacacccttagagagcttttgtttttacaggagatgaataaacagaagccatggaagcattttaac

SEQ ID NO: 233004 - DNA, 984 bp, Homo sapiens
gcaggctggacatatgtgagaagtgctcagtactaatctgtccctctgctagttagttctgtacagttatccccacagtcctcttcctaaagtagacattactttcttgttcaggtctagagttggttgccttcgcatgtagttaaagttctgtagcatggtgtataatatccataacactcaaccctgcttacctctcaagaggcacctttacctgtcaccccacagtctatgtgttaaatttctgttccctagataccttgggcctctttctaaatacacactttcatgtccattatttccccctgtctggaatactctagagcctttcattgacaattcacttgttctttttggtgcccctcctcaatgtgacccttttagaaccttcatcacagaaatagttgttctgttttttcagcatctgtgattctttccctccctgtcatagaataaaatgtgtatttatagtcatcaccaagaactcatattgcctcatggggattgtatctcagcatctagaatactgcgtggcacaaagtaggtacttgctaaatgtttctaaatataaatgattgtccaagcttaagtaagtacaggagagattcatatatattcttaaatgatttgcatgtttaaagagaataatataatgctcaatagatggaaaataacaatgagactgatctatacctgcaaagaatgaaatgttctgaatgtgtatttaaaagagagaggaacaccaagacagttcactggagaaaagaataatcttttcaataaatggtgctggaaaagctggatatccacatgcaaaaagagtgaagttgaaccactacctcacatcatatgcaaaaattaactcaaaatggactataaacataaatctaggaactaaaactataaaacttgagatacaaaattttataaccttggattaggtaatggatttgtatatgtaacaccgaaagcatgagcaacaag

SEQ ID NO: 233005 - DNA, 145 bp, Homo sapiens
gcaggctggacatatgtgagaagtgctcagtactaatctgtccctctgctagttagttctgtacagttatccccacagtcctcttcctaaagtagacattactttcttgttcaggtctagagtgatattagggggatcctctatg

SEQ ID NO: 233006 - DNA, 160 bp, Homo sapiens
ctatgatcacaccactgtgctccagcctgagtgacagagtgagatttcatgtctaaaaaaataaaaaagattttcttctaaggccacatggctggtcagtaacatttcagaaagaataatgctagtctccctattgcaaatgtaaggaaatttccattgt

SEQ ID NO: 233007 - DNA, 424 bp, Homo sapiens
ggttgccacaacagatgttgccaggtgtccttggatagtgacctcccatatgaagccactttcctctgatcaggcctgacagcttcacactgtggagggagctgagaacaataatctttcaaggaacagaaaaccagacgccacatgttctcacttataagtgggagctaaacaatgagaacacatggacacaggggggggaacaacacacactagggcctgttgggggtgtggggtcaggggagggagagcattgggaaaactagctaacacatactgagattaatacctaggtgatgggttgattggtgcagcaaaccaccatggcacatgtttacctatgtaacaaaccttcacatcctgcacatgtaccccagaacctaaaagtaaaattaaaataaaaaaaatcttgagcattcaatgt

SEQ ID NO: 233008 - DNA, 380 bp, Homo sapiens
gtgggatggcctttcgatatcattaccaacttattgaacattgccaaattcatactggtgagaaaccctttgaatgtaaagaatgtggaaaggcgtttactcttctgacaaagcttgttcgacatcagaagattcatactggtgagaaaccctttgaatgcagggaatgtgggaaggcctttagtcttctcaaccagcttaatcgccataagaacattcacacaggtgaaaaaccgtttgaatgtaaggaatgtgggaagtcctttaatcgtagctcaaaccttgttcaacatcagagtattcatgctggtataaaaccatatgaatgtaaggagtgtgggaaaggctttaatcgtggtgcacaccttattcagcatcag

SEQ ID NO: 233009 - DNA, 211 bp, Homo sapiens
agcccaagttatgcttgtttgaaaatgcgtggcatttcataatcctgccggaacacactcttcttgctgcattaggatccaactggaaaacataaagatgaattgctgtaggctggaaaatcaattaggaaaaagaggtaaaacatctggtgttactcttagaatatgaaaattcattttgcacatttaaaataaatgtgttgagttgatt

SEQ ID NO: 233010 - DNA, 501 bp, Homo sapiens
gctataaatttctctcagagaaatgatttcgttgtgtcccacaggttttgacatgcggtgcttttattttgttcaagtccaagtatttcatatttttccctgtgatttccgctttaaccaaaggattattcatttgtatgctttttagtttccaggcatatgggattttcctaaagctatccttttgttatcgacgtctaattttatagcattatggccagagagtatagtctacgaggtgatgttgactctttggaatttattgagcctcctttgtcacccaagttcaatgttgacttttgtgaatgttccatgttttctttaaaataatacgcattctgtatttattaggtgtgaaatatatttgtattagttcaagcttactaattgtgtaattcaaacctaccatttgttttctttttgttggtttaattgattagtttcacagagaaatatgttaaaattaccaactataataaatgatgtatctgcttattccta

SEQ ID NO: 233011 - DNA, 453 bp, Homo sapiens
ggggttaccacactgcggttctcagtgtgtgcaccggtgggggtgggatgggtctatagccccaagggaatgggaaggagagggaggtgtagggggaggaaggtcagagaagggtgaaaaggagcagaaacatagatgagaacaacaccagaagctgcagatcaggtaagggctgctcctggcccaactcctcctgactgccccccatcccactccacccctcaggagcggaagctgctggaagatcgtctggccgagttctcatcccaggcagctgaggaggaggagaaggtcaagagcctcaataagctacggctcaaatatgaggccacaatcgcagacctggaggaccgcctacggaaggaggagaagggtcgccaggagctggagaagctgaagcggaggctggatggggagagctcagagctgcaggagcagatggtggagcagcaa

SEQ ID NO: 233012 - DNA, 1081 bp, Homo sapiens
  misc_feature (26)..(26): n is a, c, g, or t
  misc_feature (58)..(58): n is a, c, g, or t
  misc_feature (61)..(61): n is a, c, g, or t
  misc_feature (94)..(96): n is a, c, g, or t
acgacgcgtgacctatgtacaggagntccggcagcgatacgagatcctgacacccaangcnatccccaagggcttcatggatgggaagcaggcnnntgaaaagatgatccaggcgctggaactggaccccaacctctaccgcgtgggacagagcaagatcttcttccgggctggggtcctggcccagctggaagaggagcgagacctgaaggtcaccgacatcatcgtctccttccaggcagctgcccggggatacctggctcgcagggccttccagaagcgccagcagcagcagagcgccctgagggtgatgcagcggaactgcgcggcctacctcaagctgagacactggcagtggtggcggctgtttaccaaggtgaagccactgctgcaggtgacgcggcaggatgaggtgctgcaggcacgggcccaggagctgcagaaagtgcaggagctacagcagcagagcgcccgcgaagttggggagctccagggccgagtggcacagctggaagaggagcgcgcccgcctggcagagcaattgcgagcagaggcagaactgtgtgcagaggccgaggagacgcgggggaggctggcagcccgcaagcaggagctggagctggtggtgtcagagctggaggctcgcgtgggcgaggaggaggagtgcagccgtcaaatgcaaaccgagaagaagaggctgcagcagcacatacaggagctagaggcccaccttgaggctgaggagggtgcgcggcagaagctgcagctggagaaggtgacgacagaggcaaaaatgaagaaatttgaagaggacctgctgctcctggaagaccagaattccaagctgagcaaggagcggaagctgctggaagatcgtctggccgagttctcatcccaggcagctgaggaggaggagaaggtcaagagcctcaataagctacggctcaaatatgaggccacaatcgcagacctggaggaccgcctacggaaggaggagaagggtcgccaggagctggagaagctgaagcggaggctggatggggagagctcagagctgcaggagcagatggtggagcagcaa

SEQ ID NO: 233013 - DNA, 1139 bp, Homo sapiens
taagagagatgtaggcattatactggttcatcttttacctaatgcatgaccagtatactagaggaagttgtgatggaccagagtctttttgttttgtaatcaaatgaatagttccttcataaccaggacagctagtgtgtgcttgagaatgtctccctcaactatatgatctgggatattctgcattaaaaggactcccttcccagtattgggagaaagagagataaattgacacatttttactctgactccttcatttatcttcccacatacaagatcattttgtcttttaaaatgtacaaggttacaataagttaaatgttattagtggccttctacatttgatcagtaatgtagatggctacttttatttacttgatgttgcattttgtttttttaactataagtttcaatacactaatctgactggcacaagttgcatatagttcccagtggtccacagggttcatcattccaaaaatatttattcataacattgaatggctcagattacataaaattctatctgttgtgaacaggtcacctgattgtaactattatctacacagttggccttcttcatctctgggttccacatccatggattcagcccactgtgaattgaaaatataaggagagagcgtctgtactgaacatgtacagacttttttcttgtcattccctaaacagtacagtatagcaactatttacattgtattaggtattataagtaatcacgagatttaaagtatgcaagaggatgtgcacaggtaatatgccatgattttatttttcctccacctcttccccctccctgcatcatgttatataagagacttgagcatctgtggattttgttatctgcagggagtcctgaaaccatggatactgagggaaaactatatgatttcccccaagaaggcagtgacatgcacctgtaactctttttcccctagacatatctgtgacatgcttaactacttttatttttccgatgtcaccttaatcagagaaaacttcccagaccaccctatgtaaaataaagcacctctgctgctgctttattctccttaacactactttttttctatagcacctgtcaccagttgacaggttaagtttaacaacttctctcctgt

SEQ ID NO: 233014 - DNA, 392 bp, Homo sapiens
tgtatgtctatgagtatcagaagagaatgcagaagataaaaacctgcgtgaatgctggagatgcttcatccctctggtccatctgtatcaccctgtgatgatccaaggaaactctggaagtgtagtgtggagagaggaacatggtgagaggccatccaggtatgctagagctgaacataaaactgggaattcttgactaaaagcaaagaacaggctcacccctaacatttgtgtggcttgagcatttataagtcataaatcaactaccttaaaattttaccttcataatgacaaatttaaaaatttatgtaaagttattgtttttacatagctttatgtaacttaatattcatagttatgaactatatttaaaataaaaaatataaattgca

SEQ ID NO: 233015 - DNA, 141 bp, Homo sapiens
gctgaaagacaccacacagagtgttatcagtccccatgccccacccaaaagggaccctaagacaggaggtgctccccttacatgccacctatcaaatgggtgccctgggcctcatctcaatcctgaaatccctggggatct

SEQ ID NO: 233016 - DNA, 375 bp, Homo sapiens
aagatttttgggagagaagaagtgttgcggggaggtggaggtggtaattataattactaaaacaggaaagaaagggcccctatgcagaattcagccaccctctgtaagtcaactcagatgggaaggacctctcgatctgtccaggaattcttttctctctgaggccaccactgaagaaagcagagcctggggccccaagaagaccctcccctagagacaatgagggagctagcaccagaagctgcccatgagtggacctgagatccataaaatgtagtggcccaaactgtacaataaccaagactcaatctcacctttctacctggtagactgaactcaaaccatagctacaggggagaaggtgtgaatttctag

SEQ ID NO: 233017 - DNA, 360 bp, Homo sapiens
ctactgatggcgaagtgtgtctctaagctgctgagagccgcagagaaactcgggaggactgagcgctactgcgaaaatgctcgttgaaccaaaacacatagacgatgacggaagaaaaccaaaaacgtgtaccttatctctaaacactgcccgagtgtgttattcaaatggttgatgtgaagaaatacctcaatctatctctgcatgtatgtttatttaaatctcgatccatcagtctattgtccttgtgggtaattttgcaagccagtgtcccgcacattgccagggatttctggagggggctgttacctgtggttgggactgaaaacaattttaaagcatcccatcatgcagttgtgg

SEQ ID NO: 233018 - DNA, 241 bp, Homo sapiens
cagcgtgggctcgtgggcccgtgggctcagctggacgccaagaaccacagaaacagctcccacccgcctaccccctcactctgcaagtgactcattggggtttggagtgggccaccctaggggtggctccttgttggaataagacagtcaccctctaacagagcaggcaaagatggcatgccaaaccccttgcttggcaaggtttctgaccagagggcaccaaggcatctccttccagcca

SEQ ID NO: 233019 - DNA, 474 bp, Homo sapiens
tgctgagtgaaagaggccaggcacaagagagtacctgctagatgattctatatacaattcttaacaatacaaactaatttgtagtgacagaaagcagatcagtagttggggtaggaagggtggatagaaaacaaaaggacataaaactttttggggtgatgggttatctagactgtagtaatagtttcaagataggaatatattaaaacacttcaaattgtaccctttatattaggtgtatttatgtaaatcagttttacaacttaataaagctataaaaaaattggaaaagaacacatactataattccattaatataaagtcaaccaacaatagtctagagtggcagaaatcgtatcagtggttgtttttcaggtgggaattgattgctgagggccacaggggaattttctgggtgatggaattttattgtgtgtaaattgtaccacgacaaagttgaattaaaacataaaa

SEQ ID NO: 233020 - DNA, 310 bp, Homo sapiens
cccctcccacgacacactatcccgctctgtgctccacctgcattgacctttccttggtccttcttgccacaggccatttgcacatactgttccctctttctagaatgttcttccctccccctccttgctctctcctacccattccttagagctcagctcgaatgtcacttccttaggaaatccctccaggactgcatccaattctaggctcctgtggcattacacacctctctctcctcattcttgctgttgttttgattttaaattatcttcaactttttgatgactgtcagtctgtcccactagactg

SEQ ID NO: 233021 - DNA, 273 bp, Homo sapiens
aagctatcttcttggtcccagagagccttattacttaataatacatagatatctgaccatcaaatctaataattttcaggttcaaaggatttggaatttctaatttgggcttgaagttggcaaggagtgcaaataaaagagaacacaaatgcctaaaatgcttatctgtccttacaaacattcaatttctgttgtgtatcagagctggtctgaagctgtaattacagtagtgctgtaactaacttgtgcttgctggttctggaatttgatgat

SEQ ID NO: 233022 - DNA, 403 bp, Homo sapiens
gcaccttctcggcctctgtctgggtccccaccttagtctacggtgtcgccttttctaactgcgagtgctaaggaagaggcgaggggcgggctccgaggctaggcgggcgctcggggttggagccgagggtctgggcaaaccggtgggtccctccccactgcgggagcggccagggtgggaaaaccgcggtcgggcgggcggggtagggccctcccgccgccgtggctcctggggaggccaggggtgaggagctgtcgccgcctttgcctctgcctcgagggccgcgctgaagagactggtaggagagcgccgcgggcggatggaggcgactcttcgccccgcctgagctcaggaggggctagcgcggagcgcgggtcccgcctccagccgcgggagcggccgc

SEQ ID NO: 233023 - DNA, 468 bp, Homo sapiens
gaatctctttcagacctagtgaaaaaaagctcaatcagtgaaaaattattgattttcctatcttttaatccaaaataagcctgcaaatacctcataataatgatgatgatgattgttttttcttagtatcatttcttaacagatgcctgcctccccaacacttgtattaaaaattatactaaacttatttcatataaataaaataagggtgtgtcatagtaatattttaggacatcatacccatcagaattgaattatagggtctattgccacatattggggatgccttcttaaaagctcctcatgcatataagttaaatcattcttttattaatcttaaaattaccaagggaaaagtttttattcaaagatttggaattgctggtgattgaagagttgaaaaagaaaaccagaagggaaaatgacctaaataatacttgtaagagtttccaaattaaaaaaaaaaaa

SEQ ID NO: 233024 - DNA, 410 bp, Homo sapiens
tgcgctactggaccctcacctatctggcgctgcccacagtgaccgaccaggaggccagttccatgccctccacaggggactctgaggccactcccgtctcccccgacaggcaactccgagtctgcccccgtccctgcaacgggtgactctcaggatgcccccgtgtccccctcaggtgactctgaggctcccccgtaccccctacgggtgactctgaggcccgtgcccaccttgggtgacactgaggctgcccctgtgtcccccacagatgactccgaggaagctcagatgctgcagtcattagtttctagtgtcccatcagccttggtctcaagaggccgagagggtgcaaccccaggggctcccctcccatcttgagctcttcctgaataaaacctcattcccctgtc

SEQ ID NO: 233025 - DNA, 788 bp, Homo sapiens
gagcccggtgcccccgtttacacttcagcaaaaaaaaaaaaaaattgtttacttgtcaaattgaactaggtcaatttgaatatgtgtattgctctaatgtatggaagttcttagtataagagctgaaggatcatgactttcggttaatagatgtttgaaatagatgtttagaggttactgatacacatgtcaagttgttcattcccatcatttaaaatatcaccttataattccacagaaaagtaaatggtatgtggacgtcataatttagaatgtgtaatcttttttaaaatcttataaaaatacactggactcagtggtacgtgcctgtagtcccagctacttggaaggctgaagtgggaaggtcactagagcccagaagttcgacactgtagtgtgcaacaatcatacctgtgaatagctactgtactccagcctgggcaacatagcaggactcttatctctaaaaaaaattttaaatcttataaaaatgtaggtatatctggccaggcatggtggctcacacctgtaatcccaacactttgggaggtcaaggcgggtagatcacctgaggtcaggagttcgagaccagcctggccaacatggtgaaaccccatctctactaaaaatacaaaaattagctgggtgtggtggcgggcgcctgtaatcccagctactcaggaggctgaggcaggagaatctcttgaacctgggaggcagaggtggcagtgagctgagatcgcaccactgcactccagcctgggcaaaaagagtaaaactccatctca

SEQ ID NO: 233026 - DNA, 2346 bp, Homo sapiens
  misc_feature (1511)..(1511): n is a, c, g, or t
  misc_feature (1916)..(1916): n is a, c, g, or t
  misc_feature (2290)..(2290): n is a, c, g, or t
ctctctggccgcctctgcctccatctctgtgtgtctgcgtcttcgtccctgtctctgagtttcggcttgggtgtctctctcctaccccggtctctctgtgtcctgtctgtctctgcctctcctgtccctctctccgcagcgccctccccgtctctgtctctctgagtccctagctcgctccttctctaaatctgtgtccctatagccccctgcgtctctctgactctccctgcatctccctcccctgtctgtgaatttctctgtgtccatcttctgtcctctccctccggtccctggctccctgccgtgcttcctctggtcccgagtctccccttcatctcccgcctggccctcctccctgtggccacctcctccctgcggcctctcggggcagggtgggcgcctgggcgtgctgcgcgcgccctcatgtggccggcagacgctgcgtgtgagcgccaaaaggggagtgctggggagcgggggacgctggtgttcgcggtgacactgggaaatggcgtgtgacacctggaggctgtgtgagtgtgtactgccgggagacggcgtgagacatctggagagtgtgtgagtgtgtactgccgtgatggtgtgtgactccaggagatctgtgagtgtgtactgctgtgagatggtgtacgacgccaggaaactgtgtgagtgtcgactgccgtgagatggtgtgcagtgccaggaccaggacaccatgagtgtgtactgccatgatggtgtactggtgagatggtgtgtggtgctgggagtctgtgtgtgactgattgatatgagattatgtgcgacaaggagagactgagtgggactgcatatgtcagagatgacatgtcgctgactgtgtgtgacactgagattactggtgatgctgagagattgtgggtgactgtgtgtgctgatgaaaggttatgtgtgatcgggtgtgggagagacactctttggggctctgtatgggacattgagagaccgtatgtgggagtgagagaccgtgtgtgacggtgcgtgtgagggggcagtgtgtgtggctgtgtgcaacatggtgagcatacggtgctgtgtgtgtcacagaagtagattctgtgtgagagagagtgagactgatgactgatgtacactgagaggtggtgtgggcaggtgtcatgagaggcacatagggggcctgggtgggacagacacagtgagtgtcagacagtctgtgttggccactctgtgtatggcttgtgaaaaagtgcgtgatccgggcacattgctgtaatcccagcactttgggtggctgaggcgggaggatcccttgaggccaggagtttgagatcagcctgggcaacatagggagacccctccccccacccccgccgtctctaccaaaataaaaataaaagaaattaaccaggtgcggttatgtacctctgtggtcccagctactgggaggctgaggttggaggatcgcttgagcctgggaagtggaggctgcagtgagctaagatcgngccactgcactccagcctgggtgacagagagagagaccttgtctcaaaaaacaaaacaaaactgcgtgactatgtgtgacactgagctggtgagagatggcagcgttgtgacagtgcatgcgagagtttgcggctgtgcagggcactcggaagcgagagcgtgagggaggccttgtgtgtagaaggcaagagatgatggagaggtgggagtgagtgtgtgaaacgctgcgagcttgtgtgggactctgtgagacactgagccatcgtgggtagctaggtatgacaccaggagatgggttgcgtgcgtgtgtgtgacagggacagactgtgtatggagggaatgtgtcagatgcgtgtgacaccaggagactgtgagagaatgtatgtgaccttccatggttgtcnctggacaggcgactgggtgttactatgaaatactataaaacagtgtgtacttgacaggttgtattgggtaattgcatgccaccgtgagacacagaaagtgtgagactgggacagggtgtgagattgagagagtttaaatggcatgcaaggccaggcgcggtggctcacgcctgtaatcccagcactttgggaggccgaggcgggtggatgacctgaggtcaggagttcaagaccagcctggccaacattgtgagaccctgtctctacgaaaaatacaaaaatcagacgggcgtggtgtcaggcacctgtaatcccagctactcaggaggctgaggcaggagaatggcttgaacccaggaggcggaggttgcagngagctgagattgggccactgcactccagcctgggcaacacagggagacttcatctc

SEQ ID NO: 233027 - DNA, 747 bp, Homo sapiens
cgggagtccagactggagagcagtggcacaatcatggctgcagccttgacctcccaggctcaagtgatcctccaacctcagtcttccaagtagctgggactacaagcatgcaccaccgcacctggctaatttttgtattttttgtagtgatggagtttcgccatgttgcccaggctggtctcaaactcgtgggctcaagctatctacccgcctcaacctcccatagtgctgggattacaagcatgagccacggtgcccagccaggaaaattatttttaataattccaaaatagtaagtttataacaagtattaagtttttgtctttcaaaagacaaaacctttttgtggaagaaccctctaacaactgattagtctgatttttttttcaaacacttatgaaatgatacatgttgtctccaggaatatttaatttgtattttaagattaacgcatttaataaaaccataaacaaccactgacttttatttcaaacaggtccccatttactaaaaccttgacctttgactgtgttatattctattaaaagtaacaacattctacatatgatttaattctccctgtaatctaataaaggcattccactaaatatatatatatttttaatttcacttaaaaatatatataaaggcatttcacttaaaaatatatatatatatttaagatatatatatatatcttaaatctcccacatattcagagcatagggaaagaaatgtgtatgagct

SEQ ID NO: 233028 - DNA, 508 bp, Homo sapiens
acaggctacaagacagcattgttacatgttcccgcttatggaaaaatcatacatccctgtgcatatatgcataaaaaagtctagaagaatatttatcaaaatgtcatgagtgatcatctcatcaggtagctggacctaaggggccttttaatctcttatacttttctatactaacggaaaatttctaccattagcctctattatgcttgcaaacaggtgaaaaataataaagagcagtaacagaaaaaaaatgactctaagaaaggtgaaataatttaatgttaggtaaattgagtttggaatgccaataaaatatcccagtgaaagtgcccctatgcaactgaaaatgcaaacagaaaagcagggaggcgtgtagatcatttaccattttcggttcctctcactaacctcatttccattttacttacattccagttttacctatatttatcctctaatgtacatcaattttactttccaaatacataaaaaacactaggttcttcca

SEQ ID NO: 233029 - DNA, 285 bp, Homo sapiens
ataaaagcgttctttcttatgcatttgcaaaacaatgattctgtctgctgtggattcctcagttttctaggaggtgaggaaatactgaagagcaaacagacccaccctctgctctcaggccaccctattgtcccttacagtgtgtgtgctcctggctcatcctcactctgctccttaaggctctgtggggtcccaggcataagccttctctcagttccttcagtgccactcaggcctggctgccacgatacagatggtatatgtgaaatacaaataactatatgc

SEQ ID NO: 233030 - DNA, 500 bp, Homo sapiens
  misc_feature (447)..(447): n is a, c, g, or t
cggggtttctcttccacagccgtcccctctgtcattgcccacccgcccaccattcagcacactcatctgagtgccttgttcctgccggtaaacactggctgtctctgggaaactggttcctgctgaggcgttaatgggtgaatgtgttcctcctttgagaagttccaatttttaagaagcaggaagggagggagggaggcaataattagcttgaagggttcagttactgagaagaaaacttaaggccttagccacaggctagttggagggaaaggggccatggtgagtatcttcgatgggttaggaagtcttctgtgctctttccacactgcttactacccagagtggctaaatgcatggattctgaagtcagacgaaactgttttgagacccaactctgtcgtgatctctgtgacttttttttttttttcgaaacggagtcttgcntgttgcactccagcctgggcgacaaagggagactccgtctcaaacaaacaaac

SEQ ID NO: 233031 - DNA, 559 bp, Homo sapiens
ggttttatgattaagttttaactcgtttttagtaacagaaacaatgtagtgagttattcacaaaactatatagtatatttcttcaatttattctgagattgtattattttacttttctttgatgatccagtgttgataataaatgatagttttattttcagtgcccgtacttagctaaacaacacttgaaaccctgtattgtttcccaaattatgtttcaaaatcttacctaagtaaatccaaatgtccatgagcttatgctttagcagatactggtgttctttatgtgcctattactcactttcactttaagttatttgacagcatgtgtcactatttccagtcagtttttgatttaactaaaatctttttgtcttcaaatttatttcttttttaattttgagattttatagagattggtaaaaagtttaagaaatagggaaggagatcatttataaaactagaaagtaatcttaatgttagtgtcactgtataaacttaatataagtgataataccagtgcattagtcattattttttattacactttcaaatgaca

SEQ ID NO: 233032 - DNA, 169 bp, Homo sapiens
attatttatatgccatagctccttcaggctggagacattggagtcccatctgtatctcattactcaggtctgagtctagcacgaggtaggccctcagggaatatgggtggaattaacttttttgtagaactgtgatttatgatttttgaaatgaacaatcttaaagata

SEQ ID NO: 233033 - DNA, 256 bp, Homo sapiens
tgcctcccaggttcaagtagctgaaattacatgcatgcgcctccactcccaggtaattttttgtgtttttagtagagacagggttttgctatgttggccgggctggcctcaaactcctgaactcaagagatccacctgcctcggcctcccaaagtgctgagataacaagcgtgagccaccgcgcccagcccacttcaccatcttcaaaataaggctaactaaaccattcttatgtagctcaggggactgttgtgat

SEQ ID NO: 233034 - DNA, 186 bp, Homo sapiens
ggagacaaatgttcaatttatttaggaagaaatgcccccaaaagctttaatgaacaaggccaagtgctcaatcccttttgcaggagatggcttcaagtgctttaataaagaaccatgtactcaatcgtcttcggaagaggggtctccaaacggttgactggagggatcccttctggagggagtctc

SEQ ID NO: 233035 - DNA, 587 bp, Homo sapiens
gggcaaggaccattcgtgtggggctccaggacctcagacgcctgagtttagagtgtctgcttcctaatgcatttcaactggagtgcactccatagccatgatgcagttatccctggtgctctttttgtgccctcacctcacctggcactttgggaaatgggagaggcaaccttcattgaatatgtgtgctctggtattgacattaggttagaaagaagctagcatatttctgttgcttttccctttcacattggtctggtttgaatttgtgtccctacccaaatctcatgtggaattgtaatccccaaggttggaggaggggcctggcgggaggtgattgactcatgggggttgactcctctcttgctgttcttatgatagtgagtgagctctcatgaaatctggttgtttacaagtgtgtggcacttcccccttcacacactctctcctgcctcaccatgtgatgatgtacctgcttctccttcaccttccgccatgattgtaagttcctagaggcctccccagccgtgcttcctgtacagcctatggaactatgagttaattaaacctattttcttcataaatta

SEQ ID NO: 233036 - DNA, 465 bp, Homo sapiens
aatcatcaccagcagctattaaaaattgggctccaagtgttacctcttgggaccgtgactgggcatgacagtgggaggcgcttttgctttgcattttatttatacctttgatattgtctggattttttgtttatgtcttacttttgttatatgtgtgtgttaaaaaactaatttaaaaaatgacactcttttctagatcaaagaaatgaattctgtggagcagaatatgtagtactttggaaagatgatcaaaataaattactaagcaaaaaatgatacttttgggggtatgattccattttgattaaaatgtatccatgtattaaaaaagtctggaacaatgaatattaaaatattattaacattttcttgttttagcctatctttatcttctattttgtctagtgtgaagatatattactattgtggttagataaaaataattattgattttaattaaaacag

SEQ ID NO: 233037 - DNA, 117 bp, Homo sapiens
cagaggatgagaattgtttactccctgtgtgctctgtgcatgtgagatgaatgtcacactccacacacacttgcagactcccagccgggtgccgttcctgcccttctggggttgatg

SEQ ID NO: 233038 - DNA, 938 bp, Homo sapiens
agacggagtctcgctctgtccgcccaggctagagtgcagtggcgcgatctcggctcactgcaagctccgcctcccgggttcacgccgttctcctgcctcagcctcccgagtagctgggattacaggtgcccaccaccacgcccggctaatttttgtatttttagtagagacagggtttcaccgtgttagccaggatggtctcgatctcctgacctcgtgatccacccgcctcggcctcccaaagtgctgggataacaggcgtgagccatcgcgcccggccgagaggtaccttttatgacaactgaaatcattcagtttcaagaggagttgggtactgaaaccaaacttgcttactccaaagcccaaaatcctttccaccatgcctgtgtgtctgtaaggctacactagaaatgcttcctttcttatagtgggaagcatgggtactaagctcttttacgaacaagtgttctgcatattcctggttcctttttattttggactgaggagatttaggtcaaaatttctgggttctgggttggaattccagcttctttcttcaaattaaactggggggtagcaagacttattcctagatttgttagaaggccacagcttttccacatctcattttagtcatgaaaaagacacatgcccagagtttgaaaaacataaaggcaatttgactagtggcttgattggttctatcttctttttcttgtccctctttcctatttatacttctacttttgttacagcatttgacaatagttggaaaaattttcactgaccttgaaatgtctttgggatagggtgacttaaaatataggttaagtggcatacacaaacttcttagtgagatcctaagggcctacagagacaggctgacaccaactcaacccttgaaactgtgcaatgaagagcctgtgggaggctaaaaa

SEQ ID NO: 233039 - DNA, 1064 bp, Homo sapiens
ctgagagacaggacagagggagacccaaagatctggtctgtagctaagtgaattttctaaaactcattgattcacacgccatcccttgaggtggctggtgtcccgcgatggccacaggcgccctcctgccgtgctcgcgcccgtgcccgatgtcccggctggacttcctcaaggcctcgcacttctcgctggggcctgacctgcggctgcacgagggcaccatgcgcaccacgtcgcaccgggactttgcctacccggctgccacccgggagccgccgagcctgcagccgccgcccgcgctgcttttcccaatggacccgcgctgggaccgggaagagcgcgtgtcggaggcgcaccgcgcgttcccgccgccatccacgccgccgtgggagctgctgcaagcgcaggcgcgggaacgcacgctcgccatgcaggccggcaacctgcacctgcacgaggacgcgcacgccgggatcggcctctccaacgcgcacgccgcctacggctggcccgagctgccggcgcgcacccgagagcggatccgcggcgcgcgcctcatcttcgaccgcgactccctgcctcctggcgaccgcgacaagttgcgcatcccgcccaccacgcaccaggcgctctttccaccccacgacgcgcgcccgcagcctcgcgcgcccagttgccacctcgggggccccaacaccctcaagtgggactacacgagacaagatgggacttcctaccaaagacagttccaggccctgccaggcccacctgccttgaggtgtaagagggtaaattgaggctgtgttggggctgcaggcgggggcagaattgggggctgggtggtttgggccttcctatccctgtctgcccacaggcctcctccggagtggagctgggagactgcaagatcagctatggatcaacgtgttcggagcagaaacaggcctacaggccccaggatctgcctgaagataggtataaaggggccactgcgggcacggtggctcatgcctgtaatcccagcactttgggaggctgaggcagacagatcatgaggtcaggag

SEQ ID NO: 233040 - DNA, 223 bp, Homo sapiens
tatatttaactttttaagagaataccaaacgatctttcaaagtgcctgtgccattctgccttcccaccagcaacgcgtgagggttctgtctctgcacatttttgccaatacttgttatggcctgttgttgttgttttcttttgtttttaattatagccatcctggtaggtgtgatgtggtatctcattatggtttcatttgtgtttccctgatggcatttctc

SEQ ID NO: 233041 - DNA, 348 bp, Homo sapiens
ccatatcattcacctataaagcctgctggtcttaatatttctctgtagtaagacagctcatgtgcagcttatctaaaaatgataccagatcaagtttacttggggagaaatactctgtaggtttttttgtttgtttgtttttatgagaaaaaagcagtatatactaatgtggaaagatgtagcgcgtcaagcagtgagcccattacttggtgtaacagggccaagggaaaacttcctctgtgccccctgaatcctcgctgaaaaatccactgacaaatagcagattaatagaaaaggcatacagatttgttaatgtgcacaaaagtcttacaaaatataagatctcaa

SEQ ID NO: 233042 - DNA, 313 bp, Homo sapiens
agactgttctttcccccattgaataggcttggcacccttgttgaaaatcaaatgatcatagatgcgagagtttatttctgggctctccattctattccattggtctatgtgtctaccttaacgagtactgcacttttatgattactgcagcttcatagtaagttttttaattttgggggaacagggtcttgctctgtcacccaggctggcgtgcagtggcatgactatgactcactgcagcctcctcctcctgaggcaggagatggtgtaaccagagcggagcttgcaatgagcagacatcatgccactgcac

SEQ ID NO: 233043 - DNA, 445 bp, Homo sapiens
acacataggaattgtgggagctacaattcaagatgagatttgggtggggacacagccaaactgtatcactcctgttgttccacatccttgtctgtagtttattttgtctgactttttcagttttgtcattttggaggttgtgtcatatcttattgtggctttaatttgaacttcccttattagtaatgatgttgagccacttttaatatatttgctatctgttttgtcttctgtgaaggacctattaagtttctggcctttttttttttttaattgacttgtagctgttctttctatgtgtggattgcaatcctttatcattatgtgttgtgaatattttcttccagtttgtggtttgttttttttacctgtgaggtggaggttgcagtgagccaagattgcgccactgcacaccaacccaggcgacagtgtgagactctgtctc

SEQ ID NO: 233044 - DNA, 551 bp, Homo sapiens
ggaaaggaacctctgcagcttagaggcagcagtctatcacccttttgtcagagaacctttgtagaagagtcaatgttttttgccatttgaaaatctctgtttctgcaagatgccatgctaggcactgtacacaattaaaatgagttcccatctccaaggaatttgcaaccatagacagcacagtgaagacaggtgttaacttgaaggctgtacacaaacagtgaattctcaagtctcctccccttccctcccctaggcgctgtgcacaattaaaatagcagagttcccatctccaaggaatttgcaaccatagacagcacagtgaagacaggtgttaacttgaaggcagcgcacaaacgggaggcaattgaagttgtcacctactgtacaacacagtggcccttgtatgaagatccaagacacatatggaaattaaagatttaattatcactcctttggaggatttgttggccatcagcaacttgggcttaacttgggtccaattttataattttagtaaattataataatatttatgatatctataacta

SEQ ID NO: 233045 - DNA, 501 bp, Homo sapiens
cagttacacaaaaagaatttgtatattttcaacttctagcagtttgtaattactcagctcctgaaattaaagaaatttaatcagttttagtcatcttgtcttggttgccatggtttggaaggaaataccaaatagatttgaatcagtagactagaaggctgctgtttaaacacatgaaataattttttaaaaagctttctgggttgggcgcagtagctcatgcctgtaatcccagcacttggggaggccgaggcgggtggatcacttgaagtcaggagtttgagaccagcctggccaacatggtgaaaccctgtctccactaaaaataaaaaaaattagctgggcgtggtggtgcacccttgtatttccagctactttgggaggctgaggcaggagaattgcttgaactcaggaggcactctcatgaggcggaggttgcagtgagctgaaattgcgccactgcactccagcctgggcgacagagtgaaactccatctcaga

SEQ ID NO: 233046 - DNA, 486 bp, Homo sapiens
tggacaggacattccaggcaggcacttggtctagaggtgggctgatcatttctaaatggcagaaccctgacaaacgtgagactgagagtccacagaggggcacgtggggctgagctgagaggcccccagggccagcatcctggcccatgccttatggaaggccagactagaagccctgggccagccccaggaaataggaagtttccaggccgtggacctcctgtgcccctcagggtgggggccatggaagagctcctctttgttgcagggaggggaagtctgtaccccaaaaaggtcttcccataatcctggagctgggagtgtgctcgatgcaccaatggcaaatggtgtgcagcaaacgcgctccgttcctggcactcttaccactgtcaagagagggaccccagaactcaggaggcagccaccagcaatcagcaggagctggcaggggaggcagacgggcctccgtctctctcccatttctta

SEQ ID NO: 233047 - DNA, 518 bp, Homo sapiens
ggataatggacctcagctttagtccttggtggcctcttggcatggaagctggaactttctcaattctgatataaaacccttgagcaagagagaaactcatgtgtgatggggtagggagtggggaccctctggtagctgtgggcaagcatgcccaaggacttggaagacagaagcctgtggaaccccatctcctctttgccttctttctcctggcctttcattaagggctggtaattttgaagtcggcaggggcctgagagaaggtgagctaatgcaaggcccagggtcacacagccagggaatggcaggcggagggggccagaaccaggccttctcactctgccagtgcccattctgctggcccaccctccacagcttggctctccctggcctgccctcagttagacttcggactgaggcctccagtggggtgtggggtattgctggaagcagggcctgaataaagtctggggctagcgggagggcatctgtcctcccggaggctcccaggactgtga

SEQ ID NO: 233048 - DNA, 1481 bp, Homo sapiens
aagaaaaagagagagaaaaaaagaaagaaaaaggaaaagaaaagaaagaaaaagaaagaaagaaagaaagaaagaaagaaagaaagaaagaaagaaagaaagaaagaaaggtaggcaggcattggtggtattttgataggaactctactgaatctgtagattgttttgggcagtatggtcattttcacaatattgattcttttaattcatgaacataggaggttttctatttgtttgtatcatctatggtttctttcatcagtgttttgcagttctatgtgtagagatctttcacctctttggttaagtatattcctagggttttttctaaaattgttatggtttcaggtcttacatttgacccttttcctgttttcaaaaaaaggtgtggcttgctgccagcgctcatttaattttacataaacacgttctttgaggctgaagcaaatctgactgatagtcaatgtgaaaataaaatataaaaactgttcttggagttatttctgaacagaactaacattagaattgtctgaatcatcagaataatctatttcagaaaaactgaattcatgaaactaatccttggccaacaacttttcatgaacaatgttagcatcatgtgtaggaatgctgttttctaagatttgacattttcagtggctgagattttattttgtaagtggaaataccgctactaaaaatggagtgctataaataggataatgtcttttgtttccaaagttgatatactagagcaatgcaaacataataatcatagggtgctattttgtggcaaatttactttggggtaaatgatgcagccgcaagtgccactggcgagtattctcagagcaaatggggaaagggttaagtctttaatccatcttgagtaaatttttgtagacggtgagagatagggaaccagtttcattcttctgtgtatggctatccaattttccagcaccactgaatgaatagtgtgtcctttcccccattgtatgtttcagtctgctttgtcaaagatcagttggttgtagttatttggctttatatctgggttctctattctgtttcattggtatatgtgtctatttttataccagttgtcatactgtgttgattactgtagccttgcagtataacttaaagatagctaatgtgatgcccccagatttcttttgtttgctcaggactgcttttgctattcaggatttttggttttatttgaatttaggattttcttttctaattctgagaaaaatggtgtttttggcaggatatgatggcacacacctgtagttccagctgcttgggaggctaaggcaggaggctgaggctgaagtaagccaagattgcacaactgcactccagactgggtgacagagtaagatggaaaggaaagggaaagggaaagggaaatggaaggaagaagagatagagaaagagagagagagagagagagagaaatagagaaagaaaaa

SEQ ID NO: 233049 - DNA, 320 bp, Homo sapiens
gtctgcggatggcacagcccggcgaccccgtcccggcctcttccccggcggtgcacgcccagggccaggcaggcgagaggcgcgggagtcgcgtcccagcagggagcccaggctgcgacgagtcctcaggggacgccttcaacccaggctggaagagatgatactaacgtcagacggggagtctcgggtgtcaccggacgccagaatgagcggcgaggtccgcattgtttggaggggatcacgcggaatccgcgctactccgcgggacgctgggtccgacggctagcgccgcgcacactggaggcctggaaaagccgagc

SEQ ID NO: 233050 - DNA, 433 bp, Homo sapiens
aaggaaagttaggattttcctttcaatttacttctaggaagtcggcatggaaagccttaggttccctgcctccagaccctattctcctgcctcagcagcactgccgtgcctctcgccaccctccaagacacgccccgtcctgtccccttccgcggccattgccctgctggccacaccggatccctccccatggccttattcctcccctgccccccagtagagccgtgtcccctcacacaccctgagacacacccctcgttcgcgtcctccccggagagcacagccacgatcccccaacactaagacaccacctatccactgcagttcaaggactgcttgaatcaatcctcccacctcagaatcaggcagaggttgctgtaagccaccatcatgccactacagcctgggcagcacagcaagaccccatctcaaa

SEQ ID NO: 233051 - DNA, 382 bp, Homo sapiens
atacatatctattaagtatcttctaaggcctgccactgttgcaaagctcttttggaaacttaaaatctgatccctgccccaaggaggaaagatggcatatacacaaataacctccatgggaaacagtatttggaaatgttgtaagagtgacataaagaagaaggatttgctctccagatgcagctgtgccttcctttgaaatatctttcgtatctgttctttccttcccatccttgctgctacctctctagttgcgggtcttaccacctaaaggaaggcatggtcagagagataggcaaactaagaggttgcgtatcaagaaagggagagagttgattagcattatcaagtgctacagaggcagcaatgaatgccaggttca

SEQ ID NO: 233052 - DNA, 364 bp, Homo sapiens
ggtggggtatgtgaaggttctaaggtggaaggccaatgactgcaaggaagtcattgttgctgaagagaagggataggtaatggtgtaaaagaaagttctggagtcccaaagatctgagttcaaatgatggctctgctgtgtcaccgtgtgcaagttatttaaactttataaccctcaaattcctcatttgtgaattaacagtattcctgtggcctaggactggtcatggaaaaaccttcgacacattaaattacacagagtttaactgagcaaagaacgatttacaaaccgggcaacccctgaaccagaataggttcagagagactctgtcgcagctgcattgtggaagtagatttgtggacag

SEQ ID NO: 233053 - DNA, 202 bp, Homo sapiens
tagcctgtgcctgcagcccggagtcccctcctgccctggaaggcaaggagccaggccacggggccacagccgcgggggccaccacactggcccaaatatttcctgcaggtatgaccattcactgggtattggggttgggtcccttggacccacaaactgaacctcgtgggtacagggaaaaattaaaatatattcctcctta

SEQ ID NO: 233054 - DNA, 1439 bp, Homo sapiens
gctctgtgtccccacccaaatctcatctccagttgtaattttgacatatagagggagggacccagtttcaaatcaaatggcaggaaaagcttataacaaaaactgtagttttctctcccatcccttctaatcccctgcccagaggcaaccacttgagctatttttttccttcatattttcaaatatgctcttatggctatttcttatcaattttaaacactgcccattaacttcattttaaggtagatgaagatttagttatcttatgttcaccctttctccataccctccactcccaccatcactgccacatcatctgtcctcttccccattctcccagtattgtaatatagtttgatcagaactcttggttaagtcactagtgtttacattactatggctgtgtcactatttctctctgctgacccaagcatgacactgattaggtttcctttctcatataactcttgtccttggattcagtggccctcatttttttcttttgctttgttttctgttactgttcatcacatattttatacagctgtcgatgttatttattcaaacgatgtaccagttccatttgtttgttgtttctggagacctccctctggagctttccaccttcctggctctaatctggactggttgctttaggcctgtggtctaaacagctgttatttcaggacttccttgactgttctcctttgtttgccctttttttctgatctcatgggtttttgtgtgtgtactttttttatcttgcttacaccctcattttgctggtacttatctttcagtggcttttctaagaaagattatgtaggaagtagatttttttgactgcttgtatatttgatttgtttttccaaatgtgagaccatcccccatagttcttttatatttaaaaatatctttattccaccctaattttgattagtaacctagctgggatataatttgagtttaaaattatttttcttcataatttatagacattgctttttttcttttaaggttccatgtcattctcattccttctagtgactttttgtttgtttgtttaatttgtgtgcttagcacttggatcttaaaccctcctggactgatctcctaaatgtcctcttttttcttatttttcatcttcttgcctttaatttttttcccaattattgaggtattaatgcttagaaagtaaatgaaaatactgtcctctcaccattccacctttggttattctgaagaactgggacagccctcttcttttatttaatttatttatttgtatttttgagacagggtctcactctatagcctaggctagagtgcagtagtgcaatcaccactcactgcagcctcaacctcctaggctcaagagatcatcccacctcggcctctcacgtagctgggactacaggcacgcaccactacacccagct

SEQ ID NO: 233055 - DNA, 1445 bp, Homo sapiens
gctctgtgtccccacccaaatctcatctccagttgtaattttgacatatagagggagggacccagtttcaaatcaaatggcaggaaaagcttataacaaaaactgtagttttctctcccatcccttctaatcccctgcccagaggcaaccacttgagctatttttttccttcatattttcaaatatgctcttatggctatttcttatcaattttaaacactgcccattaacttcattttaaggtagatgaagatttagttatcttatgttcaccctttctccataccctccactcccaccatcactgccacatcatctgtcctcttccccattctcccagtattgtaatatagtttgatcagaactcttggttaagtcactagtgtttacattactatggctgtgtcactatttctctctgctgacccaagcatgacactgattaggtttcctttctcatataactcttgtccttggattcagtggccctcatttttttcttttgctttgttttctgttactgttcatcacatattttatacagctgtcgatgttatttattcaaacgatgtaccagttccatttgtttgttgtttctggagacctccctctggagctttccaccttcctggctctaatctggactggttgctttaggcctgtggtctaaacagctgttatttcaggacttccttgactgttctcctttgtttgccctttttttctgatctcatgggtttttgtgtgtgtactttttttatcttgcttacaccctcattttgctggtacttatctttcagtggcttttctaagaaagattatgtaggaagtagatttttttgactgcttgtatatttgatttgtttttccaaatgtgagaccatcccccatagttcttttatatttaaaaatatctttattccaccctaattttgattagtaacctagctgggattacatcatgcctggacctaggcttctattttttatataaatgtggtcattctgtcttgatgactttctcatgtacgtaataacttaaaaatagatattgtataatagtctggatacagcagaatttacataataattctcctgttttggacatttagattgtttccacgtggtaaatagaactctggctgaacttgtgtcacgtattctggtgcacctgtgatgggactatatgagatagatttggaagtgaaaaatcagggtgaagatggtcatatattagatttgaaaacttatgctgtatcatcttcacaaaacgtcagttacatgtgccccaacagtgtgtgaaataccttcctattcacagggttatccggctttaacttcgccactatgcaaccattcattgttcatttccggtcacgagggcatcccggtgattggtattccaccttgctgcggtcttacaaggcacgcaagccttccgggac

SEQ ID NO: 233056 - DNA, 426 bp, Homo sapiens
cagtgagcatgattaggtcatgcaggattgtgggtgccaagtttgggggtgctcaaactctaccagagacattggggagccatggcaggttctaggcagagggaggacagggtcaggtttggctttagaaagatcccttggcctcggctgggcacggtggctcacgcctgtaatcccagcactttgggaggccgaggagggcggatcacgaggtcaggagttcgagaccatcctggctaacacagtgaaaccccatctctactaaaaatacaaaaaattagccaggtgtggtggcgggcgcctgtagtcccagctacttgggaggctgaggcgggagaatggcatgaacccaggaggcggagcttgcagtgagctgagatctgccactgcactccagcctgggtgacagatcgagactccgtctta

SEQ ID NO: 233057 - DNA, 631 bp, Homo sapiens
aaagactgactgtttcagactaaagtgctatggggccctaaataaccttgaaaggcagtctaggccacaaggactgccactgcagttgagtcctggtgctgaattggacccagaaacagtggatttgcaggtggcgcagatgacctactgagaaaacagccatggtagctaaaaaagtgctggcatcactccttccataactccaggctaaaaagcttatggctttcttgcattttgggtaccaggtcagccatggcaaaacagggcaccatgggtcagaatcatcaggcctcctttccaggccctagctcctgggtgaaatttctagacactccctgataaaaaagggaactgacacccacgaagggaaggatgcagtcctggcagaattaaatgtctgttaactaaagagccctttgacctgaataagaaatagcaatatccaggtactacatcaagagtcttgggtgagactttgagacttgcttttttctggtgaaactcagaacattctaagctgtggtggccatggagccaagactctgttccccttgataaaagtggaagaaaaattaaagggaattttgtcttgtacctgaggtgccagttcagcaacaaaaggaaaaagtac

SEQ ID NO: 233058 - DNA, 514 bp, Homo sapiens
atacggtccagggtcacctacagctctccccatccttccactcagcttatcctggaagccccaagagacgcagctctgctgatgcagctagacacagctccgaagacaccacaggaagctttggaagcacaatacactttgtgaagaaatttgaaaacttcagtgctacttagcaagtttcttggcattagcagttatccagggactcccagcgggtatctacccagctggagaaagaaatattccaacaggaaggaagaaactctccaatctcactgcaggcctggatatttggaaagatctcatcaccagacagggtgaaggacactggactttgacttttggactcacatagccaatggcttgcttggcgtcttcacaaagatatctaacaagcatctcaaccctaacagaactctcggttccttccctctcatccccaacatacgcccccactaatgttccccatttcaataaaataaatggttttggcttaagccaaaagcctagactc

SEQ ID NO: 233059 - DNA, 684 bp, Homo sapiens
taactcgtactttccctagagctcttgcgagaaagaactattgagaaagtagcccatctgaaagtatatttcttgctgtttatctgcttccagaactggctgaagtttactttttggttctccagagacctagcttcttccaatgtggtctatttaatctcctgtcatgtgggaaattatattcaaaatctccatgatcctctgtccatagtaagttatgcatgtagtgagaagtacatgccacaaggtcttgagattatatctgcaatgtgttgctgctggctgttgatcaagataggctgggagaaaaacattattttcaggtgtgaaaatctgtcacctttatcaaataactcttcttgcatatttcccaagacgttgtagcctatttaaactcgggaggttaattttgtagcattcattatgaccgaaaatgagttcacacaatcatgatgctctctttattaggtgttactgttaaacaatattaaaatacacacaatgtggctggtcttttgtaagctacatggcatgtttacttctttgtcaggtttcttaattgcatttcttcatctttccgaataccagtgtcactgtcacccacaatatttgctgttttgagcacatggtttacattttattttgcccaataatagaatatgatggggacatcttatctgagtg

SEQ ID NO: 233060 - DNA, 330 bp, Homo sapiens
caaaaaaaacaaaaacaaaaacaaaaaagatatatatatgaatgtaaattctggtaattggttacaggaaattggaagtcaccaaagccaagccttcccaagacatcttgacctctgcctgtcagccatccagcagcgatgggtctttgctccctacagaactctgtggattctatttcttccataagaaataaaatgctatatgctgaataagtaaaatagggtgaagtagacacaatgacaatgtgtctatggaggagtaattggaaagaagctatccacactagcttttttggaaaagcctcaaaaaatctgtgaaattccaccctc

SEQ ID NO: 233061 - DNA, 563 bp, Homo sapiens
atattttggcagagggaatggtagaggtaacgttcctagtaggtattgggattaaattatttaaaacacagttcttgtaagtagatacttccgtatcaataaaaccagtgctgtaataggggcatgtacaggttactattggaacacaaaaaagggccacttagtaccaaatgtagggggagctacttcaaaagatggcacttgagcagtactatggtgagcagggactggtcaaggaatgattctgaggagggaagaaaatggttcagatcagaggaggcagcacatgcaaagtggtgccatcaataattcagaaacccataatcaatctggctaaatggaaccaggtcccagaaaaggttagaaaagataggattgaaattaaagttggcaagattttatactaattgttcaaagttcacagataatattgctattaacaattttatgtccttagctccagctcaaacttttaaaaatttgctgcagagcacattggtgtaactcaagattttaagaacttgcctatcctttaataaataccctgcaaatttaaaaagtgc

SEQ ID NO: 233062 - DNA, 534 bp, Homo sapiens
ttagtctccatgacattacggatctactccagatattttacataccttaaagatgaggagctagaaaacctccaaggccctttctgactccaaaaccttataaaagtatggaggtagaatttatgaatttgtctaaatcttaaatttatttaaacatctataccaatgaggtagtgagcttactgtgatataaagatattactcttataaattctaagggatattgtttggttttggtattataaaatctggtaaataaatttacacaagcataccttgtttaactgtgctttcctttactgcgctttgcaaatactgcattttttacaaattgaatgtttgtggtaactgtgtctgccagtctgtcagcaccatttttccaacaaaatgtgttctctgtgtcacagtttggtaattatcatatttcaaacttcattattatctgttatagtaatatgtggtaatttttgatgttactgttgtaattgctttggggtaccatgaaccaagcccacataaaatgtcaaacttaaa

SEQ ID NO: 233063 - DNA, 536 bp, Homo sapiens
attaatatatttgcttatgcagcatatttagggatgatgggtaaaattcagtctagctgtccacagggtttgtttatgagaatgccaaaaaataaaacttgaaaggtatcctgagtaaaatttgtagaaagctaatcctatgttaacatttaaaatgggatttcatttcttatgcctctactctcaaaagtcaaagaagacttgaatgaaactatggtctagggtaacatctgtagaagtgtcttaactttataatgatcaagaatttaaagctcttccaaaataaagtacttcaactagtgagagcttctatttattgtattaaaacatgtatacacggagaatactgacattttctttttaggtgaagcagtactcagtgactttttttaatgctgttgaaagtgctctgggaatactctggcagaagggtttcaggaatggacaaaaaggaaaacatttagaaaaatttcagactgaaatcttacttgtagaagggtatcactgtcctggcaatcaaatagctttgtattctt

SEQ ID NO: 233064 - DNA, 301 bp, Homo sapiens
gatcacaagggaagttactgcacagccaagtatgctgcatttgcaaaggtcaggctttaattacatgcacagttaaatggaaatactgtagagaggtcacactcatatttctttggctttcattaatgttattgctctgtcactttccctctccttaggtttgtaaatgaaagttcctttagtacatttaaaagcattatttatttttaattgtcttacctctggagggagaggttacttctttttggggtgtttttggttgttgttgttttttttttgttttctttttttgaatagactt

SEQ ID NO: 233065 - DNA, 313 bp, Homo sapiens
gatagattaatgaattttagtgtaatattatgaaagttcaccgacgtagtttcagatcccacactgcaattaactcgtaagaaattaccaatcgttgaattttggtgcagtgtcaacgatgaatatttgcaattatttgaaaagactattaaaataccttttcctgtctcccattgcatatttgtgtaaggctggattttcttcacataattccatgaaaacaacacattgcaacagattgaatacagatgcaaatagaatctggttttcttttagtaagttgaacattaaaaatatttacgaacatgtaaag

SEQ ID NO: 233066 - DNA, 298 bp, Homo sapiens
tttaaaatccaaaactggaacaaaatgaaagccgtccgtgaatcttggctgagtttgggccgtaattcattcaagtagctcattacgcatcggaattacccaactgccgaagcttctgaacagcaggcaattctagagcttcactttcaactttctgctcttattgatttatgaaaccttactaccttcaaaatcatgaaatattccaggcatgcaaagaggcacagagaatattttaatgaatatcgtgcacccaccacccaaccgaggaaataaagcctgacagttacaatcgaaa

SEQ ID NO: 233067 - DNA, 441 bp, Homo sapiens
gaggatagcgtctagtttttcactattaaaatatgttagctataggttttttccgtttcatgtttttatcagattgaagatcccttttattcctattttgccaagagtgtcatgaatgcatgttgaatttcaccaagtactttttcctgcatctgttgagagaatcttgacttttctcttttattttgttaatgtagattctttaatgttaaactgatcttgcattcctgatataaaccatacttagtcatgatatgttatcccctttatataatgctggattcggtttgcaaatattttgtttgatttttgcatctatgctcatgagacagattggtctgtgattttcctttcttgtaagtcttgtcaggtgtcagggcttggttaattttgacacatttacaaacatatatttttaagataaaaataaacttcaaaaaa

SEQ ID NO: 233068 - DNA, 173 bp, Homo sapiens
tgttctagagggttctttgccccaaacttttcaaacttcctctttactttcgtctcaatttagcaaccaaaggcttccatgtcttcccattaacacatgcgtgcccatgtattcttgtttcttacacaggaaaacggcaggttcctaacaaaaggtcaacattttcacctgtg

SEQ ID NO: 233069 - DNA, 145 bp, Homo sapiens
caaacacttcttgttctgatacgttcaaacatcttggtgtttaggttggggaagctgagttgttgtttatgagttatctccagtgctcagatatccggcagctttttcctaggaagtcagctttgcacatgagagaaaggaaaaa

SEQ ID NO: 233070 - DNA, 811 bp, Homo sapiens
gcaagactccgtctcaaaaaaagaaaaaaaagagaaagaaatgaacaggacttggaatactaggaaaactctgtaccaacaaattaggtgaaactgacaaactcctagagggacacaaatcacttaaattggctcagaaatctgagaaatttaatagaaaatctaaatagacctataacaagaaattatagtaatgaaaagtcctgagtcttcctacagaaagcctgtgcccacgtggctgccactgtatactgtcaataacaccaaccattcacaatcttcagaatgtggaggatgagacacgcccatctgagtctaagaggctaaaggcagcgaaaggcatcataatccgtgcccccaccccacagaacaatgtccatcatgaatacagacataaagatccttaacaaaatattagcaacccaaactcggcaacatcatacaccaagaccacgtgggtgtatcacagcaaagtgaggttgcttaaacatctacgaagcacttaacgtcataagccacattaatagaaaaacagatgcctgtaatcccagcactttgggaggctgaggtgggcggattgcttgagcccaggagttcaagactagcctgggcaatatagcgaaaccctgtctctaccaaaataaacaaccaaaaaaaccaaaaattagccaggcatggatgggagtgcatgcttatggtcttagctactcacaaggctgaaaccagaggatcatttgcgcccaggaggtgcaagtccagtgagctgagatcgtgccactgcactctagcctgggaaacagccagagcctgt

SEQ ID NO: 233071 - DNA, 757 bp, Homo sapiens
gcaagactccgtctcaaaaaaagaaaaaaaagagaaagaaatgaacaggacttggaatactaggaaaactctgtaccaacaaattaggtgaaactgacaaactcctagagggacacaaatcacttaaattggctcagaaatctgagaaatttaatagaaaatctaaatagacctataacaagaaattatagtaatgaatgtcaataacaccaaccattcacaatcttcagaatgtggaggatgagacacgcccatctgagtctaagaggctaaaggcagcgaaaggcatcataatccgtgcccccaccccacagaacaatgtccatcatgaatacagacataaagatccttaacaaaatattagcaacccaaactcggcaacatcatacaccaagaccacgtgggtgtatcacagcaaagtgaggttgcttaaacatctacgaagcacttaacgtcataagccacattaatagaaaaacagatgcctgtaatcccagcactttgggaggctgaggtgggcggattgcttgagcccaggagttcaagactagcctgggcaatatagcgaaaccctgtctctaccaaaataaacaaccaaaaaaaccaaaaattagccaggcatggatgggagtgcatgcttatggtcttagctactcacaaggctgaaaccagaggatcatttgcgcccaggaggtgcaagtccagtgagctgagatcgtgccactgcactctagcctgggaaacagccagagcctgt

SEQ ID NO: 233072 - DNA, 510 bp, Homo sapiens
ctataactgttcaaacatagttgattgagaatccatcttttcctcactgatttgaaatgccactttgtcacatactggattctcatatgtatttgtgcttattttctgaatgttctatgctgatccattgacctggctgattaggcataagtaccacacagttttaattattgtggctttaatatctggtggtggctcattttttttttctgaatttttctagcattattacttattctttcaaatgaactttaaaatcaccttgtctaaaaagtaaatatttttcataggattgcattaatttttctagtgatctggtgggaaattggcatcttcatgacattaagtctgcatatccaagaagcaagcaaactctgttctgggtagctttgtttttatgattttactatggctggaagcagctagaaagtgttgtgtctcaaatctaaaaacccacatctggtgaagttctaagtttgtttaaaataccagatatttcatagtcaaata

SEQ ID NO: 233073 - DNA, 155 bp, Homo sapiens
agaaaagtatgtcaaggataacataatttagcacgtaaccatctcttatcttgtactttggtgttgcttcatactcttcaagtagatgaaagctcctggtaggaactgagcgcagcattagtgcctaataaacatgtattggtttatttattttt

SEQ ID NO: 233074 - DNA, 501 bp, Homo sapiens
catttctaggtgcagacgaggcatttggggcatagaagatcacactcttcttccgccatgtcttaagatattactttatagtaatttatcttagtccaggtgcagtgcctcacacctgtaatcccagcactttggaaggctgagctgggaggattgcttgaggctggcagttcaagacttcttccattttaaggggccttgtgattacagctggtccatctggatattctaagatattctccctattttaaggagagaaatctgaaatctgaggtgcagttgatttgaatccaggaaatctaaggaaaaagttcaagctcttaatcatttcatacccttcttgttgctaacttaaactttttttttaaaaaagttaatcttgtctatgaagcatgaatctataatactagggaaaaaactggctaacttgaagaaaaaataaattgaaatgaaaagcaattaattcctcttaatatgaataaaggatgatctaaatgcttt

SEQ ID NO: 233075 - DNA, 615 bp, Homo sapiens
catttctaggtgcagacgaggcatttggggcatagaagatcacactcttcttccgccatgtcttaagatattactttatagtaatttatcttagtccaggtgcagtgcctcacacctgtaatcccagcactttggaaggctgagctgggaggattgcttgaggctggcagttcaagacttcttccattttaaggggccttgtgattacagctggtccatctggatattctaagatattctccctattttaaggaagatgaataagaagagggagcctcttccaggaagataaatgccgaaaaagctaccttttctccatctggggacggatgataccaaaatgatgcccccttccaggctgataaggagagaaatctgaaatctgaggtgcagttgatttgaatccaggaaatctaaggaaaaagttcaagctcttaatcatttcatacccttcttgttgctaacttaaactttttttttaaaaaagttaatcttgtctatgaagcatgaatctataatactagggaaaaaactggctaacttgaagaaaaaataaattgaaatgaaaagcaattaattcctcttaatatgaataaaggatgatctaaatgcttt

SEQ ID NO: 233076 - DNA, 383 bp, Homo sapiens
cagtgtgtccgtgggattctgcttctttgttcattgctctccgcctcgctcagtggcagactcccgtaagtggccagaggttccccgtgttcccgcgatgtcctgcaggctgacccccattccctagctgccacgcagactgttccagccggagggaggatgagacccagcaaggtgatgaacctgcaggaagaagacacaacagctgtgccttccctcatctcaggacaccgaaacaagacgccgagaaaacgggcctgtgaaaagcaaaccgctgcatacttacgtagaaaaacctttaacaattttaaggatggagaatgatgctgtaagaataaaactaatgaaaaaagagaaaaaatataaaggaaaatattaatgga

SEQ ID NO: 233077 - DNA, 1432 bp, Homo sapiens
ttggaaatccttccagagactttcgcactttctataagtacactctacaaggggaagtggggcactaatggactgggagggcaggtcaggagtagcccaaggtatgcatgtgcaagaggaaaacttgataaactcaagtttatcaagaaattgttgatttcttgttcaactgttgatttgaaccaggcttctggttcaaagggccaggccatagctacagctgctctggtgggccaaaccaaaagcatcactgagtttgggcacttgaagtttcagacagctgggagtctccatagaaccggaagggaaaacacttccaaggatatgagcatgtcttgtccctgcctttgggccacccatgcacaccagctccacagcagctgaagcagagcagatccagaggaggctgtcggagggaccactgtccttcctgctgaattcatactgaccctctggattctccagattttctccaaagttcttccattctagcctggccaaacatttgggctcagcaaactgagacaagctccccacccatggcgacacttcctatgtccatagtgtgaatgtagtaatgggatatatgtcttggaacccccaagcatatgtcacgtgcaaaacaccgtgggaagcagtgggggtgtggtaaagagatgggctggaaaggctctttgtcctcaataagctggccatctgatggggagatagaggagtgaagcgagtccgaactaataggcatgtgtatttggaggcaacaaggaagagagaaccattctgactgggagctccctggaggaggtagcggacatttgactggggtttggcatattcaaaaaatgtggatgagcaaagaggacagagcagcagatattccaagcgagaaaacataacgagcatagcatcctcccatgtcctaccatttataagagaatgttaatgtgagaactgctcagtctcctgacagacccgggggctgcaggcacattttccctaggggtaggtctgttagcttttcaagatcatgaagtatttttaggtccaagttgtcaccagcattcaaagccaccgtgcatcctccagctgttcccagtgcataccgggctcttgcttgtcatagcttggatgtcccctggatcatcagatacagactgactcctgcacttgttttcccccgtaagcagatcacgtgtcagtgtgtaaaatgtatatcacgctggtcttcatgtaggtgttgcaagtttcgttcattttatacacatccattagcaccacacatgaatgccatcctcttcaagaagtaagcagatagggctgggcgcggtggctcatgcctgtaatcccagcacttcgggaggctgaggcgggcggatcatgaggtcaggagattgagaccattctggctaacacggtgaaaccccatctctactaa

SEQ ID NO: 233078 - DNA, 742 bp, Homo sapiens
aactcatgaaagacacggcacgtggccagaatctatccgaactaataggcatgtgtatttggaggcaacaaggaagagagaaccattctgactgggagctccctggaggaggtagcggacatttgactggggtttggcatattcaaaaaatgtggatgagcaaagaggacagagcagcagatattccaagcgagaaaacataacgagcatagcatcctcccatgtcctaccatttataagagaatgttaatgtgagaactgctcagtctcctgacagacccgggggctgcaggcacattttccctaggggtaggtctgttagcttttcaagatcatgaagtatttttaggtccaagttgtcaccagcattcaaagccaccgtgcatcctccagctgttcccagtgcataccgggctcttgcttgtcatagcttggatgtcccctggatcatcagatacagactgactcctgcacttgttttcccccgtaagcagatcacgtgtcagtgtgtaaaatgtatatcacgctggtcttcatgtaggtgttgcaagtttcgttcattttatacacatccattagcaccacacatgaatgccatcctcttcaagaagtaagcagatagggctgggcgcggtggctcatgcctgtaatcccagcacttcgggaggctgaggcgggcggatcatgaggtcaggagattgagaccattctggctaacacggtgaaaccccatctctactaa

SEQ ID NO: 233079 - DNA, 241 bp, Homo sapiens
tgaccttgttaaggtagccacagaaatgactgaagacttagaggtgggagtacacaagcttggaacaagattttgttcattcattcctacagccattcaaccagcatattctgggcacttctcatgcacactggccatccaccagggagacaggccatgcttagacataggcttattgcaaatcatgttttatcctttcttggctctaagactggacaagttctgcctttcagcttcacct

SEQ ID NO: 233080 - DNA, 616 bp, Homo sapiens
actgcaaagcagtctgcaatcagaagaaattacaattatggcaccgagcactaatcccagaaaatctaaacacagacaaccactaaatcccattataaaatataataatcattattagagctttttttttttctcccagaaaataaagagttggagacattatgccgttgcttaaccattttccatagcaggtcattattctttatgatgctactaaatatactcatcatcttacaaatcccaagttcaccttccaaatacatgatctcgtccttctgtgtaaagttaatgaaagttgtaaaagtgctttattccgtatctttatttttccccacagggacaggggaataaaaatgtgatgcattggaggagaatcacaggactcaacaaataaaccttgagatgtcattgtcacctgtgtgtactttatgagaatacacgtagagattaaccctttcctggaaaatgaacgtctattgcttcttttggggacagcatgctttatagttaggacattcttctttatatccagcctgacttcttcatgctgtactagccttccaatccttaactaaaaattttttaaaaatgaataaacactgggcaatgtgttcta

SEQ ID NO: 233081 - DNA, 531 bp, Homo sapiens
aaccacaacatttggagattaccaacatggttttcagccctcagctttggcgagacttcttccttttcattcttttctgggcaaatctaaacctttggagaagtagatgagtgaagtcaattgcaaagggactggatctctctctatcacccagactggagtgcagtggcacaatcgtggctcactgcagtcttgaactcctggcctcaagagatcttcctgcctcagcctcctgaatggttgcgactacagggacaggggaataaaaatgtgatgcattggaggagaatcacaggactcaacaaataaaccttgagatgtcattgtcacctgtgtgtactttatgagaatacacgtagagattaaccctttcctggaaaatgaacgtctattgcttcttttggggacagcatgctttatagttaggacattcttctttatatccagcctgacttcttcatgctgtactagccttccaatccttaactaaaaattttttaaaaatgaataaacactgggcaatgtgttcta

SEQ ID NO: 233082 - DNA, 452 bp, Homo sapiens
tagttgtgaagttagatgggataatatttttaaagcttacattgcatgaattgttttgcctacagaatgtccattgccatccagaggaatctcatgttggtagcaagaacttgcactgtctttgttgcagagcaacaggttattgggctgtgggttaatgtgaggctttctttggatgagtggggttggggggcagatcccctgacatacctcttggaaatttgaggggttgggagctttggagcagggctcctagaagcctgctaaacccagctgctcctattcagtaatttccatgtgctgttgttgattttggcttcaggcatggagagccctgccttgggagcttccttgaaactggatgccccaacccagagggtgtgggcaggagggaagcctcaatgaacactggagaagcagacttttttttctctctctaactctggcttttt

SEQ ID NO: 233083 - DNA, 853 bp, Homo sapiens
gtctcatctccgccctcaatcatggcctccgctgatgccaaagtaaacccattcagcttcaggaggcttttcagcaaacaaagcataatttgtacgacggatctgtgtgttacagtagaggatcacgggcatttgaaatgacacaactggaagctaaatccaacagcaggggagacccttaccaaggcgaggtatgacgctccacttggtctcactgcctcccgtctctgctccatccaatctatcttccagtccagaagtgaaggttttgtgccaaaatgcattcacccatccaaacattcaataaatatctactaagtacccactaaaggttaggtgtgcgtgaagccctggtggcaaagaaataaacagacccgacctcttccctcaaacagctagtgaacagtgcaaaccatggcatggtttgaaaaatgagcatgaggactgcccagggtccctttgggaaatgctgaacagagtgtgcatggcacattcaacagttccttggagcatggagtacccacgggcaagagtgggagagaaagcgaggaggcaggcaaaggccagggcaggaaggccccaaaaggccatgtggacctcaccacgtgatttctgtttagaaactttcaatggtgccccattccaaacccttaagtatggcctctgtgcgtcctggtgtagcccccaagctacatttctgatccattctcaactcctagtactgtgctacacccatctacacctcactcctcaaagactcgaagtaaactcatgctcttggcctgattcaaataattcccttaggccactctggaccccaaaccgtctcctccacatctcggcctgctgaaac

SEQ ID NO: 233084 - DNA, 418 bp, Homo sapiens
gcactccagcctgggcgacagacagaccaagactccatctcaaaaaaaaaataaataaataaataaaaataagtcaggcacagtggctcacgcatgcctgtaatcacagccctgtgggagggtgaggcatgaggatcgcttgaggccaggggtttgagactagcttgggcaacatagtgagaccctatctctacaaaaagtaaaatgaacaaataaatatagcaactacatatcagaacttggaggcacttattagctattagtcctgagtacttgtaaacactgaatagaagctagccaaatttttaattctaataatagctaatactgattactgaaggctatgtgcaaggcactgttccaagtgttgttttttttttttttgtattaactcattaaatcctcacaatcaccctgt

SEQ ID NO: 233085 - DNA, 2061 bp, Homo sapiens
ctcttcggctggagctgagaaaggagcgcttccccggactcggctcggctccgaggctctgaagccgacgccgccagctcagccccgggggcgggagcaggactgcccgcacagcccgcacctaggaggcgccgatcccgaacgcctcatgggacgcccccgggggctctctccacgccttgctgccgcgtcccggtcctaggcgcccgggatccacggcccaccccgcccgcagcccgcggcctgtctggagaggagtatgaggcccggggccccgcggacgccggccaccgggcggcaggggcctagctgcggagccccgcgcccgagagcggcgggtaaggagccgcgggagccggcgaggcgtcggggcgcgcagaggagcgcccctgcccgggcacccgctgggccacgggactcgcgtgtggcctgagcgccggggaggaggcggaggcgcccctctgtccgggctctgggaaggcgacgaggggctctgcgaaggcggcgaggggctccgcggcggccccggacccctggccaccatcctcacgctcctgctcccgccggggggatgtcgtggcccgggccccgagcgccgccccggccccggggctgagctccggaccatgtcctcccgcagcccccggcccccgccccgccgtagccgccgccgcctgccgcgcccctcctgctgctgctgctgctgccgccgttcgcacctcaacgaggacaccggccgcttcgtgctgctggcggcgctcatcggcctctacctggtggcgggtgccacagtcttctcggcgctcgagagccccggcgaggcggaggcgcgggcgcgctggggcgccacgctgcgcaacttcagcgctgcgcacggcgtggccgagccagagctgcgcgccttcctccggcactacgaggccgcgctggccgccggcgtccgcgccgacgcgctgcgcccgcgctgggacttccccggcgccttctacttcgtgggcaccgtggtgtcaaccataggtttcggcatgaccacccccgcgacggtgggcgggaaggccttcctcatcgcctacgggctgttcggctgcgctgggaccatcctgttcttcaacctcttcctggagcgcatcatctcgctgctggccttcatcatgcgcgcctgccgggagcgccagctgcgccgcagcggcctgctgcccgccaccttccgccgcggctccgcgctctcggaggccgacagcctggcgggctggaagccctcggtgtaccacgtgctgctcatcctgggcctgttcgccgtgctgctgtcctgctgcgcctcggccatgtacaccagcgtggagggctgggactacgtggactcgctctacttctgcttcgtcaccttcagcaccatcggcttcggggacctggtgagcagccagcacgccgcctaccggaaccaggggctctaccgcctgggcaacttcctcttcatcctgctcggcgtgtgctgcatttactcgctcttcaacgtcatctccatcctcatcaagcaggtgctcaactggatgctgcgcaagctgagctgccgctgctgcgcgcgctgctgcccggctcctggcgcgcccctggcccggcgcaatgccatcaccccaggctcccggctgcgccgccgcctggccgcgctcggtgccgaccccgcggcccgcgacagcgacgccgagggccgccgcctctcgggcgagctcatctccatgcgcgacctcacggcctccaacaaggtgtcgctggcgctgctgcagaagcagctgtcggagacggccaacggctacccgcgcagcgtgtgcgtcaacacgcgccagaacggcttctcgggcggcgtgggcgcgctgggcatcatgaacaaccggctggccgagaccagcgcctccaggtagaccgcccgtccgcccgcgccggggaccctctccaggccgcggggccgccgggcgtggtttgcttctctcagtcactgctggcgctttcttaatctttatccaataaaatgaaacaaaaaaaatttttttaaagaaatactat

SEQ ID NO: 233086 - DNA, 2498 bp, Homo sapiens
ctcttcggctggagctgagaaaggagcgcttccccggactcggctcggctccgaggctctgaagccgacgccgccagctcagccccgggggcgggagcaggactgcccgcacagcccgcacctaggaggcgccgatcccgaacgcctcatgggacgcccccgggggctctctccacgccttgctgccgcgtcccggtcctaggcgcccgggatccacggcccaccccgcccgcagcccgcggcctgtctggagaggagtatgaggcccggggccccgcggacgccggccaccgggcggcaggggcctagctgcggagccccgcgcccgagagcggcgggtaaggagccgcgggagccggcgaggcgtcggggcgcgcagaggagcgcccctgcccgggcacccgctgggccacgggactcgcgtgtggcctgagcgccggggaggaggcggaggcgcccctctgtccgggctctgggaaggcgacgaggggctctgcgaaggcggcgaggggctccgcggcggccccggacccctggccaccatcctcacgctcctgctcccgccggggggatgtcgtggcccgggccccgagcgccgccccggccccggggctgagctccggaccatgtcctcccgcagcccccggcccccgccccgccgtagccgccgccgcctgccgcgcccctcctgctgctgctgctgctgccgccgttcgcacctcaacgaggacaccggccgcttcgtgctgctggcggcgctcatcggcctctacctggtggcgggtgccacagtcttctcggcgctcgagagccccggcgaggcggaggcgcgggcgcgctggggcgccacgctgcgcaacttcagcgctgcgcacggcgtggccgagccagagctgcgcgccttcctccggcactacgaggccgcgctggccgccggcgtccgcgccgacgcgctgcgcccgcgctgggacttccccggcgccttctacttcgtgggcaccgtggtgtcaaccataggtttcggcatgaccacccccgcgacggtgggcgggaaggccttcctcatcgcctacgggctgttcggctgcgctgggaccatcctgttcttcaacctcttcctggagcgcatcatctcgctgctggccttcatcatgcgcgcctgccgggagcgccagctgcgccgcagcggcctgctgcccgccaccttccgccgcggctccgcgctctcggaggccgacagcctggcgggctggaagccctcggtgtaccacgtgctgctcatcctgggcctgttcgccgtgctgctgtcctgctgcgcctcggccatgtacaccagcgtggagggctgggactacgtggactcgctctacttctgcttcgtcaccttcagcaccatcggcttcggggacctggtgagcagccagcacgccgcctaccggaaccaggggctctaccgcctgggcaacttcctcttcatcctgctcggcgtgtgctgcatttactcgctcttcaacgtcatctccatcctcatcaagcaggtgctcaactggatgctgcgcaagctgagctgccgctgctgcgcgcgctgctgcccggctcctggcgcgcccctggcccggcgcaatgccatcaccccaggctcccggctgcgccgccgcctggccgcgctcggtgccgaccccgcggcccgcgacagcgacgccgagggccgccgcctctcgggcgagctcatctccatgcgcgacctcacggcctccaacaaggtgtcgctggcgctgctgcagaagcagctgtcggagacggccaacggctacccgcgcagcgtgtgcgtcaacacgcgccagaacggcttctcgggcggcgtgggcgcgctgggcatcatgaacaaccggctggccgagaccagcgcctccaggtagaccgcccgtccgcccgcgccggggaccctctccaggccgcggggccgccgggcgtggtttgcttctctcagtcactgctggcgctttcttaatctttatccaataaaatgaaacaaaaaaaaaaaaaaaaaaaaaaaaaaaaaaaaaaaaaaaaaaaaaaaataaaggaggggccgaatcgcacaaaagaccacattatggggggtcgcccaatactcatgttggccgtattacaacagcgagtctgggtgaaaaaaccggggctctaacctaattaacctcgtagcacatcatccttttttcaccaggtgtagtagcaaaaaagaggcctctaccaatcttccttaacagcaggtggccatccctgaatgcggatggctaattgggcgcgatattatgttggaagtgatgtcgtaaaatgttggattcaggtgatcttttagcacccagtggggcgatattcacaatctctattatatatagaaatttcccccatatgcggttgattgttccaccaggtttccaacaggggtctcttttagaccacggtgtcccccactttaaggggttatttggggg

SEQ ID NO: 233087 - DNA, 655 bp, Homo sapiens
gatgaagggccatgtctcctccatcagtttaggggctgccaagatcaggaaacctattaagtgccaccaagggagataaatgactaagtgctgttcttcctccacctgagtggtgccactcgagataggagccgcgcaagcacctgcatgcccccgcccccacaccccccaccctcgcccagtgaggaccacctgcgcggccaggaccgcgctgaccctgccctgtctccacaggtttcggcatgaccacccccgcgacggtgggcgggaaggccttcctcatcgcctacgggctgttcggctgcgctgggaccatcctgttcttcaacctcttcctggagcgcatcatctcgctgctggccttcatcatgcgcgcctgccgggagcgccagctgcgccgcagcggcctgctgcccgccaccttccgccgcggctccgcgctctcggaggccgacagcctggcgggctggaagccctcggtgtaccacgtgctgctcatcctgggcctgttcgccgtgctgctgtcctgctgcgcctcggccatgtacaccagcgtggagggctgggactacgtggactcgctctacttctgcttcgtcaccttcagcaccatcggcttcggggacctggtgagcagccagcacgccgcctaccg

SEQ ID NO: 233088 - DNA, 320 bp, Homo sapiens
catcattagtgccattgaaggtacgacagtgttaagtcaccttactctttttttactcctccctccatcttgcagcttatacatgacaataagtgttcattatttaataatgtttaaatatgcaataccatttctatgttgaggtgtgtactttccagagcatattgaaatgcagtgatgtgtaacaaaacttaccttctgtgattattaatacataaacatatctgaagaccatagtaaataattattataatctaaggtgtggccaacatatttgagaaaacaggaatttaataagatattctcttcagttccatgga

SEQ ID NO: 233089 - DNA, 538 bp, Homo sapiens
  misc_feature (297)..(297): n is a, c, g, or t
  misc_feature (497)..(498): n is a, c, g, or t
actgtactcgtttctgcaagcatagcattgtaggtaatggctttataagtgtctgttgtggcctcatggtacaatcgaatgacatagccttttgtaataaagtgaagcagcactggggtgatcaccgtaaagcttcccatgatgccatagaatatgatttgaataggcagaggcacactttcagaaatagcattattttgtgtaaaaatgtatggcagaaatgtaaggccaatcagactcgtagaataagagaaacatttcacaccacaacactcgctcggcgccatattgccacgntataaatagcccttccattcttctcgatcttgtcagatggcgtgatcttacagacatcgaactatatccctttcccaaataaaccaggcgatcctgcgctcgtatcccgcgacgcccggatgaagggcgctgcggcttccgcgaaggccccccgctactcacagtccggcctcaccgcgcccccgaagtggccccgctgnnctggaggaaaaagctacgggcagaccagcagggcccaggg

SEQ ID NO: 233090 - DNA, 490 bp, Homo sapiens
gagatgcagacatggaaacgtgcccttccggtccgggtgttcttggacaagtgacttactgtttctggaatttcagcttcccgatgggtaaaatgagaagaataacggacttctctccgaaggtttgtgtgaggatgtgactcagtgagccacatggtacagcactcagcctgggacacccgcagaactgagatgagaaggagccaggatttaaagtcaatttaattgtcacttctctggggtctaccatgcctcccactaaagcactctcttttgctattagccacaagcacgacatgcggtttcccaacactgctgggtgcacacctctcctcctgacccctctccccacttccccggcaaggacacacaggcggctgtggactgggggggctcatgtatccatccatttcatgtggatgccattggggggctgcactgggctgggttattttttaactcctgttattagtcactgcccgtcatgaga

SEQ ID NO: 233091 - DNA, 564 bp, Homo sapiens
tttttagacacccaaaatgtgttggctcatgagcatttagcctaaaggagaaaataataatttcactaattatctataaatatgtgatggcttattttatgaaaagctcattctgagtttgcaagacactaaccaaagaccacagtgagaaagtacagaaagtaccttaggtgaacacacaaagagcccgccctagtaaaaccatctcatcatgggacatcagtgtcccagaaactatccagacagaagggaggaggtcaagtggagatcctacaagaggattccttcatttagtgagaagttgcacaagcttttgttctaagatctccaccactttatacttccataattttatataatcaacagtatctagagacatccagctgtgtagttaacaagtactatttgttaacttgtattactcagacctcagttgtcttcttatactgtccaagcaaattaagaaaagctgaggtatagttgaattatttgggtaatagtagctataaaaactcaagtagaaaagggggtagtcacaacttcaaatttgcaataaaaaaacaa

SEQ ID NO: 233092 - DNA, 673 bp, Homo sapiens
gcagtgagctaaaatcgtgccactgcactccagcctggcgacagagcaagactccatctcacaataataataataataataataatcatcatcatcatcagagaggttcgatattatgaccatggtcaacaggtaataagtggtagatcctggagacaaattcacattatttcagttatacactgcttctttacatactggagaggtagtaagaaggaagtaaagctacagttatcatgacattttctatggaattctctttggttaaccaaaatactcctattattctgggttttatgttggggagtaggcaataaagatttttaaaaagctgacaatgtagttgaagaaataaacaatctcagaaattaacagagaaccattcgaaattaagacatcaagaatgcaaaatgatactacaaattgaataaataatttccatggaaagtattgaataaatttattcattttaatgcagtatttattaactacctactatatactaggattacattaagcactgaggatctaaaattaattttaaaaaatagactgaggttagggactctgagggagacaacacaaacatttatgtataaaacaaaatgataagcactatgtttatataaaacgttacaggaacagctacaggagaaaatggggttagtcaaag

SEQ ID NO: 233093 - DNA, 310 bp, Homo sapiens
gattttgtattttattagaggtgaggcttcaccgtgttggccaggctggtctcgaactcctgacctcaggtgatccacccacctcagcctcccaaagtgctgggttacagtcatgaggcactgtgcctgccctacttttttataataaaaaattataaataacatattttagagccaggagtggtagctcatgggtataatcccagcaactcaggacaatgagttgggagtatcatctgagaccagttctagaccagcctgggcaacttagttagactccatctgtaaaaaaaaaaaaaaaaaaaattaa

SEQ ID NO: 233094 - DNA, 477 bp, Homo sapiens
tatcatctctatataatgtgatcttttgaatctacattaaaaagacaaacacatctgtagagaaaaatgagaaaagaacatgagttgggtatttcattagagagaaaatccagtgggcagtaagcatatgagcaaatgttttacctcattaataatcaaataaataggctgggcatggtgagtcacacctgaaatccacgcactttgggaggctggtctcgaactcctgacctcaggtgatccacccacctcagcctcccaaagtgctgggttacagtcatgaggcactgtgcctgccctacttttttataataaaaaattataaataacatattttagagccaggagtggtagctcatgggtataatcccagcaactcaggacaatgagttgggagtatcatctgagaccagttctagaccagcctgggcaacttagttagactccatctgtaaaaaaaaaaaaaaaaaaaattaa

SEQ ID NO: 233095 - DNA, 476 bp, Homo sapiens
ctagatgtggtggttcatgcttgttatcccaacactttgggaggccaagacactgcctctacaaaaaatttaaaaaatgaaagtttcaaaacagtatatccattagttaacattctttagtgtccaactatcaattgttagtgtacatacacctctcattatacattaagcatgattcttatttattgaaatattcaatacatataagaactatatcttatatgctaaatttctgaaaaattattttagatatttttaaatttgtacattccagttacttttttcttgtttgtttaaagagaaaacagaacagggctacatagcagacttactttgcgataactttgacatagtaaatcttctgatacttagtcttatatttttcctctttaaacatatcttaaatttatccttactgaatttcactttatgctgacttgggtacctgaaggtatgaagataggaagaagaagata

SEQ ID NO: 233096 - DNA, 953 bp, Homo sapiens
ggcaagaataattcaggggaggcacagcaaagcacacaggctttgccaatgggccccaggggggagaagcatggaagcaggagaaaatgtaattttaaaaggactatatcccaagtgcatgaaacccaaacagcattgcagtagacaagccacagggcagggaagtacaggccgtttgtaatctatgagctattaataagtcatccccaggagacacagaacaccaaatggggaaccatagttggcccccagggctgcctgtctccatggcccatgctggctgtctgtgtgagccgagactcaaaagtgctcaaaatctcactgttaaaaaagagtgtgagcattaaacaaatacagccctggaaagtatgagaaaccactgtcctgaaacccatcattccaccttggcttcctggagagctggccaggtgcagagcatggtttgaccccagggagaagcccagagttttcatgctgtctaccaaaaaggcatctcaatggcaaatccttctatctccttccaagttcattcactgtggccttaaaatatactctacaaacatagaaccagaatgtctttgggttcctagacggggccactgcagggttatacaagatcatcgggcaggaatctgcccccttctgtgcagcaactgtcccaaaccagagtacatggcttggtgagcagagaatcagcagggagactttgtgactcagactctgtccccagaaaccctgtccccagacaccactcaggcctcaccctaaatagactatgactgggcagaagggaatcaagtcctctttccggatattttccttccaggatggaagacttgactgcagatcaattatgatcagagctgcctaaagatatcgcaaggttattgctaggaaaacttttccttttagcaagatgatcctggaaaaataaacaaacaaacgccaacaga

SEQ ID NO: 233097 - DNA, 461 bp, Homo sapiens
ccatctcaaaaaaataaaaaataaaaaataaaataaataaatgcagaaactggagtcttggcccctggatctatagccctctattgaagtgttattataccagtcatttacttactggaattaactagtagtaagttaaatttggccttatttattacccaaaacaagatagtggtgagaaactcattacaggatgcccttaccaccaaactggtcttatggaaattgatacactttttttttttttttaagaccaagtcttgctctgtcacccaggctggactacagtggcatgatctcagctcactgccacctccacctctcctggttcaagtgatttcccagctactcgggaggctgaggcaggagaatgacgtgaacctgggaggcagagcttgcagtgagccgagattgcaccactaaactccaacctgggtgacagagcgagactctatctcaaa

SEQ ID NO: 233098 - DNA, 392 bp, Homo sapiens
ggtaatggagggacacagaactcttcctaaggggtgagagggatgggggagatggttccaggaggccacagcaaatttacttggcatatgtgtacacatggaagagtggaagggccagaagagaaagtccatttcagagaggacaggtggccactcttagggtcaccgggtggccttcctgcgccatccggattcccaggacatgactgggaggacggactttccccaccacaacctttagtgactaagacacttttctgagcaaacagctgtctcaggctccctcaattggcccctctgctggaggggactggacaccgtggttccctaccctcctccttccctctcccacctgttcccctgaccccaccctcagcagtttcctttccacc

SEQ ID NO: 233099 - DNA, 244 bp, Homo sapiens
tctttatgcttgaggggaaaatatgtaactcacgcatacacatgtgtgagcacatgagtgcacactcccacacacgtatatgtctttgaaattctgctaagtaactagatattttgaaagcacttaaaactatgtctgctttttaaaaaatcgattgtctgaattaggtccaattaaaatctatttgtgaatagagttttcattagaattcacaaatggtagtggtgaagagtgacagctgcca

SEQ ID NO: 233100 - DNA, 448 bp, Homo sapiens
tgtttattttaaattgttttagaaaatatataactagcggctgggcgcggtggctcacgcctgcaatcccagcactttgggaggtcaaggctggcagatcacgaggtcaggagatcaagaccatcctggctaacatggtgaaaccccatctctactaaaaatgcagaaaaaattagccgggcgtggtggcgggcgcctgtagtcccagctactctggaggctgaggccggagaatggcatgaacccaggaggcggagcttgcagtgagccgagatggcgccactgcactccagcctgggtgacagagcgagactccgtctcaaaaaaaaaaaggaaatatataagtaactcatgaaaccaaagatatcatgggtgatattgactagagtaagggcagaaaaatgagtctatatgaagttgatgcaataaagtctgctggtttcttcca

SEQ ID NO: 233101 - DNA, 478 bp, Homo sapiens
atagatagataaaatgtgtatgtacatacagtggaatattatttagacttaaaaaggaaggaaattctgacatattacaacatggatgaaccataagcattatgccaagcgaaatatgccagtcacacacaaaaaaatactgtataattccacttatacaaggtacctagaataggcaaatgcatagaaacaggaaaaggaataatggttgccaggggatagagggaaggagatagggagttgtttaatggatgtagtgtttcgtttttgcaagaccaggatagttttgggagatttgatgcacaacaatatgaacattcttaatgctgccgaactcactttaaaatagttaaagtggtaaagcttatgttatgtgttttttactacagtttttctgaaattttctaaattttaaagtggttaagatagtaaattttattgttatgtatatattaccaccaccaccaacaacaacaaa

SEQ ID NO: 233102 - DNA, 126 bp, Homo sapiens
tggaaattctttttctgttcttttctccatctcctctccttctggtactctcccattatgtatctgtggtgtacttaatgtcccacatttctctgagtctgtgctcatttaccttcattctttcac

SEQ ID NO: 233103 - DNA, 461 bp, Homo sapiens
tccctgtaggtctgcctcttgggtaaacactctgcccagaaccagcagaaccgtccattatctcccccagcctattaaggaactctatgcaaatgtgcactaattgacccaagacacagcagctcctggaggagaaggatgactccagatggcttaatgatagggatttagaagtcccttcagaagtccctcttggggaagaaagtgatctgcacttggagaagggctgccagctgcctcatggggtggccagtggactgggtgacctgcaccttgggtccctttcatcaaaccactgtacaagggagactgtcagctcaccccttcatctctctccaatcccctgacccttcctgcaacatggccccttccccagagcccacagtttggatatttcgttgacatgtacctcagtgggtctctgccttttcaaataaattattgtcccccctttttaaata

SEQ ID NO: 233104 - DNA, 524 bp, Homo sapiens
aggttgtggtgagctgagatcatgccatcacgccactgcactccagtctgggcaacagagtgagactctgtctcaaaaaaaaaaatgtccagaataggcaaatctatagagacagaaaggagattggtggtgtcaggagctgtggggaagtgggaagaggaagtgctaatggggtcaggatttcctgctgggtggtgaagatgttctggacctagatagtggtgaagtttccacaacactgtgcatataccaaatgctactaaattgtaccctttaaaatggtgaattttatgttttgtgaattttacccaaacaaaaaatgctattttatctcaaatttttgttaatttgggctactcacacgatatgctgttaacatctttccatgacatcaaatcattttatgaaacattattttgtggttttaacaaatatttgggttatgtattcaaaccactctatttcttaaaaatggcgtgatgttacaaaatgatataaaagtgctttgtctcacgttgcaagaa

SEQ ID NO: 233105 - DNA, 389 bp, Homo sapiens
ctaaggaccaaactagtagctcagtcattgtaggcctcaggctaaacaaagaggctccaatcaagacgaagagcatgtggcccccaggtgagcacattgccactgacgccatctgtgagatgtgtaagaccctggcagggactcggcctgtcagtctgctccagacatggcgcagtgttctgaaactcttctccaagcaaaacctgagtaccacaaaggtgccttagagaagaattcattttcacaaactgttgcagaccagtctagtgctgggcactggaggttccagagaggagcgggtcacaagccctccagtgacagctcaccatctctctggggtgtcagccctagggaccatcaccatcagtgacaaatgctttgataaagta

SEQ ID NO: 233106 - DNA, 613 bp, Homo sapiens
agacggagtctctctctgtcacccaggctggagtgcagtggtgtgatctcaggttcaagcgattctcctgcctcagcctcccaagtagctgggactgcaggcgtgcaccaccacgcccagctattttttttgtatttttagtacagacagggtttcaccatgttagccaggatggtctcaatgtcctgacctcatgatccgcccccctcggcctcccaaagtgctgggattacaggcatgagccaccatgcccagccagtttgtgctttttatacatgatttctactcatcagaatattctgcaatgctacctacattttcatatgttgtttctgcccagtcctaggcttaaatactttataagttagtagtttactaacgggagctgtttgatttggattctaggaacctgcctcattccttagccaactatgagttgctaatgctgataaaacacattgtctttgagagacacaaagcgtactaggtttttcccccactctcttaagtatttttggcaaaacagagaagcatgaaaaggtgagacccctttgccctgaaccaattatgagggtgactgggtagctgatgaatgacagcccctcctgcctga

SEQ ID NO: 233107 - DNA, 279 bp, Homo sapiens
gaaatgagatgatactgtctgcccttaagaagcttactactccctggataaactagaaatttttaaaaatgaaaataatgatatggccctcttgagggaggagggtgggaagagggagaggatgagaaaaaaaataattgttgagtactatgcttagtacccaggtgacaaaatgctctgtacctcagactcctgtgacatgagtttgcctgtattaacaaacctgcacatgtacccctgagcctaaaataaaaattaaaaagtgaaataaagaaaata

SEQ ID NO: 233108 - DNA, 463 bp, Homo sapiens
cagttattccagcagagagtattctgaagtctttgagcatttattgtctgtagtattgtcttgtcacttgtaacccacatggctttaaagtcattagttatctttttacttacattctctgagaacacaggtcacagcacctagcaccattccttgctcaaaaaattagctatcagccagtcacagagtctcatgcctgtaatcccaacactttgggaggccatgtgggtttgatcacttgagaccaggagttcaagaccagacagggcaaaatggtgaaaccccatctctataaaaaatacaaaacttaaccagccagacatggtggtgcatgtctgtagtctcagctgctcaggaggcagaggtgggaggatcacctgattctggggaggtcgaggctgcagtgagctatgatcacaccactgcactccagcctggacgacagcatgagaccttgtctcaa

SEQ ID NO: 233109 - DNA, 272 bp, Homo sapiens
aatcagaacacatcagaagcatcccttttttcctccactgtaaagtctcccctcttcccgattgcttttgagtctctgccaaactcaagtgtggtcgctgcccctattgctatagcaagctctgaatagtctctgttctcacttggcaggtctacatttcttgcgttaaataaaactttgacacatattcactatctcttcccttgagacttagaaatctaacaattagagaatctttacagaattaaatctttcacaaagaaggtgctcaa

SEQ ID NO: 233110 - DNA, 501 bp, Homo sapiens
cagtgcattcagggaatgagaacactgaaatggctgtcttgttctcccagtgatggtaatgtcctggtaacacaaaggcaacaaagccagtccacaaaagtccacagaagtcacctctccctcctcatttgttttgacccacagctcagagttcaagctacctgggcagctccttcagtgcagtgcattcttctggtttctcacgaatcctttgtcaaatctttggcctctccttccaccaaaacccaactgtgttttcctgctgctgatggggaggtacttcaaggctcatattagctgtttcatatttgcctcattatgttcccccctgagacttattaatatggctggtgtatgtcagaagctcgtgttactgtctgttgcgagcatcccatgggatgatatgcagtcccagcattgagtctggtggcttctgtcacatcctttattcctgatacttccaaatttaaccatgacaccattgcttctgagaaggaattt

SEQ ID NO: 233111 - DNA, 1845 bp, Homo sapiens
  misc_feature (1665)..(1665): n is a, c, g, or t
cagggaagcttggttaaaaacagttatggcagtgggagtcgaagcgagggtctgaagttcacgactactagaaggggaggggagtggaaaggctctcagtgaaaaaggtatggaacccttcagatcaaagcttaccaataaattcagtatgtagaacagattaacgtagttgaaatgaggaagaatgagagttatctcaaccagccagcaccccctatccccattcccacactttccctcatgggaggctgtcgggagcacttcgaaaaccactggaaaggccgggcacggtggctcatgcctgtaatcccagcactttgggaggccaaggcaggcagatcacctgaggtcaggagttcgaaaccagcctggccaacatggcgaaaccccatctttactaaaaatacgaaaattagccaggtattagaattatttctgaattatcagtctctcatttgtgctttggagaagcagaaaaggcaaaaggggtctttggccatcttctgctggagcttccagggaggatgtgtctccaagagaccagatgtaccgagtttgaaatcccagaagcccaagaggaaaagaatcacagggaggaaaagactgtccaaaggcttctggagtcttctgttctctaaccttggaaggttttgaacaatatttctcagaggatagcctttcacttattcatctgtccagcatgactcatccccgggagtgttgagtaagtgaaattttgctgtattcatgtttttgtgacttataaaataggatgataaggagagaacatgaactctggagtcagacctgttacctcggacatgatactcttagctttgtcatttagtatttgagtaattttgggcaagctaacatctctggtcgttctcatctgtaaaatgagaataaatgaaacccactaaccagaattggtatgaaaatgaaatgtggcagaaaaaaaatgaaagtgaatagtatcaccactgacacacaagcactaaaggcccttcctgtctccatcaggtatggatttggggcaacatttggccaggtcttgtttatctttctgttcatctattctgtctaattcagtgctttgtttacaacgaatgtcttacaaatgctgactgaacactagcatacctgcatgaacaacaggtaaataaattttagatgtgttttaatgtttattaatctatcctgtcagagaagaactgccagttatagataaatatgatgccaggtcagggctgaagagttgggcaggttgttatctgcatggggtcactaggttccagtggagaggtgggggctaagctctcacccgctctgcagccacctggcacccggtttcagtttcctgaaagggagccttctacttgctgacgactgcctcatctcttctgaggtttcctctgataaacaattttctctgctttttttttttaattatgaaatacttaaaatgtaaaggagataatgtgacacacatttacccataattgagattgccataattgctataactttttcaaaattttgacttaatttcagacttttagaaaaattggccaggtgtgatggctcatgcctgtaatcccagcactttgggaggccaaggtgggtaaattacttgaacccagcagttcgagacttgcctgggcngcatagtgagaccttgtctctactgaaaacaaactaaaaaaaaaattagccaaccatggtggtgcatgcctgtagtcctagctactcgggaagctgaggcaagaggatagcctgagcccaggggagttggggctgaagcctgggtgacagaggaagaccttgccttcaaaaaaacaaaaa

SEQ ID NO: 233112 - DNA, 476 bp, Homo sapiens
ttagtgttttaatttatcatccagtcttctcaggtgcttgacctgcttactgtgatttgtcaactgttactaagttaacagaatctaaaaatagcaaacagtttctcagacatttttaaaaaccattaagatgatgcttcagtttgctaacctcagtcttcacttcagaaattagaaaactaaaaatagctgaaatgaaggtagcatcagtaaaaaccaagtttgtttgcactttgaggatatatagaaggagccatgaccaaataacacatgtattcttccacccagtgtctgtcttcaccaagaaggacgactttgattggctgtaattggccactgttgctaatggagtagagagagtcttgctacatgcgggaactagaattacatcactgcgttttttggctttgtttcttcaatgggttgtagtgtatgaatattattacaaaataaaatgatttaaaaatatccatcta

SEQ ID NO: 233113 - DNA, 768 bp, Homo sapiens
cagggaagcttggttaaaaacagttatggcagtgggagtcgaagcgagggtctgaagttcacgactactagaaggggaggggagtggaaaggctctcagtgaaaaaggtacagtaaataaatgtccagggatattgggggctgggaagttgaataaatggtctaatctaggctggaggccataagggggaaaacagttgattctcggaagttctgccttctccccctctctagtgcgaatcactgaggcgccatttgatttctcgtttcctgcatgttttggcagtttacagtgcaaataacggtaccttggatgtctgtagagttttgtgtgcatatacaaattctcttaactaggtttaatttcatttgctttttaccaccctactccccagagaataataagagccatcatgtgttaagttcttaatatgtgtctggacagcatttgcataacacgatatcatttgatcttaaaaaataaccttcttaggaaacaggcccagaaaggaaatgacttgctaaagttcacgcagctgataagtgagtggatagacattcagatctcaacctgtcttctttttacagatcaggacataggcaggaaaggttaggcctgtattacatagaatagtaactagcatttgcttactattgccttatagtttacatatttaataatatgttcacatgtatcatctcatcctcacaccagtcctgtaatacctttaccaggtggtgttgacttcatttacaatcagggaaactg

SEQ ID NO: 233114 - DNA, 542 bp, Homo sapiens
ttaagtgacttgcccaaggtcaagtcaccagttatgctggatcccaatctcaaaccttgagagtgatttttacgctgctgcccaccgcgcccagccgagttactattaattttaaatggcaaaaccaaacaaccaatattgttggagcagaagaatgcttatcactgcaattctattacctttgcctgttacctgtctttattttccctttatttagaacctgaagggtgcttttagggtggaagaatataaagtttaagaatttgcttaagtgaaacacttgttatatcttcattctagtaacattctagtttttgtagaagggcctgatccctctctctgacccatttaactcttctgtcttcaccaagaaggacgactttgattggctgtaattggccactgttgctaatggagtagagagagtcttgctacatgcgggaactagaattacatcactgcgttttttggctttgtttcttcaatgggttgtagtgtatgaatattattacaaaataaaatgatttaaaaatatccatcta

SEQ ID NO: 233115 - DNA, 521 bp, Homo sapiens
  misc_feature (341)..(341): n is a, c, g, or t
ctggatcatgcattgcactctgttgtgtatctttagtctccttcattctgaacacttcctcagtctggctttatctttcctaacattgacgttttataaaaatacaggccagtttttattttttttgagatggagtctcgctctgtctcccaggctggagtgcagtggcccgatctcggctcactgcaagctccgcctcccgtgttcgcgccattctcctgcctccgcctcccgagtagctgggactacaggtgtgatggctcatgcctgtaatcccagcactttgggaggccaaggtgggtaaattacttgaacccagcagttcgagacttgcctgggcngcatagtgagaccttgtctctactgaaaacaaactaaaaaaaaaattagccaaccatggtggtgcatgcctgtagtcctagctactcgggaagctgaggcaagaggatagcctgagcccaggggagttggggctgaagcctgggtgacagaggaagaccttgccttcaaaaaaacaaaaa

SEQ ID NO: 233116 - DNA, 1027 bp, Homo sapiens
aaaaatcagaataagaagtacctgacatactttctacatctgtagttgcggaagacattttaataggtcttctcatagcctttctttgctaaggacattgtgactctccagagagcaacagtgatggctctagaatgtctaggaaaaagaagggcttaatgtcaggagtctgcttggggcacacaacactagaagatgtccttctgcacattgtttcatatcgagtatggaacccttcagatcaaagcttaccaataaattcagtatgtagaacagattaacgtagttgaaatgaggaagaatgagagttatctcaaccagccagcaccccctatccccattcccacactttccctcatgggaggctgtcgggagcacttcgaaaaccactggaaaggccgggcacggtggctcatgcctgtaatcccagcactttgggaggccaaggcaggcagatcacctgaggtcaggagttcgaaaccagcctggccaacatggcgaaaccccatctttactaaaaatacgaaaattagccaggtattagaattatttctgaattatcagtctctcatttgtgctttggagaagcagaaaaggcaaaaggggtctttggccatcttctgctggagcttccagggaggatgtgtctccaagagaccagatgtaccgagtttgaaatcccagaagcccaagaggaaaagaatcacagggaggaaaagactgtccaaaggcttctggagtcttctgttctctaaccttggaaggttttgaacaatatttctcagaggatagcctttcacttattcatctgtccagcatgactcatccccgggagtgttgatctgtcttcaccaagaaggacgactttgattggctgtaattggccactgttgctaatggagtagagagagtcttgctacatgcgggaactagaattacatcactgcgttttttggctttgtttcttcaatgggttgtagtgtatgaatattattacaaaataaaatgatttaaaaatatccatcta

SEQ ID NO: 233117 - DNA, 537 bp, Homo sapiens
aaaaatcagaataagaagtacctgacatactttctacatctgtagttgcggaagacattttaataggtcttctcatagcctttctttgctaaggacattgtgactctccagagagcaacagtgatggctctagaatgtctaggaaaaagaagggcttaatgtcaggagtctgcttggggcacacaacactagaagatgtccttctgcacattgtttcatatcgagtgtgtattttgtggtgatctgggatgctgatagaaataattggatgttagtgccctaagccacctctgcactattttttttatttatttattttttcgagacttcgtctcaaaaataaaaaaaaaacccattggaaaaattcatcctctcataaatgacttgaaatgccacctccgtaatacactacgttaaaaattttacatactcaaattgtttttctctttttgtgccaggtcatactttaaggagcccaagagctttataacataacaaaagaaactgaaatgtctaataaatgtgtacataacaata

SEQ ID NO: 233118 - DNA, 263 bp, Homo sapiens
aggttatgtgccatgaattctgtggatattagtaggcatcatgttgaaggaagggttctgtagtcaaatgcggactaaattagttttattctttttccactttaggtcttctcatagcctttctttgctaaggacattgtgactctccagagagcaacagtgatggctctagaatgtctaggaaaaagaagggcttaatgtcaggagtctgcttggggcacacaacactagaagatgtccttctgcacattgtttcatatcga

SEQ ID NO: 233119 - DNA, 1962 bp, Homo sapiens
  misc_feature (1782)..(1782): n is a, c, g, or t
aaaaatcagaataagaagtacctgacatactttctacatctgtagttgcggaagacattttaataggtcttctcatagcctttctttgctaaggacattgtgactctccagagagcaacagtgatggctctagaatgtctaggaaaaagaagggcttaatgtcaggagtctgcttggggcacacaacactagaagatgtccttctgcacattgtttcatatcgagtatggaacccttcagatcaaagcttaccaataaattcagtatgtagaacagattaacgtagttgaaatgaggaagaatgagagttatctcaaccagccagcaccccctatccccattcccacactttccctcatgggaggctgtcgggagcacttcgaaaaccactggaaaggccgggcacggtggctcatgcctgtaatcccagcactttgggaggccaaggcaggcagatcacctgaggtcaggagttcgaaaccagcctggccaacatggcgaaaccccatctttactaaaaatacgaaaattagccaggtattagaattatttctgaattatcagtctctcatttgtgctttggagaagcagaaaaggcaaaaggggtctttggccatcttctgctggagcttccagggaggatgtgtctccaagagaccagatgtaccgagtttgaaatcccagaagcccaagaggaaaagaatcacagggaggaaaagactgtccaaaggcttctggagtcttctgttctctaaccttggaaggttttgaacaatatttctcagaggatagcctttcacttattcatctgtccagcatgactcatccccgggagtgttgagtaagtgaaattttgctgtattcatgtttttgtgacttataaaataggatgataaggagagaacatgaactctggagtcagacctgttacctcggacatgatactcttagctttgtcatttagtatttgagtaattttgggcaagctaacatctctggtcgttctcatctgtaaaatgagaataaatgaaacccactaaccagaattggtatgaaaatgaaatgtggcagaaaaaaaatgaaagtgaatagtatcaccactgacacacaagcactaaaggcccttcctgtctccatcaggtatggatttggggcaacatttggccaggtcttgtttatctttctgttcatctattctgtctaattcagtgctttgtttacaacgaatgtcttacaaatgctgactgaacactagcatacctgcatgaacaacaggtaaataaattttagatgtgttttaatgtttattaatctatcctgtcagagaagaactgccagttatagataaatatgatgccaggtcagggctgaagagttgggcaggttgttatctgcatggggtcactaggttccagtggagaggtgggggctaagctctcacccgctctgcagccacctggcacccggtttcagtttcctgaaagggagccttctacttgctgacgactgcctcatctcttctgaggtttcctctgataaacaattttctctgctttttttttttaattatgaaatacttaaaatgtaaaggagataatgtgacacacatttacccataattgagattgccataattgctataactttttcaaaattttgacttaatttcagacttttagaaaaattggccaggtgtgatggctcatgcctgtaatcccagcactttgggaggccaaggtgggtaaattacttgaacccagcagttcgagacttgcctgggcngcatagtgagaccttgtctctactgaaaacaaactaaaaaaaaaattagccaaccatggtggtgcatgcctgtagtcctagctactcgggaagctgaggcaagaggatagcctgagcccaggggagttggggctgaagcctgggtgacagaggaagaccttgccttcaaaaaaacaaaaa

SEQ ID NO: 233120 - DNA, 1703 bp, Homo sapiens
  misc_feature (1523)..(1523): n is a, c, g, or t
cagggaagcttggttaaaaacagttatggcagtgggagtcgaagcgagggtctgaagttcacgactactagaaggggaggggagtggaaaggctctcagtgaaaaaggtatggaacccttcagatcaaagcttaccaataaattcagtatgtagaacagattaacgtagttgaaatgaggaagaatgagagttatctcaaccagccagcaccccctatccccattcccacactttccctcatgggaggctgtcgggagcacttcgaaaaccactggaaaggccgggcacggtggctcatgcctgtaatcccagcactttgggaggccaaggcaggcagatcacctgaggtcaggagttcgaaaccagcctggccaacatggcgaaaccccatctttactaaaaatacgaaaattagccaggtattagaattatttctgaattatcagtctctcatttgtgctttggagaagcagaaaaggcaaaaggggtctttggccatcttctgctggagcttccagggaggatgtgtctccaagagaccagatgtaccgagtttgaaatcccagaagcccaagaggaaaagaatcacagggaggaaaagactgtccaaaggcttctggagtcttctgttctctaaccttggaaggttttgaacaatatttctcagaggatagcctttcacttattcatctgtccagcatgactcatccccgggagtgttgagtaagtgaaattttgctgtattcatgtttttgtgacttataaaataggatgataaggagagaacatgaactctggagtcagacctgttacctcggacatgatactcttagctttgtcatttagtatttgagtaattttgggcaagctaacatctctggtcgttctcatctgtaaaatgagaataaatgaaacccactaaccagaattggtatgaaaatgaaatgtggcagaaaaaaaatgaaagtgaatagtatcaccactgacacacaagcactaaaggcccttcctgtctccatcaggtatggatttggggcaacatttggccaggtcttgtttatctttctgttcatctattctgtctaattcagtgctttgtttacaacgaatgtcttacaaatgctgactgaacactagcatacctgcatgaacaacaggtaaataaattttagatgtgttttaatgtttattaatctatcctgtcagagaagaactgccagttatagataaatatgatgccaggtcagggctgaagagttgggcaggttgttatctgcatggggtcactaggttccagtggagaggtgggggctaagctctcacccgctctgcagccacctggcacccggtttcagtttcctgaaagggagccttctacttgctgacgactgcctcatctcttctgaggtttcctctgataaacaattttctctgctttttttttttaattatgaaatacttaaaatgtaaaggagataatgtgacacacatttacccataattgagattgcttgcctgggcngcatagtgagaccttgtctctactgaaaacaaactaaaaaaaaaattagccaaccatggtggtgcatgcctgtagtcctagctactcgggaagctgaggcaagaggatagcctgagcccaggggagttggggctgaagcctgggtgacagaggaagaccttgccttcaaaaaaacaaaaa

SEQ ID NO: 233121 - DNA, 457 bp, Homo sapiens
aactcagcattaatcttatttcattcttttgttgccattaaattgtaataagcttattttaaacttcagggtgctttctgagcccttattagcatcataaattttgttcccacatttttaaagtaccttgacagacacacaggttggctgaactgacaggccgccccatgagagttgtgggctggtatcattcccatcctcatataactgtttggccttcacatgttggtaagtatcatggggttgcaatgtttattgttttcagaaattaatatcatgtttccttttccattacatagggtatggttattttaaaccaaaatttgactgtcctttagcagatgtcattattttgatttattttattatgtattaaaagtaatgatttatgtcatattgattgtttttaataagtctgtcagttgatataaaaaaattaaactgttaactgaaaatt

SEQ ID NO: 233122 - DNA, 638 bp, Homo sapiens
ggttgtttaaccatgtacctgatttaggacatctggggtgtttccagttggggctattacaaaaaaaaaaccagtctcaaatggtcacatactgtatgatcgcatttatataacattcttgaggtgacaaaattattgaaatgaagaacagattaatggttgccagggatagggactggagggggtgtggggtatgtatgactataaagggatgacgcaaggagttcctttgtgctgatggaacagttctatatgattatgatgattacgatgttgattataacatttgattatgaggttaagcacatgaatctttacctgtgctgaagttgtatggacctacatacacacaaatgaatgcatgtaaaatctggtgatactgaataaagtctgtagtctagatagcagtataatattattgtcaatgtcttggatgtgaagttgtgctatagttacaaaaccgtaccactggaggaaactgggtaatggatacatgggactctgtactatttttgcaacttcctataagtatataattattgcaaaatgaaaagttgtaagttttaagtaaggaactgggacgtatggtacctattttatgaaataagaaaagggtgctagaaaatttgaggggaata

SEQ ID NO: 233123 - DNA, 3068 bp, Homo sapiens
cgcacagcgctgggcgctggggaggctgcgccgcagcacccggttggtcaggaccaagtgggcccgaggcggacgtgagaagggtcgggccaagatggcggtgcaggtggtgcaggcggtgcaggcggttcatctcgagtctgacgctttcctcgtttgtctcaaccacgctctgagcacagagaaggaggaagtaatggggctgtgcataggggagttgaacgatgatacaaggagtgactccaaatttgcatatactggaactgaaatgcgcacagttgctgaaaaggttgatgccgtcagaattgttcacattcattctgtcatcatcttacgacgttctgataagaggaaggaccgagtagaaatttctccagagcagctgtctgcagcttcaacagaggcagagaggttggctgaactgacaggccgccccatgagagttgtgggctggtatcattcccatcctcatataactgtttggccttcacatgttgatgttcgcacacaagccatgtaccagatgatggatcaaggctttgtaggacttattttttcctgtttcatagaagataagaacacaaagactggccgggtactctacacttgcttccaatccatacaggcccaaaagagttcagagtatgagagaatcgaaatcccaatccatattgtacctcatgtcactatcgggaaagtgtgccttgaatcagcagtagagctgcccaagatcctgtgccaggaggagcaggatgcgtataggaggatccacagccttacacatctggactcagtaaccaagatccataatggctcagtgtttaccaagaatctgtgcagtcagatgtcggcagtcagcgggcctctcctacagtggttggaggacagactggagcaaaaccaacagcatttgcaggaattacaacaagaaaaggaagagcttatgcaagaactttcttctctagaataaatcaggagacaaaatggggaaagatgaaaatatccagtgtaaagttacttaagctaaatcaatttcaaagaagaaaaacttggaggactcattttacctgacttcaagacttactataaagctatagtaatcaagatagatggtattggcagaggaacagacacatacgtcaatggaacagatgagagaacccagaaataaacccatataaatatgctcagctgattttgaaaaagtgaaaaagcaattcaatggaggaagaatagcctttctgacaaattatgctagagcaattagacacccatggcgaggagaaaaaagaacctctacttaaacctcacatcttatataaaatttaactcaaaatgtataacggacttaaatgtgatacataaaactagataactttgaaaaaagccacaggagaaaaatcttcaggatcttgggctaggtgacaagttcttggactttgccccgaaagcacatccataaaagacaaaatctgatatattggacttcttcaaaatttaaaaacttgtgatttaagaagaggaaaagataagctacagattgagatgaatttgcaaaccatatatctgatcaatttggaatatataaagtgtactaaaaactcaactgaagtcaggcatggtagctcatgcttgtaatctcaccactttgggaggccaagatgggaggagtgcttgaggttaggcgttccagaccagcctgggcaacatagtgagactcttgtctctacaaaaagtttttttaaaaaattaactgggcaccatgacacacaccagtagtcccagctactagggaggcaggaggatcacttgagcccaggagtttgaggctgcggtgagctgtgatcacaccaccacactccaacctgtgtaacagagtgaggcctcatctcaaaaaaaaaaaaaggccacaaaactcaacaataaaaacaaacagtccaattagaaaatgggcaaaagacatgaatagatgtttcactgaagaggatctatagatggcaagtaagcatatgaaaagctgttaaactccataagtcatcagggaatgcaaattgaaaccacagcgaggctatgacttacttatctcaatggctaaagaaaaaatagtgaaaataccaaatactgatgaggatacaaactggatattttatacattgctgacaggaatgtaaaatggtacagccactctgggaaagagtttatgaatttcttatcaagttaaacataattttttaatcaagttaaacataagacccagcagttgtgctcctggacattcattccagagaaatgaaaacctatattgtacttgtactcaaatattcataggagctttatttgtaatagccccaaactggaaacaacccagatgtcctacaacaggtacatggttaaacaaaccatccataacttggaatactgctctggaatgaaaaggaactaactgttgatacaagaacttggttgtacctcaggggtattatggtgaacaaaaaaaaaaccagtctcaaatggtcacatactgtatgatcgcatttatataacattcttgaggtgacaaaattattgaaatgaagaacagattaatggttgccagggatagggactggagggggtgtggggtatgtatgactataaagggatgacgcaaggagttcctttgtgctgatggaacagttctatatgattatgatgattacgatgttgattataacatttgattatgaggttaagcacatgaatctttacctgtgctgaagttgtatggacctacatacacacaaatgaatgcatgtaaaatctggtgatactgaataaagtctgtagtctagatagcagtataatattattgtcaatgtcttggatgtgaagttgtgctatagttacaaaaccgtaccactggaggaaactgggtaatggatacatgggactctgtactatttttgcaacttcctataagtatataattattgcaaaatgaaaagttgtaagttttaagtaaggaactgggacgtatggtacctattttatgaaataagaaaagggtgctagaaaatttgaggggaata

SEQ ID NO: 233124 - DNA, 2839 bp, Homo sapiens
  misc_feature (2806)..(2806): n is a, c, g, or t
cgcacagcgctgggcgctggggaggctgcgccgcagcacccggttggtcaggaccaagtgggcccgaggcggacgtgagaagggtcgggccaagatggcggtgcaggtggtgcaggcggtgcaggcggttcatctcgagtctgacgctttcctcgtttgtctcaaccacgctctgagcacagagaaggaggaagtaatggggctgtgcataggggagttgaacgatgatacaaggagtgactccaaatttgcatatactggaactgaaatgcgcacagttgctgaaaaggttgatgccgtcagaattgttcacattcattctgtcatcatcttacgacgttctgataagaggaaggaccgagtagaaatttctccagagcagctgtctgcagcttcaacagaggcagagaggttggctgaactgacaggccgccccatgagagttgtgggctggtatcattcccatcctcatataactgtttggccttcacatgttgatgttcgcacacaagccatgtaccagatgatggatcaaggctttgtaggacttattttttcctgtttcatagaagataagaacacaaagactggccgggtactctacacttgcttccaatccatacaggcccaaaagagttcagagtatgagagaatcgaaatcccaatccatattgtacctcatgtcactatcgggaaagtgtgccttgaatcagcagtagagctgcccaagatcctgtgccaggaggagcaggatgcgtataggaggatccacagccttacacatctggactcagtaaccaagatccataatggctcagtgtttaccaagaatctgtgcagtcagatgtcggcagtcagcgggcctctcctacagtggttggaggacagactggagcaaaaccaacagcatttgcaggaattacaacaagaaaaggaagagcttatgcaagaactttcttctctagaataaatcaggagacaaaatggggaaagatgaaaatatccagtgtaaagttacttaagctaaatcaatttcaaagaagaaaaacttggaggactcattttacctgacttcaagacttactataaagctatagtaatcaagatagatggtattggcagaggaacagacacatacgtcaatggaacagatgagagaacccagaaataaacccatataaatatgctcagctgattttgaaaaagtgaaaaagcaattcaatggaggaagaatagcctttctgacaaattatgctagagcaattagacacccatggcgaggagaaaaaagaacctctacttaaacctcacatcttatataaaatttaactcaaaatgtataacggacttaaatgtgatacataaaactagataactttgaaaaaagccacaggagaaaaatcttcaggatcttgggctaggtgacaagttcttggactttgccccgaaagcacatccataaaagacaaaatctgatatattggacttcttcaaaatttaaaaacttgtgatttaagaagaggaaaagataagctacagattgagatgaatttgcaaaccatatatctgatcaatttggaatatataaagtgtactaaaaactcaactgaagtcaggcatggtagctcatgcttgtaatctcaccactttgggaggccaagatgggaggagtgcttgaggttaggcgttccagaccagcctgggcaacatagtgagactcttgtctctacaaaaagtttttttaaaaaattaactgggcaccatgacacacaccagtagtcccagctactagggaggcaggaggatcacttgagcccaggagtttgaggctgcggtgagctgtgatcacaccaccacactccaacctgtgtaacagagtgaggcctcatctcaaaaaaaaaaaaaggccacaaaactcaacaataaaaacaaacagtccaattagaaaatgggcaaaagacatgaatagatgtttcactgaagaggatctatagatggcaagtaagcatatgaaaagctgttaaactccataagtcatcagggaatgcaaattgaaaccacagcgaggctatgacttacttatctcaatggctaaagaaaaaatagtgaaaataccaaatactgatgaggatacaaactggatattttatacattgctgacaggaatgtaaaatggtacagccactctgggaaagagtttatgaatttcttatcaagttaaacataattttttaatcaagttaaacataagacccagcagttgtgctcctggacattcattccagagaaatgaaaacctatattgtacttgtactcaaatattcataggagctttatttgtaatagccccaaactggaaacaacccagatgtcctacaacaggtacatggttaaacaaaccatccataacttggaatactgctctggaatgaaaaggaactaactgttgatacaagaacttggttgtacctcaggggtattatggtgaacaaaaaaaaaaccagtctcaaatggtcacatactgtatgatcgcatttatataacattcttgaggtgacaaaattattgaaatgaagaacagattaatggttgccagggatagggactggagggggtgtggggtatgtatgactataaagggatgacgcaaggagttcctttgtgctgatggaacagttctatatgattatgatgattacgatgttgattataacatttgattatgaggttaagcacatgaatctttacctgtgctgaagttgtatggacctacatacacacaaatgaatgcatgtaaaatctagantacagactttattcagtatcaccagagtcgtcc

SEQ ID NO: 233125 - DNA, 2464 bp, Homo sapiens
ctgatcgaattcgactcgtaccctccaggatgagaattgtatgagagaatcgaaatcccaatccatattgtacctcatgtcactatcgggaaagtgtgccttgaatcagcagtagagctgcccaagatcctgtgccaggaggagcaggatgcgtataggaggatccacagccttacacatctggactcagtaaccaagatccataatggctcagtgtttaccaagaatctgtgcagtcagatgtcggcagtcagcgggcctctcctacagtggttggaggacagactggagcaaaaccaacagcatttgcaggaattacaacaagaaaaggaagagcttatgcaagaactttcttctctagaataaatcaggagacaaaatggggaaagatgaaaatatccagtgtaaagttacttaagctaaatcaatttcaaagaagaaaaacttggaggactcattttacctgacttcaagacttactataaagctatagtaatcaagatagatggtattggcagaggaacagacacatacgtcaatggaacagatgagagaacccagaaataaacccatataaatatgctcagctgattttgaaaaagtgaaaaagcaattcaatggaggaagaatagcctttctgacaaattatgctagagcaattagacacccatggcgaggagaaaaaagaacctctacttaaacctcacatcttatataaaatttaactcaaaatgtataacggacttaaatgtgatacataaaactagataactttgaaaaaagccacaggagaaaaatcttcaggatcttgggctaggtgacaagttcttggactttgccccgaaagcacatccataaaagacaaaatctgatatattggacttcttcaaaatttaaaaacttgtgatttaagaagaggaaaagataagctacagattgagatgaatttgcaaaccatatatctgatcaatttggaatatataaagtgtactaaaaactcaactgaagtcaggcatggtagctcatgcttgtaatctcaccactttgggaggccaagatgggaggagtgcttgaggttaggcgttccagaccagcctgggcaacatagtgagactcttgtctctacaaaaagtttttttaaaaaattaactgggcaccatgacacacaccagtagtcccagctactagggaggcaggaggatcacttgagcccaggagtttgaggctgcggtgagctgtgatcacaccaccacactccaacctgtgtaacagagtgaggcctcatctcaaaaaaaaaaaaaggccacaaaactcaacaataaaaacaaacagtccaattagaaaatgggcaaaagacatgaatagatgtttcactgaagaggatctatagatggcaagtaagcatatgaaaagctgttaaactccataagtcatcagggaatgcaaattgaaaccacagcgaggctatgacttacttatctcaatggctaaagaaaaaatagtgaaaataccaaatactgatgaggatacaaactggatattttatacattgctgacaggaatgtaaaatggtacagccactctgggaaagagtttatgaatttcttatcaagttaaacataattttttaatcaagttaaacataagacccagcagttgtgctcctggacattcattccagagaaatgaaaacctatattgtacttgtactcaaatattcataggagctttatttgtaatagccccaaactggaaacaacccagatgtcctacaacaggtacatggttaaacaaaccatccataacttggaatactgctctggaatgaaaaggaactaactgttgatacaagaacttggttgtacctcaggggtattatggtgaacaaaaaaaaaaccagtctcaaatggtcacatactgtatgatcgcatttatataacattcttgaggtgacaaaattattgaaatgaagaacagattaatggttgccagggatagggactggagggggtgtggggtatgtatgactataaagggatgacgcaaggagttcctttgtgctgatggaacagttctatatgattatgatgattacgatgttgattataacatttgattatgaggttaagcacatgaatctttacctgtgctgaagttgtatggacctacatacacacaaatgaatgcatgtaaaatctggtgatactgaataaagtctgtagtctagatagcagtataatattattgtcaatgtcttggatgtgaagttgtgctatagttacaaaaccgtaccactggaggaaactgggtaatggatacatgggactctgtactatttttgcaacttcctataagtatataattattgcaaaatgaaaagttgtaagttttaagtaaggaactgggacgtatggtacctattttatgaaataagaaaagggtgctagaaaatttgaggggaata

SEQ ID NO: 233126 - DNA, 2384 bp, Homo sapiens
ggacgcgtgggtcgacccacgcgtcgcagcagtagagctgcccaagatcctgtgccaggaggagcaggatgcgtataggaggatccacagccttacacatctggactcagtaaccaagatccataatggctcagtgtttaccaagaatctgtgcagtcagatgtcggcagtcagcgggcctctcctacagtggttggaggacagactggagcaaaaccaacagcatttgcaggaattacaacaagaaaaggaagagcttatgcaagaactttcttctctagaataaatcaggagacaaaatggggaaagatgaaaatatccagtgtaaagttacttaagctaaatcaatttcaaagaagaaaaacttggaggactcattttacctgacttcaagacttactataaagctatagtaatcaagatagatggtattggcagaggaacagacacatacgtcaatggaacagatgagagaacccagaaataaacccatataaatatgctcagctgattttgaaaaagtgaaaaagcaattcaatggaggaagaatagcctttctgacaaattatgctagagcaattagacacccatggcgaggagaaaaaagaacctctacttaaacctcacatcttatataaaatttaactcaaaatgtataacggacttaaatgtgatacataaaactagataactttgaaaaaagccacaggagaaaaatcttcaggatcttgggctaggtgacaagttcttggactttgccccgaaagcacatccataaaagacaaaatctgatatattggacttcttcaaaatttaaaaacttgtgatttaagaagaggaaaagataagctacagattgagatgaatttgcaaaccatatatctgatcaatttggaatatataaagtgtactaaaaactcaactgaagtcaggcatggtagctcatgcttgtaatctcaccactttgggaggccaagatgggaggagtgcttgaggttaggcgttccagaccagcctgggcaacatagtgagactcttgtctctacaaaaagtttttttaaaaaattaactgggcaccatgacacacaccagtagtcccagctactagggaggcaggaggatcacttgagcccaggagtttgaggctgcggtgagctgtgatcacaccaccacactccaacctgtgtaacagagtgaggcctcatctcaaaaaaaaaaaaaggccacaaaactcaacaataaaaacaaacagtccaattagaaaatgggcaaaagacatgaatagatgtttcactgaagaggatctatagatggcaagtaagcatatgaaaagctgttaaactccataagtcatcagggaatgcaaattgaaaccacagcgaggctatgacttacttatctcaatggctaaagaaaaaatagtgaaaataccaaatactgatgaggatacaaactggatattttatacattgctgacaggaatgtaaaatggtacagccactctgggaaagagtttatgaatttcttatcaagttaaacataattttttaatcaagttaaacataagacccagcagttgtgctcctggacattcattccagagaaatgaaaacctatattgtacttgtactcaaatattcataggagctttatttgtaatagccccaaactggaaacaacccagatgtcctacaacaggtacatggttaaacaaaccatccataacttggaatactgctctggaatgaaaaggaactaactgttgatacaagaacttggttgtacctcaggggtattatggtgaacaaaaaaaaaaccagtctcaaatggtcacatactgtatgatcgcatttatataacattcttgaggtgacaaaattattgaaatgaagaacagattaatggttgccagggatagggactggagggggtgtggggtatgtatgactataaagggatgacgcaaggagttcctttgtgctgatggaacagttctatatgattatgatgattacgatgttgattataacatttgattatgaggttaagcacatgaatctttacctgtgctgaagttgtatggacctacatacacacaaatgaatgcatgtaaaatctggtgatactgaataaagtctgtagtctagatagcagtataatattattgtcaatgtcttggatgtgaagttgtgctatagttacaaaaccgtaccactggaggaaactgggtaatggatacatgggactctgtactatttttgcaacttcctataagtatataattattgcaaaatgaaaagttgtaagttttaagtaaggaactgggacgtatggtacctattttatgaaataagaaaagggtgctagaaaatttgaggggaata

SEQ ID NO: 233127 - DNA, 2854 bp, Homo sapiens
atttagtaattaaaagcaatgaggtcgggccaagatggcggtgcaggtggtgcaggcggtgcaggcggttcatctcgagtctgacgctttcctcgtttgtctcaaccacgctctgagcacagagaaggaggaagtaatggggctgtgcataggggagttgaacgatgatacaaggagtgactccaaatttgcatatactggaactgaaatgcgcacagttgctgaaaaggttgatgccgtcagaattgttcacattcattctgtcatcatcttacgacgttctgataagaggaaggaccgagtagaaatttctccagagcagctgtctgcagcttcaacagaggcagagaggttggctgaactgacaggccgccccatgagagttgtgggctggtatcattcccatcctcatataactgtttggccttcacatgttgatgttcgcacacaagccatgtaccagatgatggatcaaggctttgtaggacttattttttcctgtttcatagaagataagaacacaaagactggccgggtactctacacttgcttccaatccatacaggcccaaaagagttcagagtcccttcatggtccacgagacttctggagctccagccagcacatctccattgagggccagaaggaagaggaaaggtatgagagaatcgaaatcccaatccatattgtacctcatgtcactatcgggaaagtgtgccttgaatcagcagtagagctgcccaagatcctgtgccaggaggagcaggatgcgtataggaggatccacagccttacacatctggactcagtaaccaagatccataatggctcagtgtttaccaagaatctgtgcagtcagatgtcggcagtcagcgggcctctcctacagtggttggaggacagactggagcaaaaccaacagcatttgcaggaattacaacaagaaaaggaagagcttatgcaagaactttcttctctagaataaatcaggagacaaaatggggaaagatgaaaatatccagtgtaaagttacttaagctaaatcaatttcaaagaagaaaaacttggaggactcattttacctgacttcaagacttactataaagctatagtaatcaagatagatggtattggcagaggaacagacacatacgtcaatggaacagatgagagaacccagaaataaacccatataaatatgctcagctgattttgaaaaagtgaaaaagcaattcaatggaggaagaatagcctttctgacaaattatgctagagcaattagacacccatggcgaggagaaaaaagaacctctacttaaacctcacatcttatataaaatttaactcaaaatgtataacggacttaaatgtgatacataaaactagataactttgaaaaaagccacaggagaaaaatcttcaggatcttgggctaggtgacaagttcttggactttgccccgaaagcacatccataaaagacaaaatctgatatattggacttcttcaaaatttaaaaacttgtgatttaagaagaggaaaagataagctacagattgagatgaatttgcaaaccatatatctgatcaatttggaatatataaagtgtactaaaaactcaactgaagtcaggcatggtagctcatgcttgtaatctcaccactttgggaggccaagatgggaggagtgcttgaggttaggcgttccagaccagcctgggcaacatagtgagactcttgtctctacaaaaagtttttttaaaaaattaactgggcaccatgacacacaccagtagtcccagctactagggaggcaggaggatcacttgagcccaggagtttgaggctgcggtgagctgtgatcacaccaccacactccaacctgtgtaacagagtgaggcctcatctcaaaaaaaaaaaaaggccacaaaactcaacaataaaaacaaacagtccaattagaaaatgggcaaaagacatgaatagatgtttcactgaagaggatctatagatggcaagtaagcatatgaaaagctgttaaactccataagtcatcagggaatgcaaattgaaaccacagcgaggctatgacttacttatctcaatggctaaagaaaaaatagtgaaaataccaaatactgatgaggatacaaactggatattttatacattgctgacaggaatgtaaaatggtacagccactctgggaaagagtttatgaatttcttatcaagttaaacataattttttaatcaagttaaacataagacccagcagttgtgctcctggacattcattccagagaaatgaaaacctatattgtacttgtactcaaatattcataggagctttatttgtaatagccccaaactggaaacaacccagatgtcctacaacaggtacatggttaaacaaaccatccataacttggaatactgctctggaatgaaaaggaactaactgttgatacaagaacttggttgtacctcaggggtattatggtgaacaaaaaaaaaaccagtctcaaatggtcacatactgtatgatcgcatttatataacattcttgaggtgacaaaattattgaaatgaagaacagattaatggttgccagggatagggactggagggggtgtggggtatgtatgactataaagggatgacgcaaggagttcctttgtgctgatggaacagttctatatgattatgatgattacgatgttgattataacatttgattatgaggttaagcacatgaatctttacctgtgctgaagttgtatggacctacatacacacaaatgaatgcatgtaaaatctggtgatactgaataaagtctgtagtctagatagcagt

SEQ ID NO: 233128 - DNA, 2798 bp, Homo sapiens
actatatacctaattatgggcacgcctcaacaaacgatcgatcgctaatagtctaattgcgaggaatcggacgcttaacttgttatagcatacgttatatcgataggtcgtcatttccaacggctatactggtacagtattgccgcgggaaatgttctgaaccatttatagtgacggtagtggcctttcaccaatgttgattgttcgccacacccatgcatgatatgcacactcatggactcaaggtcgtttggtacggacgtgtagtattcttatccgtgtcttcattataagattataaaacacaatcgacatgggcggccgatttaacacgctgtttccgagtccatacaggccctccacgagttcagagtatgagagaatcgaaatcccaatccatattgtacctcatgtcactatcgggaaagtgtgccttgaatcagcagtagagctgcccaagatcctgtgccaggaggagcaggatgcgtataggaggatccacagccttacacatctggactcagtaaccaagatccataatggctcagtgtttaccaagaatctgtgcagtcagatgtcggcagtcagcgggcctctcctacagtggttggaggacagactggagcaaaaccaacagcatttgcaggaattacaacaagaaaaggaagagcttatgcaagaactttcttctctagaataaatcaggagacaaaatggggaaagatgaaaatatccagtgtaaagttacttaagctaaatcaatttcaaagaagaaaaacttggaggactcattttacctgacttcaagacttactataaagctatagtaatcaagatagatggtattggcagaggaacagacacatacgtcaatggaacagatgagagaacccagaaataaacccatataaatatgctcagctgattttgaaaaagtgaaaaagcaattcaatggaggaagaatagcctttctgacaaattatgctagagcaattagacacccatggcgaggagaaaaaagaacctctacttaaacctcacatcttatataaaatttaactcaaaatgtataacggacttaaatgtgatacataaaactagataactttgaaaaaagccacaggagaaaaatcttcaggatcttgggctaggtgacaagttcttggactttgccccgaaagcacatccataaaagacaaaatctgatatattggacttcttcaaaatttaaaaacttgtgatttaagaagaggaaaagataagctacagattgagatgaatttgcaaaccatatatctgatcaatttggaatatataaagtgtactaaaaactcaactgaagtcaggcatggtagctcatgcttgtaatctcaccactttgggaggccaagatgggaggagtgcttgaggttaggcgttccagaccagcctgggcaacatagtgagactcttgtctctacaaaaagtttttttaaaaaattaactgggcaccatgacacacaccagtagtcccagctactagggaggcaggaggatcacttgagcccaggagtttgaggctgcggtgagctgtgatcacaccaccacactccaacctgtgtaacagagtgaggcctcatctcaaaaaaaaaaaaaggccacaaaactcaacaataaaaacaaacagtccaattagaaaatgggcaaaagacatgaatagatgtttcactgaagaggatctatagatggcaagtaagcatatgaaaagctgttaaactccataagtcatcagggaatgcaaattgaaaccacagcgaggctatgacttacttatctcaatggctaaagaaaaaatagtgaaaataccaaatactgatgaggatacaaactggatattttatacattgctgacaggaatgtaaaatggtacagccactctgggaaagagtttatgaatttcttatcaagttaaacataattttttaatcaagttaaacataagacccagcagttgtgctcctggacattcattccagagaaatgaaaacctatattgtacttgtactcaaatattcataggagctttatttgtaatagccccaaactggaaacaacccagatgtcctacaacaggtacatggttaaacaaaccatccataacttggaatactgctctggaatgaaaaggaactaactgttgatacaagaacttggttgtacctcaggggtattatggtgaacaaaaaaaaaaccagtctcaaatggtcacatactgtatgatcgcatttatataacattcttgaggtgacaaaattattgaaatgaagaacagattaatggttgccagggatagggactggagggggtgtggggtatgtatgactataaagggatgacgcaaggagttcctttgtgctgatggaacagttctatatgattatgatgattacgatgttgattataacatttgattatgaggttaagcacatgaatctttacctgtgctgaagttgtatggacctacatacacacaaatgaatgcatgtaaaatctggtgatactgaataaagtctgtagtctagatagcagtataatattattgtcaatgtcttggatgtgaagttgtgctatagttacaaaaccgtaccactggaggaaactgggtaatggatacatgggactctgtactatttttgcaacttcctataagtatataattattgcaaaatgaaaagttgtaagttttaagtaaggaactgggacgtatggtacctattttatgaaataagaaaagggtgctagaaaatttgaggggaata

SEQ ID NO: 233129 - DNA, 666 bp, Homo sapiens
atttagtaattaaaagcaatgaggtcgggccaagatggcggtgcaggtggtgcaggcggtgcaggcggttcatctcgagtctgacgctttcctcgtttgtctcaaccacgctctgagcacagagaaggaggaagtaatggggctgtgcataggggagttgaacgatgatacaaggagtgactccaaatttgcatatactggaactgaaatgcgcacagttgctgaaaaggttgatgccgtcagaattgttcacattcattctgtcatcatcttacgacgttctgataagaggaaggaccgagtagaaatttctccagagcagctgtctgcagcttcaacagaggcagagaggttggctgaactgacaggccgccccatgagagttgtgggctggtatcattcccatcctcatataactgtttggccttcacatgttggtaagtatcatggggttgcaatgtttattgttttcagaaattaatatcatgtttccttttccattacatagggtatggttattttaaaccaaaatttgactgtcctttagcagatgtcattattttgatttattttattatgtattaaaagtaatgatttatgtcatattgattgtttttaataagtctgtcagttgatataaaaaaattaaactgttaactgaaaatt

SEQ ID NO: 233130 - DNA, 565 bp, Homo sapiens
ctcatgaatagattaatgctgttatttcagaagtggtttccaaaaggataagtttggctctctgttctcaatctctctctctcttctctcttttttctctttctttctctctctcttttttctttctctctctctctctctcactttccttctctctctccctctctcctgccctttctttctgtctccctccctctcatcccaccctttgcccttcctccctaggatgatgtagcaagaaggcccttgcaaggtgccagcccctcaaccttgtacttcccagcctccagaaccatgagccaatacatttttgttcattataaattactcagtctgttctattctgttacagcagtacaaaatgggttaacacaaacagttaccacaccaaacctgtaaaaaatacctctcaacttttaaaaaaaaagagaatatgccaggtactatggcacattcctgtaatcccagctactcaggaagctgaggcaggaggatggcttgaacccaagagtttgctccactgccctccagactggggggcagaaagaggccctgtctcctgtaa

SEQ ID NO: 233131 - DNA, 647 bp, Homo sapiens
tttttttttgactagagactttgtactgaccaaagtgtcactaagcctgaattaagtccttattatatatctaagtaaatgaatggctattaagaaacaagtcagtagcatatgaagctggcgattcccctattaagaatcccaaaggatttgttcttaagtttccagaagacatattacagaagatggctgaaaccagctagccgagctgatgtgattagtccctaatctgaagcattaaccttcctaaccagttaggggatgatttttagccagtgactccatttatagaacttttttttttttttgagacaaggtctcactctgttcccaggctggagtacagcacgaatgatcatagctcactgcagcctcaacccactgtagtcagtaacaactgcagtattctggccttctgagagtccctactaggtggttccgccatttgcttctagttctaaattttgcaatttttttctttgtattcctgctcattccctgtcatctctctccccaccccagaaagtgttacatggccaaagagtgaatcaacaaatatttttgagcccttaatacgtgctaggtaacatgctagctgccgtggacacagcagaggcactggatccccttttccaggcatgcctttc

SEQ ID NO: 233132 - DNA, 933 bp, Homo sapiens
tttttttttgactagagactttgtactgaccaaagtgtcactaagcctgaattaagtccttattatatatctaagtaaatgaatggctattaagaaacaagtcagtagcatatgaagctggcgattcccctattaagaatcccaaaggatttgttcttaagtttccagaagacatattacagaagatggctgaaaccagctagccgagctgatgtgattagtccctaatctgaagcattaaccttcctaaccagttaggggatgatttttagccagtgactccatttatagaacttttttttttttttgagacaaggtctcactctgttcccaggctggagtacagcacgaatgatcatagctcactgcagcctcaacccactgtagtcagtaacaactgcagtattctggccttctgagagtccctactaggtggttccgccatttgcttctagttctaaattttgcaatttttttctttgtattcctgctcattccctgtcatctctctccccaccccagaaagtgttacatggccaaagagtgaatcaacaaatatttttgagcccttaatacgtgctaggtaacatgctagctgccgtggacacagcagaggttctaggagcaatctacctgaactaaaactctttgatcttggcagtgccgaaggcatttttccaggatgcaatagtgaacaggtttaaagcgaggctatgcccttgtttgttcatgccctgactctggtatgaggaaaaaaaaacccaaagtaattaaagactgttttcagacgagttcaacaaaacaaaggaatttaaattgtctgaatttgtggtaaagcttcaaatgtgactctaagcaatgacctttctatttctgccagaagttaacctattggtggaaaagctgtgtaactaaagacattgttccccaaac

SEQ ID NO: 233133 - DNA, 223 bp, Homo sapiens
agaaaaacctaagatttgtggaggcattgatctcgctactgtcaaggcttattagcatcttgaggagaaggaaactgaaaaactgccaattccctgtcagtttaaggctaatcacagttagatgctatggaggaaggtgaaactgagttctcacttgtctctcggtatgaaaccgaattagatatgattaactcccaaatatatacaaaacaaaaacaattaa

SEQ ID NO: 233134 - DNA, 480 bp, Homo sapiens
agttaagcctccctaactatatgaatggaccccttctcccttttggagttcaggaaaagccaaccagcattaatatcaacatagaccttaagtctgataagaaatatttgcaatctattctctctgaagacctgctacctggaggtctcatctgcatgatgaaaccttggcctccaccaccccttattattacccagacatttatttatattgataataactcttttaaccaattgccaatcagacaatttttaaatccacctatgacatggaagccccctccctttctatttgttccaccgtttcagatacaaccaatgtaaagcttacatgtattgattgatgtattgtgtctccctaaaatgtgtaaaagcaagctgtactccaaccaccttgggcacataccatcaagacctcctgaggctgtgtgatgggcacatctttaaccttggcaaaataaactttttaaattgattgaga

SEQ ID NO: 233135 - DNA, 541 bp, Homo sapiens
aggtaagagatgagacaaagaaaaagacactagagaaatctgaaacctctggctatatttatatttgtaacatacaactatagcaaacactaaagacaaacgaacttctctgccagacgaccattaattcttatactaaatgcctatttacttcacttcctagtactcgatacattgtatctgactttcaacaaaaaattataagacatgtcaaatgacaagaaaaaaacattctgaagagacaaaacaatattaagaactagactcagatatgaaacatatgttgtaattattatggaatttaaagtaactgattaatatattaaggtaattaatggaaaaaatagacatgaaagaacaggtggataatgaagtagagagatggaaactctagaaaagtatcaaaaggaaatgctagaaatgaaaaacactaacagaaatgaagaatgcctctgataggctcattagtggattagacacagccaaagaaagaatcagtgagcttgaagatagatcaatgaaaactttccaaactgaaatt

SEQ ID NO: 233136 - DNA, 412 bp, Homo sapiens
attgataatcaaaaaaacctcccaaaaagaaaaacccaggatctgatggctttattggttaattctacccaacatttaaacaaaaattaatgccaattgttttcaaacccttaaaaattcaagagcagggagcacttacatcatgagaacagcattaccttgacaccaaagctagatagttggacactataagaaaagaaattataagccaatatccatgatgaacatagatgcaaaaatccttaacaaaataccagcaaactgaattcaattacacattaaaaggatcatacgccacaatcaagtggatttatctctgggctgcaaaggtagttcaacacatgcaaatcaataaatgtgatacaccacaataaccaaatgaaggacaatcatatgttcagttcaatagatg

SEQ ID NO: 233137 - DNA, 387 bp, Homo sapiens
gcagctgggacttgtgccttctgtccagtgccttccactcctgtagagcaccccaccttcctgccggtgctgcataagcacaggctcctgcagggctgcgccccctggaacggcttcccagagcctccacaagcacgggctcctgcagggctgcgccccctgaaacggcttcgcagagcctccactagcacaggctcctgcagggctgtgccccctggaacggcttcgcagagcctccactagcacaggctcctgcagggctgtgccccctggaacggcttcccactgcagggctgcgccccctggaacagcttcccagagcctccaccagcatgggctcctgcagggctgcgcccccggaacggctttgcagagcctcccagggtg

SEQ ID NO: 233138 - DNA, 496 bp, Homo sapiens
agaagcaagtcagttgggcacagtggcttccacctgtaatcctagcactctgggaggctgaggctggtctcgaactcccgatgtcaagtgatctgcccacctcggcctcccaaactgctgagatcacaggcatgagccaccacgcctggcctcgactttgttcttttgcatgtggatatgctgttttcccctcaccatttgttggagagaccttcttttccctattgagtagtcttggcacccttgtcaaagatcatttgagcatatacgtaagggtttatttctgggtctttgtcctgttccattggtccgtatgtctgtctttatgacagtgccacactgttttgattactgtagctatgttttgaatcaggaagtgtgggtcctccaactttttttttcctcggaattgtttttgctatttggaggtctgtatgtattcttttttgatgtacctataaatatattttagtgtggataaatatgtgcatgtaaa

SEQ ID NO: 233139 - DNA, 139 bp, Homo sapiens
caggaaatttaaaaggaatatgtttatataacgacactcagtataaggtatgtagcccaggaaatgactggccagatgtgtgttatgacccctttgagcctcccatgtccacagtttttgaaataaaattaaggactga

SEQ ID NO: 233140 - DNA, 952 bp, Homo sapiens
ttcaggagataaagttgggctttttgaaaactaatacttttgtcctcgcctcagcatcaaaatgggtgcttttgggaagagacatctagggacttgaccaaaaccaggattcttcctaaaaaccagagcttaaatgttttaaacaaccaaaataagtttcttccccctgagatacagaagaacaagcaacaagaaaaaaaaaagaaagaaattaggacattagatttcaatgtcccagtgaatgccttaccaataacgattcccttttcctgccaaacactggtgacctgttgtttctcctattttctccctggacagttgagaaattattgcatgatttatctttagtgcaggtacaacaaggatatggccacatattaccccaaatgagggattcgtatcacattattttccattggtgagtaatcgacgggaaatgggaaatgtcacttcaaggcgggctggccatctggtggaagcatctccatgaacacagcagctgatctacatggaaatattaaagcaacaaagtctgaagctgttttgcttctccagggaacttcagttcatgcatggaaggaaggcaataaagtccaattattctggacgcagctacacaaggcatatgaaaattatctcatggagggtagcgctaagctaagtattttttaaaatagccatcagtcactcccggcaacaaaatcaaataaaccaatcaatctctaaggaactcctcattaatcaaaagacggtggtgagaagttggcaatttttcattattctacgtgtaatattttaaatctgacatgctgacagggtggtctgaacatgtgaaattatcacgtccgagaggaggaacagttgagcttcacagtgttggacccctcacgtgttacctatttattgtgaatcttcaagtttgcccttttaaggtgtttgctttcttcttatt

SEQ ID NO: 233141 - DNA, 356 bp, Homo sapiens
cccgctgggccgtggaggggcggtggccctttgtgcagttagaccccccagggagtgcagttgtgaactaatcaccgcctggagagcctgtgtgcctcacacttcctccaggactgcactaatccccactcccacccccaactgccagcccctggccttggccccctccttccaaggtgcctctgctggtccaggaacatgccacctcctctcccagctgcacatgggctttccaaaaaggcccatcctgcctgctagtcatttttggtttgctcagtttactttaagaaaacccatttgcttgccagtgtttttggttggctagcttgtgataaacacttatcaaccacttatat

SEQ ID NO: 233142 - DNA, 738 bp, Homo sapiens
ggaacatgagtcagttatatcagggtgatctttcttaatatgtttattttgatttaatatagtctgcttgttttatcctatttttttcatagcagcaattcagatttcttattaaacatttctaactaaaatttgagtcagtatttttttactgcttgtgcattcaatagtactgtaactatacaagcaatttttgttgggttttttgttttggttttacattatatgtaaatataagtgaaaagtaaaatgtttaacattttctcgtttaaaagccattcctagggagtagtgactgtgttaatcaaatatcagggaaacttaaactgggaaaagaagtcctagctactttggaaggtcattgggatagtgaagtttttattactgataaaaagactgataattcagaggttttctggaatccaacacctgacattaagcaatggagattaataaggcacactgtaaaatttgaagaacagggagattttgaatcagagaagtaagtatactgttttacagctaacttcatgaggatcagagagtagtttttcaattccttaatgatatggtcattttgtcaccttctgtcatatcttaattcagcaaaatagtttatcatttgtggaagtgacagtattctgtttttgtgtatatgaatgtcaaatataatataaatcgtcttgcttttctgtagctcaaaactactcatttttttctttctcaattgttccagca

SEQ ID NO: 233143 - DNA, 710 bp, Homo sapiens
ggaacatgagtcagttatatcagggtgatctttcttaatatgtttattttgatttaatatagtctgcttgttttatcctatttttttcatagcagcaattcagatttcttattaaacatttctaactaaaatttgagtcagtatttttttactgcttgtgcattcaatagtactgtaactatacaagcaatttttgttgggttttttgttttggttttacattatatgtaaatataagtgaaaagtaaaatgtttaacattttctcgtttaaaagccattcctagggagtagtgactgtgttaatcaaatatcagggaaacttaaactgggaaaagaagtcctagctactttggaaggtcattgggtaagtattttgtatatgagctttacaaaaagaattttattctgtgggaaaaaaaaaatcacatttaaaatttaaaacttattccgttgctgaaaacatcactatttaacataagcttcatcttaatagcagatattttggtggtgttctgttatcaacagtagttaattttgtgtaatattttatttccaaaacttaaaatcagtagaaatagctaacacttatatatgacttactgcattatttaagaatgttactcatattaactgatttaatatttataacatataacgctatgaggtgagtatataggtgccatgcccattttattattgtttattattg

SEQ ID NO: 233144 - DNA, 7204 bp, Homo sapiens
cactagaatgtgaaggatcttcgcggttctgggtgcccagaaaggcggcgacgcggcggatgacaacattaggccgcgacgcgctcctggccaggcggcggctgtagtgttagctttggacgccgcagtagccgctgccggtagcaagccgactgagggaaggtgggggtccgcccgggctggtggacctcggggccgaaagttcccgccccgctcgggggctgagccggcagtgcctccgcggccgctgggcagcgcccttcgtccaggctcgcgccccagctgccgccgacgacagcggccgagagaagttggggtctgactagacgcttacggggcctcggaccccggcgccgcggcgacctcggaggaaccggctccttgcgtcccgcctccctgggagctccgcacgggatttgcagatttacagaatggctgcacattaatggaaagagaagcataaacctatcttctttcattatggagggaggtttggcagatggagaacctgatcgaacttcgctgttgtagcaaacagtgacgaatctcagcttctgacaccaggaaagatgagtcagcgccaaggaaaagaagcttatccaacgccaaccaaagatttgcatcagccatctcttagtccagcaagtcctcatagccagggttttgaaagagggaaggaagatatttctcaaaataaagatgaatcttcactttctatgtcaaagagcaagtctgaatctaaactttataatggctcagagaaggacagttcaacttcaagcaaactcacaaaaaaagaatctcttaaggtacaaaagaaaaattaccgagaagaaaagaaaagagccacaaaggagctgctcagtacaatcacagatccttctgttattgttatggctgattggttaaagattcgtggtactctaaagagctggaccaagttatggtgtgtgttgaaacctggggtgctactgatctataaaacccaaaaaaatggtcagtgggtaggaacagttcttctgaatgcctgtgaaatcattgaacgtccatcaaaaaaggatggcttttgtttcaaacttttccatcctttggagcaatctatttgggcagtgaagggtccaaaaggtgaagcggttggatccattactcaacccttacctagcagttatttgatcatccgagctacttcagagtcagatggaaggtgctggatggatgctttggagttggctttgaaatgttctagtcttcttaaacgtacaatgatcagagaaggaaaggaacatgacctgagcgtttcatcagatagcacacatgtgactttctatggcttactacgtgctaacaatctccacagtggtgataacttccagttaaatgatagtgaaattgaacgacaacattttaaggaccaagatatgtattctgataaatctgataaagaaaatgatcaagaacatgatgagtctgataatgaggtgatggggaaaagtgaagaaagtgacacagatacatcagaaagacaagatgactcatatatcgaacctgagcctgttgagcctttaaaggagactacctacactgaacagagccatgaagaacttggagaggcaggtgaggcttctcaaacagaaactgtatctgaagaaaacaaaagccttatctggacactattgaaacaagtccgtcctggcatggacctatccaaggtggttctgcctacatttattttggaaccccgttctttcctggataaactttcagattactactatcatgcagatttcctatctgaggcagctcttgaagaaaatccttatttccgtttgaagaaagtagtgaaatggtatttgtcaggattctataaaaagccaaagggactgaagaaaccttataatcctatacttggcgagactttccgttgtttatggattcatcccagaacaaacagcaaaactttttatattgctgaacaggtgtcccatcatccaccaatatctgccttttatgttagtaatcgaaaagatggattttgccttagcggtagtatcctggctaagtctaagttttatggaaactcattatctgcaatattagagggagaagcacggttaactttcttgaatagaggtgaagattatgtaatgacaatgccatacgctcattgtaaaggaattctttatggtacaatgacactggagcttggtggaacagtcaatattacatgtcaaaaaactggatacagtgcaatacttgaatttaaactaaagccattcctagggagtagtgactgtgttaatcaaatatcagggaaacttaaactgggaaaagaagtcctagctactttggaaggtcattgggatagtgaagtttttattactgataaaaagactgataattcagaggttttctggaatccaacacctgacattaagcaatggagattaataaggcacactgtaaaatttgaagaacagggagattttgaatcagagaaactctggcaacgggtaactcgagccataaatgccaaagaccaaactgaagctacccaagagaagtatgttttggaagaagctcaaagacaagctgccagggatcggaaaacaaaaaatgaagagtggtcttgcaaattatttgaacttgatccactcacaggagaatggcattacaagtttgcagatacccgaccatgggacccacttaatgatatgatacagtttgaaaaagatggtgttattcagaccaaagtgaaacatcgtactccaatggttagcgtccccaaaatgaaacataagccaaccaggcaacagaagaaagtagcaaaaggctattcctccccagaacctgacattcaagactcctctggaagtgaagctcaatcagtaaaaccaagtacaagaagaaagaaaggaatagaactgggagacattcagagttccatcgaatctataaaacaaacacaggaagaaattaaaagaaatattatggctcttcgaaatcatttagtttcaagcacaccggccacggattattttctgcaacaaaaagactacttcatcattttcctcctgattttgcttcaagtcataataaacttcatgttcaagtagaagttctctaccattgaatcagtgaactagaaagatctgatttggcctgggaccagtgttcaagttggtttggtctttattaaaaatcacaatattccgaaaacaaaaaaacctaggagataaatgtagaggtattgacttttcgtatcttttatcttcacactgaaacaagagctatcctatttgattattaaagtgagctatgtgttaagtgccaggacatttctagcttttgtgagaatgtgtctacatatgagtataataaacccacatgtatacacaattgtctcttatgtactcctacctgacagtagtctttgtattctatagtatgttctgagatataatgttaacattgttcataacaaaaaatgctatcaatcttataaatatatgtaatctattttcttcataaaacaggcacaaaagttttatcagtaaggaattacagattgagaaatgatggaataatagacataattaattcaatacactactgttaaaatcatttgcaaagcactcagctcaattatcttcttagaaagaaagaaaaagtatgaatggtcaaaatgaatacatcgagagagataaatggcaaattgcttttttaaaagtttacataagttttttttaacccctagaatttaatatttgtagatgcaggtaaatatatatacttacgtgtatatcagtataaaaacactggtgtgcaattaattggattgattataataccaccttaagcacttgctgaaaaaagtgtggtcaaaattgattgctgtccttttgtcttatttttgtttttcttaagtcagctggttcataacataggccaaattctagagatgtttatagagcatttgaagtgctgataatttatgttttttcattatgaaaacttattttagctttagactccagtgtgttcagtgaataagtagaatataaaaaaatataaccagtattttacttcaaaagccaaaaagaggcaataagaaaagacactttgtggtggcctttatgtgtgcattaaaattggtttctgtaaaacgtgtaataagttgagtatctacgaagagtatcaagttctgaagtttaatttttttattatcctcctctcttcttagtaacttctttctgtggcaaaaccacaattctttaagattcctattgttcaggctaaggcaaatttttttgtttgtttcttcagtttaatattttgattttgtgtttttacgtaaatatttatattccttgaaagcaatttttgccaaggtagttcagtttaggaatatgttgttctaaaatatgtcttagaatcctgaaagcatagattttgaaatgtttttttaatgaaaatgaaggtcagagagaataattgccctgaccacatttgcctttcagtaggaggaggctgtgaaatagtaaaattataatcgtttatgccatgataaatacaagattggtaaataaatacattgattggtaaattatgagaatcaaaatgataaaaagagcctgcttttttccctaaccaatatagctatcttaagtatccttaggtttctgtgaagaaccatttcccatgttttcttggcaaaataatgctgtattccatatgtacatgtgaaatgatgttttaaattgataaaagcttaaataagatctacctatacccagtattttcatgatattagaacaaatgggtttttggttatattttatatttgtcaatataatttttgtattcacattctgttacactctgcctattcattgatatatgatattctgtaaatattgtacaatttgatcttttttatggtttaaattagttaattacatacaaattgattggcttatcacaaaaatcatttcatcagtaaaccttgttaacattttgtactggtgacccacctcttaggactttggtcttatccacgtgtatgttgttttcatttggtccaaataatattttatttgtatgggtatcttctaagactaaataggtagttgtgttctttatttttaaaatttctttttagagcaaatgttatgggttcttacccaaagagtcaaaaactatttcttaagaaagagcagagttattcatgactgttctttatacactaaaagcatgcatctaatctaatagtcctcttattatgcttttagttgtatgagtctctttctatgaactgaacacaaaactcaggaattggtggcttaattttagatcagtgcttgtactaggcttagttatatgaatctttataacacataattactaactttgtagccatatatgtaattgactttgaatgttatttacctgaaattaatcttccttcacacatggaccgtaaacggttcccagttgtctgagagcctcatgagggtttctaggatttatgaccttatgaccagtttttttcatttaccaagattttattttcctacatgaaaatttaattgagtaataattattcacatgtgcattttctttttagctgttaaatgtactatgccatcatccaccatttagtaaaatgtagctggcccaggacatgtaaaaaaaaaaaaaaacaacaacaataaatagggcatgtgaaatgttaagttacagcaatagatattttatttgtatttcatgttagtacttttttgttttatatcacttataaaggtacagtgtactctttgtcacagctcagttggtaaccgcattccattgaaaagttggccttgtaaaatacaactctcatttaatattcatgcttttgtgcctttaagaaaatattttttgtcattttttgtgttacagaactataatgtgattcaaggtgtttataggcttgtcataaaagggtcatttctgtgtgttactttctttttatatagctatagtatatttaaacaataatactatcttttataggggtttgtctatttacctattctttactcagacattgatgtagacttgtcagattattctgagtattgttaacagtgccttttcgatggaatcacactttttggctgtcaccttgtgccatatacacacaaaattttgtggaaggcagttttaactttctgaagaatatctgtcaaaatttaagaaaacaaatgtataaaattccattttttccagtgtttagcatttctagtaagcagtgaggttgtttgacatacagtgatgatggcattattgataagccatacatgagactgcagattatattgaatcatattaaatgtacagaaataaaatattagatttatatcaaattttccaatttgaaccagtggggaaaatcccacagaaatcagtaagtttacatttcaatttctatcttatttgactaagtggaaagagattctttaaaatgtataacctgccattatgtaatttggtttcattttattctacctgttgtgtgagtttagtatatttaatttactttttgttactctttacatactgtttatttttgttagtttttaattgaagatggactgttgaaattgtataggaccagtgtcttattaatatgattaatatatttagaagagccacgtgaaacccatgacaaaatgaatgtgaatattctttctaaaaatttagaaaatgttatctttttgcatttattatgtaaaactgttttacagtatcaaaatttttcacttaaagaaaaaaaatgccatgaaacatttgaactgatgagccacagaacttcagttgaaatttttttcactttttagcatgctaaatatacatctgagtttaaatgttctgtttaatggccattcataaattcaagcactaccactggtcagttttgtgtgatagaataaaaatatgttacctgcagtgtaagtacagcacactgtcaaattcttttccttaaggtgcacagtaaatgtacagatagttataggccactgttttgtaatgtagtacatttctaatctattattcctaacctattataactgtttgcagaaagaaaagaatttttctaataatctgtaaaattatgctaacttctacaagtaggcttctaaataaaatttttaaaaagagaaaa

SEQ ID NO: 233145 - DNA, 7241 bp, Homo sapiens
cactagaatgtgaaggatcttcgcggttctgggtgcccagaaaggcggcgacgcggcggatgacaacattaggccgcgacgcgctcctggccaggcggcggctgtagtgttagctttggacgccgcagtagccgctgccggtagcaagccgactgagggaaggtgggggtccgcccgggctggtggacctcggggccgaaagttcccgccccgctcgggggctgagccggcagtgcctccgcggccgctgggcagcgcccttcgtccaggctcgcgccccagctgccgccgacgacagcggccgagagaagttggggtctgactagacgcttacggggcctcggaccccggcgccgcggcgacctcggaggaaccggctccttgcgtcccgcctccctgggagctccgcacgggatttgcagatttacagaatggctgcacattaatggaaagagaagcataaacctatcttctttcattatggagggaggtttggcagatggagaacctgatcgaacttcgcttcttggtgatagcaaagatgtccttgggccatcaactgttgtagcaaacagtgacgaatctcagcttctgacaccaggaaagatgagtcagcgccaaggaaaagaagcttatccaacgccaaccaaagatttgcatcagccatctcttagtccagcaagtcctcatagccagggttttgaaagagggaaggaagatatttctcaaaataaagatgaatcttcactttctatgtcaaagagcaagtctgaatctaaactttataatggctcagagaaggacagttcaacttcaagcaaactcacaaaaaaagaatctcttaaggtacaaaagaaaaattaccgagaagaaaagaaaagagccacaaaggagctgctcagtacaatcacagatccttctgttattgttatggctgattggttaaagattcgtggtactctaaagagctggaccaagttatggtgtgtgttgaaacctggggtgctactgatctataaaacccaaaaaaatggtcagtgggtaggaacagttcttctgaatgcctgtgaaatcattgaacgtccatcaaaaaaggatggcttttgtttcaaacttttccatcctttggagcaatctatttgggcagtgaagggtccaaaaggtgaagcggttggatccattactcaacccttacctagcagttatttgatcatccgagctacttcagagtcagatggaaggtgctggatggatgctttggagttggctttgaaatgttctagtcttcttaaacgtacaatgatcagagaaggaaaggaacatgacctgagcgtttcatcagatagcacacatgtgactttctatggcttactacgtgctaacaatctccacagtggtgataacttccagttaaatgatagtgaaattgaacgacaacattttaaggaccaagatatgtattctgataaatctgataaagaaaatgatcaagaacatgatgagtctgataatgaggtgatggggaaaagtgaagaaagtgacacagatacatcagaaagacaagatgactcatatatcgaacctgagcctgttgagcctttaaaggagactacctacactgaacagagccatgaagaacttggagaggcaggtgaggcttctcaaacagaaactgtatctgaagaaaacaaaagccttatctggacactattgaaacaagtccgtcctggcatggacctatccaaggtggttctgcctacatttattttggaaccccgttctttcctggataaactttcagattactactatcatgcagatttcctatctgaggcagctcttgaagaaaatccttatttccgtttgaagaaagtagtgaaatggtatttgtcaggattctataaaaagccaaagggactgaagaaaccttataatcctatacttggcgagactttccgttgtttatggattcatcccagaacaaacagcaaaactttttatattgctgaacaggtgtcccatcatccaccaatatctgccttttatgttagtaatcgaaaagatggattttgccttagcggtagtatcctggctaagtctaagttttatggaaactcattatctgcaatattagagggagaagcacggttaactttcttgaatagaggtgaagattatgtaatgacaatgccatacgctcattgtaaaggaattctttatggtacaatgacactggagcttggtggaacagtcaatattacatgtcaaaaaactggatacagtgcaatacttgaatttaaactaaagccattcctagggagtagtgactgtgttaatcaaatatcagggaaacttaaactgggaaaagaagtcctagctactttggaaggtcattgggatagtgaagtttttattactgataaaaagactgataattcagaggttttctggaatccaacacctgacattaagcaatggagattaataaggcacactgtaaaatttgaagaacagggagattttgaatcagagaaactctggcaacgggtaactcgagccataaatgccaaagaccaaactgaagctacccaagagaagtatgttttggaagaagctcaaagacaagctgccagggatcggaaaacaaaaaatgaagagtggtcttgcaaattatttgaacttgatccactcacaggagaatggcattacaagtttgcagatacccgaccatgggacccacttaatgatatgatacagtttgaaaaagatggtgttattcagaccaaagtgaaacatcgtactccaatggttagcgtccccaaaatgaaacataagccaaccaggcaacagaagaaagtagcaaaaggctattcctccccagaacctgacattcaagactcctctggaagtgaagctcaatcagtaaaaccaagtacaagaagaaagaaaggaatagaactgggagacattcagagttccatcgaatctataaaacaaacacaggaagaaattaaaagaaatattatggctcttcgaaatcatttagtttcaagcacaccggccacggattattttctgcaacaaaaagactacttcatcattttcctcctgattttgcttcaagtcataataaacttcatgttcaagtagaagttctctaccattgaatcagtgaactagaaagatctgatttggcctgggaccagtgttcaagttggtttggtctttattaaaaatcacaatattccgaaaacaaaaaaacctaggagataaatgtagaggtattgacttttcgtatcttttatcttcacactgaaacaagagctatcctatttgattattaaagtgagctatgtgttaagtgccaggacatttctagcttttgtgagaatgtgtctacatatgagtataataaacccacatgtatacacaattgtctcttatgtactcctacctgacagtagtctttgtattctatagtatgttctgagatataatgttaacattgttcataacaaaaaatgctatcaatcttataaatatatgtaatctattttcttcataaaacaggcacaaaagttttatcagtaaggaattacagattgagaaatgatggaataatagacataattaattcaatacactactgttaaaatcatttgcaaagcactcagctcaattatcttcttagaaagaaagaaaaagtatgaatggtcaaaatgaatacatcgagagagataaatggcaaattgcttttttaaaagtttacataagttttttttaacccctagaatttaatatttgtagatgcaggtaaatatatatacttacgtgtatatcagtataaaaacactggtgtgcaattaattggattgattataataccaccttaagcacttgctgaaaaaagtgtggtcaaaattgattgctgtccttttgtcttatttttgtttttcttaagtcagctggttcataacataggccaaattctagagatgtttatagagcatttgaagtgctgataatttatgttttttcattatgaaaacttattttagctttagactccagtgtgttcagtgaataagtagaatataaaaaaatataaccagtattttacttcaaaagccaaaaagaggcaataagaaaagacactttgtggtggcctttatgtgtgcattaaaattggtttctgtaaaacgtgtaataagttgagtatctacgaagagtatcaagttctgaagtttaatttttttattatcctcctctcttcttagtaacttctttctgtggcaaaaccacaattctttaagattcctattgttcaggctaaggcaaatttttttgtttgtttcttcagtttaatattttgattttgtgtttttacgtaaatatttatattccttgaaagcaatttttgccaaggtagttcagtttaggaatatgttgttctaaaatatgtcttagaatcctgaaagcatagattttgaaatgtttttttaatgaaaatgaaggtcagagagaataattgccctgaccacatttgcctttcagtaggaggaggctgtgaaatagtaaaattataatcgtttatgccatgataaatacaagattggtaaataaatacattgattggtaaattatgagaatcaaaatgataaaaagagcctgcttttttccctaaccaatatagctatcttaagtatccttaggtttctgtgaagaaccatttcccatgttttcttggcaaaataatgctgtattccatatgtacatgtgaaatgatgttttaaattgataaaagcttaaataagatctacctatacccagtattttcatgatattagaacaaatgggtttttggttatattttatatttgtcaatataatttttgtattcacattctgttacactctgcctattcattgatatatgatattctgtaaatattgtacaatttgatcttttttatggtttaaattagttaattacatacaaattgattggcttatcacaaaaatcatttcatcagtaaaccttgttaacattttgtactggtgacccacctcttaggactttggtcttatccacgtgtatgttgttttcatttggtccaaataatattttatttgtatgggtatcttctaagactaaataggtagttgtgttctttatttttaaaatttctttttagagcaaatgttatgggttcttacccaaagagtcaaaaactatttcttaagaaagagcagagttattcatgactgttctttatacactaaaagcatgcatctaatctaatagtcctcttattatgcttttagttgtatgagtctctttctatgaactgaacacaaaactcaggaattggtggcttaattttagatcagtgcttgtactaggcttagttatatgaatctttataacacataattactaactttgtagccatatatgtaattgactttgaatgttatttacctgaaattaatcttccttcacacatggaccgtaaacggttcccagttgtctgagagcctcatgagggtttctaggatttatgaccttatgaccagtttttttcatttaccaagattttattttcctacatgaaaatttaattgagtaataattattcacatgtgcattttctttttagctgttaaatgtactatgccatcatccaccatttagtaaaatgtagctggcccaggacatgtaaaaaaaaaaaaaaacaacaacaataaatagggcatgtgaaatgttaagttacagcaatagatattttatttgtatttcatgttagtacttttttgttttatatcacttataaaggtacagtgtactctttgtcacagctcagttggtaaccgcattccattgaaaagttggccttgtaaaatacaactctcatttaatattcatgcttttgtgcctttaagaaaatattttttgtcattttttgtgttacagaactataatgtgattcaaggtgtttataggcttgtcataaaagggtcatttctgtgtgttactttctttttatatagctatagtatatttaaacaataatactatcttttataggggtttgtctatttacctattctttactcagacattgatgtagacttgtcagattattctgagtattgttaacagtgccttttcgatggaatcacactttttggctgtcaccttgtgccatatacacacaaaattttgtggaaggcagttttaactttctgaagaatatctgtcaaaatttaagaaaacaaatgtataaaattccattttttccagtgtttagcatttctagtaagcagtgaggttgtttgacatacagtgatgatggcattattgataagccatacatgagactgcagattatattgaatcatattaaatgtacagaaataaaatattagatttatatcaaattttccaatttgaaccagtggggaaaatcccacagaaatcagtaagtttacatttcaatttctatcttatttgactaagtggaaagagattctttaaaatgtataacctgccattatgtaatttggtttcattttattctacctgttgtgtgagtttagtatatttaatttactttttgttactctttacatactgtttatttttgttagtttttaattgaagatggactgttgaaattgtataggaccagtgtcttattaatatgattaatatatttagaagagccacgtgaaacccatgacaaaatgaatgtgaatattctttctaaaaatttagaaaatgttatctttttgcatttattatgtaaaactgttttacagtatcaaaatttttcacttaaagaaaaaaaatgccatgaaacatttgaactgatgagccacagaacttcagttgaaatttttttcactttttagcatgctaaatatacatctgagtttaaatgttctgtttaatggccattcataaattcaagcactaccactggtcagttttgtgtgatagaataaaaatatgttacctgcagtgtaagtacagcacactgtcaaattcttttccttaaggtgcacagtaaatgtacagatagttataggccactgttttgtaatgtagtacatttctaatctattattcctaacctattataactgtttgcagaaagaaaagaatttttctaataatctgtaaaattatgctaacttctacaagtaggcttctaaataaaatttttaaaaagagaaaa

SEQ ID NO: 233146 - DNA, 7263 bp, Homo sapiens
cactagaatgtgaaggatcttcgcggttctgggtgcccagaaaggcggcgacgcggcggatgacaacattaggccgcgacgcgctcctggccaggcggcggctgtagtgttagctttggacgccgcagtagccgctgccggtagcaagccgactgagggaaggtgggggtccgcccgggctggtggacctcggggccgaaagttcccgccccgctcgggggctgagccggcagtgcctccgcggccgctgggcagcgcccttcgtccaggctcgcgccccagctgccgccgacgacagcggccgagagaagttggggtctgactagacgcttacggggcctcggaccccggcgccgcggcgacctcggaggaaccggctccttgcgtcccgcctccctgggagctccgcacgggatttgcagatttacagaatggctgcacattaatggaaagagaagcataaacctatcttctttcattatggagggaggtttggcagatggagaacctgatcgaacttcgctgttgtagcaaacagtgacgaatctcagcttctgacaccaggaaagatgagtcagcgccaaggaaaagaagcttatccaacgccaaccaaagatttgcatcagccatctcttagtccagcaagtcctcatagccagggttttgaaagagggaaggaagatatttctcaaaataaagatgaatcttcactttctatgtcaaagagcaagtctgaatctaaactttataatggctcagagaaggacagttcaacttcaagcaaactcacaaaaaaagaatctcttaaggtacaaaagaaaaattaccgagaagaaaagaaaagagccacaaaggagctgctcagtacaatcacagatccttctgttattgttatggctgattggttaaagattcgtggtactctaaagagctggaccaagttatggtgtgtgttgaaacctggggtgctactgatctataaaacccaaaaaaatggtcagtgggtaggaacagttcttctgaatgcctgtgaaatcattgaacgtccatcaaaaaaggatggcttttgtttcaaacttttccatcctttggagcaatctatttgggcagtgaagggtccaaaaggtgaagcggttggatccattactcaacccttacctagcagttatttgatcatccgagctacttcagagtcagatggaaggtgctggatggatgctttggagttggctttgaaatgttctagtcttcttaaacgtacaatgatcagagaaggaaaggaacatgacctgagcgtttcatcagatagcacacatgtgactttctatggcttactacgtgctaacaatctccacagtggtgataacttccagttaaatgatagtgaaattgaacgacaacattttaaggaccaagatatgtattctgataaatctgataaagaaaatgatcaagaacatgatgagtctgataatgaggtgatggggaaaagtgaagaaagtgacacagatacatcagaaagacaagatgactcatatatcgaacctgagcctgttgagcctttaaaggagactacctacactgaacagagccatgaagaacttggagaggcaggtgaggcttctcaaacagaaactgtatctgaagaaaacaaaagccttatctggacactattgaaacaagtccgtcctggcatggacctatccaaggtggttctgcctacatttattttggaaccccgttctttcctggataaactttcagattactactatcatgcagatttcctatctgaggcagctcttgaagaaaatccttatttccgtttgaagaaagtagtgaaatggtatttgtcaggattctataaaaagccaaagggactgaagaaaccttataatcctatacttggcgagactttccgttgtttatggattcatcccagaacaaacagcaaaactttttatattgctgaacaggtgtcccatcatccaccaatatctgccttttatgttagtaatcgaaaagatggattttgccttagcggtagtatcctggctaagtctaagttttatggaaactcattatctgcaatattagagggagaagcacggttaactttcttgaatagaggtgaagattatgtaatgacaatgccatacgctcattgtaaaggaattctttatggtacaatgacactggagcttggtggaacagtcaatattacatgtcaaaaaactggatacagtgcaatacttgaatttaaactaaagccattcctagggagtagtgactgtgttaatcaaatatcagggaaacttaaactgggaaaagaagtcctagctactttggaaggtcattgggatagtgaagtttttattactgataaaaagactgataattcagaggttttctggaatccaacacctgacattaagcaatggagattaataaggcacactgtaaaatttgaagaacagggagattttgaatcagagaaactctggcaacgggtaactcgagccataaatgccaaagaccaaactgaagctacccaagagaagtatgttttggaagaagctcaaagacaagctgccagggatcggaaaacaaaaaatgaagagtggtcttgcaaattatttgaacttgatccactcacaggagaatggcattacaagtttgcagatacccgaccatgggacccacttaatgatatgatacagtttgaaaaagatggtgttattcagaccaaagtgaaacatcgtactccaatggttagcgtccccaaaatgaaacataagccaaccaggcaacagaagaaagtagcaaaaggctattcctccccagaacctgacattcaagactcctctggaagtgaagctcaatcagtaaaaccaagtacaagaagaaagaaaggaatagaactgggagacattcagagttccatcgaatctataaaacaaacacaggaagaaattaaaagaaatattatggctcttcgaaatcatttagtttcaagcacaccggccacggattattttctgcaacaaaaagactacttcatcattttcctcctgattttgcttcaagtcataataaacttcatgttcaagtagaagttctctaccattgaatcagtgaactagaaagatctgatttggcctgggaccagtgttcaagttggtttggtctttattaaaaatcacaatattccgaaaacaaaaaaacctaggagataaatgtagaggtattgacttttcgtatcttttatcttcacactgaaacaagagctatcctatttgattattaaagtgagctatgtgttaagtgccaggacatttctagcttttgtgagaatgtgtctacatatgagtataataaacccacatgtatacacaattgtctcttatgtactcctacctgacagtagtctttgtattctatagtatgttctgagatataatgttaacattgttcataacaaaaaatgctatcaatcttataaatatatgtaatctattttcttcataaaacaggcacaaaagttttatcagtaaggaattacagattgagaaatgatggaataatagacataattaattcaatacactactgttaaaatcatttgcaaagcactcagctcaattatcttcttagaaagaaagaaaaagtatgaatggtcaaaatgaatacatcgagagagataaatggcaaattgcttttttaaaagtttacataagttttttttaacccctagaatttaatatttgtagatgcaggtaaatatatatacttacgtgtatatcagtataaaaacactggtgtgcaattaattggattgattataataccaccttaagcacttgctgaaaaaagtgtggtcaaaattgattgctgtccttttgtcttatttttgtttttcttaagtcagctggttcataacataggccaaattctagagatgtttatagagcatttgaagtgctgataatttatgttttttcattatgaaaacttattttagctttagactccagtgtgttcagtgaataagtagaatataaaaaaatataaccagtattttacttcaaaagccaaaaagaggcaataagaaaagacactttgtggtggcctttatgtgtgcattaaaattggtttctgtaaaacgtgtaataagttgagtatctacgaagagtatcaagttctgaagtttaatttttttattatcctcctctcttcttagtaacttctttctgtggcaaaaccacaattctttaagattcctattgttcaggctaaggcaaatttttttgtttgtttcttcagtttaatattttgattttgtgtttttacgtaaatatttatattccttgaaagcaatttttgccaaggtagttcagtttaggaatatgttgttctaaaatatgtcttagaatcctgaaagcatagattttgaaatgtttttttaatgaaaatgaaggtcagagagaataattgccctgaccacatttgcctttcagtaggaggaggctgtgaaatagtaaaattataatcgtttatgccatgataaatacaagattggtaaataaatacattgattggtaaattatgagaatcaaaatgataaaaagagcctgcttttttccctaaccaatatagctatcttaagtatccttaggtttctgtgaagaaccatttcccatgttttcttggcaaaataatgctgtattccatatgtacatgtgaaatgatgttttaaattgataaaagcttaaataagatctacctatacccagtattttcatgatattagaacaaatgggtttttggttatattttatatttgtcaatataatttttgtattcacattctgttacactctgcctattcattgatatatgatattctgtaaatattgtacaatttgatcttttttatggtttaaattagttaattacatacaaattgattggcttatcacaaaaatcatttcatcagtaaaccttgttaacattttgtactggtgacccacctcttaggactttggtcttatccacgtgtatgttgttttcatttggtccaaataatattttatttgtatgggtatcttctaagactaaataggtagttgtgttctttatttttaaaatttctttttagagcaaatgttatgggttcttacccaaagagtcaaaaactatttcttaagaaagagcagagttattcatgactgttctttatacactaaaagcatgcatctaatctaatagtcctcttattatgcttttagttgtatgagtctctttctatgaactgaacacaaaactcaggaattggtggcttaattttagatcagtgcttgtactaggcttagttatatgaatctttataacacataattactaactttgtagccatatatgtaattgactttgaatgttatttacctgaaattaatcttccttcacacatggaccgtaaacggttcccagttgtctgagagcctcatgagggtttctaggatttatgaccttatgaccagtttttttcatttaccaagattttattttcctacatgaaaatttaattgagtaataattattcacatgtgcattttctttttagctgttaaatgtactatgccatcatccaccatttagtaaaatgtagctggcccaggacatgtaaaaaaaaaaaaaaacaacaacaataaatagggcatgtgaaatgttaagttacagcaatagatattttatttgtatttcatgttagtacttttttgttttatatcacttataaaggtacagtgtactctttgtcacagctcagttggtaaccgcattccattgaaaagttggccttgtaaaatacaactctcatttaatattcatgcttttgtgcctttaagaaaatattttttgtcattttttgtgttacagaactataatgtgattcaaggtgtttataggcttgtcataaaagggtcatttctgtgtgttactttctttttatatagctatagtatatttaaacaataatactatcttttataggggtttgtctatttacctattctttactcagacattgatgtagacttgtcagattattctgagtattgttaacagtgccttttcgatggaatcacactttttggctgtcaccttgtgccatatacacacaaaattttgtggaaggcagttttaactttctgaagaatatctgtcaaaatttaagaaaacaaatgtataaaattccattttttccagtgtttagcatttctagtaagcagtgaggttgtttgacatacagtgatgatggcattattgataagccatacatgagactgcagattatattgaatcatattaaatgtacagaaataaaatattagatttatatcaaattttccaatttgaaccagtggggaaaatcccacagaaatcagtaagtttacatttcaatttctatcttatttgactaagtggaaagagattctttaaaatgtataacctgccattatgtaatttggtttcattttattctacctgttgtgtgagtttagtatatttaatttactttttgttactctttacatactgtttatttttgttagtttttaattgaagatggactgttgaaattgtataggaccagtgtcttattaatatgattaatatatttagaagagccacgtgaaacccatgacaaaatgaatgtgggggaaaaaaaaaattttcggggggcctttctgggggcccaaaacaaaaactttttaaaaatattctttctaaaaatttagaaaatgttatctttttgcatttattatgtaaaactgttttacagtatcaaaatttttcacttaaagaaaaaaaatgccatgaaacatttgaactgatgagccacagaacttcagttgaaatttttttcactttttagcatgctaaatatacatctgagtttaaatgttctgtttaatggccattcataaattcaagcactaccactggtcagttttgtgtgatagaataaaaatatgttacctgcagtgtaagtacagcacactgtcaaattcttttccttaaggtgcacagtaaatgtacagatagttataggccactgttttgtaatgtagtacatttctaatctattattcctaacctattataactgtttgcagaaagaaaagaatttttctaataatctgtaaaattatgctaacttctacaagtaggcttctaaataaaatttttaaaaagagaaaa

SEQ ID NO: 233147 - DNA, 7532 bp, Homo sapiens
cactagaatgtgaaggatcttcgcggttctgggtgcccagaaaggcggcgacgcggcggatgacaacattaggccgcgacgcgctcctggccaggcggcggctgtagtgttagctttggacgccgcagtagccgctgccggtagcaagccgactgagggaaggtgggggtccgcccgggctggtggacctcggggccgaaagttcccgccccgctcgggggctgagccggcagtgcctccgcggccgctgggcagcgcccttcgtccaggctcgcgccccagctgccgccgacgacagcggccgagagaagttggggtctgactagacgcttacggggcctcggaccccggcgccgcggcgacctcggaggaaccggctccttgcgtcccgcctccctgggagctccgcacgggatttgcagatttacagaatggctgcacattaatggaaagagaagcataaacctatcttctttcattatggagggaggtttggcagatggagaacctgatcgaacttcgctgttgtagcaaacagtgacgaatctcagcttctgacaccaggaaagatgagtcagcgccaaggaaaagaagcttatccaacgccaaccaaagatttgcatcagccatctcttagtccagcaagtcctcatagccagggttttgaaagagggaaggaagatatttctcaaaataaagatgaatcttcactttctatgtcaaagagcaagtctgaatctaaactttataatggctcagagaaggacagttcaacttcaagcaaactcacaaaaaaagaatctcttaaggtacaaaagaaaaattaccgagaagaaaagaaaagagccacaaaggagctgctcagtacaatcacagatccttctgttattgttatggctgattggttaaagattcgtggtactctaaagagctggaccaagttatggtgtgtgttgaaacctggggtgctactgatctataaaacccaaaaaaatggtcagtgggtaggaacagttcttctgaatgcctgtgaaatcattgaacgtccatcaaaaaaggatggcttttgtttcaaacttttccatcctttggagcaatctatttgggcagtgaagggtccaaaaggtgaagcggttggatccattactcaacccttacctagcagttatttgatcatccgagctacttcagagtcagatggaaggtgctggatggatgctttggagttggctttgaaatgttctagtcttcttaaacgtacaatgatcagagaaggaaaggaacatgacctgagcgtttcatcagatagcacacatgtgactttctatggcttactacgtgctaacaatctccacagtggtgataacttccagttaaatgatagtgaaattgaacgacaacattttaaggaccaagatatgtattctgataaatctgataaagaaaatgatcaagaacatgatgagtctgataatgaggtgatggggaaaagtgaagaaagtgacacagatacatcagaaagacaagatgactcatatatcgaacctgagcctgttgagcctttaaaggagactacctacactgaacagagccatgaagaacttggagaggcaggtgaggcttctcaaacagaaactgtatctgaagaaaacaaaagccttatctggacactattgaaacaagtccgtcctggcatggacctatccaaggtggttctgcctacatttattttggaaccccgttctttcctggataaactttcagattactactatcatgcagatttcctatctgaggcagctcttgaagaaaatccttatttccgtttgaagaaagtagtgaaatggtatttgtcaggattctataaaaagccaaagggactgaagaaaccttataatcctatacttggcgagactttccgttgtttatggattcatcccagaacaaacagcaaaactttttatattgctgaacaggtgtcccatcatccaccaatatctgccttttatgttagtaatcgaaaagatggattttgccttagcggtagtatcctggctaagtctaagttttatggaaactcattatctgcaatattagagggagaagcacggttaactttcttgaatagaggtgaagattatgtaatgacaatgccatacgctcattgtaaaggaattctttatggtacaatgacactggagcttggtggaacagtcaatattacatgtcaaaaaactggatacagtgcaatacttgaatttaaactaaagccattcctagggagtagtgactgtgttaatcaaatatcagggaaacttaaactgggaaaagaagtcctagctactttggaaggtcattgggatagtgaagtttttattactgataaaaagactgataattcagaggttttctggaatccaacacctgacattaagcaatggagattaataaggcacactgtaaaatttgaagaacagggagattttgaatcagagaaactctggcaacgggtaactcgagccataaatgccaaagaccaaactgaagctacccaagagaagtatgttttggaagaagctcaaagacaagctgccagggatcggaaaacaaaaaatgaagagtggtcttgcaaattatttgaacttgatccactcacaggagaatggcattacaagtttgcagatacccgaccatgggacccacttaatgatatgatacagtttgaaaaagatggtgttattcagaccaaagtgaaacatcgtactccaatggttagcgtccccaaaatgaaacataagccaaccaggcaacagaagaaagtagcaaaaggctattcctccccagaacctgacattcaagactcctctggaagtgaagctcaatcagtaaaaccaagtacaagaagaaagaaaggaatagaactgggagacattcagagttccatcgaatctataaaacaaacacaggaagaaattaaaagaaatattatggctcttcgaaatcatttagtttcaagcacaccggccacggattattttctgcaacaaaaagactacttcatcattttcctcctgattttgcttcaagtcataataaacttcatgttcaagtagaagttctctaccattgaatcagtgaactagaaagatctgatttggcctgggaccagtgttcaagttggtttggtctttattaaaaatcacaatattccgaaaacaaaaaaacctaggagataaatgtagaggtattgacttttcgtatcttttatcttcacactgaaacaagagctatcctatttgattattaaagtgagctatgtgttaagtgccaggacatttctagcttttgtgagaatgtgtctacatatgagtataataaacccacatgtatacacaattgtctcttatgtactcctacctgacagtagtctttgtattctatagtatgttctgagatataatgttaacattgttcataacaaaaaatgctatcaatcttataaatatatgtaatctattttcttcataaaacaggcacaaaagttttatcagtaaggaattacagattgagaaatgatggaataatagacataattaattcaatacactactgttaaaatcatttgcaaagcactcagctcaattatcttcttagaaagaaagaaaaagtatgaatggtcaaaatgaatacatcgagagagataaatggcaaattgcttttttaaaagtttacataagttttttttaacccctagaatttaatatttgtagatgcaggtaaatatatatacttacgtgtatatcagtataaaaacactggtgtgcaattaattggattgattataataccaccttaagcacttgctgaaaaaagtgtggtcaaaattgattgctgtccttttgtcttatttttgtttttcttaagtcagctggttcataacataggccaaattctagagatgtttatagagcatttgaagtgctgataatttatgttttttcattatgaaaacttattttagctttagactccagtgtgttcagtgaataagtagaatataaaaaaatataaccagtattttacttcaaaagccaaaaagaggcaataagaaaagacactttgtggtggcctttatgtgtgcattaaaattggtttctgtaaaacgtgtaataagttgagtatctacgaagagtatcaagttctgaagtttaatttttttattatcctcctctcttcttagtaacttctttctgtggcaaaaccacaattctttaagattcctattgttcaggctaaggcaaatttttttgtttgtttcttcagtttaatattttgattttgtgtttttacgtaaatatttatattccttgaaagcaatttttgccaaggtagttcagtttaggaatatgttgttctaaaatatgtcttagaatcctgaaagcatagattttgaaatgtttttttaatgaaaatgaaggtcagagagaataattgccctgaccacatttgcctttcagtaggaggaggctgtgaaatagtaaaattataatcgtttatgccatgataaatacaagattggtaaataaatacattgattggtaaattatgagaatcaaaatgataaaaagagcctgcttttttccctaaccaatatagctatcttaagtatccttaggtttctgtgaagaaccatttcccatgttttcttggcaaaataatgctgtattccatatgtacatgtgaaatgatgttttaaattgataaaagcttaaataagatctacctatacccagtattttcatgatattagaacaaatgggtttttggttatattttatatttgtcaatataatttttgtattcacattctgttacactctgcctattcattgatatatgatattctgtaaatattgtacaatttgatcttttttatggtttaaattagttaattacatacaaattgattggcttatcacaaaaatcatttcatcagtaaaccttgttaacattttgtactggtgacccacctcttaggactttggtcttatccacgtgtatgttgttttcatttggtccaaataatattttatttgtatgggtatcttctaagactaaataggtagttgtgttctttatttttaaaatttctttttagagcaaatgttatgggttcttacccaaagagtcaaaaactatttcttaagaaagagcagagttattcatgactgttctttatacactaaaagcatgcatctaatctaatagtcctcttattatgcttttagttgtatgagtctctttctatgaactgaacacaaaactcaggaattggtggcttaattttagatcagtgcttgtactaggcttagttatatgaatctttataacacataattactaactttgtagccatatatgtaattgactttgaatgttatttacctgaaattaatcttccttcacacatggaccgtaaacggttcccagttgtctgagagcctcatgagggtttctaggatttatgaccttatgaccagtttttttcatttaccaagattttattttcctacatgaaaatttaattgagtaataattattcacatgtgcattttctttttagctgttaaatgtactatgccatcatccaccatttagtaaaatgtagctggcccaggacatgtaaaaaaaaaaaaaaacaacaacaataaatagggcatgtgaaatgttaagttacagcaatagatattttatttgtatttcatgttagtacttttttgttttatatcacttataaaggtacagtgtactctttgtcacagctcagttggtaaccgcattccattgaaaagttggccttgtaaaatacaactctcatttaatattcatgcttttgtgcctttaagaaaatattttttgtcattttttgtgttacagaactataatgtgattcaaggtgtttataggcttgtcataaaagggtcatttctgtgtgttactttctttttatatagctatagtatatttaaacaataatactatcttttataggggtttgtctatttacctattctttactcagacattgatgtagacttgtcagattattctgagtattgttaacagtgccttttcgatggaatcacactttttggctgtcaccttgtgccatatacacacaaaattttgtggaaggcagttttaactttctgaagaatatctgtcaaaatttaagaaaacaaatgtataaaattccattttttccagtgtttagcatttctagtaagcagtgaggttgtttgacatacagtgatgatggcattattgataagccatacatgagactgcagattatattgaatcatattaaatgtacagaaataaaatattagatttatatcaaattttccaatttgaaccagtggggaaaatcccacagaaatcagtaagtttacatttcaatttctatcttatttgactaagtggaaagagattctttaaaatgtataacctgccattatgtaatttggtttcattttattctacctgttgtgtgagtttagtatatttaatttactttttgttactctttacatactgtttatttttgttagtttttaattgaagatggactgttgaaattgtataggaccagtgtcttattaatatgattaatatatttagaagagccacgtgaaacccatgacaaaatgaatgtgaatattctttctaaaaatttagaaaatgttatctttttgcatttattatgtaaaactgttttacagtatcaaaatttttcacttaaagaaaaaaaatgccatgaaacatttgaactgatgagccacagaacttcagttgaaatttttttcactttttagcatgctaaatatacatctgagtttaaatgttctgtttaatggccattcataaattcaagcactaccactggtcagttttgtgtgatagaataaaaatatgttacctgcagtgtaagtacagcacactgtcaaattcttttccttaaggtgcacagtaaatgtacagatagttataggccactgttttgtaatgtagtacatttctaatctattattcctaacctattataactgtttgcagaaagaaaagaatttttctaataatctgtaaaattatgctaacttctacaagtaggcttctaaataaaatttttaaaaagagaaaagtgacagaactgacaatctgtggagcaatacacacagttttccatggccccaaattcggtcctaagcaatttaaatgtaccccttaaaaaaattcttttggaaaattggggggccccgatcattttacgcccttaattaggaaaccaccccattattaagccccgcgtcgtgaggaagcccaaaaaacgataataagaggaaacagatagaaagacacagcgacgatacacaatagcgggactatagcaagtaaaaaaaaacgaggggcgccaaaacaaagagaggagcaggagggacaaagaagaccgcacgcaggtagtaaacaaa

SEQ ID NO: 233148 - DNA, 7146 bp, Homo sapiens
cactagaatgtgaaggatcttcgcggttctgggtgcccagaaaggcggcgacgcggcggatgacaacattaggccgcgacgcgctcctggccaggcggcggctgtagtgttagctttggacgccgcagtagccgctgccggtagcaagccgactgagggaaggtgggggtccgcccgggctggtggacctcggggccgaaagttcccgccccgctcgggggctgagccggcagtgcctccgcggccgctgggcagcgcccttcgtccaggctcgcgccccagctgccgccgacgacagcggccgagagaagttggggtctgactagacgcttacggggcctcggaccccggcgccgcggcgacctcggaggaaccggctccttgcgtcccgcctccctgggagctccgcacgggatttgcagatttacagaatggctgcacattaatggaaagagaagcataaacctatcttctttcattatggagggaggtttggcagatggagaacctgatcgaacttcgctgttgtagcaaacagtgacgaatctcagcttctgacaccaggaaagatgagtcagcgccaaggaaaagaagcttatccaacgccaaccaaagatttgcatcagccatctcttagtccagcaagtcctcatagccagggttttgaaagagggaaggaagatatttctcaaaataaagatgaatcttcactttctatgtcaaagagcaagtctgaatctaaactttataatggctcagagaaggacagttcaacttcaagcaaactcacaaaaaaagaatctcttaaggtacaaaagaaaaattaccgagaagaaaagaaaagagccacaaaggagctgctcagtacaatcacagatccttctgttattgttatggctgattggttaaagattcgtggtactctaaagagctggaccaagttatggtgtgtgttgaaacctggggtgctactgatctataaaacccaaaaaaatggtcagtgggtaggaacagttcttctgaatgcctgtgaaatcattgaacgtccatcaaaaaaggatggcttttgtttcaaacttttccatcctttggagcaatctatttgggcagtgaagggtccaaaaggtgaagcggttggatccattactcaacccttacctagcagttatttgatcatccgagctacttcagagtcagatggaaggtgctggatggatgctttggagttggctttgaaatgttctagtcttcttaaacgtacaatgatcagagaaggaaaggaacatgacctgagcgtttcatcagatagcacacatgtgactttctatggcttactacgtgctaacaatctccacagtggtgataacttccagttaaatgatagtgaaattgaacgacaacattttaaggaccaagatatgtattctgataaatctgataaagaaaatgatcaagaacatgatgagtctgataatgaggtgatggggaaaagtgaagaaagtgacacagatacatcagaaagacaagatgactcatatatcgaacctgagcctgttgagcctttaaaggagactacctacactgaacagagccatgaagaacttggagaggcaggtgaggcttctcaaacagaaactgtatctgaagaaaacaaaagccttatctggacactattgaaacaagtccgtcctggcatggacctatccaaggtggttctgcctacatttattttggaaccccgttctttcctggataaactttcagattactactatcatgcagatttcctatctgaggcagctcttgaagaaaatccttatttccgtttgaagaaagtagtgaaatggtatttgtcaggattctataaaaagccaaagggactgaagaaaccttataatcctatacttggcgagactttccgttgtttatggattcatcccagaacaaacagcaaaactttttatattgctgaacaggtgtcccatcatccaccaatatctgccttttatgttagtaatcgaaaagatggattttgccttagcggtagtatcctggctaagtctaagttttatggaaactcattatctgcaatattagagggagaagcacggttaactttcttgaatagaggtgaagattatgtaatgacaatgccatacgctcattgtaaaggaattctttatggtacaatgacactggagcttggtggaacagtcaatattacatgtcaaaaaactggatacagtgcaatacttgaatttaaactaaagccattcctagggagtagtgactgtgttaatcaaatatcagggaaacttaaactgggaaaagaagtcctagctactttggaaggtcattgggatagtgaagtttttattactgataaaaagactgataattcagaggttttctggaatccaacacctgacattaagcaatggagattaataaggcacactgtaaaatttgaagaacagggagattttgaatcagagaaactctggcaacgggtaactcgagccataaatgccaaagaccaaactgaagctacccaagagaagtatgttttggaagaagctcaaagacaagctgccagggatcggaaaacaaaaaatgaagagtggtcttgcaaattatttgaacttgatccactcacaggagaatggcattacaagtttgcagatacccgaccatgggacccacttaatgatatgatacagtttgaaaaagatggtgttattcagaccaaagtgaaacatcgtactccaatggttagcgtccccaaaatgaaacataagccaaccaggcaacagaagaaagtagcaaaaggctattcctccccagaacctgacattcaagactcctctggaagtgaagctcaatcagtaaaaccaagtacaagaagaaagaaaggaatagaactgggagacattcagagttccatcgaatctataaaacaaacacaggaagaaattaaaagaaatattatggctcttcgaaatcatttagtttcaagcacaccggccacggattattttctgcaacaaaaagactacttcatcattttcctcctgattttgcttcaagtcataataaacttcatgttcaagtagaagttctctaccattgaatcagtgaactagaaagatctgatttggcctgggaccagtgttcaagttggtttggtctttattaaaaatcacaatattccgaaaacaaaaaaacctaggagataaatgtagaggtattgacttttcgtatcttttatcttcacactgaaacaagagctatcctatttgattattaaagtgagctatgtgttaagtgccaggacatttctagcttttgtgagaatgtgtctacatatgagtataataaacccacatgtatacacaattgtctcttatgtactcctacctgacagtagtctttgtattctatagtatgttctgagatataatgttaacattgttcataacaaaaaatgctatcaatcttataaatatatgtaatctattttcttcataaaacaggcacaaaagttttatcagtaaggaattacagattgagaaatgatggaataatagacataattaattcaatacactactgttaaaatcatttgcaaagcactcagctcaattatcttcttagaaagaaagaaaaagtatgaatggtcaaaatgaatacatcgagagagataaatggcaaattgcttttttaaaagtttacataagttttttttaacccctagaatttaatatttgtagatgcaggtaaatatatatacttacgtgtatatcagtataaaaacactggtgtgcaattaattggattgattataataccaccttaagcacttgctgaaaaaagtgtggtcaaaattgattgctgtccttttgtcttatttttgtttttcttaagtcagctggttcataacataggccaaattctagagatgtttatagagcatttgaagtgctgataatttatgttttttcattatgaaaacttattttagctttagactccagtgtgttcagtgaataagtagaatataaaaaaatataaccagtattttacttcaaaagccaaaaagaggcaataagaaaagacactttgtggtggcctttatgtgtgcattaaaattggtttctgtaaaacgtgtaataagttgagtatctacgaagagtatcaagttctgaagtttaatttttttattatcctcctctcttcttagtaacttctttctgtggcaaaaccacaattctttaagattcctattgttcaggctaaggcaaatttttttgtttgtttcttcagtttaatattttgattttgtgtttttacgtaaatatttatattccttgaaagcaatttttgccaaggtagttcagtttaggaatatgttgttctaaaatatgtcttagaatcctgaaagcatagattttgaaatgtttttttaatgaaaatgaaggtcagagagaataattgccctgaccacatttgcctttcagtaggaggaggctgtgaaatagtaaaattataatcgtttatgccatgataaatacaagattggtaaataaatacattgattggtaaattatgagaatcaaaatgataaaaagagcctgcttttttccctaaccaatatagctatcttaagtatccttaggtttctgtgaagaaccatttcccatgttttcttggcaaaataatgctgtattccatatgtacatgtgaaatgatgttttaaattgataaaagcttaaataagatctacctatacccagtattttcatgatattagaacaaatgggtttttggttatattttatatttgtcaatataatttttgtattcacattctgttacactctgcctattcattgatatatgatattctgtaaatattgtacaatttgatcttttttatggtttaaattagttaattacatacaaattgattggcttatcacaaaaatcatttcatcagtaaaccttgttaacattttgtactggtgacccacctcttaggactttggtcttatccacgtgtatgttgttttcatttggtccaaataatattttatttgtatgggtatcttctaagactaaataggtagttgtgttctttatttttaaaatttctttttagagcaaatgttatgggttcttacccaaagagtcaaaaactatttcttaagaaagagcagagttattcatgactgttctttatacactaaaagcatgcatctaatctaatagtcctcttattatgcttttagttgtatgagtctctttctatgaactgaacacaaaactcaggaattggtggcttaattttagatcagtgcttgtactaggcttagttatatgaatctttataacacataattactaactttgtagccatatatgtaattgactttgaatgttatttacctgaaattaatcttccttcacacatggaccgtaaacggttcccagttgtctgagagcctcatgagggtttctaggatttatgaccttatgaccagtttttttcatttaccaagattttattttcctacatgaaaatttaattgagtaataattattcacatgtgcattttctttttagctgttaaatgtactatgccatcatccaccatttagtaaaatgtagctggcccaggacatgtaaaatattttatttgtatttcatgttagtacttttttgttttatatcacttataaaggtacagtgtactctttgtcacagctcagttggtaaccgcattccattgaaaagttggccttgtaaaatacaactctcatttaatattcatgcttttgtgcctttaagaaaatattttttgtcattttttgtgttacagaactataatgtgattcaaggtgtttataggcttgtcataaaagggtcatttctgtgtgttactttctttttatatagctatagtatatttaaacaataatactatcttttataggggtttgtctatttacctattctttactcagacattgatgtagacttgtcagattattctgagtattgttaacagtgccttttcgatggaatcacactttttggctgtcaccttgtgccatatacacacaaaattttgtggaaggcagttttaactttctgaagaatatctgtcaaaatttaagaaaacaaatgtataaaattccattttttccagtgtttagcatttctagtaagcagtgaggttgtttgacatacagtgatgatggcattattgataagccatacatgagactgcagattatattgaatcatattaaatgtacagaaataaaatattagatttatatcaaattttccaatttgaaccagtggggaaaatcccacagaaatcagtaagtttacatttcaatttctatcttatttgactaagtggaaagagattctttaaaatgtataacctgccattatgtaatttggtttcattttattctacctgttgtgtgagtttagtatatttaatttactttttgttactctttacatactgtttatttttgttagtttttaattgaagatggactgttgaaattgtataggaccagtgtcttattaatatgattaatatatttagaagagccacgtgaaacccatgacaaaatgaatgtgaatattctttctaaaaatttagaaaatgttatctttttgcatttattatgtaaaactgttttacagtatcaaaatttttcacttaaagaaaaaaaatgccatgaaacatttgaactgatgagccacagaacttcagttgaaatttttttcactttttagcatgctaaatatacatctgagtttaaatgttctgtttaatggccattcataaattcaagcactaccactggtcagttttgtgtgatagaataaaaatatgttacctgcagtgtaagtacagcacactgtcaaattcttttccttaaggtgcacagtaaatgtacagatagttataggccactgttttgtaatgtagtacatttctaatctattattcctaacctattataactgtttgcagaaagaaaagaatttttctaataatctgtaaaattatgctaacttctacaagtaggcttctaaataaaatttttaaaaagagaaaa

SEQ ID NO: 233149 - DNA, 5687 bp, Homo sapiens
cactagaatgtgaaggatcttcgcggttctgggtgcccagaaaggcggcgacgcggcggatgacaacattaggccgcgacgcgctcctggccaggcggcggctgtagtgttagctttggacgccgcagtagccgctgccggtagcaagccgactgagggaaggtgggggtccgcccgggctggtggacctcggggccgaaagttcccgccccgctcgggggctgagccggcagtgcctccgcggccgctgggcagcgcccttcgtccaggctcgcgccccagctgccgccgacgacagcggccgagagaagttggggtctgactagacgcttacggggcctcggaccccggcgccgcggcgacctcggaggaaccggctccttgcgtcccgcctccctgggagctccgcacgggatttgcagatttacagaatggctgcacattaatggaaagagaagcataaacctatcttctttcattatggagggaggtttggcagatggagaacctgatcgaacttcgctgttgtagcaaacagtgacgaatctcagcttctgacaccaggaaagatgagtcagcgccaaggaaaagaagcttatccaacgccaaccaaagatttgcatcagccatctcttagtccagcaagtcctcatagccagggttttgaaagagggaaggaagatatttctcaaaataaagatgaatcttcactttctatgtcaaagagcaagtctgaatctaaactttataatggctcagagaaggacagttcaacttcaagcaaactcacaaaaaaagaatctcttaaggtacaaaagaaaaattaccgagaagaaaagaaaagagccacaaaggagctgctcagtacaatcacagatccttctgttattgttatggctgattggttaaagattcgtggtactctaaagagctggaccaagttatggtgtgtgttgaaacctggggtgctactgatctataaaacccaaaaaaatggtcagtgggtaggaacagttcttctgaatgcctgtgaaatcattgaacgtccatcaaaaaaggatggcttttgtttcaaacttttccatcctttggagcaatctatttgggcagtgaagggtccaaaaggtgaagcggttggatccattactcaacccttacctagcagttatttgatcatccgagctacttcagagtcagatggaaggtgctggatggatgctttggagttggctttgaaatgttctagtcttcttaaacgtacaatgatcagagaaggaaaggaacatgacctgagcgtttcatcagatagcacacatgtgactttctatggcttactacgtgctaacaatctccacagtggtgataacttccagttaaatgatagtgaaattgaacgacaacattttaaggaccaagatatgtattctgataaatctgataaagaaaatgatcaagaacatgatgagtctgataatgaggtgatggggaaaagtgaagaaagtgacacagatacatcagaaagacaagatgactcatatatcgaacctgagcctgttgagcctttaaaggagactacctacactgaacagagccatgaagaacttggagaggcaggtgaggcttctcaaacagaaactgtatctgaagaaaacaaaagccttatctggacactattgaaacaagtccgtcctggcatggacctatccaaggtggttctgcctacatttattttggaaccccgttctttcctggataaactttcagattactactatcatgcagatttcctatctgaggcagctcttgaagaaaatccttatttccgtttgaagaaagtagtgaaatggtatttgtcaggattctataaaaagccaaagggactgaagaaaccttataatcctatacttggcgagactttccgttgtttatggattcatcccagaacaaacagcaaaactttttatattgctgaacaggtgtcccatcatccaccaatatctgccttttatgttagtaatcgaaaagatggattttgccttagcggtagtatcctggctaagtctaagttttatggaaactcattatctgcaatattagagggagaagcacggttaactttcttgaatagaggtgaagattatgtaatgacaatgccatacgctcattgtaaaggaattctttatggtacaatgacactggagcttggtggaacagtcaatattacatgtcaaaaaactggatacagtgcaatacttgaatttaaactaaagccattcctagggagtagtgactgtgttaatcaaatatcagggaaacttaaactgggaaaagaagtcctagctactttggaaggtcattgggatagtgaagtttttattactgataaaaagactgataattcagaggttttctggaatccaacacctgacattaagcaatggagattaataaggcacactgtaaaatttgaagaacagggagattttgaatcagagaaactctggcaacgggtaactcgagccataaatgccaaagaccaaactgaagctacccaagagaagtatgttttggaagaagctcaaagacaagctgccagggatcggaaaacaaaaaatgaagagtggtcttgcaaattatttgaacttgatccactcacaggagaatggcattacaagtttgcagatacccgaccatgggacccacttaatgatatgatacagtttgaaaaagatggtgttattcagaccaaagtgaaacatcgtactccaatggttagcgtccccaaaatgaaacataagccaaccaggcaacagaagaaagtagcaaaaggctattcctccccagaacctgacattcaagactcctctggaagtgaagctcaatcagtaaaaccaagtacaagaagaaagaaaggaatagaactgggagacattcagagttccatcgaatctataaaacaaacacaggaagaaattaaaagaaatattatggctcttcgaaatcatttagtttcaagcacaccggccacggattattttctgcaacaaaaagactacttcatcattttcctcctgattttgcttcaagtcataataaacttcatgttcaagtagaagttctctaccattgaatcagtgaactagaaagatctgatttggcctgggaccagtgttcaagttggtttggtctttattaaaaatcacaatattccgaaaacaaaaaaacctaggagataaatgtagaggtattgacttttcgtatcttttatcttcacactgaaacaagagctatcctatttgattattaaagtgagctatgtgttaagtgccaggacatttctagcttttgtgagaatgtgtctacatatgagtataataaacccacatgtatacacaattgtctcttatgtactcctacctgacagtagtctttgtattctatagtatgttctgagatataatgttaacattgttcataacaaaaaatgctatcaatcttataaatatatgtaatctattttcttcataaaacaggcacaaaagttttatcagtaaggaattacagattgagaaatgatggaataatagacataattaattcaatacactactgttaaaatcatttgcaaagcactcagctcaattatcttcttagaaagaaagaaaaagtatgaatggtcaaaatgaatacatcgagagagataaatggcaaattgcttttttaaaagtttacataagttttttttaacccctagaatttaatatttgtagatgcaggtaaatatatatacttacgtgtatatcagtataaaaacactggtgtgcaattaattggattgattataataccaccttaagcacttgctgaaaaaagtgtggtcaaaattgattgctgtccttttgtcttatttttgtttttcttaagtcagctggttcataacataggccaaattctagagatgtttatagagcatttgaagtgctgataatttatgttttttcattatgaaaacttattttagctttagactccagtgtgttcagtgaataagtagaatataaaaaaatataaccagtattttacttcaaaagccaaaaagaggcaataagaaaagacactttgtggtggcctttatgtgtgcattaaaattggtttctgtaaaacgtgtaataagttgagtatctacgaagagtatcaagttctgaagtttaatttttttattatcctcctctcttcttagtaacttctttctgtggcaaaaccacaattctttaagattcctattgttcaggctaaggcaaatttttttgtttgtttcttcagtttaatattttgattttgtgtttttacgtaaatatttatattccttgaaagcaatttttgccaaggtagttcagtttaggaatatgttgttctaaaatatgtcttagaatcctgaaagcatagattttgaaatgtttttttaatgaaaatgaaggtcagagagaataattgccctgaccacatttgcctttcagtaggaggaggctgtgaaatagtaaaattataatcgtttatgccatgataaatacaagattggtaaataaatacattgattggtaaattatgagaatcaaaatgataaaaagagcctgcttttttccctaaccaatatagctatcttaagtatccttaggtttctgtgaagaaccatttcccatgttttcttggcaaaataatgctgtattccatatgtacatgtgaaatgatgttttaaattgataaaagcttaaataagatctacctatacccagtattttcatgatattagaacaaatgggtttttggttatattttatatttgtcaatataatttttgtattcacattctgttacactctgcctattcattgatatatgatattctgtaaatattgtacaatttgatcttttttatggtttaaattagttaattacatacaaattgattggcttatcacaaaaatcatttcatcagtaaaccttgttaacattttgtactggtgacccacctcttaggactttggtcttatccacgtgtatgttgttttcatttggtccaaataatattttatttgtatgggtatcttctaagactaaataggtagttgtgttctttatttttaaaatttctttttagagcaaatgttatgggttcttacccaaagagtcaaaaactatttcttaagaaagagcagagttattcatgactgttctttatacactaaaagcatgcatctaatctaatagtcctcttattatgcttttagttgtatgagtctctttctatgaactgaacacaaaactcaggaattggtggcttaattttagatcagtgcttgtactaggcttagttatatgaatctttataacacataattactaactttgtagccatatatgtaattgactttgaatgttatttacctgaaattaatcttccttcacacatggaccgtaaacggttcccagttgtctgagagcctcatgagggtttctaggatttatgaccttatgaccagtttttttcatttaccaagattttattttcctacatgaaaatttaattgagtaataattattcacatgtgcattttctttttagctgttaaatgtactatgccatcatccaccatttagtaaaatgtagctggcccaggacatgtaaa

SEQ ID NO: 233150 - DNA, 3903 bp, Homo sapiens
ggagtaacggattcgtcgaccacgccccgggacatttctagcttttgtgagaatgtgtctacatatgagtataataaacccacatgtatacacaattgtctcttatgtactcctacctgacagtagtctttgtattctatagtatgttctgagatataatgttaacattgttcataacaaaaaatgctatcaatcttataaatatatgtaatctattttcttcataaaacaggcacaaaagttttatcagtaaggaattacagattgagaaatgatggaataatagacataattaattcaatacactactgttaaaatcatttgcaaagcactcagctcaattatcttcttagaaagaaagaaaaagtatgaatggtcaaaatgaatacatcgagagagataaatggcaaattgcttttttaaaagtttacataagttttttttaacccctagaatttaatatttgtagatgcaggtaaatatatatacttacgtgtatatcagtataaaaacactggtgtgcaattaattggattgattataataccaccttaagcacttgctgaaaaaagtgtggtcaaaattgattgctgtccttttgtcttatttttgtttttcttaagtcagctggttcataacataggccaaattctagagatgtttatagagcatttgaagtgctgataatttatgttttttcattatgaaaacttattttagctttagactccagtgtgttcagtgaataagtagaatataaaaaaatataaccagtattttacttcaaaagccaaaaagaggcaataagaaaagacactttgtggtggcctttatgtgtgcattaaaattggtttctgtaaaacgtgtaataagttgagtatctacgaagagtatcaagttctgaagtttaatttttttattatcctcctctcttcttagtaacttctttctgtggcaaaaccacaattctttaagattcctattgttcaggctaaggcaaatttttttgtttgtttcttcagtttaatattttgattttgtgtttttacgtaaatatttatattccttgaaagcaatttttgccaaggtagttcagtttaggaatatgttgttctaaaatatgtcttagaatcctgaaagcatagattttgaaatgtttttttaatgaaaatgaaggtcagagagaataattgccctgaccacatttgcctttcagtaggaggaggctgtgaaatagtaaaattataatcgtttatgccatgataaatacaagattggtaaataaatacattgattggtaaattatgagaatcaaaatgataaaaagagcctgcttttttccctaaccaatatagctatcttaagtatccttaggtttctgtgaagaaccatttcccatgttttcttggcaaaataatgctgtattccatatgtacatgtgaaatgatgttttaaattgataaaagcttaaataagatctacctatacccagtattttcatgatattagaacaaatgggtttttggttatattttatatttgtcaatataatttttgtattcacattctgttacactctgcctattcattgatatatgatattctgtaaatattgtacaatttgatcttttttatggtttaaattagttaattacatacaaattgattggcttatcacaaaaatcatttcatcagtaaaccttgttaacattttgtactggtgacccacctcttaggactttggtcttatccacgtgtatgttgttttcatttggtccaaataatattttatttgtatgggtatcttctaagactaaataggtagttgtgttctttatttttaaaatttctttttagagcaaatgttatgggttcttacccaaagagtcaaaaactatttcttaagaaagagcagagttattcatgactgttctttatacactaaaagcatgcatctaatctaatagtcctcttattatgcttttagttgtatgagtctctttctatgaactgaacacaaaactcaggaattggtggcttaattttagatcagtgcttgtactaggcttagttatatgaatctttataacacataattactaactttgtagccatatatgtaattgactttgaatgttatttacctgaaattaatcttccttcacacatggaccgtaaacggttcccagttgtctgagagcctcatgagggtttctaggatttatgaccttatgaccagtttttttcatttaccaagattttattttcctacatgaaaatttaattgagtaataattattcacatgtgcattttctttttagctgttaaatgtactatgccatcatccaccatttagtaaaatgtagctggcccaggacatgtaaaaaaaaaaaaaaacaacaacaataaatagggcatgtgaaatgttaagttacagcaatagatattttatttgtatttcatgttagtacttttttgttttatatcacttataaaggtacagtgtactctttgtcacagctcagttggtaaccgcattccattgaaaagttggccttgtaaaatacaactctcatttaatattcatgcttttgtgcctttaagaaaatattttttgtcattttttgtgttacagaactataatgtgattcaaggtgtttataggcttgtcataaaagggtcatttctgtgtgttactttctttttatatagctatagtatatttaaacaataatactatcttttataggggtttgtctatttacctattctttactcagacattgatgtagacttgtcagattattctgagtattgttaacagtgccttttcgatggaatcacactttttggctgtcaccttgtgccatatacacacaaaattttgtggaaggcagttttaactttctgaagaatatctgtcaaaatttaagaaaacaaatgtataaaattccattttttccagtgtttagcatttctagtaagcagtgaggttgtttgacatacagtgatgatggcattattgataagccatacatgagactgcagattatattgaatcatattaaatgtacagaaataaaatattagatttatatcaaattttccaatttgaaccagtggggaaaatcccacagaaatcagtaagtttacatttcaatttctatcttatttgactaagtggaaagagattctttaaaatgtataacctgccattatgtaatttggtttcattttattctacctgttgtgtgagtttagtatatttaatttactttttgttactctttacatactgtttatttttgttagtttttaattgaagatggactgttgaaattgtataggaccagtgtcttattaatatgattaatatatttagaagagccacgtgaaacccatgacaaaatgaatgtgaatattctttctaaaaatttagaaaatgttatctttttgcatttattatgtaaaactgttttacagtatcaaaatttttcacttaaagaaaaaaaatgccatgaaacatttgaactgatgagccacagaacttcagttgaaatttttttcactttttagcatgctaaatatacatctgagtttaaatgttctgtttaatggccattcataaattcaagcactaccactggtcagttttgtgtgatagaataaaaatatgttacctgcagtgtaagtacagcacactgtcaaattcttttccttaaggtgcacagtaaatgtacagatagttataggccactgttttgtaatgtagtacatttctaatctattattcctaacctattataactgtttgcagaaagaaaagaatttttctaataatctgtaaaattatgctaacttctacaagtaggcttctaaataaaatttttaaaaagagaaaa

SEQ ID NO: 233151 - DNA, 1693 bp, Homo sapiens
cactagaatgtgaaggatcttcgcggttctgggtgcccagaaaggcggcgacgcggcggatgacaacattaggccgcgacgcgctcctggccaggcggcggctgtagtgttagctttggacgccgcagtagccgctgccggtagcaagccgactgagggaaggtgggggtccgcccgggctggtggacctcggggccgaaagttcccgccccgctcgggggctgagccggcagtgcctccgcggccgctgggcagcgcccttcgtccaggctcgcgccccagctgccgccgacgacagcggccgagagaagttggggtctgactagacgcttacggggcctcggaccccggcgccgcggcgacctcggaggaaccggctccttgcgtcccgcctccctgggagctccgcacgggatttgcagatttacagaatggctgcacattaatggaaagagaagcataaacctatcttctttcattatggagggaggtttggcagatggagaacctgatcgaacttcgctgttgtagcaaacagtgacgaatctcagcttctgacaccaggaaagatgagtcagcgccaaggaaaagaagcttatccaacgccaaccaaagatttgcatcagccatctcttagtccagcaagtcctcatagccagggttttgaaagagggaaggaagatatttctcaaaataaagatgaatcttcactttctatgtcaaagagcaagtctgaatctaaactttataatggctcagagaaggacagttcaacttcaagcaaactcacaaaaaaagaatctcttaaggtacaaaagaaaaattaccgagaagaaaagaaaagagccacaaaggagctgctcagtacaatcacagatccttctgttattgttatggctgattggttaaagattcgtggtactctaaagagctggaccaagttatggtgtgtgttgaaacctggggtgctactgatctataaaacccaaaaaaatggtcagtgggtaggaacagttcttctgaatgcctgtgaaatcattgaacgtccatcaaaaaaggatggcttttgtttcaaacttttccatcctttggagcaatctatttgggcagtgaagggtccaaaaggtgaagcggttggatccattactcaacccttacctagcagttatttgatcatccgagctacttcagagtcagatggaaggtgctggatggatgctttggagttggctttgaaatgttctagtcttcttaaacgtacaatgatcagagaaggaaaggaacatgacctgagcgtttcatcagatagcacacatgtgactttctatggcttactacgtgctaacaatctccacagtggtgataacttccagttaaatgatagtgaaattgaacgacaacattttaaggaccaagatatgtattctgataaatctgataaagaaaatgatcaagaacatgatgagtctgataatgaggtgatggggaaaagtgaagaaagtgacacagatacatcagaaagacaagatgactcatatatcgaacctgagcctgttgagcctttaaaggagactacctacactgaacagagccatgaagaacttggagaggtaaaagtctgctatttttagaggttctggattttcatattcttgggaattcttaaatgaaattgaagatattatttgcttga

SEQ ID NO: 233152 - DNA, 1144 bp, Homo sapiens
cactagaatgtgaaggatcttcgcggttctgggtgcccagaaaggcggcgacgcggcggatgacaacattaggccgcgacgcgctcctggccaggcggcggctgtagtgttagctttggacgccgcagtagccgctgccggtagcaagccgactgagggaaggtgggggtccgcccgggctggtggacctcggggccgaaagttcccgccccgctcgggggctgagccggcagtgcctccgcggccgctgggcagcgcccttcgtccaggctcgcgccccagctgccgccgacgacagcggccgagagaagttggggtctgactagacgcttacggggcctcggaccccggcgccgcggcgacctcggaggaaccggctccttgcgtcccgcctccctgggagctccgcacgggatttgcagatttacagaatggctgcacattaatggaaagagaagcataaacctatcttctttcattatggagggaggtttggcagatggagaacctgatcgaacttcgctgttgtagcaaacagtgacgaatctcagcttctgacaccaggaaagatgagtcagcgccaaggaaaagaagcttatccaacgccaaccaaagatttgcatcagccatctcttagtccagcaagtcctcatagccagggttttgaaagagggaaggaagatatttctcaaaataaagatgaatcttcactttctatgtcaaagagcaagtctgaatctaaactttataatggctcagagaaggacagttcaacttcaagcaaactcacaaaaaaagaatctcttaaggtacaaaagaaaaattaccgagaagaaaagaaaagagccacaaaggagctgctcagtacaatcacagatccttctgttattgttatggctgattggttaaaggtcagtgtgttttgaatcatgaattcagattgctggatgtttacctactggaatggaaaagcctggagtatacctaacgcctacaagacaaaaacagctcctaaaatgattgtttttcactggcaaagaaactattattgtattcccggaggttctgtgttcccatcttaatgaagagaaggaatcttaatgtctttcttaacaatagcatcaattacatacagtatagttct

SEQ ID NO: 233153 - DNA, 7647 bp, Homo sapiens
cactagaatgtgaaggatcttcgcggttctgggtgcccagaaaggcggcgacgcggcggatgacaacattaggccgcgacgcgctcctggccaggcggcggctgtagtgttagctttggacgccgcagtagccgctgccggtagcaagccgactgagggaaggtgggggtccgcccgggctggtggacctcggggccgaaagttcccgccccgctcgggggctgagccggcagtgcctccgcggccgctgggcagcgcccttcgtccaggctcgcgccccagctgccgccgacgacagcggccgagagaagttggggtctgactagacgcttacggggcctcggaccccggcgccgcggcgacctcggaggaaccggctccttgcgtcccgcctccctgggagctccgcacgggatttgcagatttacagaatggctgcacattaatggaaagagaagcataaacctatcttctttcattatggagggaggtttggcagatggagaacctgatcgaacttcgctgttgtagcaaacagtgacgaatctcagcttctgacaccaggaaagatgagtcagcgccaaggaaaagaagcttatccaacgccaaccaaagatttgcatcagccatctcttagtccagcaagtcctcatagccagggttttgaaagagggaaggaagatatttctcaaaataaagatgaatcttcactttctatgtcaaagagcaagtctgaatctaaactttataatggctcagagaaggacagttcaacttcaagcaaactcacaaaaaaagaatctcttaaggtacaaaagaaaaattaccgagaagaaaagaaaagagccacaaaggagctgctcagtacaatcacagatccttctgttattgttatggctgattggttaaagattcgtggtactctaaagagctggaccaagttatggtgtgtgttgaaacctggggtgctactgatctataaaacccaaaaaaatggtcagtgggtaggaacagttcttctgaatgcctgtgaaatcattgaacgtccatcaaaaaaggatggcttttgtttcaaacttttccatcctttggagcaatctatttgggcagtgaagggtccaaaaggtgaagcggttggatccattactcaacccttacctagcagttatttgatcatccgagctacttcagagtcagatggaaggtgctggatggatgctttggagttggctttgaaatgttctagtcttcttaaacgtacaatgatcagagaaggaaaggaacatgacctgagcgtttcatcagatagcacacatgtgactttctatggcttactacgtgctaacaatctccacagtggtgataacttccagttaaatgatagtgaaattgaacgacaacattttaaggaccaagatatgtattctgataaatctgataaagaaaatgatcaagaacatgatgagtctgataatgaggtgatggggaaaagtgaagaaagtgacacagatacatcagaaagacaagatgactcatatatcgaacctgagcctgttgagcctttaaaggagactacctacactgaacagagccatgaagaacttggagaggcaggtgaggcttctcaaacagaaactgtatctgaagaaaacaaaagccttatctggacactattgaaacaagtccgtcctggcatggacctatccaaggtggttctgcctacatttattttggaaccccgttctttcctggataaactttcagattactactatcatgcagatttcctatctgaggcagctcttgaagaaaatccttatttccgtttgaagaaagtagtgaaatggtatttgtcaggattctataaaaagccaaagggactgaagaaaccttataatcctatacttggcgagactttccgttgtttatggattcatcccagaacaaacagcaaaactttttatattgctgaacaggtgtcccatcatccaccaatatctgccttttatgttagtaatcgaaaagatggattttgccttagcggtagtatcctggctaagtctaagttttatggaaactcattatctgcaatattagagggagaagcacggttaactttcttgaatagaggtgaagattatgtaatgacaatgccatacgctcattgtaaaggaattctttatggtacaatgacactggagcttggtggaacagtcaatattacatgtcaaaaaactggatacagtgcaatacttgaatttaaactaaagccattcctagggagtagtgactgtgttaatcaaatatcagggaaacttaaactgggaaaagaagtcctagctactttggaaggtcattgggatagtgaagtttttattactgataaaaagactgataattcagaggttttctggaatccaacacctgacattaagcaatggagattaataaggcacactgtaaaatttgaagaacagggagattttgaatcagagaaactctggcaacgggtaactcgagccataaatgccaaagaccaaactgaagctacccaagagaagtatgttttggaagaagctcaaagacaagctgccagggatcggaaaacaaaaaatgaagagtggtcttgcaaattatttgaacttgatccactcacaggagaatggcattacaagtttgcagatacccgaccatgggacccacttaatgatatgatacagtttgaaaaagatggtgttattcagaccaaagtgaaacatcgtactccaatggttagcgtccccaaaatgaaacataagccaaccaggcaacagaagaaagtagcaaaaggctattcctccccagaacctgacattcaagactcctctggaagtgaagctcaatcagtaaaaccaagtacaagaagaaagaaaggaatagaactgggagacattcagagttccatcgaatctataaaacaaacacaggaagaaattaaaagaaatattatggctcttcgaaatcatttagtttcaagcacaccggccacggattattttctgcaacaaaaagactacttcatcattttcctcctgattttgcttcaagtcataataaacttcatgttcaagtagaagttctctaccattgaatcagtgaactagaaagatctgatttggcctgggaccagtgttcaagttggtttggtctttattaaaaatcacaatattccgaaaacaaaaaaacctaggagataaatgtagaggtattgacttttcgtatcttttatcttcacactgaaacaagagctatcctatttgattattaaagtgagctatgtgttaagtgccaggacatttctagcttttgtgagaatgtgtctacatatgagtataataaacccacatgtatacacaattgtctcttatgtactcctacctgacagtagtctttgtattctatagtatgttctgagatataatgttaacattgttcataacaaaaaatgctatcaatcttataaatatatgtaatctattttcttcataaaacaggcacaaaagttttatcagtaaggaattacagattgagaaatgatggaataatagacataattaattcaatacactactgttaaaatcatttgcaaagcactcagctcaattatcttcttagaaagaaagaaaaagtatgaatggtcaaaatgaatacatcgagagagataaatggcaaattgcttttttaaaagtttacataagttttttttaacccctagaatttaatatttgtagatgcaggtaaatatatatacttacgtgtatatcagtataaaaacactggtgtgcaattaattggattgattataataccaccttaagcacttgctgaaaaaagtgtggtcaaaattgattgctgtccttttgtcttatttttgtttttcttaagtcagctggttcataacataggccaaattctagagatgtttatagagcatttgaagtgctgataatttatgttttttcattatgaaaacttattttagctttagactccagtgtgttcagtgaataagtagaatataaaaaaatataaccagtattttacttcaaaagccaaaaagaggcaataagaaaagacactttgtggtggcctttatgtgtgcattaaaattggtttctgtaaaacgtgtaataagttgagtatctacgaagagtatcaagttctgaagtttaatttttttattatcctcctctcttcttagtaacttctttctgtggcaaaaccacaattctttaagattcctattgttcaggctaaggcaaatttttttgtttgtttcttcagtttaatattttgattttgtgtttttacgtaaatatttatattccttgaaagcaatttttgccaaggtagttcagtttaggaatatgttgttctaaaatatgtcttagaatcctgaaagcatagattttgaaatgtttttttaatgaaaatgaaggtcagagagaataattgccctgaccacatttgcctttcagtaggaggaggctgtgaaatagtaaaattataatcgtttatgccatgataaatacaagattggtaaataaatacattgattggtaaattatgagaatcaaaatgataaaaagagcctgcttttttccctaaccaatatagctatcttaagtatccttaggtttctgtgaagaaccatttcccatgttttcttggcaaaataatgctgtattccatatgtacatgtgaaatgatgttttaaattgataaaagcttaaataagatctacctatacccagtattttcatgatattagaacaaatgggtttttggttatattttatatttgtcaatataatttttgtattcacattctgttacactctgcctattcattgatatatgatattctgtaaatattgtacaatttgatcttttttatggtttaaattagttaattacatacaaattgattggcttatcacaaaaatcatttcatcagtaaaccttgttaacattttgtactggtgacccacctcttaggactttggtcttatccacgtgtatgttgttttcatttggtccaaataatattttatttgtatgggtatcttctaagactaaataggtagttgtgttctttatttttaaaatttctttttagagcaaatgttatgggttcttacccaaagagtcaaaaactatttcttaagaaagagcagagttattcatgactgttctttatacactaaaagcatgcatctaatctaatagtcctcttattatgcttttagttgtatgagtctctttctatgaactgaacacaaaactcaggaattggtggcttaattttagatcagtgcttgtactaggcttagttatatgaatctttataacacataattactaactttgtagccatatatgtaattgactttgaatgttatttacctgaaattaatcttccttcacacatggaccgtaaacggttcccagttgtctgagagcctcatgagggtttctaggatttatgaccttatgaccagtttttttcatttaccaagattttattttcctacatgaaaatttaattgagtaataattattcacatgtgcattttctttttagctgttaaatgtactatgccatcatccaccatttagtaaaatgtagctggcccaggacatgtaaaaaaaaaaaaaaacaacaacaataaatagggcatgtgaaatgttaagttacagcaatagatattttatttgtatttcatgttagtacttttttgttttatatcacttataaaggtacagtgtactctttgtcacagctcagttggtaaccgcattccattgaaaagttggccttgtaaaatacaactctcatttaatattcatgcttttgtgcctttaagaaaatattttttgtcattttttgtgttacagaactataatgtgattcaaggtgtttataggcttgtcataaaagggtcatttctgtgtgttactttctttttatatagctatagtatatttaaacaataatactatcttttataggggtttgtctatttacctattctttactcagacattgatgtagacttgtcagattattctgagtattgttaacagtgccttttcgatggaatcacactttttggctgtcaccttgtgccatatacacacaaaattttgtggaaggcagttttaactttctgaagaatatctgtcaaaatttaagaaaacaaatgtataaaattccattttttccagtgtttagcatttctagtaagcagtgaggttgtttgacatacagtgatgatggcattattgataagccatacatgagactgcagattatattgaatcatattaaatgtacagaaataaaatattagatttatatcaaattttccaatttgaaccagtggggaaaatcccacagaaatcagtaagtttacatttcaatttctatcttatttgactaagtggaaagagattctttaaaatgtataacctgccattatgtaatttggtttcattttattctacctgttgtgtgagtttagtatatttaatttactttttgttactctttacatactgtttatttttgttagtttttaattgaagatggactgttgaaattgtataggaccagtgtcttattaatatgattaatatatttagaagagccacgtgaaacccatgacaaaatgaatgtgaatattctttctaaaaatttagaaaatgttatctttttgcatttattatgtaaaactgttttacagtatcaaaatttttcacttaaagaaaaaaaatgccatgaaacatttgaactgatgagccacagaacttcagttgaaatttttttcactttttagcatgctaaatatacatctgagtttaaatgttctgtttaatggccattcataaattcaagcactaccactggtcagttttgtgtgatagaataaaaatatgttacctgcagtgtaagtacagcacactgtcaaattcttttccttaaggtgcacagtaaatgtacagatagttataggccactgttttgtaatgtagtacatttctaatctattattcctaacctattataactgtttgcagaaagaaaagaatttttctaataatctgtaaaattatgctaacttctacaagtaggcttctaaataaaatttttaaaaagagaaaaaaaaaaaaaaaaaaaaaaaaaaaaaaaaacccgggggcccttttttggggggggggaaaaaggggtttgaaaggggcccggggccaaagcttttttcgttgaacccagttctttttgtggtcatccaggggtggaataattcggcaaggagatcccccataataagggagaggccgctatatatttccgcgaaaataacgccaggggtgttacccctgctgtaatatctctccgcgagacgaacagggacggagacgaaggacaagcaccgacctacatagcacagagacaataaatgataatgaatcaccagagacgcgcatcagctggaacaaccattctgtaagagagcagcaagtagcacaggtgcagaacgaacaaaagacacaccgacgaccacggagattagtaagcgacaacaagacgaacacaatttacaaaga

SEQ ID NO: 233154 - DNA, 7213 bp, Homo sapiens
cactagaatgtgaaggatcttcgcggttctgggtgcccagaaaggcggcgacgcggcggatgacaacattaggccgcgacgcgctcctggccaggcggcggctgtagtgttagctttggacgccgcagtagccgctgccggtagcaagccgactgagggaaggtgggggtccgcccgggctggtggacctcggggccgaaagttcccgccccgctcgggggctgagccggcagtgcctccgcggccgctgggcagcgcccttcgtccaggctcgcgccccagctgccgccgacgacagcggccgagagaagttggggtctgactagacgcttacggggcctcggaccccggcgccgcggcgacctcggaggaaccggctccttgcgtcccgcctccctgggagctccgcacgggatttgcagatttacagaatggctgcacattaatggaaagagaagcataaacctatcttctttcattatggagggaggtttggcagatggagaacctgatcgaacttcgctgttgtagcaaacagtgacgaatctcagcttctgacaccaggaaagatgagtcagcgccaaggaaaagaagcttatccaacgccaaccaaagatttgcatcagccatctcttagtccagcaagtcctcatagccagggttttgaaagagggaaggaagatatttctcaaaataaagatgaatcttcactttctatgtcaaagagcaagtctgaatctaaactttataatggctcagagaaggacagttcaacttcaagcaaactcacaaaaaaagaatctcttaaggtacaaaagaaaaattaccgagaagaaaagaaaagagccacaaaggagctgctcagtacaatcacagatccttctgttattgttatggctgattggttaaagattcgtggtactctaaagagctggaccaagttatggtgtgtgttgaaacctggggtgctactgatctataaaacccaaaaaaatggtcagtgggtaggaacagttcttctgaatgcctgtgaaatcattgaacgtccatcaaaaaaggatggcttttgtttcaaacttttccatcctttggagcaatctatttgggcagtgaagggtccaaaaggtgaagcggttggatccattactcaacccttacctagcagttatttgatcatccgagctacttcagagtcagatggaaggtgctggatggatgctttggagttggctttgaaatgttctagtcttcttaaacgtacaatgatcagagaaggaaaggaacatgacctgagcgtttcatcagatagcacacatgtgactttctatggcttactacgtgctaacaatctccacagtggtgataacttccagttaaatgatagtgaaattgaacgacaacattttaaggaccaagatatgtattctgataaatctgataaagaaaatgatcaagaacatgatgagtctgataatgaggtgatggggaaaagtgaagaaagtgacacagatacatcagaaagacaagatgactcatatatcgaacctgagcctgttgagcctttaaaggagactacctacactgaacagagccatgaagaacttggagaggcaggtgaggcttctcaaacagaaactgtatctgaagaaaacaaaagccttatctggacactattgaaacaagtccgtcctggcatggacctatccaaggtggttctgcctacatttattttggaaccccgttctttcctggataaactttcagattactactatcatgcagatttcctatctgaggcagctcttgaagaaaatccttatttccgtttgaagaaagtagtgaaatggtatttgtcaggattctataaaaagccaaagggactgaagaaaccttataatcctatacttggcgagactttccgttgtttatggattcatcccagaacaaacagcaaaactttttatattgctgaacaggtgtcccatcatccaccaatatctgccttttatgttagtaatcgaaaagatggattttgccttagcggtagtatcctggctaagtctaagttttatggaaactcattatctgcaatattagagggagaagcacggttaactttcttgaatagaggtgaagattatgtaatgacaatgccatacgctcattgtaaaggaattctttatggtacaatgacactggagcttggtggaacagtcaatattacatgtcaaaaaactggatacagtgcaatacttgaatttaaactaaagccattcctagggagtagtgactgtgttaatcaaatatcagggaaacttaaactgggaaaagaagtcctagctactttggaaggtcattgggatagtgaagtttttattactgataaaaagactgataattcagaggttttctggaatccaacacctgacattaagcaatggagattaataaggcacactgtaaaatttgaagaacagggagattttgaatcagagaaactctggcaacgggtaactcgagccataaatgccaaagaccaaactgaagctacccaagagaagtatgttttggaagaagctcaaagacaagctgccagggatcggaaaacaaaaaatgaagagtggtcttgcaaattatttgaacttgatccactcacaggagaatggcattacaagtttgcagatacccgaccatgggacccacttaatgatatgatacagtttgaaaaagatggtgttattcagaccaaagtgaaacatcgtactccaatggttagcgtccccaaaatgaaacataagccaaccaggcaacagaagaaagtagcaaaaggctattcctccccagaacctgacattcaagactcctctggaagtgaagctcaatcagtaaaaccaagtacaagaagaaagaaaggaatagaactgggagacattcagagttccatcgaatctataaaacaaacacaggaagaaattaaaagaaatattatggctcttcgaaatcatttagtttcaagcacaccggccacggattattttctgcaacaaaaagactacttcatcattttcctcctgattttgcttcaagtcataataaacttcatgttcaagtagaagttctctaccattgaatcagtgaactagaaagatctgatttggcctgggaccagtgttcaagttggtttggtctttattaaaaatcacaatattccgaaaacaaaaaaacctaggagataaatgtagaggtattgacttttcgtatcttttatcttcacactgaaacaagagctatcctatttgattattaaagtgagctatgtgttaagtgccaggacatttctagcttttgtgagaatgtgtctacatatgagtataataaacccacatgtatacacaattgtctcttatgtactcctacctgacagtagtctttgtattctatagtatgttctgagatataatgttaacattgttcataacaaaaaatgctatcaatcttataaatatatgtaatctattttcttcataaaacaggcacaaaagttttatcagtaaggaattacagattgagaaatgatggaataatagacataattaattcaatacactactgttaaaatcatttgcaaagcactcagctcaattatcttcttagaaagaaagaaaaagtatgaatggtcaaaatgaatacatcgagagagataaatggcaaattgcttttttaaaagtttacataagttttttttaacccctagaatttaatatttgtagatgcaggtaaatatatatacttacgtgtatatcagtataaaaacactggtgtgcaattaattggattgattataataccaccttaagcacttgctgaaaaaagtgtggtcaaaattgattgctgtccttttgtcttatttttgtttttcttaagtcagctggttcataacataggccaaattctagagatgtttatagagcatttgaagtgctgataatttatgttttttcattatgaaaacttattttagctttagactccagtgtgttcagtgaataagtagaatataaaaaaatataaccagtattttacttcaaaagccaaaaagaggcaataagaaaagacactttgtggtggcctttatgtgtgcattaaaattggtttctgtaaaacgtgtaataagttgagtatctacgaagagtatcaagttctgaagtttaatttttttattatcctcctctcttcttagtaacttctttctgtggcaaaaccacaattctttaagattcctattgttcaggctaaggcaaatttttttgtttgtttcttcagtttaatattttgattttgtgtttttacgtaaatatttatattccttgaaagcaatttttgccaaggtagttcagtttaggaatatgttgttctaaaatatgtcttagaatcctgaaagcatagattttgaaatgtttttttaatgaaaatgaaggtcagagagaataattgccctgaccacatttgcctttcagtaggaggaggctgtgaaatagtaaaattataatcgtttatgccatgataaatacaagattggtaaataaatacattgattggtaaattatgagaatcaaaatgataaaaagagcctgcttttttccctaaccaatatagctatcttaagtatccttaggtttctgtgaagaaccatttcccatgttttcttggcaaaataatgctgtattccatatgtacatgtgaaatgatgttttaaattgataaaagcttaaataagatctacctatacccagtattttcatgatattagaacaaatgggtttttggttatattttatatttgtcaatataatttttgtattcacattctgttacactctgcctattcattgatatatgatattctgtaaatattgtacaatttgatcttttttatggtttaaattagttaattacatacaaattgattggcttatcacaaaaatcatttcatcagtaaaccttgttaacattttgtactggtgacccacctcttaggactttggtcttatccacgtgtatgttgttttcatttggtccaaataatattttatttgtatgggtatcttctaagactaaataggtagttgtgttctttatttttaaaatttctttttagagcaaatgttatgggttcttacccaaagagtcaaaaactatttcttaagaaagagcagagttattcatgactgttctttatacactaaaagcatgcatctaatctaatagtcctcttattatgcttttagttgtatgagtctctttctatgaactgaacacaaaactcaggaattggtggcttaattttagatcagtgcttgtactaggcttagttatatgaatctttataacacataattactaactttgtagccatatatgtaattgactttgaatgttatttacctgaaattaatcttccttcacacatggaccgtaaacggttcccagttgtctgagagcctcatgagggtttctaggatttatgaccttatgaccagtttttttcatttaccaagattttattttcctacatgaaaatttaattgagtaataattattcacatgtgcattttctttttagctgttaaatgtactatgccatcatccaccatttagtaaaatgtagctggcccaggacatgtaaaaaaaaaaaaaaacaacaacaataaatagggcatgtgaaatgttaagttacagcaatagatattttatttgtatttcatgttagtacttttttgttttatatcacttataaaggtacagtgtactctttgtcacagctcagttggtaaccgcattccattgaaaagttggccttgtaaaatacaactctcatttaatattcatgcttttgtgcctttaagaaaatattttttgtcattttttgtgttacagaactataatgtgattcaaggtgtttataggcttgtcataaaagggtcatttctgtgtgttactttctttttatatagctatagtatatttaaacaataatactatcttttataggggtttgtctatttacctattctttactcagacattgatgtagacttgtcagattattctgagtattgttaacagtgccttttcgatggaatcacactttttggctgtcaccttgtgccatatacacacaaaattttgtggaaggcagttttaactttctgaagaatatctgtcaaaatttaagaaaacaaatgtataaaattccattttttccagtgtttagcatttctagtaagcagtgaggttgtttgacatacagtgatgatggcattattgataagccatacatgagactgcagattatattgaatcatattaaatgtacagaaataaaatattagatttatatcaaattttccaatttgaaccagtggggaaaatcccacagaaatcagtaagtttacatttcaatttctatcttatttgactaagtggaaagagattctttaaaatgtataacctgccattatgtaatttggtttcattttattctacctgttgtgtgagtttagtatatttaatttactttttgttactctttacatactgtttatttttgttagtttttaattgaagatggactgttgaaattgtataggaccagtgtcttattaatatgattaatatatttagaagagccacgtgaaacccatgacaaaatgaatgtgaatattctttctaaaaatttagaaaatgttatctttttgcatttattatgtaaaactgttttacagtatcaaaatttttcacttaaagaaaaaaaatgccatgaaacatttgaactgatgagccacagaacttcagttgaaatttttttcactttttagcatgctaaatatacatctgagtttaaatgttctgtttaatggccattcataaattcaagcactaccactggtcagttttgtgtgatagaataaaaatatgttacctgcagtgtaagtacagcacactgtcaaattcttttccttaaggtgcacagtaaatgtacagatagttataggccactgttttgtaatgtagtacatttctaatctattattcctaacctattataactgtttgcagaaagaaaagaatttttctaataatctgtaaaattatgctacatactaccgtcgacttcataatagttcggcgtgcttgcctctgcgccttgggg

SEQ ID NO: 233155 - DNA, 5209 bp, Homo sapiens
ggaacatgagtcagttatatcagggtgatctttcttaatatgtttattttgatttaatatagtctgcttgttttatcctatttttttcatagcagcaattcagatttcttattaaacatttctaactaaaatttgagtcagtatttttttactgcttgtgcattcaatagtactgtaactatacaagcaatttttgttgggttttttgttttggttttacattatatgtaaatataagtgaaaagtaaaatgtttaacattttctcgtttaaaagccattcctagggagtagtgactgtgttaatcaaatatcagggaaacttaaactgggaaaagaagtcctagctactttggaaggtcattgggatagtgaagtttttattactgataaaaagactgataattcagaggttttctggaatccaacacctgacattaagcaatggagattaataaggcacactgtaaaatttgaagaacagggagattttgaatcagagaaactctggcaacgggtaactcgagccataaatgccaaagaccaaactgaagctacccaagagaagtatgttttggaagaagctcaaagacaagctgccagggatcggaaaacaaaaaatgaagagtggtcttgcaaattatttgaacttgatccactcacaggagaatggcattacaagtttgcagatacccgaccatgggacccacttaatgatatgatacagtttgaaaaagatggtgttattcagaccaaagtgaaacatcgtactccaatggttagcgtccccaaaatgaaacataagccaaccaggcaacagaagaaagtagcaaaaggctattcctccccagaacctgacattcaagactcctctggaagtgaagctcaatcagtaaaaccaagtacaagaagaaagaaaggaatagaactgggagacattcagagttccatcgaatctataaaacaaacacaggaagaaattaaaagaaatattatggctcttcgaaatcatttagtttcaagcacaccggccacggattattttctgcaacaaaaagactacttcatcattttcctcctgattttgcttcaagtcataataaacttcatgttcaagtagaagttctctaccattgaatcagtgaactagaaagatctgatttggcctgggaccagtgttcaagttggtttggtctttattaaaaatcacaatattccgaaaacaaaaaaacctaggagataaatgtagaggtattgacttttcgtatcttttatcttcacactgaaacaagagctatcctatttgattattaaagtgagctatgtgttaagtgccaggacatttctagcttttgtgagaatgtgtctacatatgagtataataaacccacatgtatacacaattgtctcttatgtactcctacctgacagtagtctttgtattctatagtatgttctgagatataatgttaacattgttcataacaaaaaatgctatcaatcttataaatatatgtaatctattttcttcataaaacaggcacaaaagttttatcagtaaggaattacagattgagaaatgatggaataatagacataattaattcaatacactactgttaaaatcatttgcaaagcactcagctcaattatcttcttagaaagaaagaaaaagtatgaatggtcaaaatgaatacatcgagagagataaatggcaaattgcttttttaaaagtttacataagttttttttaacccctagaatttaatatttgtagatgcaggtaaatatatatacttacgtgtatatcagtataaaaacactggtgtgcaattaattggattgattataataccaccttaagcacttgctgaaaaaagtgtggtcaaaattgattgctgtccttttgtcttatttttgtttttcttaagtcagctggttcataacataggccaaattctagagatgtttatagagcatttgaagtgctgataatttatgttttttcattatgaaaacttattttagctttagactccagtgtgttcagtgaataagtagaatataaaaaaatataaccagtattttacttcaaaagccaaaaagaggcaataagaaaagacactttgtggtggcctttatgtgtgcattaaaattggtttctgtaaaacgtgtaataagttgagtatctacgaagagtatcaagttctgaagtttaatttttttattatcctcctctcttcttagtaacttctttctgtggcaaaaccacaattctttaagattcctattgttcaggctaaggcaaatttttttgtttgtttcttcagtttaatattttgattttgtgtttttacgtaaatatttatattccttgaaagcaatttttgccaaggtagttcagtttaggaatatgttgttctaaaatatgtcttagaatcctgaaagcatagattttgaaatgtttttttaatgaaaatgaaggtcagagagaataattgccctgaccacatttgcctttcagtaggaggaggctgtgaaatagtaaaattataatcgtttatgccatgataaatacaagattggtaaataaatacattgattggtaaattatgagaatcaaaatgataaaaagagcctgcttttttccctaaccaatatagctatcttaagtatccttaggtttctgtgaagaaccatttcccatgttttcttggcaaaataatgctgtattccatatgtacatgtgaaatgatgttttaaattgataaaagcttaaataagatctacctatacccagtattttcatgatattagaacaaatgggtttttggttatattttatatttgtcaatataatttttgtattcacattctgttacactctgcctattcattgatatatgatattctgtaaatattgtacaatttgatcttttttatggtttaaattagttaattacatacaaattgattggcttatcacaaaaatcatttcatcagtaaaccttgttaacattttgtactggtgacccacctcttaggactttggtcttatccacgtgtatgttgttttcatttggtccaaataatattttatttgtatgggtatcttctaagactaaataggtagttgtgttctttatttttaaaatttctttttagagcaaatgttatgggttcttacccaaagagtcaaaaactatttcttaagaaagagcagagttattcatgactgttctttatacactaaaagcatgcatctaatctaatagtcctcttattatgcttttagttgtatgagtctctttctatgaactgaacacaaaactcaggaattggtggcttaattttagatcagtgcttgtactaggcttagttatatgaatctttataacacataattactaactttgtagccatatatgtaattgactttgaatgttatttacctgaaattaatcttccttcacacatggaccgtaaacggttcccagttgtctgagagcctcatgagggtttctaggatttatgaccttatgaccagtttttttcatttaccaagattttattttcctacatgaaaatttaattgagtaataattattcacatgtgcattttctttttagctgttaaatgtactatgccatcatccaccatttagtaaaatgtagctggcccaggacatgtaaaaaaaaaaaaaaacaacaacaataaatagggcatgtgaaatgttaagttacagcaatagatattttatttgtatttcatgttagtacttttttgttttatatcacttataaaggtacagtgtactctttgtcacagctcagttggtaaccgcattccattgaaaagttggccttgtaaaatacaactctcatttaatattcatgcttttgtgcctttaagaaaatattttttgtcattttttgtgttacagaactataatgtgattcaaggtgtttataggcttgtcataaaagggtcatttctgtgtgttactttctttttatatagctatagtatatttaaacaataatactatcttttataggggtttgtctatttacctattctttactcagacattgatgtagacttgtcagattattctgagtattgttaacagtgccttttcgatggaatcacactttttggctgtcaccttgtgccatatacacacaaaattttgtggaaggcagttttaactttctgaagaatatctgtcaaaatttaagaaaacaaatgtataaaattccattttttccagtgtttagcatttctagtaagcagtgaggttgtttgacatacagtgatgatggcattattgataagccatacatgagactgcagattatattgaatcatattaaatgtacagaaataaaatattagatttatatcaaattttccaatttgaaccagtggggaaaatcccacagaaatcagtaagtttacatttcaatttctatcttatttgactaagtggaaagagattctttaaaatgtataacctgccattatgtaatttggtttcattttattctacctgttgtgtgagtttagtatatttaatttactttttgttactctttacatactgtttatttttgttagtttttaattgaagatggactgttgaaattgtataggaccagtgtcttattaatatgattaatatatttagaagagccacgtgaaacccatgacaaaatgaatgtgaatattctttctaaaaatttagaaaatgttatctttttgcatttattatgtaaaactgttttacagtatcaaaatttttcacttaaagaaaaaaaatgccatgaaacatttgaactgatgagccacagaacttcagttgaaatttttttcactttttagcatgctaaatatacatctgagtttaaatgttctgtttaatggccattcataaattcaagcactaccactggtcagttttgtgtgatagaataaaaatatgttacctgcagtgtaagtacagcacactgtcaaattcttttccttaaggtgcacagtaaatgtacagatagttataggccactgttttgtaatgtagtacatttctaatctattattcctaacctattataactgtttgcagaaagaaaagaatttttctaataatctgtaaaattatgctaacttctacaagtaggcttctaaataaaatttttaaaaagagaaaa

SEQ ID NO: 233156 - DNA, 1131 bp, Homo sapiens
cactagaatgtgaaggatcttcgcggttctgggtgcccagaaaggcggcgacgcggcggatgacaacattaggccgcgacgcgctcctggccaggcggcggctgtagtgttagctttggacgccgcagtagccgctgccggtagcaagccgactgagggaaggtgggggtccgcccgggctggtggacctcggggccgaaagttcccgccccgctcgggggctgagccggcagtgcctccgcggccgctgggcagcgcccttcgtccaggctcgcgccccagctgccgccgacgacagcggccgagagaagttggggtctgactagacgcttacggggcctcggaccccggcgccgcggcgacctcggaggaaccggctccttgcgtcccgcctccctgggagctccgcacgggatttgcagatttacagaatggctgcacattaatggaaagagaagcataaacctatcttctttcattatggagggaggtttggcagatggagaacctgatcgaacttcgctgttgtagcaaacagtgacgaatctcagcttctgacaccaggaaagatgagtcagcgccaaggaaaagaagcttatccaacgccaaccaaagatttgcatcagccatctcttagtccagcaagtcctcatagccagggttttgaaagagggaaggaagatatttctcaaaataaagatgaatcttcactttctatgtcaaagagcaagtctgaatctaaactttataatggctcagagaaggacagttcaacttcaagcaaactcacaaaaaaagaatctcttaaggtacaaaagaaaaattaccgagaagaaaagaaaagagccacaaaggagctgctcagtacaatcacagatccttctgttattgttatggctgattggttaaagattcgtggtactctaaagagctggaccaagttatggtgtgtgttgaaacctggggtgctactgatcacatcctttggatttaaaatgtcttttgagcaacttgaacaagttttcttggtgagaggaggcggtgggcggtcaggtggaactgtatatccagtgaggcacagtgtggagcagaatagctgagtagaccctttcctctggtgggtcagaacat

SEQ ID NO: 233157 - DNA, 563 bp, Homo sapiens
tgcagagataggaatgttctgtacctgtgccatccaatacagtaggcattagccagatgtggctcttgagcacttgaaatgcagttagtataactgaggaaataaagttttaattttacttaatttaaatctccacatgaggttggtgtttactgtattggacagtatagctctagcttctgcttaccttgtgatgaccactctcttgtttagacagactagttgcaagtcagggtctatgatcagagctgaccatgattagccatttcaaggtgacacccaccaagaagaatataatttcccaaaataataatgttctaaacctaggagaataaaaagtgggtacaagtactatcattgctaaggttttaaaaattattattattatattcagtaactgagaataaatagcatattgctgaattataggtataattttagggagagtcagtgaccacataaaccacgaaagtaaagattagaatttaatttcagccaggtgattatgcaggacttggacggtaggtactaagggatgacttggcttaggatcaaaccatagc

SEQ ID NO: 233158 - DNA, 466 bp, Homo sapiens
tgccgatgtgcctcagggtttacaggagaggactgccagtactcgacatctcatccatgctttgtgtctcgaccttgcctgaatggcggcacatgccatatgctcagccgggatacctatgagtgcacctgtcaatgagtgtgacattccaggacactgccagcatggtggcacctgcctcaacctgcctggttcctaccagtgccagtgccttcagggcttcacaggccagtactgtgacagcctgtatgtgccctgtgcaccctcgccttgtgtcaatggaggcacctgtcggcagactggtgacttcacttttgagtgcaactgccttccagaaacagtgagaagaggaacagagctctgggaaagagacagggaagtctggaatggaaaagaacacgatgagaattagacactggaaaatatgtatgtgtggttaataaagtgctttaaactgaattgacat

SEQ ID NO: 233159 - DNA, 367 bp, Homo sapiens
ttgcaggaagaaatggtgaaggcagacagctttgtagatttagaagggtgcttctttcttccctttctattggttttccccagagaagactacgtgtggatatctactataaaacatgtgtgcatggaaaattgtagggccagatgcttctggattaagagaacatgaccagttttatcatgatgaggatatggattttatccacagaacagggagggcaaaagcaagcctgtgggcacagtatgtgatgataagcactttggaaggatttgtgaatgatacaacggagttatacaaatctttggaagctgacaatggtaattaaagtgaccattggaatattaaaccatcatttgttattagagta

SEQ ID NO: 233160 - DNA, 749 bp, Homo sapiens
tctgtttatatcaacttcgccagctgagcaataaaagatggcttgggtagctttctctcaggagcaaaagctcacaccctttcccccgcatttcaacatttaccaaaatgtcatcaccaagggcaaaaatgaaagtgtatggctctgagatggagcaggatgtttccagatgaactatggagggcctgagtgatgttctcaaatcccaagactccaggaggccaaaaagttgtgttctacttgccaaacaccacataaggaagacatcaatcccttagcctgaccatttttgccagcattttcaactccaagagtttttttttttatcttatccatatgtgttcataaattcttataccaatttaataaagaagtttcactttgataggaagcatgcaccatgaggctaaacatgaaagggcttcttttctgggtgaaatgaactttgttacaataaatcaaaattgaagctcctttgaatggaaagcactcaattgttggcctcttcactattcctgaggctactattatatttaccttgggacaagctagaggtgtgatgtgactcatacatccatatgcttgggggtggggaccaggtgccagcacagtgtcaaacttggacacataaagcgtggtctgcagtgacctggagtttttactccatatatccttagaagaaaaaaaactggttatcgggccaggtgcagcggctcacgcctgcaatcccagcaccttgggaggccgag

SEQ ID NO: 233161 - DNA, 381 bp, Homo sapiens
attaagattggtttccttccctcactgtcatatcacatcattaaaaaaacttgcttcccaagtacttcccttttataaccaaaagccacaatgccagtttatcatactgagtttttttaaactaggtcaatgtaccaaagtcacaattttaggtgtttttaacctattccatagtcagagaagagttaactttaacaaatctgtcacgaatgggatttaccagtcttcaatatacttactatgacagcctgtctttggtttaagaaacagcaccgtgtggtgccatgaaagagcacagtagtgatgtcttcctacaaactcattgctgaatttcatctaaagcttcaaagatctgggtggtctaaacacctatagtgaacc

SEQ ID NO: 233162 - DNA, 410 bp, Homo sapiens
gcattctgtgaatttcctattacatcagtttcatgattcagcattttccatttcatttatttacagtaatatatggcgagataacccaaggtttctgcaggattgtggaacataagttactctgggcaggaagggtgtcgccttctgtaaatttactattgtttaggagaactcaaaacagaagcaagcaagccctcaaaggaactgagaaaatttctccccactttgttctgaggggtctcagctactctggtatttaaaataaatgggttttgaaaaataggttactgccctttagttgatgactaaaacagaagccaagaagtgtgcaaattgcaaactgacatgcatgagccaaacatattctctgaaatgacaatgttcaagacgcagctaaagtcaccactctg

SEQ ID NO: 233163 - DNA, 560 bp, Homo sapiens
tgggaacatggtaattgtgtaagacacactggggttgtatcagaaggacccacaggggccctgctggcacagatggggcaagcgagagtgaacaagaacaaggagcccctgagttagatgtgttaaaaatccaaggctggctggatgccgtggctcacacctgtaatcccagcacttcgggaggctgaggcaggtggatcatttgaggtcaggagttcaagaccagcctggccaatatggtgaaaccccgtctctactgaaaatataaaaattagctgggtgatagtgacgcacgcctgtaatcccagctactcgagaggctgaggcaggagaattgcttcagcctgggaggcggaaagttgcagtgagccaagatcgcgccactgcactccagtctgggcaacagagtaagactgtgtctcacaaaaagaaaaacccaagggtttaagctggctgtggttatacgcacctgccatcctagctgttccggaggccaaggccataggattgcctgagctcaggagttggagtctagcctgagcaatgtagcaggacccccc

SEQ ID NO: 233164 - DNA, 502 bp, Homo sapiens
tgggaacatggtaattgtgtaagacacactggggttgtatcagaaggacccacaggggccctgctggcacagatggggcaagcgagagtgaacaagaacaaggagcccctgagttagatgtgttaaaaatccaaggctggctggatgccgtggctcacacctgtaatcccagcacttcgggaggctgaggcaggtggatcatttgaggtcaggagttcaagaccagcctggccaatatggtgaaaccccgtctctactgaaaatgaggcaggagaattgcttcagcctgggaggcggaaagttgcagtgagccaagatcgcgccactgcactccagtctgggcaacagagtaagactgtgtctcacaaaaagaaaaacccaagggtttaagctggctgtggttatacgcacctgccatcctagctgttccggaggccaaggccataggattgcctgagctcaggagttggagtctagcctgagcaatgtagcaggacccccc

SEQ ID NO: 233165 - DNA, 498 bp, Homo sapiens
cgattcaggagctatttacagcacctgccagcatttctaatgtctcagtgctgcccctgagaaccagcgccggcgtcacaaccagccccattccccctcgtgttctcagctgtagccaagccctggtccagcagtagctgggtaggaaatgcatgcagctcctgccggggcctcccgccccaaccctctctcctgacaggcgatttgctgggctggaggacagggccaggtcttggccttggcaccgtcctgggtcacgagtgtatggttctggtcactctgctgtggtgcgaggatgaaggtgccagcccagtgtgggcaaccctcacagccagaatgttccagtgccccgcacctcgggaccctggatgtgtgcggctgccgtcacaaagtaccgcagacccagcagcttaaaccacagaaatttattctatcacagtcctgaaggcccagagtacaagatcaaagtgtctgcagattctgtttgtctgaggtctc

SEQ ID NO: 233166 - DNA, 358 bp, Homo sapiens
aaccatttttaatttttttagctgttgtctttagggattgatggtactagattggtaatacaagaataaccaaccggaatagagaagatgtttatacattcagtaaacttttctttggttttagatttttctgtctatgagctttagttgcgttattgttttcttgctctggaaaaccctaactgaatgcaatcaagatgcctctaaaggttcaattgagagagctttattttgaatgaaaaatctcattgttttttgatgaaatgctagacttagaaatggattggttaaatctgaagaataatgaaaccacttaatctagtataaaatacttttaataaatgaacagaagatttta

SEQ ID NO: 233167 - DNA, 416 bp, Homo sapiens
tcttaaaaaagcaatgcattagcatcaacaacgggattaattaggcttccctagaaactgttcaaacaaagaattgtgcagttctctaggaaggtcaggctttttcattcttttctgcagcagttcaagttatcacttctgcacaggcccacgttctgccacaggttggaggaacattcattccactgccctggggtctgatgggatcagacactggttcccaggggtggtgctctgaatggccaggccttcaagggtattagccagaagtgctgggttccaggaccaaggcctaacgaaaagatgaagggctttgaagtccagcatagtaagctctgccattccccccactggacttcattttcctcctccgtgaaataggcctgatattctctatagagcaaagttgccatcaa

SEQ ID NO: 233168 - DNA, 434 bp, Homo sapiens
aagattaggtttccagactacccttttgagtcagtcgctattacacggtatagtcccaaagaaatttaagggccactcttggaattttttaaaagcaacatgtatttcacagtttgtgggtcaagaacctggatgcccttagctcagtgtctctcaggaggccacaattggagtggtgactaaggctgtggtctgatctgaaggctggacaggggaaagatctacttccaagttcacatatgtatttgttccagtcatagaattttaaagttagaagaaacctggaaacataagagcaaataaatataaataactgccaggcacggtggctcatgcctgtaatcccagcactttgggaagctgaggcgagtcagttggggtcaggagttcgagaccagtttggccaacatggtgagacctcatctctactgaaa

SEQ ID NO: 233169 - DNA, 614 bp, Homo sapiens
ggcctccggccgctctcggctgcgggccatggccgctccccggcgcgtccccacacggtccccgccccagtctggccgcagcccaccccgcgccgccactgggcagatgggggcggcggctcctgcctcccggctttcggaagagcagagcggagcgcgcctgaccgagtcaggcttccgagtgggattggaacccggggcgccctgaagtttggggaaagcaggagcagaagggaagggatgcgctccccgctctccggcggcgcggaatgggcctccttccagcctctgcgtaggcaagatttccccagttgcgcgctgcaccggggactccccagcccgtgaggcagccaagaggagagcgctcagtgaccctctgggggcagagccgtcaggccaagttcatgggcaggaagactttgtgcacgtgggggtctctgaaggttgagcgcgagctctgcacccccacttcgaggcactcaagaagcggaacagacgcgagccccgccgggggtgcgggtgagggctgcagggagcccgcgaacgacagaaagtcgccccccgcattccaccggagcactcgggaacacggcttccaggtgtcccagcggccg

SEQ ID NO: 233170 - DNA, 535 bp, Homo sapiens
atggagtcaacgctataattagacttctgaaaatgagcaactactagagaatcccaagagattctttcaggaactggaaaggagcagagcatatgaaaataaagacattgtacagagtcagcaaaccatgagatgcactggccaaatccagcccaccggcttgttttcaaacagcttgcaagctagaaatggattttacattttaaaaattattggaaaaaaaatcaaaagaaattaatatttcacaacacacgaaaaattatatgaaatttaaatttcacagaccatagataaagtttcattgtaacgcagccatgctaattctttaggtattatctatggctgctctcatgctacaatggcaaacttgtgtagttgtgacagaaaccacagggttcacaaagtctaaaatactatgtggccttttacagaaaaaagtttgataaaacttggtctattttaacaatgtaataacaattcaccacagacaaacccaaaattacaaaattctcagtctgcagtattctttaaaaaa

SEQ ID NO: 233171 - DNA, 610 bp, Homo sapiens
gatgccatcagtcactgtgacaaatggtgtgtggggggagcttgctggctgaagcattgtcaccgtgggtaattatacacttaatattcatgtgttatcgttccacctggaatctttaaactcttcatccaggagacactaatcttcaccttattattacgtcctaatgtcactctagcagaagaatggggctgccaacagggggagagaacttcctccttctcctctaggttgtaataaacatggttatttgttatttgaactctggctgaagataagacgctatatgcccctgccagatatggcccaggtgtagagatgagtccaggttattgttaaaagagtgaaaatgcccctgtcacattccccatcgttttcttccatctataaagatgatggcaatggtgttggcaatggtggtgataatgatgattatcaagtgagcattattccatttttaggcatgatggaaggaaaagtcaaatgcagtgttcttaacacttcttataacgttcagaaaccaccagatagagagaatgctgtctgtccttaatgcaagcagcccttggaattggttctagagctgcatgagctgccgatgggaaagtga

SEQ ID NO: 233172 - DNA, 1030 bp, Homo sapiens
agctcaagcactccgggggctccgagacagcctgagccctggccctgctgcttggtgaatcatgggggccaaaaggggctgctgcctgagggctaactaggaaaagggggaccccgtggcgtgagatcggacatggggggcacagcaggcggccccgccacactagtcagcacagccctcctgtctcctgtgttgggtccatgtgagattttattagaaagaggattcgactgctaacagttgaggctccccaggctcacccaaagacccctccctcgtcccagcaggaactcctgctgctgctagggcctggcccggccatcaccgtgtgcaccctcttgaggagggggacacactgcccgtgttcaaggggctgctcggaggaggcaaacccagccttttgcgattatggcttgtggggaatccagacctcgaaaccccacggggagggaagggtctggttgtcaaggtgggtccctttgatgtgaggtgccatcctctgagcccaggtctgacccccctacccagccccgtgagtctggagaggccccagggaaggacccctcatcaggggcggcttcaggtgtagaagccgaggggacagcaaggggcccagacacccccgaccttcagaacagccatctgtgcccagctctgcaggccaggcacacccagctgagcccggggccagccagcaccacccaccagctggggcctgtgggtcccggagaccgtctgtggttgtggctttgtcgccggattgcagagctgaagggagccctgtggatgacaaacaccaggggcctctccagaccctacgtggggggagggctgaacaaagcagggaggcccacggttagacaccaggcagaactgcccaggagagacacagggacaatcagaccagcgtcctcgaggttagcctgaggcgggtgggcacggccgaccatccacccggtggttcctgtttgtcccaccacttaactgggagacactgttttattaaaacacaccgtggcttccttcagtc

SEQ ID NO: 233173 - DNA, 843 bp, Homo sapiens
agctcaagcactccgggggctccgagacagcctgagccctggccctgctgcttggtgaatcatgggggccaaaaggggctgctgcctgagggctaactaggaaaagggggaccccgtggcgtgagatcggacatggggggcacagcaggcggccccgccacactagtcagcacagccctcctgtctcctgtgttgggtccatgtgagattttattagaaagaggattcgactgctaacagttgaggctccccaggctcacccaaagacccctccctcgtcccagcaggaactcctgctgctgctagggcctggcccggccatcaccgtgtgcaccctcttgaggagggggacacactgcccgtgttcaaggggctgctcggaggaggcaaacccagccttttgcgattatggcttgtggggaatccagacctcgaaaccccacggggagggaagggtctggttgtcaaggtgggtccctttgatgtgaggtgccatcctctgagcccaggtctgacccccctacccagccccgtgagtctggagaggccccagggaaggacccctcatcaggggcggcttcaggtgtagaagccgaggggacagcaaggggcccagacacccccgaccctacgtggggggagggctgaacaaagcagggaggcccacggttagacaccaggcagaactgcccaggagagacacagggacaatcagaccagcgtcctcgaggttagcctgaggcgggtgggcacggccgaccatccacccggtggttcctgtttgtcccaccacttaactgggagacactgttttattaaaacacaccgtggcttccttcagtc

SEQ ID NO: 233174 - DNA, 154 bp, Homo sapiens
ttagccctgttaaaagaatttctttcctgtagaaacaggaagttacattttgtagcgtgtaaccccctaaagtctctaaaggatctagacaaatttgtagttctagtctcaaaggctccaaatccagacaaaattcttccctaatgtactcccc

SEQ ID NO: 233175 - DNA, 264 bp, Homo sapiens
caaggtgatagttttaagaggtggtgcctttaggagctgattaaggcatttgggcagagccattctgaatgggattaatgaccttataaaagagatgaagatgaacttttgaccccttccaccacatgaggacatagcaagaaggcatcatcttaaagcagagagcaagccctcaccaagacactgaatctgcagatgccttgatcttagacttcccagcctcagaaactgcaaaaataaataaataaataaataaataaatgt

SEQ ID NO: 233176 - DNA, 868 bp, Homo sapiens
tctgcttttgttgttaacggactaacccttagtttggtggttagagaagtgatgggaagaacataaagaaagctcagatgacatttgtctttgctttaaatgtgtagtttttctctcacaaggctagtcagaaatattgttggcagaagctgtgtgtatctaaatagtaatttcttaaggaagcataatatgtatatcttaattgctgccaagaattgagtacagacatttgttatcctcgtttgtctgtttaatgcttttctatgggagagaatgcttaagagaggtagatactactgaaatttagctcatcaagagggagacacaccaggataaggataataacagcagctcacttttagcaaacgcttgttatgatgatgatgatgatttattagctggaatgggaaccatgtcttcacgaatagactgaagtccttttgagcccagatcacatgcctgtttgtcaatgatggctgtttatgaaggtgtctctttgaggtggtggtcatctggcagggtcagtagagcttagattgagccttgtcaaggccctgggtgatgagtgggatttagtttctctagctgtgaaattgaaaggatgctatttaatagtgctattagggagaaaatatttgctctgttgaatactttcaaaatatcattacaatgtacatgctgtgctataccatatagatacattggagccagtgtctcgcatgaaaatattttggatgaatatgtaaaccaatgttacctttgttttttgctctagtttttacagctctgtctgaaggtgcaccaaccttacaaggaagatcaaacagcaagcctgttctttgaagaatacttctttattatcattaaa

SEQ ID NO: 233177 - DNA, 748 bp, Homo sapiens
agctagtagcaaatttttgtttcaacttgctgtctatctttctccttacttacaactctggagaggggtttgttaatcagatctccttaaggttggaagagtaaattctcccctctccatccaaaggggaagatgcctgtgtctcctgggttttttccaggtggaggttttgttataagtaaggtttggctgttaaatatcttcccttttttaagagttctaggaaggaagtgtgtttgaggaggtttgagcctgcaaagtggaagtgacactgtgggttgcacggtttggccactgacttctcacgtggtttcagtccttagcaccgtggtattgacatgacatcagttgcaaaattaataagtaatgtggcattgttactacatcacaggcatatttgagaatgaacatcactgtgttttgcaaagtaaacgtttaaggggtgaagaaagggtcatgtattgctaataaaggattatgttagtaacctggatgtgagagaacatttctactttttcagacctgtatttcaaataaaatgtgatgtcatcttctgaagacttaggaaaagtttgagtgagtaagcgccttctccctcagcttccatttccgctctgttctttttttttttttttttttgtgagacggagtcttgctttgttgcccaggctggagtgcagtggcaccatctcagctcactgcaacctccacctcctgtgttcaagcaattctcctgcctcagcctccc

SEQ ID NO: 233178 - DNA, 414 bp, Homo sapiens
agcacatatttcccaacagcataacgagtgtaattttatgggaaaaagtatttagacccaattggaaattagccaggccatacaaccaggagtgtctttgctactccgtctggtgttgaaagggtttgtattgactgggcgcggtggctcatgcctgtaatcccagcactttgggaggctgaggcgggcagatcatgaggtcaggagatcaagaccatcctggctaacatggtgaaaccccgtctctactaaaaatacaaaaaaattagctgtgcgtggtggccggcgcctgtagtcccagctactcgggaggctgaggcaggagaatggcgtgaacctgggaggcggaggttgcagtgagccaagatcgcgtcactgcactccagcctgggtgacagagtgagactccgtctc

SEQ ID NO: 233179 - DNA, 628 bp, Homo sapiens
ttaaattcagacttcagatcaacaaccaatcatattttcagtaaaagtttagcccaagtaatacttgaatatacttatactaaaaaagaacccattatctgaaactcaaatttgactggacattctggatttttatttgctagatctggccgccctttggggggctcacagaattctgccacagagagccaccatacagttgtctgtgcacctaaagatgactgctttaggatgaggtaacccaccatcagctgccagagcaaactaagaagggtttctgtcccccaaagcccattacaggctctgtttcaatatcagacctctcctgatgagtacgaccatgtcactgcatttcacttctacttgcacacttcagcaatgaagagttcagtcacattaggaaacccaggccactatttaaaactcttaaatgttgtgttatttttcccggaaatgaatcacaatctggcctcctgttgtccccaccctttgatcctactcctgccatttaagtcacatagaaaagagtatctctttccctcctcctccacatgaaaacgtgttaaacaatttcatggctgtgttcctgacatcagaacagcctctgatagtttatcaggtctcctcc

SEQ ID NO: 233180 - DNA, 417 bp, Homo sapiens
agctcttaaaatgttagtttttcaaggaaaaaaggtaattcttgagcatcatatttcatgtcccaaagaactatgttgaaatgctagattttatgccataaacaagtctataggagccaaaacctcccctaccccttgagcaagaaaagatggtccgggggaaacctttgatatcacataatgtagccaggcagagagtattaaaccagttcatgcctggactggtagagtctctaatccttgatatctctggtgtcctttagagcatctgggccatccctgaactctagtcgggctgctgtagccactcatttggccctgctatacttagtcttttgggtgaccccacgtggccattctagtttcatctgtgcttccaatcccctgatgccccacatatacccaccatttaattca

SEQ ID NO: 233181 - DNA, 517 bp, Homo sapiens
acttcaataattgatgtgacagtatgaggttttctccacaaagaagccactcaacaggaataaatatatgtaagaattagcacagtcaagtggtagggagccccccatcatgccttttctgcaaactggtggcacatgtttatagaaagggagatgctgatgaaatcctaagtaagaatggaaactgagttcacaagaagataaactgaaacaattgcttaatgttaatatcatgtaaaaattacacacatttaacacagatttaaagacagggcaattttttttttcctaaccttggaatattaggagaaagactatattataccttacatctatttttgtgttcaaccacatttgtgacaactttataaaaactttccacaactttttaaaaaaaattttcacatttggttattatttaaaatttttggaatcctttaaagaaattaacatctgattaacatccaaaaaagaggcgtttggaaagttcaataaatatccactaattgttaaaaaa

SEQ ID NO: 233182 - DNA, 437 bp, Homo sapiens
agggtgagaggggatctgaccaggggtcctaaccttttgaaaagtcccgtttaaaggaaatagtctgggatatggggaaagcggggtgtgggtgtcgtcagtgcttcactgcccactgcttgttatggggatgggaaagagaggtccaaaggacggaaaggtcacacaagtggccttgagggggctggtaaagcaggaacagagtcaaattgtgcctggttccttcctgagtcccttggtgggtggcccagtggttctcaagcccttgctctgcctggttcatcaccacagcagtcactggggaggactgcctgggttgtaggggtctgctggcaggagctgcccatctcttctgaagaatccacagtttttctttgttttcttctacaattacaaaagcattaaattatctttaaaaataaataattcagataata

SEQ ID NO: 233183 - DNA, 332 bp, Homo sapiens
tctgtgtgtggtggtggaggattggcattgggagacatgggaggcaaagagctgggcctggccaggccaggcctctggcttccaagaactcctagttccaggggacacccagtgggggaagagctggctgctgggaggcccacagcctagggctggtcggccaagcagccagctctggtccctgctcacaagtgccctatggcttctaatgcatttctcttcttcctcccttgctgcacctgcagatgcagaagccacaccggcgagccccgccatgtactacctgaccagctaccagcctcctcaggacgatgccctctgcttccatcgtg

SEQ ID NO: 233184 - DNA, 311 bp, Homo sapiens
ccaggactggaacctagaggtgagctttcacaattctataccttttccctggtagaaggaggtaagaacaccagaaggaggtaaggacagcagaaggagaccagttatttctgactctagctggcttcgcatcttggagtttttagatccattttgattttcactgatatcaaaaccacttgtcctaacttactatgtagcacagtcaacttctttgaatgttgaacttttattcttaatcgggagacaaggacagaccttaaagacaaatgtaattagtagactgttaataaaatttaattttccttctt

SEQ ID NO: 233185 - DNA, 250 bp, Homo sapiens
cagctttgaaatcagataggtttggttgggattggattccaaactgtactttgaagttgtggtcaagtacctttaaatggaacttcaggtttcctgatccatgaaaattagctggacatggtggcacatgcctagaatcccaactactcgctaggctgaggcacttgagcccaggaggttgagcctgcagtgagccgtgatcgtgccgctgcactccagcctgggcaacatagactgtgtctctaaacaa

SEQ ID NO: 233186 - DNA, 491 bp, Homo sapiens
actgtgctgtcgttctctcacatggcctttggtcattggttcagacaggctaagaagacaaatggagatttgcagaagaaaatgtcatatgggttatcctggtagtctccagagaattaactgagtcatccacattatttagctccatctccatccttcatgtgataggaaacagagttttgaagtcgaggacataaggcagcatcaccaaatgctctccaggagagttgctacctctgccaaaggcaaaaaggagatagggaagctgccatagcatctgttggttccaggaagaaaccaccttgcctgtggcctggggatagaaggatgacacctcatctagttactttatgcatggcagttctgcactagcaaaaactcagaggccaacccccagactggagcctgaaatgttgctacataaaacccagtgtttccatgaccgagcttgccagctgcaacaacaatatcagcagaaagatcgcttctga

SEQ ID NO: 233187 - DNA, 417 bp, Homo sapiens
tattgtcgtttattacataattattctaccaggttgccatgaaataagcaactgggttttaagttttcagtagttatgtggagtatgtatgtagtcaggacctatttccatgttctgtgtaagtgttaacaagtccattagctttgctgaatttaatctctggatatgaaggagtagaaatttgcatccttctaaaaatgcatgctctgtttaatattaatatattaaaatttattaatttggagtcctcagatacgggaactaattttactgtctaggttgctctttggtagtatctatgagtaaagatgatacttgacaaaaataatttaataaatgttttagatactttactagtatgtccaaattaaattttccctattaaaagcatttgagcttctacttaatacattataa

SEQ ID NO: 233188 - DNA, 765 bp, Homo sapiens
caggcaacaaaacagacagtgtgtcctgacagctctgctgacaaaggtggcataaaagagcaaatgaatggagcagtagctggagtgtgggccagaggcccatttgggcatatttcctgacatggaagttcctagaacagtagaaagggagagaatcatacaggagaaagaagagtcctctaaaggttaaaggttgtgagcagcccagagagggtgggtcccgagagccagggcagggctggccctgcggagaagaggctgaaagactcaggagcccccatccacagccacatacagggcctctggagggaagtgatccgcccaagtctcctggaggactcttctcacccaagacatctgaagctgtcatgaaacaggcagagccgagcagtggggctgcggcaatgagtcatggcaagctcccggaggggatgtgcccggttactaacagagagcatcaagaaagttcttcacgggggtgtacagcaggagaagcagggtacaagcatgccacctgatcctgcagggcctgcccgggttaccagggcaggatgcagtgtctctctgggcctctcctgtcaccccaatccctttaatgtcttcttgatgctcccagcccataggtttgtctttcctttcctatcacctctatcaaaaggtctcttctattttacacattttgtcctgctgcttctccctctcacctgtatttctattttattttaatttttttgagacaggatctcactatgttgcccaggctgg

SEQ ID NO: 233189 - DNA, 366 bp, Homo sapiens
catgctcagaggaaaagcagagtgagctgctggcaaaattcctctgctaagtggcagcgtggaggccatgcgaaatgagttgcatgcgccatgaagagcgattgcggtgtgctgaagccacagatcatggcgcttcacacaggtgggttgagagtctgaagaggcactcagtaactgccagtaactggtttcctgtgcctgcctccttacctcgattcaccctgaatttgctgtgcagccagccccctcgatggcagccttgacacctggccgctaaagagggcacagtgcttccgcattctccccactgaaacccaggggcctcgcctgtggctcactgcccttttggtcccatcatattcccaa

SEQ ID NO: 233190 - DNA, 550 bp, Homo sapiens
tttttttttttttttccgtgacagagtctcgctctgtcacccaggctggagtgcagtggcccgatctccactcactgcaagctctgcctcctgggttcacgccattctcctgcctcagcctcccgagtagctggactacaggcttccaccaccacacctggctaattttttgtattttcagtagagacagggttttaccgtgttcatgtttgccaggatggtctcgatctcctgacctcaggatccacccacctcggcctcccaaagtgctgggattacaggcgtgagccaccaccatgcctggccctgaatacacaatttacatgtgagagggggtggaggaatagtcacttatgccttagactgcctcagtgactctacatttttacataaataggacaggggaagcaatcagataggcattcatctcaggtgtgcagagggatgggttctgtcccacacctgtgaagataagctattagtttacattggcagtgggaaattcaaaagaactattttagggtggagatctcgaggtccccagtttgtg

SEQ ID NO: 233191 - DNA, 210 bp, Homo sapiens
tctgaatgcagtgagtcgaaacgatttctacatgttttcccatggtttaggaggtgtctttacatacttgtcaatagtagcctgacctttttccccatggagttgctaagtgtgttttgtttgttgctttgagtacttttttcttgttgtttgtgtgtgtgttgcacaaaatacacaagaaaataaaggttttttttcttttattgctca

SEQ ID NO: 233192 - DNA, 387 bp, Homo sapiens
catgaccgggcttgttttccaggttaagttccttaagaaattgtaaaccaagcaagaaaaacaaacagacaacaacagaacacagattgttgtggatcatgcagcaggaaaagtaggacaccatttgagctgaccaagcatatgtgttctccgtgcagctctgtcgaagctgtgtaaggtgtgcttggtgctggctcctgccagatgctgttggcatggcttcatccacccagcttgctgttgggtaacttgcagagtgaagaagtctgttgttcacgtcatcaccacaaccctgaacatccaagcagttcatgtcaacaactagagtataattatcttctttacttgtaaaactgtggagcctgtggattaaattcaccaaaatga

SEQ ID NO: 233193 - DNA, 353 bp, Homo sapiens
gagaccgagtcagccttctggacttcccacctgctgggtaaaactcaagtaacatgtgagagccgcgctcctcaggccccaccccctgtgggtgattgatttctaagtaggggaagcccgccctcctcaggtcccaccccttgtagatgattgatttctaaagtaacaagtgagagccaagctcctcaggccccaccccttctggatgattgatttctaagcaggggaagcccgctctcctcaggccccaccccttgtagatgattgatttctaaagtaacaagtgagagttgcgctcctcaggccccaccccttgtagatgatggatttctaagcaggggaagcgcggccgc

SEQ ID NO: 233194 - DNA, 1317 bp, Homo sapiens
tgtagagagtccctaccagcaagaaggctctcaccagatgtggcccctcgaccttggatgtagcctccagaattactctagaagtaaggaaccaagcgcctcactggtggtgtggaagaactgggattccccacagtgcagtggaaattcctgggagtctcgaaccacatattttccatcgactacatccaaagctctgcaaagaacggaaccacagtcatgtcaatacactatgaacaatgccaaaatctcaagaaacccaaaggcatatttctccatgtattaatatatttccagtcagcccaaataatgaatcattcttcaaaacctacacggcgttgtagataatttggtgctctcatagcacatttataaataaacctggatgacttcaccctgtgcctaactgaattcttttaaatcctatgcagaaaacaaattagagatagatagaggtagacagaaactagatggagagacagattttggcatgaaagtaatccaatttcattttccagtttcctggttgttctatgtcgtggcttttaagaaataacaaaaagaaatttgtaagtttcctgaacactggaaataaagtgggaactgaatcccagttagagaaacaatctagactatgccaggaaatgggaactgttcctaggattataatatttatcagattcaaaaggaatggaaactaataaaggcagaaagaatgttttacagactctgatggttgcctaccccaaagccattccctttatccaacccttcactgttctcccacctcccccatacacactgcctttgctaataatcctaaatttgttcagcaattcatcctccatatgcctcagagaaagctgctcccagccccagtagtcagtcgggattgctctaaccctggtgtccagtttccctcaccagtaactgatttaggcaaatgcccatatgtaactgtcttgcttatgttaccacattgattgatgtctccctgaccctctaaaatgttcatactttgccctgcttctctggcccagtcctgaccaatgggatgtgagaggcgtctgctgaagaaatgggggaaaaggtcttctacaagaagagaaagtttccctttcctgcaggccagtgtcatgcctgcatgtgatgaatatgatagaacatcttgggaccatgtgcaggattagcctaaggagactagattgaggaaaaagcagagaggaaatacctatctcttgatttcttgaaatgagaagcagaattacctatctctggagttcttgttgtgttagataataaacgtcctattcttca

SEQ ID NO: 233195 - DNA, 448 bp, Homo sapiens
attagtatgtagtaatcacataacagaattccagaatcttatttaaaattctttgcccccaaatgaaaatagcgtttttttctggttgtagaaggaatttctatgttctaaacaataaaaacttacaattgaatgagtcccttatttctccaagagaaggtatcaagtcttttccataactatggaagaaatcaattttaaccacccagtatgaggacttctaaccatctccacctgtgaaattacttggaagagttcatcccttctctgtagaactaaatctgtaatatattttagaatctctttcagattcaggacatgaaatctttatcaaatttataatggtcagccaaattttttgcacttcatctgtcagtgttttcaagctttcgtttgtagcctccggaatcccttgtttaaataaaacaattttcagaagctaaatatg

SEQ ID NO: 233196 - DNA, 404 bp, Homo sapiens
gattgtaacatcctgtaaagccaccccgtggattatagaattccagggcagctggggcaggagcattgaatcaggaggtttcatcttgactctgtttggccctgtgcaaatcactttacccactacacgttggttctttcttcccaatggagggctgaattgcaccatctctctctctcattcttttgttgttttttttttttgtttgtttgtttttttgagacagtcccactctgttgcccaggctagactgcagtaatgcaatctcggctcactgcaagtgtgagccactgtgcctggccaggctccttttccctacactgcccgtgtattctctccagggacttacctagaaccacacacattggcctattgccgtaagtttgtcagcacgttgtctcaga

SEQ ID NO: 233197 - DNA, 509 bp, Homo sapiens
gcatcgtggaggtttatttaaaatcacagaaaggtagggctggaagagaaatctattaatagttacgtcactaatgcgaaaagtgagaaaaatgacttgtccgagttatatcagggtggaccccgggcaagactcaggtgcctctgctgtcagctcacctttcaagtttctggtccccactcgcacccactgagaccagagaccgatttacctgaggcagaaggtgctgcacgcattcttgtgaaatttgaggggaccgagaaggaatctcaggaagtttgtttacactgggggcctggagaccttcgggaaaatagccagaaccaaaacggaccagtcagcagacgcagacacacacaaagtgacagggacacagaagcagaagctgaactgggcagagcgggcagcggccgacccacctcgcacggccgcccccgccagcgccaggtgcagggctcatagcgggccagcagagggcgcgccgcccccagggagccgagcggcggccg

SEQ ID NO: 233198 - DNA, 114 bp, Homo sapiens
gcgcacagcatcacttctttggcatttgtgccaaaaatgcatatcctcaatctaatactgagaaaacatcagacaaatccaaagtgagaaatgtcctataaaatagctggccag

SEQ ID NO: 233199 - DNA, 190 bp, Homo sapiens
gcattgcagtactccctgattcacaattcatcttggcttttgaatggattgatcctgacagtcatttggtttatcaatgaacttggacagttcttccccaggtatttaggggcagcccttatctgtttggaaatgcattggctagagaattaaggatgttacacttaaataggggcattattatccaata

SEQ ID NO: 233200 - DNA, 515 bp, Homo sapiens
tggcatattttggggtggcatttcctgaacattttcaggaacaatatgtagccgcagaccttaaacaatggtctggctgtattccaataaaacttcatttacagaaacaactcaatactcagatttggccctcaggctgcagttttctgaccccagtgtttgttagtgaaaaaggaagatacggtgaagatctctacctatcacagaacggtgagaagagtagtaggaaatactttagagagagggccagatgttagatgtatcaatctgcttaccatacagattatgcaaattattctaattgcaatggaaagaaactggagagttttaagcaaagagtgacatgttttggctttgttttaaaagagggctgcgtgtagtgggtcacacctgtaatccgagcactttgggaggctgaggccagcagatcacttgaggccatgagttcaagaccagcttggccaacatagtgaaacccctagtgaacattttgctgcttagacatttctctactg

SEQ ID NO: 233201 - DNA, 446 bp, Homo sapiens
gatagctcttatcttgtgctactcaactttctcttcccttaggatgagttctttacaggaaattcctcagtccctcatgcaatggagcccagataagatggctttagaagccatccagacacacctgaatcctagggtgactgtggcccaggcccaactgggatccaccaccaataccttgtattatagatgatccacattctgaagcacaaagatggcacaagatgaaacaatagattgttatccccatggggtttatccttattatttgacctcgctacacttcttttgactgatcgacagccttttcagacaaacaacctgatattaaggtaaatattttattctttaaatagaaataacaaatgcatttttgttatagattactaaatattgaactgtatgactttacaatatttcactactgtttttagcttgcaaaaaaa

SEQ ID NO: 233202 - DNA, 580 bp, Homo sapiens
actactcttattttcaacacatttggtcttgcttatcttttttatttttatttttgttagcacagagatcatatgtgtccatgaattgtggatcgttttgtcattaccatgtctctgacaatatgtgtataattaatatgttagctctggagtcacattccaggctagcatgttagagccgtgcagcttttgttccttaaggggtgacaaaacttgctgtctggcctaacagataggaaatcctaaagccattctaagaaatctcttactatgaaatgttcccctttgatttaaagaggatatcaataaaaggaatgatgactgaaaaaaacattttttgttcctaaagataatttttagcagaatagttgaaaggctttaaaacttaagtagcagctctataagaagaaaaatgctttgtaaagggagttgagggctgggcgcggtggctcatgcttgtaatcccagtactttgggaggccgaggtgggtggatcacctgaggtcaggagttcgagaccagcctggtcaacatggtgaaactgtctctactaaatatacaaaaattagccaggcgtggt

SEQ ID NO: 233203 - DNA, 345 bp, Homo sapiens
agagtgcctttgtggatttaaggacaaacctcatgcttgcaggacacaggcagggccttgaactgggttgtcatgcaggttggaatgttggtatcaaagaacaagagtcattagcagtttgctaatgtggttaagaatattgtcagcatcatttacagatgatgggaacaatagtcactggggactccaaaaggagggagggagagaggaggggcaagggttaaaaactacctatcaggtactgtgcttactacttaggtgacaggatcattcataccccaaatctcagcatcatgcaagatacccatgcaacaaacctgcatatgcattccccgcatctaaaat

SEQ ID NO: 233204 - DNA, 869 bp, Homo sapiens
ggtcccagggtccacggagccactgggagagaaaaggagtctggttgggtctgatcgaaggacactgggacagcccaagaaagggacccttccggcccacagccctctccgaggccagagtgagggagccggcaggggccgaaggagagcgaaatgggcccgctccccggggctatttttagtctccctctttctctgagaaactccccccgcgggcttctcacgccccaggggcagcagcactgagccgccgaggagcctactgagccggagagcctcctccagagcccagaagagcggagccgggcgcctgcacgttgcaccggggtcaccagtgccatttaaccctcgagtggctggcgggaactgggcaaccccccagggggaccgattggaacttttgagtccaggtcttcagtctgacaaactgaggctcaaagctggggtaggacaaagggttgcagatgagcagcaggtgaagcctgggacactcaggcagtcaacttgaactgtcctccctggcttcagagattcccccagcccccaccccccacaaggaagggggatagagttggggtggaatgcagaaggaacagagctgaagttgaagttgggaaaggcgggatgagaagtctgagggatcctggagcaggcccaccaagcccagagggacagaaggctacttgtggccttggtgtggcctggggggctgtacttgagactcattttgtccaaggactataatattgcatgccccgacacctgtggggcacagaacatgctaaaggggacactggtgatcctcatctctgtccccatcattgtagaatttcactctacagcttcccaggccttacttgtcctgacat

SEQ ID NO: 233205 - DNA, 535 bp, Homo sapiens
catcactttgggagtcctaggctagaagattgcttgaggctaggagtttgagaccagcctaggcaatatagtgagactccatctctccaaaaactcagaaaaattatataggtgtggtggcgcatgcctgtattcttagctgcttggtggctgaagcaggaggattgattaagcctgggagcttgagactacagtgagccatgactgcacccctatactccagcatgggtaatagtatgagaacttttttaaaaaaaattttaaaaaacagggtccggtttggtggcttatgtccataatcccaacactttaggaggccaaggagagtggatcacttgagcccaggaggtcaagacaagcctgggtaacctagtgagaccttgtccctaccaaaaaaaacacaaaacttagctgggcatcctgttacacacctgtagcctcagctacttgggaggctgagcctaggagatcgaggctgcagtgagctgtgatcatgctacagcactctagcctgggccacagagcaagactgtca

SEQ ID NO: 233206 - DNA, 573 bp, Homo sapiens
ccaacactatcatccacctaggtcagtgtaccttcagctgctgagttcactattctggctgttttttcttcacttctggcagctgggatttcctttttcttttgtggttagctgtgtgtatatttgttgttttctatgacatctctgtaagtttagagttatgggattgtggtggtaggataatttatgttagtcagaataagtaacctatatagaagttcttcacccttccaggaaatcctccaatctatgacaaatgactacttaaattgccataaaaggtgaattgtaagtacaataatccaaataaaactttgattttgctcagtgacaatatgcccagcaaaaaaactatgtttctcagcatctcttacagctaaaagatagccatgttacgcagttgtggcaaatgagacataagctgggagtttctgaaaaagctttgtctttgtgaaaaaggcagcaagactcaggggttaaaaaaaaaatcttgtttaagctactgtcttagagttctctgttacaccatagcctaattcaatcactagctgatacactttgaagagcagatca

SEQ ID NO: 233207 - DNA, 348 bp, Homo sapiens
ctgtggaacatgcagacatgattatgatcacccaatcaatgttttattttaaagataaaatttaaatgtttttctccagctaacatcaaacaaaactaaaccttcagaatatttttaattaactttttcaatactttatttgcatttaaaattaaataaatttagttgtgctacttttatacaatttagtgattttttttttaattgactgttttggtctcctgtcagtaaaaatacgatgctttgtctcaacttgcatcttctctcaccccacaaaaggacctcaggatgctaagttcactctttagaaagtcatcataatgatgcagctgggaataatcactgtat

SEQ ID NO: 233208 - DNA, 332 bp, Homo sapiens
tcaaaaaaaaaaaaaaaaaaaaaggaagctttgcactcaaagaaggaaattttcatctttgaccagatcccaaaggcccatttccaccccaaagtatcaaaacgcatatatcctactaatattaatagtttattgagcaattaagttccaggcacccagttaagcctctcacgtggactgcacgatgaaattcataccctcattgatcctcactacaactcagaggtaacatggaattttactgaggcaaatggtgggacctggattccagaagcaatactatttgtgtgaaatgtcatgtcactgtaaaagtctgttagggattacccaaa

SEQ ID NO: 233209 - DNA, 263 bp, Homo sapiens
caaccaaaaaaattaacttgaataatatttaatatgaaatccaattgccccaattcccaatcggaagtactgctgacttccccaaagataacttctaatttggttacttcgtttgttgctccatgatcaaccaaggccacacactgtattcagttatatctctttagtggtttcaatctaggacagggttccatagactttttcttaaagggctgtattagtctgttttcatgctgctgataaagacatatccgagactgagc

SEQ ID NO: 233210 - DNA, 378 bp, Homo sapiens
tacagcatgaactatgttgttagatgttgtcttgttcaaagccaggctgagtctttgatttaatgagatggattcctgcacagaaatgcctagactcaggtgaaatcacatggtattcgatgtaactaggaggagtccatgccttcctgctgtattcttcctgctgtattcttatgtgaaccttactgatgccaaaaatattaggctggctgctttcctccctctgctgcagccaggccacctgtacccaggccttctaaccaagcactgtggtttgggaaccacacatgcggcatgtctggctctagacaaaatcacttgtggctgactctgtaactcttgacaggtgcaaaggcttagacagtgctaatcctgaga

SEQ ID NO: 233211 - DNA, 333 bp, Homo sapiens
taaatccatcgttttttctccacttttttctgcatcctttttaggccatattaccattacagtcaagcataattgccttactggtttctccacctgaattcttatctctcttcaacccattaaccatgctgctgttggagactttttcttttcaatgtaactcagatccaatcgtgaatctttccagattaaaatacttcaaagacttcttgttgttcctgggataaatccttacaaactactgtgatatctggcccatctctaaaccttctgcatcatctcttattttccctgttctctgtcatccaggggcattggccttctgctttctgc

SEQ ID NO: 233212 - DNA, 1590 bp, Homo sapiens
  misc_feature (979)..(979): n is a, c, g, or t
aaatattatgtctttcaagtctatttttttggtaagtcaatttttgactaccctttctttacttattgtgccctgtgaactcttccatgtccatacccattcattgtctataatcttggcactttcttattcattaattcaacaaatatttattccctatcacctttatttatgcatttctatagatgctagagatagggtaaataaaagtatggcaaaaccagcaattacttttgcaccaacctaatatgattttttaagaaatttataatttcattagagaaatagatgtataaacaaagaaattataatacaaacattgtgataagtgcaggaagtagaaaatagtgattattgctttcttcaaacataaagtattgttagtcaggagtccttcagttgtaagtgccagaaacccaatttcaaacagcaaaagcagaaaatggaatctattggctcgcatccctacaaattccaggaatagaactgtgctaagggactcaaataatgttgttgggtcttcatagcttattctggtttatttcttgcttttggggccttgcttttttcttctgaagatggactctgaagtgaattctacagcacactacccagatgccttatttagaatcgaagcattggtttccttcaggttttgggagtgttggctgctgatggctcatagttgagtctctttctgagacaaagggaggtgtctcactcaagtttatccctcctccctgagaatagcttgaatccaaagactgatcaatgagggatacaaagggctggcctcttgccttgattcaggacgtacctaaaaggccatccagctttagagttacccatgggaacagttcaggaatctgaggaacttaacatctgactcttggaagaacggttctgtggagaagagggttgagtttattttttttattctggagatatagggatgaaatggagagaagtaaagaagagnaaatatgaagggaaaccaaacaactgtttgaactggtgaaagactaggcaccttgccctgtgactcctctctagaaccctgcagacttttatcaagtatttggctacaagcaagttttttgtgaaaccagtggaagagtctgttcttcctctctcaactggcctaggatgggatggaactgtagagcacaggcatatttaggagtttagagacataattctgaggaaataagttctagaactttgcagaagcagtaggtagggctatgaactctatacattgtaaggtttgacaggcaaacatctggatgtatctgtcacagcaactaatgtcttagagaataaggtatagcttcaccaaacatttgaggaactagtagtaaaagtaatcaatgctaataaatgacagtataataaaatgaaggcaaagtgccacaggaacagaaaggtcttgaacagctaaccgatatattaaagaacaaatagacttgcccggcatggtgctatgtatctgtagtccaagctacttgggaggctgaagcaggaagatcactttgaacccaggagttcaaatgcagcctgggcaacatagagagatcctatctctaaaat

SEQ ID NO: 233213 - DNA, 719 bp, Homo sapiens
ggcgccgccggcgtccctgggaagctgagcgccgcgtagcttcgccggggggagtggggtaggcgcggtgaggccgtgggcccccacacctggcggaccacaggggccagaagccctggagccccgccagggaagggctgcgtcgctggccaggaccgagcgcggtagagcctcagctgctcacggggtcgctggagttgggggtggccccaggagaaattaaaggtgaaaagccttagcagcagagggaagaggaagatggaggcagagcgagtgaccgaacttggaagggacagccgggcgcaacagggcagggggcgtctgactgttggaaacatggctgacgtctggaggctgcagccagtggtccgtaagtcaggtcaaggacccacagaagaccccagcatgtcttcacctggcccacagaagccctgacatccagttacaactgccccagcctagtgagcatttcggcacccactcctcaattcctacccccagcctaacttcgaaggggcggtgagccacagcaagccggaggagaaagttggaagagagagtggacaaaagaatacccacaggcaccttccccacagtggaatagcggggttttagacaatcaaggataatcacctcttcctatcccagttcagaaacggatgaaaaagacacagcaataagatgggtgggtatcaaaatatcagctttgccacaaatta

SEQ ID NO: 233214 - DNA, 535 bp, Homo sapiens
ctaatctagcttattcttcctcctatctgtcaaactcggcttcactatcactttctttgttcccgtcaacactctttgctcaccttagactcctatgcttatttatcattcatatagtttaaatatttatttgtataattatttaatgcctacccttcttgtattctactgtatccctagtgcctagcaatgccaggcacctataaaataataaatatttgctaaacaaataaataaatgagagttgaccagtcacggcagctcacacctgtaatcccagcactctgggaggccgaggcaggtagatttcttgagttcaggcgttctgagaccagcctaggcaacatgttgagaccctgtttctacaaaaaatagagaaaaattaggcgtggtggcttgcacctgtggtccaatctccttgggaggctcaggtgggaggatcgcttgagcccgagacgtggaggttgcagcgagccaagactgtgtcactgccctccagcctgggcaacagagtgagaccctgtttcaaaaaaaa

SEQ ID NO: 233215 - DNA, 273 bp, Homo sapiens
cccactgtacttacggcattttaaagtgttatcttccccaggcttagaaacctgaacatgacagaggcaaggattgaagtttcaataatatgggagaagctagctgggtatgagtaagagtgagtgggtggaggacatcaattaaaggatgagtgtgtagaaacatatcagttttctaaccatggttgtttctaggatatcccaagtttatggtatctgcaaattcttgaatttcagtgggggaaagaagagaacaagatatttaaaaaggca

SEQ ID NO: 233216 - DNA, 274 bp, Homo sapiens
gtgggatgggcagaaagactttgagggcaggcggaagaatgggacatcaaaccaccttccccagggtgggcagccagctcctcactcatatctgccctggggctgcaaagtcctgccatgcccaccgaccattcccttggagcactgtacttaacctgcagtgccctgggaatgcgcccaccctgtgtttctgggagaaagtgaggtctgtgtgcacattcccagggcactgtacttaacctgcagtgccctgggaatgcgcccaccctgtgtt

SEQ ID NO: 233217 - DNA, 390 bp, Homo sapiens
cctttcctgaactattctgctagattcagacttcaaaaacattgtatcaggaaatacagaaatgttctttcaaaatgagtgtatgggaatgtgggaatgcctaataaaatctgtccttattgattcgttagcaaaaaatcatataaatcaatagcttgtgattgcaagcagatatatttcagatcctttctgtgtttgttttttgctttcttgatctatcacaattggagaaaacttaaaatttctcaatggtattgtatttttgccaatttcttattctgctttatgtttctcgttgctatattattgggctataatggtccataattacttaagaatcattgtgaaatatattgcttaatgacacaagtaaatctttttcactgtttg

SEQ ID NO: 233218 - DNA, 373 bp, Homo sapiens
atctatagcctgagcccacctgggttgccctaagttgtctgattcacatccattctaattccttggcttctctcaaccatgtctgctccttttcctcctcttggccattcctgagtgtacctggatcactacagcagtatctatgctgtttcctccttttctaggtgaccatttgtccttctgccagagggctctgtgggaaatacagattcgatcctgctgtttcttactgggaaccctccatggctcccagtccctggaatgtgccgggcaactttcagctcttggtcgtgggagcctcctgcctgtgcacagtgtgttcttccaggacccatgcccactccctccttcccagcattccagtttggccctt

SEQ ID NO: 233219 - DNA, 468 bp, Homo sapiens
gaggaaatctgaaaataagacttaatcatcaagtcacttatagactgatgaaataattaaggaatataatggcctggcaatgactaagtcgttctatctcctcattgcaggtacatgcttatcacttttttctctcttaacaacgtttattatgaaatggcatgttttcgccacagcagggtagccatttcccaaccctggagcactcttaattctgagatgcctgattagagcctcaggggtcccaaaagatgtgctgttttcccactttataaaattacattcttttctcacagttgtcacaaacatgatattggttgataagaactttggagtagttttaatgactcttgactgcctgaaagatgccactttaaaaaaggagctacttttagctgactctatttgaaagtaaatgattggaccctttttatgttttatatgaagctttgtttccatttgcttaaa

SEQ ID NO: 233220 - DNA, 193 bp, Homo sapiens
ggatgtagggagtcatctctctcttgctttggtactatgactattgcctcactcaaaactgagttaaaaataatctcggctgggtgcagtggctcatgcctgtaatcccagcactttgacaggtcgaggcgggagctgagatcgtgccactgcactctccagtctggtgccagagtgagacaccctctcaaaa

SEQ ID NO: 233221 - DNA, 273 bp, Homo sapiens
tgccgttgtggctggcagatggcagaatgaccaggaatctcatctcaaaacagtgttttcatgagaaaatggaataaagcatttcagctcataccttgacctaaaaagaactctactgccccattagaaaaaataaaattaagaagttataattaataacaattttttttttccaagatggagtctcactttgttaccaggctggagtgtagtggcgtaatctcagctcactgcaagctccgcctcccgggttcaagtgattctcgtgcctca

SEQ ID NO: 233222 - DNA, 421 bp, Homo sapiens
agcatctgatgtaaacacttgtggggcgggtgggagattctccgggcgcccctttttatctgcctagacatttggctgtctcattaatattaagtaaacacctgaaaacacctttctggtagcctcgaaaatcagtgaacacatacacatcatattctaaaaccaatttgttgatgataaaacatatcattatccaggagagtggattgtttgttctttcttaacaacctcctgatgtgtaaatccatcagccaaagaaaactgattgtgatattgactttttatgcagatatgctgaaaatggaactgggtagaaataaagtttgtatatacttttgatagttcatgtatttgtttattttggtgtgtttgtaatgcaagttttcatttatcaattaaatttccttttaattaaattagt

SEQ ID NO: 233223 - DNA, 446 bp, Homo sapiens
cagtcctctattgggggataggtgctagtggccttcagagaaacctatttatgtggccagtggtgtggccttacctgcagtaaataaaaaaccttcttggtgtttcatatagaaaatcagccattgggcggggcattatttacggcatttttttttcattgcacacaataatttctgacctatacatgtataatacagcattttcttgtttttctttttcttttctttttttttttttttttctgaaatggagcctgggggacagagcgaaactccgtctcaaaaaaaaaaaaaaaattagctgggcatgctggcaggtgcctgtaatcccatctactttggaggctgaggcaggagaatcacttgaactcgggaggtggaggttacagtgagccgagatcactctactgcactccagcctgggcaacagagcgagactccatctt

SEQ ID NO: 233224 - DNA, 113 bp, Homo sapiens
gcctttccactcttccaccttgtgaggacacagcaacaagctgccctcttggaagcagaaagcagctctcaccagacatcaaatctgccagcacattgatcttggacttccca

SEQ ID NO: 233225 - DNA, 1258 bp, Homo sapiens
ttgtatatttggattgctgctctaggttgaccctcagctaaagaaaaatgcttccttatttagttttattctgcctgcctgttagtttgaaaggtaccacttgtttgcttcatgcagtttttttttttttggttaaactcagcctctatatgtgtttatatgctttcatattttcttcaagtcacttctggattggtaattcacgtaccagagtggccgatgccatatttcttgtttattcttttttttcaatttcatggccttccagcagttttctgggaatactttctgccagttcttgtttacttctctgtttatatgcgtcggtattggaatgctagaacgttaaagtacaaaatatagaaaatataaaatttctgttcatacttttacatcttaaactggaaagacatatctcacattttttaaccatttatgtgttaggtgatatgctaagttcattattcatgttacttaatcatttacaacaactctttggcgtatagatgccattttactggtgaggaaactaaggcttacaaggtgatgtagttcttttttaagggtcatacacttagtgaaagtgaggctggaattttaaccctgatagggtgaccctagagtgcagttacccgggtatactctctgaggagtcctgtatgaatcacgtcctgggaatttttccaaagtgaaatgaatgcttctggaagaactcagcacaattggcttgaattcctgtggaaattttgggcaaatattggaaccagctggaaatatagtaatggggtatcacatgccaaatctggacctgaccattttagcctgatagttgacgggtattagtaagatgtgtcttcaaacccttatttattctcattggttacaataggtactatgcaggatgcactgtggaaagtaagactggatatgagattgataatgctcagtaaattgtgatgatatgtaattaacaaatgtaagagatatgattttcagtattgtagcattgtgtccaagtggcaattttttttttttttttatatggagtcttgctctcttgcccaggttggagtgcagtggcatgatcttggctcactgtaacttccacctcccaggttcgagcaattctcctgtctcagcctcttgagtagctgggattacaggtgcccaccaccatgcccggctaatttttgtatttttagtagagatggggtttcaccatgttgggccaggctggtcttgaactcctgacctcaag

SEQ ID NO: 233226 - DNA, 439 bp, Homo sapiens
ctatatgtggactctgaaagagtggaactcacagaagcagagagtagaatgatggttgccaggggctggggttgggggaaacagagagatgttagttaaagtatacaaacttttagttataagataaataagttctgggatttagagtacagcatggtgactataatgaataaaattgtattttatacttgaaatttactttaaaaagtagatatttgttgttttcatcacacaaaaaagtggtaactatgtgaggtgatggacgtgttaattaacttgattgtggtaattgttccaaagtgtgtacatatatcaagtaatcacattgtacattttaaatagacacaattttgatttgtcaattatacctcaataaagctggagaaaaacctaaaataaataaatgtcaacctcttaaacaataaaaatgtctaatgta

SEQ ID NO: 233227 - DNA, 118 bp, Homo sapiens
tggtcataggtaaacaaggggggatccttgagtcttacctaactcaagggtgggaggattttttaaattatagctaataaggagccagcacagggctcaagcaaaattcaacttgcca

SEQ ID NO: 233228 - DNA, 410 bp, Homo sapiens
gggaggtccccatcccccatgaacaatccccaggcactgggggtcctgagatgtctgagactcagcccctgctctcaaggagctcagagtccattgggagaaatagttgatccgcagcatccagctcagaagggttctgttctagttgtgtggcctggcccccttaacctctctaggcctcagtttccttactaatgaaatggatgggggataatatagggaaggattaggtgaaataatgcatgggaagtgcttagcatagtgctaagggctcaataaattatcactgtcattattaatggaagcccaagatgttctagaagcataggcaaggagataggagctttgcgtgagggagtctgtagggtgttggggggggctggttcctggaaggagggcagggcagtgga

SEQ ID NO: 233229 - DNA, 332 bp, Homo sapiens
atccatggatagcatgtattagaatatcatccctccttaagggtgaataatattccatcgtacatgtaactacattgtatttatccattcatctgtggatggacacgtggacttttttttcgaatacctcaattcactgtcaagaacacaggagacttctaactgatgagagaaatgagaaaaatgatgtttgaggaggatgactttgacagctgtgtttttccaaatcagatctcagaatatatgacctgttttttataatttgtgaagttaattatttgaacagtttcagaaagctatgaaaaataaaatgaagttttatatgtaatgaa

SEQ ID NO: 233230 - DNA, 569 bp, Homo sapiens
attaccttgattctcagactattgcatttttagtatctgtggtgtatctttctccttttctcttgctgttattgtttatttatgcctattcttaaagttcattcgccccagtgtattatagttttctattttatgtatttcttgattatgtttgttattttttcttctgattattttgagttactctttctaaattctttgtctagatctttaaatacttaactcatttatatttagtctttcttgatattgaatagatccatttaaacttacctgtaaatattttatctgcatctcactaattttgcagtttcagctgtcttttcattggtgttctatcctaaatactttgtaattctctcactgttattttcctttggattatgttatttaggagtgaatgttctagagttctaaatatatgatcttttatctatcttttaatttttaatttctggtttaatttcattacagtgagataacatagtcgctatgatattgaaactttgagatgtgttgacatttgattatgatacagttaattactgtaaatggcatctttgtacttg

SEQ ID NO: 233231 - DNA, 157 bp, Homo sapiens
tctacaaaatcttagagaaacgcataaaatcaaggcagctgttattcttcaatggtctgtgtgagtgtgaacttcaactttctctacggcttgtacatttaataagcagctatttaacttacataaaagttaaaaaataaaaacaagtttaacaatt

SEQ ID NO: 233232 - DNA, 876 bp, Homo sapiens
cttatttcgggaagatatatttttgtgtgaagttcattgggaaaaaggaaaaactagagacaaaacttgagacacagttacaatagtccgggttacaggcaaccctttcataaccccctcctggtgattctcatgctcacatttgagaatgcttctaagaaattttaggaagaaaagaggagggaaaggaagaaagatttgtccatggtcatttagtggccactccatggcttgattctgaaaacggagaagttctgagttaaaagacgtgttaactgagggaagaaggaagaaagagaaaagatgacaggaggactctcaccttggcaagggggatgatggcagtgacactggtaagaggtgagcaggaagtatagtaaaagcacaaactcatcctacaaggagaaaggtatcgacattagtggaaacagaagcagttagaaaacttaggataaactgtgtgcatcaatcagactgtataggagagaaaacacagagaatggcaaaaaaaaccatcttcatatctcaaaagtgagagggagtcaagagcacaggggcagctccagttagttggattaaggttctagaccaggccgtactgcacagacatcactttctgttgtcctgctactgagtccctctccctgttgcactgacattatcaaaccaaatgcaaatgagatgaaccacaataatgggcagaactgcacctggttcagcacaacctggtgaaggtcttaagaggaggggaggtggggagtggaggatttttgccacacccaaaggggtgagaccacagaagaaaaaattatttacatagaaactcaggccaatcctttcgtaagtactccaggactattgcttctcttgatgatt

SEQ ID NO: 233233 - DNA, 488 bp, Homo sapiens
ggaacctacctgaacctccgtttcctcgtctctaagttggggatgatacaaattacctctcagaaagtggtaattattaattaagcgggatcctgtctgcaatgcctctggcactggagggccacgttagcattcactgcctgatttcctgcctgcctgccaactctaggctcagcagcctcagcctggggagcctcacttggaactaaattacatctaaacccagagccatcctttagctgtgaagctgacaggggcttgcaatcctgcctgtcagccttaagctgccacacatctgaacacacaaactgaaaaattaatgtccctggaaggcattgtctcccttcccatagacaccactgaccttgcctctctgcacagcagcggaagccggagctcctgctttcactgtctgggtgaaagcctcagcactgcagggctggcaggaaacaggaaagaggctagcattctccttgcatctgagggca

SEQ ID NO: 233234 - DNA, 238 bp, Homo sapiens
gtcggcccacagcttcctcaagccaagctccccaggcccaggtcaggcctcacggtggcctctccaggatcagctcctgccctccgatggcgtctccaggccccaaacggtctccggtcggtgggctcctccgcgcccagcttgggcctcctggcgacctctgcaggcccaagtcgtcctgaagtcagcgtctcccggccctgcctcccagcaagtaagcaagctctttgggctcaac

SEQ ID NO: 233235 - DNA, 405 bp, Homo sapiens
ggaataatgcagagtagttgagaggaagataacttttctgttagacaatcctcaccaaaaagacggggagggggagaaccagcaaaacaaaaacttttccttttttgctgaccgctgctataacaatcaagctttacgggacagttaatccaggtggctccaccaatacatcttctcccaaatttctagtggctgaacagcttctagtggtttccactagctgaaactgcttcccagatgcaaaaactgcaacttgaacatgaaacacggaaactactccaatctcatcttctagaaatcagttattcaaatggaggtccctgttggaagaaacacgctcctagctccctgcccacacaccattcattaggaaaggtcactttaaaggacttctacggcaggagc

SEQ ID NO: 233236 - DNA, 165 bp, Homo sapiens
attttcaatgtgtcacagacaaaagcttttgcaaaatacaacaaaaatgatttactaggaaaattaaatttttaagcccattaacagtataactggatgtcatggcaacaccaaatgttataaaagtctgaagaattcttattctcaatgtcatacttacctcat

SEQ ID NO: 233237 - DNA, 485 bp, Homo sapiens
actcgctggccagcccgtgctgggtgacaagaacgcactggtaaactgggcagacgcagccccctacttgggatacggcttcattcctgcatcacagacttggtgagcacctcctcagccctggaggcggtgccaggcactagagggtgtctctgcccttggggagctcacagacattaaagaggccattcttggctggatgcggtggctcacacctgtaatcccagcactttgggggggcgaagcagatagatcacctgaggtcaggaatttgagaccagccttgacaacacggtaaaaccccgtctctactaaaaaatacaaaaattagccagacgtggtggcaggcgcctgtaatcccagctactcaggaggctggggggctcaggcaggagaatcgctttaacctgggaggcagaggttgcagtgagctgagatcacgccactgcactccagcatgggcaacatagcgagactcccatctc

SEQ ID NO: 233238 - DNA, 124 bp, Homo sapiens
aggaactgtgaattgagggataagttgttgccagggtgatgattggaggtagtccagctggttcagtcacttcttaatatttaataagccctgagagagataactggcctcagttactggcagg

SEQ ID NO: 233239 - DNA, 1577 bp, Homo sapiens
  misc_feature (955)..(955): n is a, c, g, or t
  misc_feature (993)..(993): n is a, c, g, or t
ctcttggtttttgttccagctgagcaattttcattgccgacagcacaacatacattaggataaagcaaataaacaatgcaaggcacttggagccaggaagtcgcatctcagactagaaacacatagttttctattgacatttgggaggtgggctgctaaataggcgagccagccaccaaatagaaaaccagtggccatgaggttcttgcacttctagggaagccatttatttaatcgttagatctttgaaaggtgtctgaagttgattttgatgtaacaacagccagtttctttgtaattaaatattaactcaaaactatgtcttgggtaactgttaacctttgccatttgttgtttgccttagacatgtaattaacattcattgaatttaatttgttgttgttcacgtcttttattaactcatacacaattacttgtcttctgtttttaaaaacttttttgggaagacagggtcttgctctgtgcgcaggctggagtgtggtggcttgatcttgactcactgcagcctcgacctcctgggctcaagccatcctcccacctgagccttccaagtagctaggaccacaggcgcgcaccaccatgcctagctaattttttattttttgtagagatgggatctcgctatgttgcccaggctggtctcaaactcctgggctcaagtgagccacagtgctgagccttgtcttctggtttgttgaagcagtaagtcagacaatatttgccacaataatgtctgtcaattgtttgtggctggccataaaaactccagcatcacattcatctgaaggacactgctaatgaaggccactcattttgctgttgtcatccaccttattgtatctcaggacatccagcttaatctttttctattatgtttattcttcttgggagtggtatgactacttctatgaagtcccaacacaagatgaagagnggactccttttgaatgtgtagttagagtatgttcatcnttcagttgcttgccagcaaagatcagtctctgttgatcaggagaaattccttctttattctggatcttggcctttggattttctgttgtgtccaagggttcaaccttgagagtggtgctcttcctgtaaggacttttatgaaaatctgcctgttgcttgtggctccatcccagatggtggatcagaaaactgaatttcctattttgaaacaaatttcttgttaatttaatactttactttgaaataatccatgtaaatttggcatacatatttttaatagttccttattttaaaatatgatctagacctggcacggtggctcacagctgtaatcccagcactttgggaggccaaggcaggcgggtcttgaggtcaggagttcaagaccagcctggccaacacagtgaaacccgtctctactaaaaatacaaaaattagctgggcatggtggcgggcacctgtaattccagctactcggggggctgaggcaggataatcgcttgaacctgggaggcagaggttgcagtgagccgagatcgcgccattatactccagccttggtgacaagtgcgaaactctgtctc

SEQ ID NO: 233240 - DNA, 336 bp, Homo sapiens
taatataacttatgttaagggctggtctttctttttctatatttaactgattaaactgattaactgtttgttgtttttttttatgtcataggtgtcagatccagctagcagtgccataagccagaattatagatggaagtgggggagagagagaattgtcagaaaaacttactaagatttctatcctggccaggtatagtggcttatgcctataattccagcattttggaaggccaaggtggaaggatccctggaacccaggagttcgaagctgcagtgatctatgatcatcccattgcactctagcctgggatacagagcaagaccttgtctcga

SEQ ID NO: 233241 - DNA, 471 bp, Homo sapiens
taacccctgtttaaaaataagaaaactgagtcttgggaaagttaagtagcttgacctgagattcacagtttacaactacaaaactcatatactatattttataacacactgtctcttactcttactatttaaaaaaaagagattgttttaaaaattgattcatttaactcagtgaatgaagttgaagataaattcacaacagaaccattgatttgaactcagtgaatataaaatgtttaactttattctttagatcttagctttttacttttcacattcctttggtaattattctgtatcttaatttttaaaaaaatcatgtgaatggacagacagatagatggacagtatgaccgatagacagacctgtccctgagtgtgagtgtatgtagaagagtccccctgtcaagttatgttataaaagttcatctgaggtcagatattgggaataaagtttcatttttccatcga

SEQ ID NO: 233242 - DNA, 343 bp, Homo sapiens
ggaggtaggggtggggtgctcattcaggaggaaccatgcacactccattcaggatgtggggccagatctcagtagaatcacagtattagaaagagatgtaggaatttgggagtcatctacagtgaagtgacaaatctctttcaatggtgaatgggtgcttaatttgggctgaatataaaaaaaaagaaatcccttattttaatatttttgaaagaaagttattttggaaaaaacaattgaacaatatgacttcttcccgcctgggtgataggctcttttaatcgatatgattttttcagcctcttatggcaaacatttcttggaagaaatatacaaaggagaa

SEQ ID NO: 233243 - DNA, 191 bp, Homo sapiens
ggaagcagaaagggggctgagttgattcagagtttttggataagtagaaaaatgggcacgatttccacagtaaccagttgttaagagctcctgagacagaagacagcaaggcccataaaaagcagtaaagtagaaggcagatttgggaaagaaagcattgttgctaaggggctagaaactggcagggacac

SEQ ID NO: 233244 - DNA, 3822 bp, Homo sapiens
aacggtgtttgttatgttacattttatctggcatttctggctctctagttggctatagcgctgaaactgaacatctcctgggttcttcatgctgacagtttaagggaaataagctctgtgataagcagaactagaaaatccaccaggaacaaggctctggcgcttgggaagggacttggattccaggccaggcactgctgcttcccagctgtgtggcctcagggcagctcacctgacctgcacccaggttgtgggggctgtatggttacatgtgagctctttgaaaactggcaagcattttgccaatataaagaacgacttctactctcagtagcagtgagaataaataggaacaacaatggctgtttgccatgcagcaggtgctcagaactatctgttgaaataacgagaactccacccctgcagtttgaaggcaagcaacccgcagggccccagagaggagccacaggaggctccaggagactgcgcaaggcccagaatggatgggcaaggcggggattcgacttggctcttgcagaggcagccaattggccctcatccagccctgccaaggcccgtgtggcatgggcaggcttcatggcaattctctctccaggtctgcccctctggcccagctgggacaggtgcctggctccacagcctctttgctgtggctttacaggaaacaggtgcttgtgccaatcagcagagagcgcctggtgcagggtgtggaggagatgagataaaaagttgttggtgtgtgtgcaggtttgcatgtatgtgcatgggtgtgtgtgcatgtttgtacgtgagggtggatgctggggtgctgagtgagcatcaattctggcccagatgctgaaaggattgcctccaagagcctcattttcattccagggagttctcccctcacacaatccaaaacgctatagacatcacagctcttatcagtgagagctgttttttctaaccttttcctgtctctgacctcatctgctcccccagtctttttatgaagtagatggagaagttgttattggactcttttttttattttaagactgagtttcactcttgttgcccaggctggagtacaatggcatgatctcagctcactgcaacctctgcctcccgggttcaagtgattctcctgcctcagcctcccgagtagctggcattacaggcatgtgtcaccatgcccggctaattttgtattttttagtagagatggggtctctccatgttggtcaggctggtctcaaactcccgacctcaggtgatccgccttggcctcccgaagtgctgggattacagaagtgagccactgtacctggccttttggactaattttttagattaaaaaacattctgtgcgtcagacaccagcggcccagtagaaaaagccagaggtgctgatgacttctaaggtggcgctccctgcagctgcgactcaggtcctgcgttagtgtctgcacctgtgaccatcaggatgagctggggccccgggtgcttctgtggtcaggctgggacagtgaaaggcaggtttgagctgctgaagagggagcccttgcatccagggctctcaagaggcaaaggcccgcctggcagtgtcctggggcaggagcatggaaggctgtgtcatgtgcggagacagcggtgatgggggaggtttggggtgcggtgagggggagactccctccatggtggaagcccttggagttgccagatggctggtcaatgctgatgccaatgtggaaatggggcgctgttgtttgtggggtggctggaccctgcatggagaagtgaattcagttttggctttctcagctgttggctgaaggccatggcccctcatgaagtcttcctgtaagcttgaggactttgttctcactcacagggagcccggtcagctcttagacaggagggctgtggtgtaccctggaggtgtttcctgtctctctagaagctggccatggggagaactgaggggtaggtggggaggggccacgcggacccctgcagcctctttgatcttgtattcagaaggtatgagtgtgcatttctatggggcgaggagctatagcatccaccagattctatggatggagctttcgtggatccagagggtgccatgttcttccgaagcctgagaggctcctgagcggggcaaacttctccatcgcccttggccagagatccaaccactcaatcctaagctcctcatcagcaaggtgggatgcagcccccggcattgacctcctgggtgtccccagccctccagccccagacaaagggggaagattctagcctcatcccaaggtgggtgggcactccacatacccagcagcctgcagagatccttggtggtcccagcctcccagtccctgctctgaaagcttgatgaagacctcccctgcataaaaggtctctcttggggcagtcgtctgactccagcgatggttctgtcctcgtgccttcctgggggtcgaggcctggcctcggggtgggattggtctctaggttcaggttagtgcccctacttttacctatgagagcccattgccactgcttgccatgctagaacaggccactgctccaacgaggaaaacccatttttgacgtccatcatgttaattagcacagcctctagggttgatggggacggaaccacagaagcaccatggggtcctccctgaactggagcctctgtgaccacctgctagagggagattcttgactagggccaaggctaagcccagaggagagcaatggcacattgtcagcccgcagtgtttgcaagtgaaatgtagacagggcaggctggctgcggggaggggcttgtttgtttgtttttaatcccgatttagtcttcccaaaggcaggcacatggaagcatcctcacccccgctgcttcccgtggcggccctcacagaaggcgcgtctgtctggcatcttggccgtgaatcagagctgcttgtgatgaatcagagctgctcgtgcagccctttgcagaggcataaatccgcaccacccttgttaattggttaggttttgacattcctgacagctctgcccgccgcagatggtgtaattgctgggtctaacgagaaggttgagcaccttcccgtttgtcaccccgtcattctccagcacggctggattctgccctgtgactgttatgcctggcacggatctcagctggatccctgcccctcctgccgaggtcctctctgagcacctgctccccatcacacagacttttatttaccctggacttctccgggtgccagcacctcatccttcacacactagcagccacggccggcacttccatgggagagttcactcccggctgcatctatcaccatcagcgcggccaggggcccagcatccagcctctgtctgttactcctgacccactttgtttcatgaatgagcctttcctgttgatggaggaggctccaggagggttttgacggatttaaataaccctgcaggaaggggaagccagcaggggagcttgccgaagccccggagccatccttagggctgcaggcgggaagcatgaaggggactgtcccctcgcttgctccactttcagattcaagcagggcccatgttttgtaagaattttgtctttcttgattccagttgtaagccatttcagttactataactttaaaataggcttttgactgggcatggtggctcacgcctgtaatcccagcactttgagatgctgaggcaggtggatcatttgaggtcaggagttcgagaccaacctagccaacatggtgaaaccccgtctcttctaaaaatagc

SEQ ID NO: 233245 - DNA, 603 bp, Homo sapiens
atgccttccttttatgtgatattgctcctttgaatctcctacataaagacctgttttcctaaataggaggctcaataaagttatcctctggagaaatgaccctacaaatctaagatttatcagacaataaaaccttgtgggttctccaggcccaaattggctgtcctaaggaaactattaagttccataaatgtatagacatacatctttctgaaattcctgatactctatgggcttctactctacaaaattgctttattttctttttcgagatgaagtctcactctgttgcccaggctggagtgcagtggtgtgatctcggctcactgcaacctccgcctcccgagttcaagtgattttcctgcctcagcctcccgggcagctgggatcacaggtatgcgccaccatgcctggctaatttttgtacttttagtagagatggggtttcaccatgttggccaggctggtctcaaacgcctagcctcaggtgatcttcccaccttggcctcccaaagtgctgggattacaggcgtgaaccaccgcacccggcctaaactgctttgtaagttaccccaataccctctgaaacctgaagcaaatcag

SEQ ID NO: 233246 - DNA, 529 bp, Homo sapiens
tccccagaccatgtttggaatagtggatcctggaagtgaatccatgagctgcttaattttaggtgtcaacttgactggattacggaatacctagacaactggtatattatttctggatgtatttgtgagtgtgtttccagaagagattgacatgtgagtcagtgggaaattctcccctcctattggctgggggcccaatataacaaaaaggcagaggaaaggcaaattcttctctcccctgagacattcttcttctgctgctcttggacatcagaactgctggctctcgggcctttgaactttgggacttgtaccaggaagccctgggttctcaggcctttcactttggactgagatttacacaatcggcttccctagttctgaggctttcagacttaaactgagccatactaccagcatcccagggtctccagcctacagacgagctgtcatgggatttctcagcttgcataatcacatgagccaatttccctaataaacacccgctcatcatatgtatctatatcta

SEQ ID NO: 233247 - DNA, 381 bp, Homo sapiens
attataggcattgccattccctggtgtgagtcaagttctttgactggtgtcagatctaaatattttaggcagaattatatttaacaaagactttgtatcctggtgttcctagcagaagatatcaatgaggagtgtaacagctagagctcaaattcctgatattctatcactgattttcattaaatgatcttaaacaaataatttttacttccttgggttttcatttcccttctttaaagtgggtatgaggccaaatatctacttaattaccaaaacagaatattttgggaagaaagagacagtagccttaatgatgcaagaagcaaaccggatacatctcttgctggcctagcattatgcactagaaaaaaaaaaaacagc

SEQ ID NO: 233248 - DNA, 233 bp, Homo sapiens
aagccttgatttttttgcttttccttcacaaaactaagcaaacatccctcagatagaaccatatcttttttcagttgatggttccacattactagagacttgtcgtcagaggtggtcatgcataggcagaaaaacaacttgttgaccatgttctaaggcatttaggcagcagaaaattggttggattagagcagaggttctcacatttttgaatttaactgacctgtaaaatt

SEQ ID NO: 233249 - DNA, 1864 bp, Homo sapiens
  misc_feature (402)..(402): n is a, c, g, or t
gaatattgtgcatttaaaagagatgaggtttcaccatcttgcccaggctggtctcaaacccctgggttcaagcgatcttcctgcctcagcctctcaaagtacagagattacaggcatgaaccaccgtgcctggtcctatttttaattttttgaggaaactccatactgtttttccataatggttgtactaatttgtattcccaccagcagtgtgcgagggtttcctttcctttacatcatcaccaacacttgttcattgtttttatagtagccgttctaacgagtgctaggtgatatctcattttggtttgttttttatttatctatttttgatggagtatcactctgtcacccaggctagagtgcagtggcatgatctcagctcactgcaacctcagcctnccaaatagctgggattagaggtgtgcactatcacggccagaaaatttttgtgtatttagtagagatggggtttcgccatgttgcccaggtaggtctcgagctcctgacctcaagttcaggtgatctgcccacctcagccttccaaagtattgggattacagacatgagccaccatgcccaccctaattaacagtatttgtcaaattttaatgtgcatcagattcttaggtttcagctggcatctgtttccagctcttggtgctatttgcaaccttgtatcttaggatgaaggcataaaggttttcaagcagcaaaaccttccagggttagataagagtgtttcactgtggatctgtgagcacctatagccactgtgtgcatccctctgggaccccagcagctgcttctgagaaaacagagggatggagaagaggacatcacccagatggtggaaacatctatcaaaagttaggatgtcctctggaaagcctctttgggtgtctgatttcatatctccttcctcatcagagaatggcgtcgcctcctatttgatgagaatttaaacacatctagaacatgtgcttatctttttcctatctcctgtctctgggatcacatcatactgcctccaagaatcctgtccttaacccccttccttagaatttacagcatagcctggaaacaaccaagcattcatctttattctaaagtacctagaacagagctggatctgtgacagatgctcaatggctgtttaatcaaacaggaaaaactcatatttggagtagggagtagggggaggcaaaatggtactctcaatgaattataatattttaaaatttgtcaatagagaatataatacaaaccagagaagcataaaggaaggtcatgctaattttcatgaggtagtttctaactccaggaacaaaatggtgaaagggcattctaagtcaaaggaatttatcatgtaaagacgggagtaacacacacacacacacacacacacacacacacacacacacaccccactctgctacaaccacaacaaacactttgttgttcttcaaatgcaccaagctctcttcagcagtgttttgtagtgcgtataggacatctttgaaatattctggatatttaacctttgtcttcttggcatgttaaaaatatcttctggcggctgggcgcggtggctcacgcctgtaatcccagcactttgggaggccgaggcgggcggatcacgaggtcaggagatcgagaccatcctggctagcacggtgaatccccgtctctactaaaaatacaaaaaattggccgggcatggtggcgggcgcctgtggtcccggctgcttgggagactgaggcaggagaatggcgtgaacctgggaggcggagctggcagtgagccgagattgcaccactgcactctagcctgggtgacagagtgagactgtctcaaaaaaag

SEQ ID NO: 233250 - DNA, 389 bp, Homo sapiens
agattgcaccactgcactccagcctgggggacagagtgagacttcgtttccaaaaaaaaaaaaaaaaaaatgtaaaaaatggtgagtagaaagacaagaatgaacatttgaggactgagtttggctttttgttttgactcatgtcttaaaagaatattgtgcatttaaaagagatgaggtttcaccatcctggctagcacggtgaatccccgtctctactaaaaatacaaaaaattggccgggcatggtggcgggcgcctgtggtcccggctgcttgggagactgaggcaggagaatggcgtgaacctgggaggcggagctggcagtgagccgagattgcaccactgcactctagcctgggtgacagagtgagactgtctcaaaaaaag

SEQ ID NO: 233251 - DNA, 2770 bp, Homo sapiens
attgactgggcccagatagaacaagaaggcagaagaaatgtgaattcctctttctctgctggagctgggatattcttcttctcctgcccttggacatcagagctgcaggctctctggcctttggacccgaggatttataccaagcaggtttctgggttctcaggcctttggccttggactgatagttacaccattggcatatctggttctgaggctcttggtcttggactgagccacactcctggcatcccagcgtctccagcttgcatggcctgtcacgtgattcctgtcagaatcaccatttttggtaaacaaaccaagcccagaacctgataattatggagcattctacactgacagttctttgagacaaatttcctcttggcatttacactgtggctttagctttcaaaccagaggttcctcttacccagcaaaaaatggctttcccgaagatgagattgatgtatatttgccttctggttctgggggctctttgtttgtattttagcatgtacagtctaaatcctttcaaagaacagtcctttgtttacaagaaagacgggaacttccttaagctcccagatacagactgcaggcagacacctcccttcctcgtcctgctggtgacctcatcccacaaacagttggctgagcgcatggccatccggcagacgtgggggaaagagaggatggtgaagggaaagcagctgaagacattcttcctcctggggaccaccagcagtgcagcggaaacgaaagaggtggaccaggagagccagcgacacggggacattatccagaaggatttcctagacgtctattacaatctgaccctgaagaccatgatgggcatagaatgggtccatcgcttttgtcctcaggcggcgtttgtgatgaaaacagactcagacatgttcatcaatgttgactatctgactgaactgcttctgaagaaaaacagaacaaccaggtttttcactggcttcttgaaactcaatgagtttcccatcaggcagccattcagcaagtggtttgtcagtaaatctgaatatccgtgggacaggtacccaccattctgctccggcaccggctacgtgttttctggcgacgtggcgagtcaggtgtacaatgtctccaagagcgtcccatacattaaactggaagacgtgtttgtggggctctgcctcgaaaggctgaacatcagattggaggagctccactcccagccgaccttttttccagggggcttacgcttctccgtatgcctcttcaggaggatcgtggcctgccacttcatcaagcctcggactctcttggactactggcaggctctagagaattcccggggggaagattgtccgcctgtctgaggggagcccagaggcacatccggacaagtttcagataacccgtggggatagtttttgctagattttggaagagggggcgggacagaggatgctgttcttcagtgctgaaatccacgccagaatgtcggtgttcatgaagtcactgattagttcccacttggtgccccaggcaataataggcccgtctcttgggcacgcacactcttcatactaagtgtttgacatacacctggatttttgcatttcaggggtcagtatcctatgacatgatgggtgttaccatcctaattttacaggcaaggacacagcagctgcgagaggtacagaaacttgtcccaaggctcacagccagtaggcataggagcgggaatgaaaatcgagcactgtcagaatctggtgggcagcccctgacttgaaccactcccacgtgctgcctcccttaggaggggacactgatgatgaggtctcggagccggcatccttccatccctgtcgagtcccctccacctcagctcccagtccttgtgctttttggagctaagcctgggatgaccaaattcaccccagctccttcattcacagggctggatgtagctgggattgagtccatgttatcggctcggtactcaacacaacccaagtttcatccgaggaaatgtccccgcagtggatgcagctcacatgctgaggaacacccagctctggacagagttcttataaatgtataaattaggctcagaaaccactgcattctgacctgctgtacagactgcccacactgctgacctgcctagcgagcaggacatcccttctgagccatctgctgctctctcatttcatcaccccaactgtcccttgtttttgatcaatggggaccagccactgccccaggagcactttagggctctcagttcaaactgaaggacagttgaactcagatggggttcatgtgggattctgggagctttctgggaattcagttggagtcaagtcaggatgctctcaaggacccctcgggctcagagccctaaagtgggccctggtgaagcagggtggtcctgcgtccacttcccaagcctgagccaagctcatcttcattgaatgtctcatttggccgaggaacaactgaactttgtggtttgctgtttagccttcagtttgctccgctgcctcctacccagaggtttgtgcgagcctgtgttgcagggttgtataaaaccaaggtacttcgttagttttgcccattcagccatggtcacgtgacatgcaaagtaatcttgctcctaattatagaaatgatttttcttttaattttttactttaccagactttactttgtactcagagaagaggcctcacatggctgtgtcacatataaatgttggactaaactctta

SEQ ID NO: 233252 - DNA, 2879 bp, Homo sapiens
attgactgggcccagatagaacaagaaggcagaagaaatgtgaattcctctttctctgctggagctgggatattcttcttctcctgcccttggacatcagagctgcaggctctctggcctttggacccgaggatttataccaagcaggtttctgggttctcaggcctttggccttggactgatagttacaccattggcatatctggttctgaggctcttggtcttggactgagccacactcctggcatcccagcgtctccagcttgcatggcctgtcacgagaaccctgactaatacacctggagtgcagaatctgctggagaaactgccattccgttattgactggctggtcaggccatacagcctggtggtctagatgtgtttggagtgattcctgtcagaatcaccatttttggtaaacaaaccaagcccagaacctgataattatggagcattctacactgacagttctttgagacaaatttcctcttggcatttacactgtggctttagctttcaaaccagaggttcctcttacccagcaaaaaatggctttcccgaagatgagattgatgtatatttgccttctggttctgggggctctttgtttgtattttagcatgtacagtctaaatcctttcaaagaacagtcctttgtttacaagaaagacgggaacttccttaagctcccagatacagactgcaggcagacacctcccttcctcgtcctgctggtgacctcatcccacaaacagttggctgagcgcatggccatccggcagacgtgggggaaagagaggatggtgaagggaaagcagctgaagacattcttcctcctggggaccaccagcagtgcagcggaaacgaaagaggtggaccaggagagccagcgacacggggacattatccagaaggatttcctagacgtctattacaatctgaccctgaagaccatgatgggcatagaatgggtccatcgcttttgtcctcaggcggcgtttgtgatgaaaacagactcagacatgttcatcaatgttgactatctgactgaactgcttctgaagaaaaacagaacaaccaggtttttcactggcttcttgaaactcaatgagtttcccatcaggcagccattcagcaagtggtttgtcagtaaatctgaatatccgtgggacaggtacccaccattctgctccggcaccggctacgtgttttctggcgacgtggcgagtcaggtgtacaatgtctccaagagcgtcccatacattaaactggaagacgtgtttgtggggctctgcctcgaaaggctgaacatcagattggaggagctccactcccagccgaccttttttccagggggcttacgcttctccgtatgcctcttcaggaggatcgtggcctgccacttcatcaagcctcggactctcttggactactggcaggctctagagaattcccggggggaagattgtccgcctgtctgaggggagcccagaggcacatccggacaagtttcagataacccgtggggatagtttttgctagattttggaagagggggcgggacagaggatgctgttcttcagtgctgaaatccacgccagaatgtcggtgttcatgaagtcactgattagttcccacttggtgccccaggcaataataggcccgtctcttgggcacgcacactcttcatactaagtgtttgacatacacctggatttttgcatttcaggggtcagtatcctatgacatgatgggtgttaccatcctaattttacaggcaaggacacagcagctgcgagaggtacagaaacttgtcccaaggctcacagccagtaggcataggagcgggaatgaaaatcgagcactgtcagaatctggtgggcagcccctgacttgaaccactcccacgtgctgcctcccttaggaggggacactgatgatgaggtctcggagccggcatccttccatccctgtcgagtcccctccacctcagctcccagtccttgtgctttttggagctaagcctgggatgaccaaattcaccccagctccttcattcacagggctggatgtagctgggattgagtccatgttatcggctcggtactcaacacaacccaagtttcatccgaggaaatgtccccgcagtggatgcagctcacatgctgaggaacacccagctctggacagagttcttataaatgtataaattaggctcagaaaccactgcattctgacctgctgtacagactgcccacactgctgacctgcctagcgagcaggacatcccttctgagccatctgctgctctctcatttcatcaccccaactgtcccttgtttttgatcaatggggaccagccactgccccaggagcactttagggctctcagttcaaactgaaggacagttgaactcagatggggttcatgtgggattctgggagctttctgggaattcagttggagtcaagtcaggatgctctcaaggacccctcgggctcagagccctaaagtgggccctggtgaagcagggtggtcctgcgtccacttcccaagcctgagccaagctcatcttcattgaatgtctcatttggccgaggaacaactgaactttgtggtttgctgtttagccttcagtttgctccgctgcctcctacccagaggtttgtgcgagcctgtgttgcagggttgtataaaaccaaggtacttcgttagttttgcccattcagccatggtcacgtgacatgcaaagtaatcttgctcctaattatagaaatgatttttcttttaattttttactttaccagactttactttgtactcagagaagaggcctcacatggctgtgtcacatataaatgttggactaaactctta

SEQ ID NO: 233253 - DNA, 2637 bp, Homo sapiens
attgactgggcccagatagaacaagaaggcagaagaaatgtgaattcctctttctctgctggagctgggatattcttcttctcctgcccttggacatcagagctgcaggctctctggcctttggacccgaggatttataccaagcagtgattcctgtcagaatcaccatttttggtaaacaaaccaagcccagaacctgataattatggagcattctacactgacagttctttgagacaaatttcctcttggcatttacactgtggctttagctttcaaaccagaggttcctcttacccagcaaaaaatggctttcccgaagatgagattgatgtatatttgccttctggttctgggggctctttgtttgtattttagcatgtacagtctaaatcctttcaaagaacagtcctttgtttacaagaaagacgggaacttccttaagctcccagatacagactgcaggcagacacctcccttcctcgtcctgctggtgacctcatcccacaaacagttggctgagcgcatggccatccggcagacgtgggggaaagagaggatggtgaagggaaagcagctgaagacattcttcctcctggggaccaccagcagtgcagcggaaacgaaagaggtggaccaggagagccagcgacacggggacattatccagaaggatttcctagacgtctattacaatctgaccctgaagaccatgatgggcatagaatgggtccatcgcttttgtcctcaggcggcgtttgtgatgaaaacagactcagacatgttcatcaatgttgactatctgactgaactgcttctgaagaaaaacagaacaaccaggtttttcactggcttcttgaaactcaatgagtttcccatcaggcagccattcagcaagtggtttgtcagtaaatctgaatatccgtgggacaggtacccaccattctgctccggcaccggctacgtgttttctggcgacgtggcgagtcaggtgtacaatgtctccaagagcgtcccatacattaaactggaagacgtgtttgtggggctctgcctcgaaaggctgaacatcagattggaggagctccactcccagccgaccttttttccagggggcttacgcttctccgtatgcctcttcaggaggatcgtggcctgccacttcatcaagcctcggactctcttggactactggcaggctctagagaattcccggggggaagattgtccgcctgtctgaggggagcccagaggcacatccggacaagtttcagataacccgtggggatagtttttgctagattttggaagagggggcgggacagaggatgctgttcttcagtgctgaaatccacgccagaatgtcggtgttcatgaagtcactgattagttcccacttggtgccccaggcaataataggcccgtctcttgggcacgcacactcttcatactaagtgtttgacatacacctggatttttgcatttcaggggtcagtatcctatgacatgatgggtgttaccatcctaattttacaggcaaggacacagcagctgcgagaggtacagaaacttgtcccaaggctcacagccagtaggcataggagcgggaatgaaaatcgagcactgtcagaatctggtgggcagcccctgacttgaaccactcccacgtgctgcctcccttaggaggggacactgatgatgaggtctcggagccggcatccttccatccctgtcgagtcccctccacctcagctcccagtccttgtgctttttggagctaagcctgggatgaccaaattcaccccagctccttcattcacagggctggatgtagctgggattgagtccatgttatcggctcggtactcaacacaacccaagtttcatccgaggaaatgtccccgcagtggatgcagctcacatgctgaggaacacccagctctggacagagttcttataaatgtataaattaggctcagaaaccactgcattctgacctgctgtacagactgcccacactgctgacctgcctagcgagcaggacatcccttctgagccatctgctgctctctcatttcatcaccccaactgtcccttgtttttgatcaatggggaccagccactgccccaggagcactttagggctctcagttcaaactgaaggacagttgaactcagatggggttcatgtgggattctgggagctttctgggaattcagttggagtcaagtcaggatgctctcaaggacccctcgggctcagagccctaaagtgggccctggtgaagcagggtggtcctgcgtccacttcccaagcctgagccaagctcatcttcattgaatgtctcatttggccgaggaacaactgaactttgtggtttgctgtttagccttcagtttgctccgctgcctcctacccagaggtttgtgcgagcctgtgttgcagggttgtataaaaccaaggtacttcgttagttttgcccattcagccatggtcacgtgacatgcaaagtaatcttgctcctaattatagaaatgatttttcttttaattttttactttaccagactttactttgtactcagagaagaggcctcacatggctgtgtcacatataaatgttggactaaactctta

SEQ ID NO: 233254 - DNA, 3417 bp, Homo sapiens
attgactgggcccagatagaacaagaaggcagaagaaatgtgaattcctctttctctgctggagctgggatattcttcttctcctgcccttggacatcagagctgcaggctctctggcctttggacccgaggatttataccaagcaggtttctgggttctcaggcctttggccttggactgatagttacaccattggcatatctggttctgaggctcttggtcttggactgagccacactcctggcatcccagcgtctccagcttgcatggcctgtcacgtgattcctgtcagaatcaccatttttggtaaacaaaccaagcccagaacctgataattatggagcattctacactgacagttctttgagacaaatttcctcttggcatttacactgtggctttagctttcaaaccagaggttcctcttacccagcaaaaagtgagttatacgctttcttaatgttataacgttaccatggatgatcctgaacttgccgaggatagcagagacgggtgggcagaacaggaaagaatcagatcagagactgtaaaaagtaacttaaaaaaaaataattctggcagagacagaatttgaaggtacttgtgcacatcagaacactggacttgcttttttctgggagcaggaatgctgcttaattagatcagagaagaatgcaagtggtccatacatttagatctacaatgcgtggtttccagacctgcagcttgttttgctgcgcttcatcatggagtcatagaagggcagagctggaggaccgagtgagggacctggtgccatatccctacagacaggcaattggagactcccgtaggttaagggctgcagagcctggaccaatgcccagaatctctgagctttttatcttacaccatgaagtgacagatgctggcagatgttagacctttgtgcttaactgtttaaccacacagcacccgacttctgtatgcagcgaggttctagagtttccaaaacacgggtctcctctcccacctcagcctcctagcataaaactagacacatcctcatgcttttgaggtctaatcattggattttgttcctttcagatggctttcccgaagatgagattgatgtatatttgccttctggttctgggggctctttgtttgtattttagcatgtacagtctaaatcctttcaaagaacagtcctttgtttacaagaaagacgggaacttccttaagctcccagatacagactgcaggcagacacctcccttcctcgtcctgctggtgacctcatcccacaaacagttggctgagcgcatggccatccggcagacgtgggggaaagagaggatggtgaagggaaagcagctgaagacattcttcctcctggggaccaccagcagtgcagcggaaacgaaagaggtggaccaggagagccagcgacacggggacattatccagaaggatttcctagacgtctattacaatctgaccctgaagaccatgatgggcatagaatgggtccatcgcttttgtcctcaggcggcgtttgtgatgaaaacagactcagacatgttcatcaatgttgactatctgactgaactgcttctgaagaaaaacagaacaaccaggtttttcactggcttcttgaaactcaatgagtttcccatcaggcagccattcagcaagtggtttgtcagtaaatctgaatatccgtgggacaggtacccaccattctgctccggcaccggctacgtgttttctggcgacgtggcgagtcaggtgtacaatgtctccaagagcgtcccatacattaaactggaagacgtgtttgtggggctctgcctcgaaaggctgaacatcagattggaggagctccactcccagccgaccttttttccagggggcttacgcttctccgtatgcctcttcaggaggatcgtggcctgccacttcatcaagcctcggactctcttggactactggcaggctctagagaattcccggggggaagattgtccgcctgtctgaggggagcccagaggcacatccggacaagtttcagataacccgtggggatagtttttgctagattttggaagagggggcgggacagaggatgctgttcttcagtgctgaaatccacgccagaatgtcggtgttcatgaagtcactgattagttcccacttggtgccccaggcaataataggcccgtctcttgggcacgcacactcttcatactaagtgtttgacatacacctggatttttgcatttcaggggtcagtatcctatgacatgatgggtgttaccatcctaattttacaggcaaggacacagcagctgcgagaggtacagaaacttgtcccaaggctcacagccagtaggcataggagcgggaatgaaaatcgagcactgtcagaatctggtgggcagcccctgacttgaaccactcccacgtgctgcctcccttaggaggggacactgatgatgaggtctcggagccggcatccttccatccctgtcgagtcccctccacctcagctcccagtccttgtgctttttggagctaagcctgggatgaccaaattcaccccagctccttcattcacagggctggatgtagctgggattgagtccatgttatcggctcggtactcaacacaacccaagtttcatccgaggaaatgtccccgcagtggatgcagctcacatgctgaggaacacccagctctggacagagttcttataaatgtataaattaggctcagaaaccactgcattctgacctgctgtacagactgcccacactgctgacctgcctagcgagcaggacatcccttctgagccatctgctgctctctcatttcatcaccccaactgtcccttgtttttgatcaatggggaccagccactgccccaggagcactttagggctctcagttcaaactgaaggacagttgaactcagatggggttcatgtgggattctgggagctttctgggaattcagttggagtcaagtcaggatgctctcaaggacccctcgggctcagagccctaaagtgggccctggtgaagcagggtggtcctgcgtccacttcccaagcctgagccaagctcatcttcattgaatgtctcatttggccgaggaacaactgaactttgtggtttgctgtttagccttcagtttgctccgctgcctcctacccagaggtttgtgcgagcctgtgttgcagggttgtataaaaccaaggtacttcgttagttttgcccattcagccatggtcacgtgacatgcaaagtaatcttgctcctaattatagaaatgatttttcttttaattttttactttaccagactttactttgtactcagagaagaggcctcacatggctgtgtcacatataaatgttggactaaactctta

SEQ ID NO: 233255 - DNA, 2719 bp, Homo sapiens
attgactgggcccagatagaacaagaaggcagaagaaatgtgaattcctctttctctgctggagctgggatattcttcttctcctgcccttggacatcagagctgcaggctctctggcctttggacccgaggatttataccaagcaggtttctgggttctcaggcctttggccttggactgatagttacaccattggcatatctggttctgaggctcttggtcttggactgagccacactcctggcatcccagcgtctccagcttgcatggcctgtcacgagaaccctgactaatacacctggagtgcagaatctgctggagaaactgccattccgttattgactggctggtcaggccatacagcctggtggtctagatgtgtttggagatggctttcccgaagatgagattgatgtatatttgccttctggttctgggggctctttgtttgtattttagcatgtacagtctaaatcctttcaaagaacagtcctttgtttacaagaaagacgggaacttccttaagctcccagatacagactgcaggcagacacctcccttcctcgtcctgctggtgacctcatcccacaaacagttggctgagcgcatggccatccggcagacgtgggggaaagagaggatggtgaagggaaagcagctgaagacattcttcctcctggggaccaccagcagtgcagcggaaacgaaagaggtggaccaggagagccagcgacacggggacattatccagaaggatttcctagacgtctattacaatctgaccctgaagaccatgatgggcatagaatgggtccatcgcttttgtcctcaggcggcgtttgtgatgaaaacagactcagacatgttcatcaatgttgactatctgactgaactgcttctgaagaaaaacagaacaaccaggtttttcactggcttcttgaaactcaatgagtttcccatcaggcagccattcagcaagtggtttgtcagtaaatctgaatatccgtgggacaggtacccaccattctgctccggcaccggctacgtgttttctggcgacgtggcgagtcaggtgtacaatgtctccaagagcgtcccatacattaaactggaagacgtgtttgtggggctctgcctcgaaaggctgaacatcagattggaggagctccactcccagccgaccttttttccagggggcttacgcttctccgtatgcctcttcaggaggatcgtggcctgccacttcatcaagcctcggactctcttggactactggcaggctctagagaattcccggggggaagattgtccgcctgtctgaggggagcccagaggcacatccggacaagtttcagataacccgtggggatagtttttgctagattttggaagagggggcgggacagaggatgctgttcttcagtgctgaaatccacgccagaatgtcggtgttcatgaagtcactgattagttcccacttggtgccccaggcaataataggcccgtctcttgggcacgcacactcttcatactaagtgtttgacatacacctggatttttgcatttcaggggtcagtatcctatgacatgatgggtgttaccatcctaattttacaggcaaggacacagcagctgcgagaggtacagaaacttgtcccaaggctcacagccagtaggcataggagcgggaatgaaaatcgagcactgtcagaatctggtgggcagcccctgacttgaaccactcccacgtgctgcctcccttaggaggggacactgatgatgaggtctcggagccggcatccttccatccctgtcgagtcccctccacctcagctcccagtccttgtgctttttggagctaagcctgggatgaccaaattcaccccagctccttcattcacagggctggatgtagctgggattgagtccatgttatcggctcggtactcaacacaacccaagtttcatccgaggaaatgtccccgcagtggatgcagctcacatgctgaggaacacccagctctggacagagttcttataaatgtataaattaggctcagaaaccactgcattctgacctgctgtacagactgcccacactgctgacctgcctagcgagcaggacatcccttctgagccatctgctgctctctcatttcatcaccccaactgtcccttgtttttgatcaatggggaccagccactgccccaggagcactttagggctctcagttcaaactgaaggacagttgaactcagatggggttcatgtgggattctgggagctttctgggaattcagttggagtcaagtcaggatgctctcaaggacccctcgggctcagagccctaaagtgggccctggtgaagcagggtggtcctgcgtccacttcccaagcctgagccaagctcatcttcattgaatgtctcatttggccgaggaacaactgaactttgtggtttgctgtttagccttcagtttgctccgctgcctcctacccagaggtttgtgcgagcctgtgttgcagggttgtataaaaccaaggtacttcgttagttttgcccattcagccatggtcacgtgacatgcaaagtaatcttgctcctaattatagaaatgatttttcttttaattttttactttaccagactttactttgtactcagagaagaggcctcacatggctgtgtcacatataaatgttggactaaactctta

SEQ ID NO: 233256 - DNA, 1082 bp, Homo sapiens
gccaagtcctcggtgccccttgccattttccagccgcgctcccacgagggtcacggcggcggggagaggtggagccgcgagagctcggccgggggccccgcctggtggtcgcggccatgacagcggctcgggactggctccttttccgcgcccctcccgccggaggtgaggggaagatgtccatgtccgggttcaagggcaaaccgaagttactggcctctatcttccaggagaaccaggagccacagccgcggctcacgccccaccgcaacattaagattacaagtggacacctgagtcagcaggacctggaatcccagatgagagagcttatctacacgactcagatcttgttgtcacccccattattgacaatccaaaggtgcagaaagcactctgacaaatgggccaaggttgctcgggtgattggtttactggcttcgcacaaaactgatctccaggaaaatacacctgttgttgaggccttccctaacagtcccagaactcctacattgcctggtgtgctgacctaaagccctcattaagaccagtaacaaatcaagcctatcttatcaactgacaacacattctggaaccatggcgtgtccatggataagacatgaagtccttctttcaagacttggttttctggtactggaaaataccaatatggataaaagaccttcaaagctgctacgatgggtaaggaacaatgcacacagtataccattaaggcaaagaagatagtcttaatcctgtatgaaatgccaatgaagatgtaattaatgaatagacatttcattgaaatgaaatcaaaagacattttccttctctgacataacagagtagaactctctagtaagaacacaaaactgaccagcctgaccaatgtgataaaaccccctgtctctactaaaaagacaaaaattagccatgcatggtagcagatgcttgtaatcccagctactcaagaggctcaggcatgagaatctcttgaacccaaaaggtggaggctgcagtgagtcgagatcgcacaactgcacttcaccctgggcgacaaagcaagactttgttttttaaaa

SEQ ID NO: 233257 - DNA, 833 bp, Homo sapiens
gccaagtcctcggtgccccttgccattttccagccgcgctcccacgagggtcacggcggcggggagaggtggagccgcgagagctcggccgggggccccgcctggtggtcgcggccatgacagcggctcgggactggctccttttccgcgcccctcccgccggaggtgaggggaagatgtccatgtccgggttcaagggcaaaccgaagttactggcctctatcttccaggagaaccaggagccacagccgcggctcacgccccaccgcaacattaagattacaagtggacacctgagtcagcaggacctggaatcccagatgagagagcttatctacacgactcagatcttgttgtcacccccattattgacaatccaaaggtgcagaaagcactctgacaaatgggccaaggttgctcgggtgattggtttactggcttcgcacaaaactgatctccaggaaaatacacctgttgttgaggtaatgtcttttatgactgaaatgtgatgaatgacaagaaatactgttgttgattctgtaatttagaacatgcggctttccttgaccttcacttgacttttctttgtgggattgtggaaattgttcaaaaacttatcacctcaacagacctttaggcttaaacatagcggctcatttacaatgtagtccatcattaaaatggcacagcagagttaacaaggctcgtgaaccctactcatcattatttcatttgtttttgaataaggcttgttcatttcccgttttcttgtagtctgtccaacattttgttacagctaatgtatttcctaattaaatcatagcttataattc

SEQ ID NO: 233258 - DNA, 1129 bp, Homo sapiens
gccaagtcctcggtgccccttgccattttccagccgcgctcccacgagggtcacggcggcggggagaggtggagccgcgagagctcggccgggggccccgcctggtggtcgcggccatgacagcggctcgggactggctccttttccgcgcccctcccgccggaggtgaggggaagatgtccatgtccgggttcaagggcaaaccgaagttactggcctctatcttccaggagaaccaggagccacagccgcggctcacgccccaccgcaacattaagattacaagtggacacctgagtcagcaggacctggaatcccagatgagagagcttatctacacgactcagatcttgttgtcacccccattattgacaatccaaaggtgcagaaagcactctgacaattccaattgctaatccagcatttgtggatagctgcaaactgcgatatatgggccaaggttgctcgggtgattggtttactggcttcgcacaaaactgatctccaggaaaatacacctgttgttgaggccttccctaacagtcccagaactcctacattgcctggtgtgctgacctaaagccctcattaagaccagtaacaaatcaagcctatcttatcaactgacaacacattctggaaccatggcgtgtccatggataagacatgaagtccttctttcaagacttggttttctggtactggaaaataccaatatggataaaagaccttcaaagctgctacgatgggtaaggaacaatgcacacagtataccattaaggcaaagaagatagtcttaatcctgtatgaaatgccaatgaagatgtaattaatgaatagacatttcattgaaatgaaatcaaaagacattttccttctctgacataacagagtagaactctctagtaagaacacaaaactgaccagcctgaccaatgtgataaaaccccctgtctctactaaaaagacaaaaattagccatgcatggtagcagatgcttgtaatcccagctactcaagaggctcaggcatgagaatctcttgaacccaaaaggtggaggctgcagtgagtcgagatcgcacaactgcacttcaccctgggcgacaaagcaagactttgttttttaaaa

SEQ ID NO: 233259 - DNA, 115 bp, Homo sapiens
ctataattaaagtgaaataagtcattcttatttaaaacaaaatagtttgcgagtaagtgttccagttcttgttactcacagacattaccagtaacatatatgcttaggttgttca

SEQ ID NO: 233260 - DNA, 827 bp, Homo sapiens
cccttacggctcctgccccagctcaggcatcctccttggcctgtaggactccagttttgcccttttctgtccatcccccagtgtcccagcaggatctttcagtgccctgagctgaccctggccctttcctgctcaaagtgctcctgtggctccccactgccctccagtttagtccaaatcgtactccaggctcttcaggccctgctcctgctgaccactccaggcccctcacgcccctccccactttgcacctgaccttctggtcaggtggaagctttttctagccaggtggcagctttgatcactgccagctggctctcacaacctggcatgttttttcttcctagcagacttttgttcatcctgtagtgtcaagctcagatcaccacctctgtgaagccctccctgactaccacaggtggaacccctggggactgtgacagcctgtgtctgttcttccaccctctctgaatccaggatcagaagccctttgaaggcatgtcttgggtataaatcatctcaactccaaactcagggcttacaaggggccagagagttggtccaagagttgattgtcacagctggacagagcttgcatttccagtttttgtttttttggaaacagggtcccactgcactccaacctgcacaagagtgagaccttatctcaaaatatggaatattaggaacgatagataaatctataaggagattcaggaggcagagagaacacgtggggattgatgggctatgggacggggttgtccagcatgagacccagagctctagtctggaggacagtggagccatctctgaggtgaggacgg

SEQ ID NO: 233261 - DNA, 412 bp, Homo sapiens
ggaaaatctcatcttaaaattcttaatcacatctgcaaagttccttttgctttgtaaggtaacatattcacaggttctaggggttgggagagggatatctttggggggactattaatctgtctaccacaatgcccaatgtttaagtcaaaccagagggccaatgggggcggaagatttgattgaagcatagggtattaacaagagaaaacgatcaatggtttgaatcagatttaagttcacataggatgggcctagatgaggggtccaggctgttacgtcagaattgcatcaagggcctgagttcaaagttaaaggaaattcaaagtcaaagttcaaatttcaaaggaaattgatggaatctcaacagagatcctgagctctggatcaaagccccaggagcactggtggtta

SEQ ID NO: 233262 - DNA, 271 bp, Homo sapiens
aggttcttgggggttgtccttacagttagacagaacaggggattgtgggaatcacttaagaagtggtgtcggctggagtaatgaggaggaaagaaattttagctcagagactaaaagacctaaacagagaagcttgcagtggttatagagcttgtggctagagtccagtcatgctagactcgttctcagcatcaaatctgtgcctagagtgcctagattatagttgttttaatttaaactaatccaaacgtgagctatctcatacaaggtt

SEQ ID NO: 233263 - DNA, 482 bp, Homo sapiens
agagattgcatgtactcttcacccagtttctcccaatggtaacatcttgcgaaactatggtgcaaaatcaaaaccaaatctctttttataacaaagagagggttcccacctcaagctcagatccttccctgtgtagctagaacttagtaacagtgttttattttattatattcagtttcaagggttacattctatttataacaaatgatactggttttccctttacaataatgataaaattttattactgagtaaattgatttatgtttaaaaattgagttattttaaagaatatattatataaatgattgtgctagctgtatgaaaatgaaagtgaatgatacataattgaatttcaggaaacactgaaaacactgaagctacactatcaaatggaatgctttccagaccctactttttctacattgaacaactactatgaatctgatacatcatgaataaacccatcaattcactgcatt

SEQ ID NO: 233264 - DNA, 148 bp, Homo sapiens
ggcaggagaggtgatcctctgctcagagctctaaaattacattattccttaccactactctttctaataagcctaaaactgagcacacctgctatttcttaatgtgactcttcttattcaacaaggacagaggatcctatatctttta

SEQ ID NO: 233265 - DNA, 361 bp, Homo sapiens
tatttatgcggctcttattctatcatttgaacgtaagctttcacttttgatgaggtggaaattaaatgaggctaaggaaagtagtggcatgagcttatattgttatagtacattgttccaaggagatatttaaaaatgaatatcagagtctgaatttttcttctttggtaaatgaaaatggaaataactagctaaactgcttcttttaatggaatttaataatataaaattaaactaatagaagttaaaataaatttgtgagagttatgaaagtacttccaagagcatacaaagtagctagagttcttacttatttattgttatttattacagcattcggaataaagaaaaacaaatcatt

SEQ ID NO: 233266 - DNA, 301 bp, Homo sapiens
cagtcaaagagagggaaagatccatgcctaagaaactacacaggttttttaaagttttttttttctccccttctaagttctcagctgaagtctgtgtaatgttcctgtctctattgccctgtattattaaagctcagactttctatctatgaagaattggctggtgaggaaattagaaatagaggtggaattaaagtcatctcccttggagatcatattgttggcattaattggggattgcaggctgagtacaaagtaccttgtaatggcccagaaaaagaaatagaaaaatttttttccc

SEQ ID NO: 233267 - DNA, 261 bp, Homo sapiens
tttaggaccttgccatttcacatttatactactgcaaaaacccctaaattagctccctgttaatacagtacctgattgtaatctactctttatgccgctgtcagaatggtattcctaaaacaaatttctaattgtattacttccctgatccaaaaggttggatgggtctccattttcaaaataaaattcaacctgttcaagctctctccacactgagaccaagctttcacttccatatatttacactccactcccactaag

SEQ ID NO: 233268 - DNA, 225 bp, Homo sapiens
gccaccacgcccggctaattttttgtaattttagtagagacggggtttcaccatgttagccaggatggtctcgatctcctgaccttgagatccgcccgcctcagcctcccaaagtgctgggattacaggcttgagccaccaagcctggcctgttgtggaggatcttctatacataagaccatgtcatctgcaagtagaaatagttttcttttccaattttggata

SEQ ID NO: 233269 - DNA, 408 bp, Homo sapiens
tcatagttatttaaagaaatattgtttaaattcctacaggactttggacaacatgcagaagtagttcaggtatcttgtttagcattaaggaagtgagagtgtgcttgtgttgttagcttcatcttgtcgtatacccaaattttgtgatacctcaaaatgcagagaccgaaaatgttcataaatgtactttaatgagatttctcaaagtgagttattgtttggagttggttaactctgtatcacgtatttcgatcctctttataatgttggctaaatgtttgttaaagaaaagtagtggaaaggaagatatatgaaaacaattagatgttaccttcttgtaagtcacattgaccttattcaataccaagtaatcattagacttttaattttacggaacaacaaatttgc

SEQ ID NO: 233270 - DNA, 288 bp, Homo sapiens
ctaataagtaactgtgagatgtacagaaaggtgttcttacatgaagaagggtgtgaaggctgaacaatcatggatttttctgatcaattgtgctttaggaaattattgacaattttgcacaagttcttgaaaacgttatttataacgaaatcaactaaaactatttttgctataagttctataaggtgcataaaaaccttaaattcatctagtagctgttcccccgaacaggtttattttagtaaaacaaacaaacaaacagatttttatcaaatgttatgatgcaaa

SEQ ID NO: 233271 - DNA, 503 bp, Homo sapiens
tctgcagatatcaattcttgttttaagaaatagtttctggtctgttactgggaactagtaaagattaaatgctagaccattagtcatcaattttctgtgccacctgaggtacccaacatgaagtaggtgttgtcttaccaaaccatgaagttgggtatgcacagcaacatcccctcatcaaatggaaatggttaatataagatccagcctgcacaggtcatgaaggcacaggtgtggcctctttgagagttccctttgatcatcgttgaacaagaaaatatttgggtctggtttaccaaaggacctacaagattttctggcaccaccattccctggaggggtcagccagctacatgttggcaggatgatggcactggactatttccatcgtggaaggggcagcattttgtcctcactggaacagacacttggttagaatatgaatatgctttcactgtacatatttgttctgctaaaaccaccaactgtatatgccttattca

SEQ ID NO: 233272 - DNA, 626 bp, Homo sapiens
cagaacaatgcgggagttgcagagagaggtgtcctgtgtttgttcccagtcttccttcactcacctgcacctgctcctgccctgcttcggccaacatgttctatgcaggcagcagagttcatatcaagggcccatgttttaactgaatataatgaattttttttttcaccttggaagagtcttagaggcaagattagaatgttcatctaaaaggagtgcaaatttcttcaaccattcccacggaggaaggtctactctgtgaaaaggaaatgatcatacataattcatgcatttgctgtacggatttaattaaatgatagacaaaaagtagagtggcacaagtcaaactcaaaaaatagtaacaacaaaatcaatttcaaaataagcaacagcaataaatgttacctactattttacgaatgaaaatactgagaccaataaaggcattatagtatacatagccttggaatcagaagaccaagaacatacaagagaacatagccttggaatcagaagaccaagaaacaatttaactctgcccctctagagctctgagaacttgggcaagccttttaccctctgtgagtttcagtttcctcatttatttaattgaaataataatacag

SEQ ID NO: 233273 - DNA, 511 bp, Homo sapiens
cagaacaatgcgggagttgcagagagaggtgtcctgtgtttgttcccagtcttccttcactcacctgcacctgctcctgccctgcttcggccaacatgttctatgcaggcagcagagttcatatcaagggcccatgttttaactgaatataatgaattttttttttcaccttggaagagtcttagaggcaagattagaatgttcatctaaaaggagtgcaaatttcttcaaccattcccacggaggaaggtgagctcagactcactttcatctgtccctctcccccatgtgcttggccagggtaagggacctcaggagggcccccccagtctcccagacagctgactctccctgtgtaaataattctaatgctctcagttattcactactcatctgagccacctattgaactataagcttcagaattagctttgtacaacccacacccagcacagggtctggcatttatatgtgttcataaatgcaacaaataaacatttattaaaatgca

SEQ ID NO: 233274 - DNA, 640 bp, Homo sapiens
agagtagaggccatcttggaattgtttgaagagcactattggaagtgaatatatacaccttacgtttaaataactgcctgtgaagggaagtagaggcttgtgctggggggaggggtgttataggattgaaaataaattagtataggctcagatggtacccagacctaagtgattaattcaccactttataattagataatagaaatactgtaccaaaattctgtaaaagctgctgtgattatctctctgtgccatcattagccctcatgtagtcactagagggcgctccactctcttttcagtctatgtgattgataaccggtaccgttcaaggattactttgagactcctatagttgccacaagtcttaattcagtcatactcatatttatatagcattacatttttatttttattaatgagtctttccagtgcagtagtccctaaggcctttctatgaaatgtacattctgaaactggtgtggtataccaactgttttcagactgattatcaaacagtatggataaccactcatatccacagaaattaaaatttcaggtagaagtggcaataggtttgtagtacggaagtttagggtggatacagtggctcacgtctataatccctacactttgggag

SEQ ID NO: 233275 - DNA, 190 bp, Homo sapiens
gtatttttagtagacaggggttttgctgtgttgactaggctggtctcaaactactgacctcaagtgatccgcccacctcagcctcccaaagtgctgggattacagacgtgagccaccacacctggcctcaacttttatatgaaggacattttggttccttgaaagaaagtgatcccttctgttgacatcc

SEQ ID NO: 233276 - DNA, 530 bp, Homo sapiens
ctctcactgagggcggggtgttctgtccccagaggtcaaagcccagagaagttaagacactgctgaaggtcgcccagggcctctggcacaaccaggcctgggacacttcccacgatgggcagaacaggagacaggaggagggtctctgctgctcgggggactcccagccgccgccggacccctgaggcgccccccacccccgcctgaccccatggcagcgcctggcagggcgcagggtcaccgccctgccggaaggttaaacaaacagaagcggaggagggggccaggagggggagttccagcgcttctcggctttcggggcgagttggtgccccccgccggggcctggtgggagaggggagataatccgccccggcagaagcgcctccgggaggctccgggtctgccacggccccttggccctggaagaggacggcagcggagaaacctggctgcggagcggcgggagcgcagggccggggcgggccgcgataagatgaggacagcacgggctgggccgggggcggccg

SEQ ID NO: 233277 - DNA, 578 bp, Homo sapiens
ccctcacaacaggcttttgcactgaccaccggcatggcttggaaccctaaccattgttcccaagactgagatgcttactggctagcttccatgatcatccttgcagccatcccccatttgtgatcttcgtctgccaggatgtagtgttgtaaatcaggcacaagtctcagtaccaatgaagtcttcaatcttagtgcaaagttgcagcatagtctttcattttcttcatatgtttttaacttgaagactattttgtataataactaatatagctatactagctttgcatggtttatcttttccatcctttatttttttaacctttctgtagctcatgttttggaagtttctcttataaatagcatatggttgggtttctcaaatccagtttggcaatatttgtctttatgttccaaataaaaaatagctctgtactaatatttcactaatatattttatttgagcttacatccatattcttcctaatgctactgtcctatcagttctgtgtttttttttttgttgttgttgttgtttttttttgaggctgggcaacagagcgaaactccgtctcaaaa

SEQ ID NO: 233278 - DNA, 426 bp, Homo sapiens
tatgaaagagactgagcccctatgagtgagggtgatgtcaacacaacagcaggcacccttggtaaccaagtcagcttccatattgatcaggactcttttgattgcaagaaaccaaactcggatctttataaaagcaaaggtaattgactcagtcagaagcacatacagcacgagagttgtaggcatggctacacttaagccatccctttatctggctttcattagagcctcggccgcgcctcttttgtgggagagacttgagggagccgaggcagtttcccagccgctgtgatgttgctaaagattaaaaaggagctttgaagctgcaccagttctctctgtgccccctcggtacaggacctcagaaagacccaagccatctggcaaacctgacataaagacaaaataaagtgattgaaacagtct

SEQ ID NO: 233279 - DNA, 639 bp, Homo sapiens
tggactccaacgacactttcatgactctaaaagtccttccagaaagcttgattggttacctggtaggagaccctgaaactgcctagctgaggcatgagctggttcaggggcacatggtcagtcaacagatccacttggtgtcatgggcaaattgagacccaagctggaagacagaaccagaaatgtgaagagatctgggggttgaatacggggcattgcagctgaatctggagaccagatatttctaagtaggactgcttcatcctccacaattttaagaagtgatatcttctgtttcgggtgaaaggtttagtatggattggacaggggaataatttcacctggccaaaatcctcagttgggagggttttttttctgaggtcacatgaggtcttcactgaatatctgtgcttcctagtgtcttccaaggttcctgaggacctaatattggttcctactggttactttcctgttctgggattcccttatgctgccttgcttggaagctgtgatagaaagcgaggattttgagcaaggagccctgggctcacctaagtgtctgagcctcagttcctcatctgaaatgttagacacaatcacagggtgattgtatggagcaggtaggagtacatttgtgaa

SEQ ID NO: 233280 - DNA, 280 bp, Homo sapiens
cagctggtaagtgacatagctgggatttgaacccccacctccaaacggcctaactccaaagctgcactctttgcatggcatctgctgacctaattatttattcattcatctgcttaattttcagccttaacttttgctgaaatagagacaggcaaatgaggggctgctttgagctcattaattatgaaatgctactcctacctagacctccagctacaaaaactttccatactctttaccttattgacaacttcatctggaatttttcagttgcaaattt

SEQ ID NO: 233281 - DNA, 588 bp, Homo sapiens
cttcttataaaacatgtccttcctattaccttctaggaatgatatcagtattgcgtcatacctctttgaaaagaaaaacttagccttgtattaatagaatagagaagatttattagtgacacctcatttatctggaggtaattaatgcagttcagacttcagtaacctctgtttgtatgggacagcacaaaacttggcagttttaaaaaaaaatgaaacaccaaaaaacaaaacaaagagcttgtcatctgtgagcaggctgaaaaaaacccaagacccaatgaatatgtatgatcaacatgtgaccaacaaataacagagacagtgtctcgtaggagagtgttggcagcaatttgtgatcaagggaagcaagcttgacatgacagcaaagagagttggacaaccaaaagaaaaagaagaaaagtaggacatctttgcacacagacagacctattccagtcattgctttttgaggcatcattttgtcacattgaagacatttagacagttgagtccaagttagagagcattaagtaaacataggttggtttatcatgtttacctctgtaatgtacagggtcatttgct

SEQ ID NO: 233282 - DNA, 309 bp, Homo sapiens
cagtgagccatcagttcttcttcagcaacagctctcacaaccacccctcctccttcaatccagctcctccccctcatggctcatgggtgcacaagatcctccacctacacatgagagcacccacccagcagggtgtcgggtacactgtaagccctcagcaaacacaatctacattcccacactacatctctgcctttgtcctctgccaggcctgcacctcagaataccgatcccagctggccagctttgactgtaaaccttcttcttcctctggttcaacctgcaggttggccacacacagcctctgtt

SEQ ID NO: 233283 - DNA, 426 bp, Homo sapiens
gtccccatcacccccccgacccaagcacgaacagggcaggaacccgggtccaagtcctcaaatccacacctcactcctcgtcctgaacacccagagatggggattccttgtgaaaaacagaaagcacaaatgcactttgggaggtgtggagggaagggggaacccccaggagcgtggcctgtgcctgcccggcctttctttatcaggatgacacagtgacgataagcctggccaatatggcgagaccccatctccaccaaaaaataaaaaacaaaattagccaggcgtgctggcccgtgcctgtagtcccagctactcgggaagctgaaacaggaggatcagttgagcccaggaggcagaggctgcagtgagccaagatggcaccactgtgctccagcctgggcaacagagcaagaccctgtctca

SEQ ID NO: 233284 - DNA, 253 bp, Homo sapiens
cccccaaccccacaacagtccccagagtgtgatgttccccttcctgtgtccatgtgttctcattgttcaattcccacctatgagtgagaatatgcggtgtttggttttttgttcttgggatagtttactgagaatgatgcgtctttggcttctaagagttctttgctgagagtaaagagccagaatctcagaaatcccccagaaagacgatttaagttaaatgcacccatcaagctttgaaggaaggcggctt

SEQ ID NO: 233285 - DNA, 151 bp, Homo sapiens
ttcgaccctgggaaatgcatttgagtgcccccgcagtccgtaagccttggtgtgacagaaggaatttgttcatacttttcatttcttccggcagcttattgagctctcatttttataatttttaagttagtaaattgtatcattggcaaaa

SEQ ID NO: 233286 - DNA, 303 bp, Homo sapiens
tctccccctctcccccaccctgtctgctgccaacccaccccaggggctgtactagctgacaagtttctagttgccatcagctatgtggcagatgtccccagtttggcagaacagcatttccttggcacagattgtcccagggcacagctgagacagaggttctggctatgtcagtggccaaatctgatttaaaatggggaggccgattgccagcattccagatcgtccctagtaaatgtgagtaaacagagctgttgttaaagcagttggagtgagtccactcattcaataaatatttcatga

SEQ ID NO: 233287 - DNA, 296 bp, Homo sapiens
atataagaggtgcctcccttccttgaaacttcttcacctttgcttcaagagcaccacagagcagattcttcaaggcagagatatacaagaatccctgtggaaaacctcatgaactcaaggtcatgcagagacttagggaagaactgggactggcttatcaagactctacactactgacccagggcttggcagtttctgtcctagaaatcagaacacgcagctcatgcatcaccgagaaggtggtcagcctaagaagtggttccccactctttgttctaagatattcctctctcaga

SEQ ID NO: 233288 - DNA, 626 bp, Homo sapiens
aagatactcaaagacaaaaaccagcaagaaatggcatttgacttgcaagcctttaggagatgtgcataaacagagaagctcaaagggaggcagagaaaccaggatgccatcgttgattatgtccttccagcaactgcaaccgtgcctcaatttgcagggaaatacattcctcttcatggaccctgttctgggacccatagcatgctccaggctgcagcccagacaggaaggtgtccaatatgtctttgagttccatcttggggatctcatgtgatctctggtgtgttagtgagtgggcagggcccctggatcccagcactgacctcagttacatgaagagtctgagtccatggcaggatctgggcccacagtcttctcaccaacccagaggcagaaacagactctacaagcaacatggaatggcagtgctttgtatctacatttattagtttttaaaaaattataaaatctggctgggtacggtggctcatggctgtaatcccagtgctttgggtggccaaggtgggaggttcccttgagcccaggagttagagaccagcctgggcaacatggcaaaaccctgtctcgacatggctaaataaaaaaattagccaggcatgctggta

SEQ ID NO: 233289 - DNA, 542 bp, Homo sapiens
ttatgtcaaagcttactattgttcttaaaagaataaaatcatgttgacattttattattctattacctgtattatctcttctgtcccccaaattgaaaccaaataatttggattctggaggcatatagtcatctttatttaaaatttaaaaagtgatacctgaatcaggaatgattcttgtgaaatagtgttacttctaaaatcataatttaaaatatagaaaaagtaaatcagcaatagttttatgatataaaaaagcagggacagaaataaaatagaaatgttagctgcatttttcttctgtctgtaaattgtgccagtgtaggtgtaaaattatggtagaaactttgaacttctaaatcaatgaaaagtaacttgcaggaaatcaaatcagaattgtacacaatcaagatacattcatgacaccaaggcatattttgtaagatgccacacaccttaaaggatcttcctttttgctagtcatacttctggaaaaataatgatcattctttagttatacttcttaaaaattctcgatttgg

SEQ ID NO: 233290 - DNA, 441 bp, Homo sapiens
aggttatattaggtggagaaaaagtaaagtatgttttctctgcatatccaaatcatagtacaaagtaaatactgtgcatctgacacacaggaataaaaggaccatgaaatcacttgtcaaaaatcttagcagtttagaaaaaccaggcagaaagttgctgcagggtcggatgggtcactttcttaaagttcccacagatagggctgactgcagctttcacaactgtagaaaacacaggaggaaattcaaagagcgaaccacgatggtggattcctaactcttggtcagacccgccctctaagtggtagctcagctagtctgcccatggtgggcaccaggcaacttccatggagaggggatatgcccactcacgtcccctcctggtcaatacttataggcatgtcagcaaaaagacttgtttaaaaataaagagtccacaat

SEQ ID NO: 233291 - DNA, 504 bp, Homo sapiens
cagtggcagagcctgagccgttcgtgcatctgttcaccagcatccagaataacaatagatttttgaaacattcctgagaaaattctgggagttgcataccggccagtcttattccctaaagttgttccttctaaagggtgggatgaccaaaaatttcagaaaagcaaaccaccgctgaaaggcaacgttatttctgttggcagaaggcggcctgagcaatctagattttccacggttcaccaactagtttttaaggaaatatggctgtgagaggaataaaacataattcctacctttaaggaactcagagaagtgaattaaaggaagtcacagatcaggcaaccaaccacacaaagtttctaagagcaaactgttcaggtcggcaagtcactcttatccactgttttgccttctgaggtttcagttactctcagtcagtcatggtccaaaaacattaaatgaaaaattccagaaataaacaattcacacgttttaaatcgtgtt

SEQ ID NO: 233292 - DNA, 409 bp, Homo sapiens
tcaggcctctgctccaggcccctgaaggagggtggctgtctgcactgtggatacagctctcctgccacctgtgtcctggtgccaagagcctgaaaccagacctggccttccggccaaaagggactttctctgctttcacccagccggaactgagacaccactagaagttcctcctggctgcctccacctcaaggttcccaccaggctcctgcctttccgagaggaggctctgatggacagtcttcctggggagcaagggagggggctggagccctagaaggaacaaggaggtctggggcagctgctgcggcagtgatagactcgtgtgccatgggccactgccgctgcacgtgcacctgcattgtatttcttaaaattataaattaacaccatttgaaaattcagagga

SEQ ID NO: 233293 - DNA, 462 bp, Homo sapiens
ggatttgtcctccctgctgtcagaacaacagggttctggaagagtagaggacaggccgtgggacttggctgtctagagacaaggcgggagggatttccttgagaggcagggacatgtggtggttactaatcattgtgaggtgtctgggatgtaatggatgggaaatctactaagaagtcaacttatgtaataattagaaaagctctagttctgaggacagagacctgttggagtcaccatagtgggaatttttgacctggcatccagttcagatacctggagcttcttgactgaggggagattggatcccttggggaagagtgaagccttcaatgctgccacaagtgtaatctcagcactttgggaggccgaggtgggcagatcatgaggtcaggagatggagaccatcatgcctaacagtgaaaccccatctctacaaaaataaagaaaatttaaaaatca

SEQ ID NO: 233294 - DNA, 392 bp, Homo sapiens
ggatttgtcctccctgctgtcagaacaacagggttctggaagagtagaggacaggccgtgggacttggctgtctagagacaaggcgggagggatttccttgagaggcgtgagccaccatgcccggcctcttttttatatttaaaaaatatcattttatatattatcagggcaaaagagaaaaaccgtatgattaccttgtcatacacagtaaaagcatttggcaaaattgaaaacttttttcatgatttataaaaacaaaccccagaaaatgctcagcatgatgagaacagaaggcaacacttccaaccccattaagggcagatttgaagaacccacaggtaacattatattaaatggcataagattgaatgcttttctattaaatcagaga

SEQ ID NO: 233295 - DNA, 675 bp, Homo sapiens
ggatttgtcctccctgctgtcagaacaacagggttctggaagagtagaggacaggccgtgggacttggctgtctagagacaaggcgggagggatttccttgagaggcagggacatgtggtggttactaatcattgtgaggtgtctgggatgtaatggatgggaaatctactaagaagtcaacttatgtaataattagaaaagctctagttctgaggacagagacctgttggagtcaccatagtgggaatttttgacctggcatccagttcagatacctggagcttcttgactgaggggagattggatcccttggggaagagtgaagccttcaatgctgccacaagtgtgatccgcccgcctcagcctcccaaagtgctgggattacgggcgtgagccaccatgcccggcctcttttttatatttaaaaaatatcattttatatattatcagggcaaaagagaaaaaccgtatgattaccttgtcatacacagtaaaagcatttggcaaaattgaaaacttttttcatgatttataaaaacaaaccccagaaaatgctcagcatgatgagaacagaaggcaacacttccaaccccattaagggcagatttgaagaacccacaggtaacattatattaaatggcataagattgaatgcttttctattaaatcagaga

SEQ ID NO: 233296 - DNA, 225 bp, Homo sapiens
ctaacataaggtggttagggaaagcctatcccggaagataaaatttcatttagctgaggccctaaagctaagatgaacccagccttactaagagctaggtgcagagtgtttatgtctgaacactctaagctggagggtgtaggacttaaatggaccctggcataactagggatacagttgaatgagaaggttcatatagattgggtgagatcactgtgtttcatt

SEQ ID NO: 233297 - DNA, 468 bp, Homo sapiens
agcccctggctgacctcctccactttcacctttcagcctcgtactcctgtgccacctcagcacactctcctgctctaaaaaaaaagaagcattcaggcagtcactaaatagcagtattgatgccccatccccacatgccctggaatgataatgcatcacccgtggtgtgtatccagacgaagccagattacgctcaggtggttaaaagtccaggtctaattagagttccagggaatcaagccattgtattattaatgattctccggcaatgttctgattaaaacagtaattttaataagcacagctcgatgctaagtgttcagtgagcacctaattacatcagttatgactccaaaattatttaaaattccgctttttttccaccggacccggcatgcaccaaataaaatagagactcagacaacttggtgattatttgctctaattaatatcctaagcacctctttt

SEQ ID NO: 233298 - DNA, 282 bp, Homo sapiens
ccttccatgccttcgtttctttatctccaaaatgggtgtcacagtcttgacctcatactgttgttttgaagattgaatagactgatacatgttaagtgttcatttgatttattaagtgtgcgctctgggctagacactgtgataggtgctgggattacagcagagaacaaaatccctgcccacaggctttgacagtccatcaggggaataggttgtagcaaatagaaagcactcaataaagtttttatattgctgtgactagtagtaattactgggtggcta

SEQ ID NO: 233299 - DNA, 312 bp, Homo sapiens
cttccggctggcgtgggccctctccgggagggggccgagcctctcctgcccgggcctggtcctggcgccagcctcaggcctgcaggtcctaacctcagccactgccagtgtggggttccccattcatccgccttttggagtaggggctgcgctgaggcaggggaatgggagaagtttgaaagggagagagtaaaaggaagccctggcccctgacagctttgacagtccatcaggggaataggttgtagcaaatagaaagcactcaataaagtttttatattgctgtgactagtagtaattactgggtggcta

SEQ ID NO: 233300 - DNA, 180 bp, Homo sapiens
gatattttctgtgccttagtctgaggacaaactctacatctcaccattctgtatgaacagtaaggaggagcatggctgacccagctgcatggccaatagtcctttacatgatcatccttgtagctaccctctgatcaacatgccttccttgcacttttaaccattcctcagagttcctcc

SEQ ID NO: 233301 - DNA, 300 bp, Homo sapiens
gtagctgggattacaggcacctgccaccatgcccggctaatttttatatttttagtagagacggggttttgccatgttggccaggctgatcttgaactgacctcaggtgatccacccacctcggcctcccgaagtgttgggattacaagcatgagccaccacatctttcagtgtcatttatgtaaataattctacttttaattagaaaagttcatctaaaatctggtttgtaaattgaaatctgccccttgcttttcagttcacagagacataaccaaccaagcccactgatctagtgtc

SEQ ID NO: 233302 - DNA, 614 bp, Homo sapiens
ctcccacaatgctatagacacaatgacagagcaagcaagaaagaagaaaactggaattggctgggtttaaatctcttccactgaataggggcatgagagaaaattttagtcgggtttatagaaaaatctagccagttacatgtcttacatttctagtgacatttcttcactactgagagaatagaatgagttccacagtggcttttattcatcactgcaaagaagctagagaaaatgactctttgctctgagaatagtcctgtccctggaagggtctggatatagaatgggaaaccatggccttgggaaacacgctgggaatcacaggcaggtacttttattttaaattggttcctcgtctccattctatccggttacgagtattccttcagaagacgtttactaagcgcttgctgtattggggttgctcttctcgaggagtatctttgtggtgttctctgtatttcctgaatttgaatgctggcctgtcttgctacgttggggaagttctcctggataatatcctgaagagtgttttccaacttggttccattctccccgtcactttcaggtacaccaatcaaacgtaggtttggtcttttcacagagtccca

SEQ ID NO: 233303 - DNA, 416 bp, Homo sapiens
tggtcagtgctttaagtgaatctactcagagctgtgaaatcttgggggaatttgacccagtcacagttgagagaaggttctggaaggatatgggctaaggtctacagatgaataaaagttaagctggtagagagggaagagcttgtaggatggacagagggatggttggatgagtgacatgagcctgagtttaagaggttgactatttcttcaccctgtcctctctcttagcctgtgaaggcttgctggtaaattgctaaatctggcagagaatgaggaaaggaagatctctttccctggctatcaattgtttgagtgtttcacttaaagttgagcacctgttctattgaagtgcccacctctgttcctctccatttctttgaaccctatcactggtccttgggaagggtaaatgc

SEQ ID NO: 233304 - DNA, 256 bp, Homo sapiens
cagttaatgtcagaaaacttctgacaagggaccatctgcagctgaatactttggagacagtgttgggatccttaaatcgaggttcagaaattcaaaagaatatgggacttttaaatttggggtcattactgtaatttgcttagtgtggaaatataccagaaaatatatgagacagtggaatgagaaaatattcaattaaataataggcaaaaaaatgcaaatggtctttgtagccagtctccctaggttcaaatct

SEQ ID NO: 233305 - DNA, 602 bp, Homo sapiens
gcatgtttatttccaaattaacagggcaataaaaatcctctcttaaaaatcagggatatcagtattcatctcttttcatgtaaaaatattaaaaaattagaagtgaaatatcacagaagatattttaaatatgaagacaaataatgaaataaggagaattttaaaagccaaatattttggatcagagtaagaagttagtggtaaaagataaaggttatccaacaaccttttgcaaatgaagccaaaaaagtaggtttgcgcaacactgaataactaaaattacaactcttttatatttcattaagaaacatgccctttttcaaaaagtcagatcggtttaatcacaccataaaattatttacccaaagttaaggaaaaatagcatgctttcatataagtagaaaatttaaatacacaattgatatttaacgttctctaagcaatgtaaagattgcttttaagccatctaacagagttgtatttattattagggatcaaaaagtgtgtaaattagcacaatatattttatataaaatgaatctgttttctcttataagagtatacaattataattctgaattttgaatttattcttaaacaaa

SEQ ID NO: 233306 - DNA, 560 bp, Homo sapiens
ctgatgcctacctcagagaattgttgtaaagattaaatgagatgtgccttcagcacagtgcctagcctatggtaagggtccaaaactgttagccatcagtgctattaccattgtcctcatcttcatcatcatgactatggtatgtgtatggaaaggggaaactgcctaaactgatgctttacttgtgtgtggctatgatacagctcaaaacttctctaataaggcacgagggcctattgggaaaaggctaccagcctttgacttgtatttcaaataaggtatttttgcttctcattttatttcttctacatatgtccatattttttttaaccttcctcttcacacttgatttttagcatttcctttttctccctaaactttgtatggagaaaaagaggcaatgagatgctatttttgcaacattagctgaacctgggatatgcgtagtcatgtttatttctgcatccagagatcacacacacctaactcaactgtgtaaaatatattcggaagaaattcagtcaaattaaaagcatgatataagcatgcttatagagtca

SEQ ID NO: 233307 - DNA, 508 bp, Homo sapiens
gagtatcatatagacagagaggtagagatgccttctcttatgtggataaggtggattagcaagttgctattaattggcatctacctactccctcgtcatacaaccaaattagaaaatatcgacaactaatgtgcctcactagaactcaaaatgggttttcccataaaaacaaggtttatacaaagaagaagacaagcctactctatacgtgttcaatgctgtaactcaagacacaatgccagtaatggagagcatttcccttcttgataaaacagtgtctgatctgagaacactggtaactctgagatgtggcctccccgtgagtgtctactgtctccgaaccccaagggcctggagatgtatgattgcaacaccctcaaggactaccagactgatattggtactggccagtatatttgatatcagctaccatttggcactgctagggtcctttgataccagattttgcagcttttcaagagaaaatagaaatctagattttcatata

SEQ ID NO: 233308 - DNA, 612 bp, Homo sapiens
gagtatcatatagacagagaggtagagatgccttctcttatgtggataaggtggattagcaagttgctattaattggcatctacctactccctcgtcatacaaccaaattagaaaatatcgacaactaatgtgcctcactagaactcaaaatgggttttcccataaaaacaaggtttatacaaagaagaagacaagcctactctatacgtgttcaatgctgtaactcaagacacaatgccagtaatggagagcatttcccttcttgataaaacagtgtctgatctgagaacactggtaactctgagatgtggcctccccgcaaccattattgttttgaagatttacaatcaaaaccatttccaaattaaatctgaacaaatggaggcattatttctaaatggaaacctctggaaagtgaagttctacaatttctcctcagagtactttgctatagtgcacatacctgctctgcacgcttgctggaggctgaaccctgcctagaacatgatgggggctcacataaggaagggcacacagtggcatttgtccccaactaactgataatttagttatttaatgaagtaccaaaggatgaaacaaaactaggaaaa

SEQ ID NO: 233309 - DNA, 571 bp, Homo sapiens
tgccttttgccccataggatgctgcttctaactgtactgactcctggtcttttatccttgtgggacagttgtcacagcccccatgcctagcctcagatttcctttacttatcactgggggctgagctcgttggaactgagtgcttagagctaagtgctgactgggggctgcctttccttgcaaaagttctttctttcaccctagacactgtctcagctttcttgtccccacagtgacttgttcaaggacacatcaaagactgaaaatatagccaaagttctcactttctggtccagaaactggatgaaagcaattgacgggagtgacaatgcagatgtctcaagttgatggaagcaaatattaacaagttcatctgccaaagaagagaagccggctaggtggagcctgatgttttattcttcaagcacagctatcaactttgagtgagaggatacagaaaatttatttctactttggctgctttcagaactgcatttatcagcagctccagcataatctacatcaagctgcaaagcatcaattggcagcctgtttgaagcagatccaggct

SEQ ID NO: 233310 - DNA, 466 bp, Homo sapiens
agtgtccatatatgtctgggtttattttctagtctttctcttaggttccattggtatatctatttctcagtgcacacttatgtcttaattacaatagctttaacataaatcttcgcagataccctatttattctttttccgcagcagtatcttgacattcttgatcctttgtacttttatacaaattttagaattatcttgtcaaattccataatgccatctgttggctatgtattggggttgaatggaaacaatagattaatgcagaggtaattgatacatatacaatgttgagagatgcaatctctaagcatggtacatttcttcatttatttaagtcttttgtaatgtctttctaagttttactttaaactctaatattttctttaaaaggtcttgtacaactttttggagatttatttttagtttcttaatcttttgatatattaaaaacagtaattaaaat

SEQ ID NO: 233311 - DNA, 166 bp, Homo sapiens
tagttgttagtgtatgaaccgtcttcactatgctagtgagtcagctctgtgtaggacaagatgaactggttttcaatattttaatatcccttgtttcttcaaggagatcagggattatacacttttcaaattctaaataaaagaatgtgctttgtttcttaatcaa

SEQ ID NO: 233312 - DNA, 405 bp, Homo sapiens
agacccttctgggtgccaagaactgtggccttggtaccagggagagaacactgtgttcctgggcatgaagctgcagaggctgcggctggagttggcaccctccatttatctattcatttgtttattcattcttttgttcaatagatggttattgagtaccttctctgtgccaggccctgctctaagcaacaggaaataccatcaactgcagaatacagagctaaagaatctgtcttcgtggagcatatactctagtgggaagaggcagtaaaacaagaatcataaaggccaggtgcagtggctcatgcctgtaatcccagcactttgggaggccgaagcaggaggatcacttgagcccagaagttcgagaccagtctgggccacatagtgggaccccatctctac

SEQ ID NO: 233313 - DNA, 379 bp, Homo sapiens
gtgcagtaattctggactgaatttcaaagttacccaaattaacatatttgaccacagtgacctttccagcttgatttacttctgttccattaccaaatttctggcgctggccaatcaactcatcttctcctatctcttgagctttcaagcctcattgctttggctcatgccatcctcttgccctaaaatgccctccccattgtgttctgcctgtgtagctcacatagctttaaagggtcaccacaaattccacctcttattgaagttattcttgacccctatattcttgtggcaagtttttaatctgtgaaaatcacaacacttcacctccagtctttttccaggtacccacatcctgctttcaacctcttttgtgttg

SEQ ID NO: 233314 - DNA, 428 bp, Homo sapiens
tagagttcttctaacttttaaattcatttcaatcaggttttgatcaccactactctactgctttggtcaaagtcaccagtaacgtctgtgttgctaaattcagaagtcaattactagttttcattgtattttacttaccaaccccatttgacaaaattggtccgtctctcctccttaatagactttattcatctggcgtccgggacagcaaactcctagttttctttatagctctcctcagtctcccttgagagttcttcattttcctgttgttgaatttcagtgcttcagtcttgagacctggtctctatttatacccatttgtttgggattttatccaagtttatggctttaaatatagtccatttgctgaatacttccaaatttatatctccagccttcacttgtcatgtgacaactcttattta

SEQ ID NO: 233315 - DNA, 477 bp, Homo sapiens
tggctccagctgaaggtgtaggggactggccttttataagccttgtctgtcagtcattaactgtgggctgatccccagtctgtccgtcattaatgaactgcaggaacttcgggctgatcctggaatggggtggggcagggggagccagtgatccagttcagcccagagtgcttcttcagagagggggcatctgtgagccactgacaactgatactttcagactctggggatgggttctctgcctgctgaggggatctgggtttggggtactagcagcatccaatacagaaggtcttatcactcgtatttaatatttccccattgttgtaacagacatttactggttcctgggcttagcactggcgattcataagagaacaagtctgatgtgttctctgctatcaggaaacctatattctagtggtggggaaaagccaacaggttatcacaacagattattgaaacccagtgtaaaca

SEQ ID NO: 233316 - DNA, 360 bp, Homo sapiens
tggctccagctgaaggtgtaggggactggccttttataagccttgtctgtcagtcattaactgtgggctgatccccagtctgtccgtcattaatgaactgcaggaacttcgggctgatcctggaatggggtggggcagggggagccagtgatccagttcagcccagagtgcttcttcagagagggggcatctgtgagccactgacaactgatactttcagactaagagaatgaacagagcccctgagattgagacctcaccctgagctctcagttgctccatatagatctttgaaatcctttttgcctttaaaatttctatacattttaaatatccataaatagaatacattcacactcg

SEQ ID NO: 233317 - DNA, 2811 bp, Homo sapiens
  misc_feature (2301)..(2301): n is a, c, g, or t
  misc_feature (2563)..(2563): n is a, c, g, or t
tggctttaaacaatagcagtcatttattttgctcacaaatctgcaacttgggcagtacttggcagaggcagctaatctccatttcacatggtatcaactgggctgtttggtggtagctgggggatctactttcaagatggcacactcatatggctggcaagttggtgttggctgtaggcctctcgacagactgcttaaggcttcctcaaaacatggcagctaggttctaagagcaagcatcccaagagaagaaggtagaagttcatggaattctgatgattataccttggaggtcacataagggtccttttcacctactcattggttgaggccgtcataaggacccatagtggttgaagtacaggggacatgggttccagctcttgatggaggagtgacaaggttccagcagaccatgtggaatgagaaatattgttgtggccatctttggaaaatacagtctgccacatacatgaattccaacatgcttatgttcatttctggttcattcttctactaggagagaactttgagaatacgtaacaaataaaaatgaaggcgagaagtggaaataaattcagtattgaatataagggttattggacattgaagataatctttaaatgtataattctcagtagttgttaatgcaaagctgttccttccctcccccccgaaaaaaaacccatctcctatttgttactcaaagggatcacatatcttcatgtgctctgaaactctcttaaatcatttccatcttccagaaaaaccatcccagtgttctccagggtatttacaaaagaacaataaaacattcatttttttagcacactgtaatgaaaaccatccccaagtacttagtttaactgccttgtttaccgtgggagtttcaaatgtcattaggaccctgttatatttttgttggtctggagtcgtgggaatcacaaagtattttttaaccaagggttaaaactaggatagcaatgcccaatggcaccatctcaacattttgttaaagtgtgtttcattaatgctttggaagcctatgtaaatcagaggatggtggggggaagaaaaggtcacgaatactggatgttaaagcagtgtggtgtgaagagaaacatctgctcctggttaaattctttaaacttatgttcttttgactcactcatttaactgtggtgctgagatttgagttcaatgaagactctaaagctggttttccagaatgttccagggagtcttaatgaacccttgagttcttaaccccaagcttgtaattccaaggtcactggtattaccaaagtataaaactagggttgtcaacctcagcaactccaaaaaactgtctttttgttttttgggacctacattgcctcatcttagtgcctttgtgaaacaaggcccatgggtatgcctgattatgaggcattttttaccttgataagaagtagtgatattaacaaattgcttattgctacttcttttctttttcctgaggggaagattgacttggtttcttaagagatggactgaaaacccacgaactgcacattttaacagcaatgctttcttgagacatgtctctggacctgcaacccccttaatgtctctaggcctcagttttcttcactgttaagatgataggagtagcaaatgatgtgcaagttttctgaatctcaaatgaatatatttttaaaacattattggtcccagatggatatttcctgaaattgtagactcatagatgtttccacttgggggtaacctcagatactgcaaatttaatctcatgcctattcattcctttaataaatgcccaaggaatacttactgtgtaccaggaacagttccagatgctgaggacaaagcaggaggcaaaagagacaaactgcctgtcctcatagagctctcatccagctaggaaaaccagttgtagggagatggaggggggaacagcatgccaaacagagggatctgcaaagtgctgaggccccctgatgggaacaaatcttggggtaggggggaaacaatgacaaagacttgtgaaggtgtcaggagtttgggatgtggcctgagaggtgggcaagacccatttcaggggcagggcaagggttgggaatcttattctaaatgggacatcgttggagagttaaaacgagcagccttaactggctcacatctttcagataccagcctggctgctgtgagggctgtatacaggccagcatgcaggaagaaaaccagcagaaaggtggtggtgaggccaaggaagagcatctccaggaggaggggaatgcntgagctaccagagaggatggggtggtgagggctaaaaagcctgtgggatttggcgtcatggaggtgacaggagggctgtggggagctgccggtgaggaggcagtacagaagctagagagtgagtggaggtggagtcggtgaggcgggtgggtggacgaggcttgcttacttctattgttggttggattctttcctctttttcttcttttaaaaaaagataacttgaatttagttgtatgctgagtggaaggagccagtaganagagagagagagagccaaagctgtccgttttgcagatggacaggaaggagccaggacacagctcagctcgctcacgcccagagagagaaaaagttaagctgctgaccctgaaggcaagggagagcaggctgcacagctgtgtgtggaagccacgggctcaagcagccaaggcagggcggacagtgtgagagagctagtgtaagctgttgatgagagctgttgctgaataaaaccatattcccctgccc

SEQ ID NO: 233318 - DNA, 301 bp, Homo sapiens
aaaaaatgacatacaagccatgaagaggctcccacatcccacttctctgctttgggctaggatgaataccacttcttgaaaagattggcttctgcaattaccactgaataaacaaccaattaaaatgtctcccctgcccctaccccaccctttttctctcttgaagctttctcatctcagagctatggggcagaggtggctttctctaataacatttgtgttctctgcctgagagaacatttgatggaaatgaacaaatcaattagaaaataataaattatgtggaaagggctgatccaag

SEQ ID NO: 233319 - DNA, 465 bp, Homo sapiens
ggcttccagagttgtatgagataatttccatatatgtctcatatatatatgagacagagagaggtttataaatatatgtatacacacacacattctattttcctgtttctctggaaaaccctgactaatacatttcattagacctctgttttcccatctgaaaagtgaagacagtaatttttacctctagaattgttgcaaagattacatgagacaatggacccaaggcccatagcacagcatctgttaactgagtaagcattcactagaaattgtatttatgtttgtgactattatagggaaatgtctttaggcgtgtgtctaagggctgaattcagctgtgtgtctcactcctccctgagggctgtgccacggtcaggtggcttccaatctgtactcaattgttactgtacagactgtttcttttttagtggcagtcccttaggtcccaaggtgaataggccg

SEQ ID NO: 233320 - DNA, 1398 bp, Homo sapiens
  misc_feature (8)..(8): n is a, c, g, or t
  misc_feature (735)..(735): n is a, c, g, or t
  misc_feature (922)..(922): n is a, c, g, or t
  misc_feature (1251)..(1251): n is a, c, g, or t
ctacagantcgatgaccccatacggcaccccatcatgcctgcatcatgcctcccctcttggcctgtgcctccttatgtctgcagatgggcttcctctagcccacacctccatcaaaggacagggacccccctgcctcgtgccccatgatgcggcccacatggcgcctccggcctctgccccctctccccacagatatcgacgagtgtcgcatctctcctgacctctgcggccagggcacctgtgtcaacacgccgggcagctttgagtgcgagtgttttcccggctacgagagtggcttcatgctgatgaagaactgcatgggtcggtgactgccgggcaggggtgtggtgggcgccctgggcagggagggcattgaggagagggagggtggggacggctgttgctgtgtggacgtggatggagggggcaggaggagggaggagctgtaaattagctgaggtacagtgagtctgggctccatgaggcctcgtccttaggagagagacctggggcctgagacctgggggtggccggcacactggggtgtggtctcccagggagggtgtgtagcttgggtagaggacagggaccctcagagaagcctgggaaatactgccggttatgaggcctctcgtccccatcattgacttcgttattcatttgatgagcatttcacatgcatcctctgagctagaggcactgcagggagctctagctccagggagccctctttncttggagctcacagcctaacaggaagacagacatgaataacatgaatcgctgaggaaatgcaaaactgggctgggtgcagtggccctcgcctgtaatcccagcattttgagaggctgaggcagtaggattgcttgagtccaggagttcgaggccagcctgggcaacataacaagaccctgtcactanaaagttttttaaaaattagctaggcatggtggcgcgtgctactcgggaggctgaggagggaggatcccttgagcccaggaggttgaggctgcagtgaaccataatcgcacttttgcactccagcctgggtgacagagtgagaccctgtctaaagaaaaaaggaaggaaggaaggaaggaagaggaaaaagccaggcatggtggctcatgcctgtaatcccagcactttgggaggctgaggtgggcagattgcctgagttcaggagtttgaaaccagcctgggcaacatggtgaaaccccgtctctattaaaatacaaaaaattagctgngtgtggtggcgtgcacctgtaggtccagctactcaggaggctgaggcaggagaattgcttgaacccaggaggtggaggttgcagtgagccgagatcgcgccactgcactccagcctgggcgacagagcgagattctgtctccaaatt

SEQ ID NO: 233321 - DNA, 332 bp, Homo sapiens
cacttgaggcgaggagttggagaccagcctgggcaacatatcaagaccccatctctactgaaaaaaaaaaaaaagtttttaattagctgggcatagtgacacccacctgtagtcccagctactgaggaggctaaggcaggaggattgtttgagccaaggagattaaggctgtagtgagccatgatcatgccattgcactccagcgtggacaacagaacaagacactatttaaaaaaaaaaaaaaagaaagaaagaaagaaaactgaagaaaatgaaatgtgtccacaaggcctggccaaggcaggcatcagatatcagttgcccccatcttc

SEQ ID NO: 233322 - DNA, 464 bp, Homo sapiens
agctcgcctctgcccagctggacgatgcaggggtctacacggctgaggtcatccgggcaggggtctcccagcagactcacgagttcacggtgggtgtgtatgagcccctaccccagctgtcggttcagcccaaggctccagagacagaggagggggcggccgagctccggctgcgctgcctggggtgggggccaggtcgcggggagctgagctggagccgggacggacgcgccctggaggcggcggaatcggagggagccgagacgccccggatgcgctcagagggcgaccagctgctcatcgtgcgccctgtgcgcagcgaccacgcccggtacacttgccgcgtccgcagccccttcggccacagggaggctgccgccgacgtcagcgtcttctacggcccggacccgccgaccatcacggtctcctcggaccgcgacgccgcgcctgcccgctttgtcacc

SEQ ID NO: 233323 - DNA, 371 bp, Homo sapiens
atattggaagttctgattatggtaaaactcaaaatgggtgttcttccagcgtaataagtttattttcagctccttttaaacagttctgttattagtgaaagaggaactgtttaagattgtgatttataaacgtgtgaagtctcacgtgctctcaaaccaaaggctgtcagaggttggtgctgcctgttctcgaaatggctctggatgggggccgtagccacgtgtctgtgcatatgctgcttttgctctgattttaaagctgtaggcttgctaattccataaggatcgtattttgtttctgtcaggacatggtcttgtaaggatatgtactcaggttgtgtttctaattaaaggcagtttttgattcaaga

SEQ ID NO: 233324 - DNA, 523 bp, Homo sapiens
gcaaaggatttatcaggattagcaatcaactgagcagtggaattttatgaaatgcctgaaggtaattatgtggaattgtgaaatgtatatcagtgggattactctagtcttgtctaattatttgaccgttatcaatacaactgagtgataagtatttagaagatgctatttaaatatttttcagtgaatactgagaggcacagtctcttgataaaccccttcctattcaataagcatgtcaaaatattaaacaatgtcatcttaggaaaggtaagaatggaattttggaacttaagctaaaactgccataaagacgctatggcgtttcaaacaagctgtagttgtttgcatagattggtagaatttaattttggaaaaattactaatctgaacaactagcgatcagccctggtgcataaaattacttgctttcaaaaattctgaccacaaatattcacaatggatgcacaaacaaattttgccagccacaatacgaaagatttttggaatcttaccttgtctt

SEQ ID NO: 233325 - DNA, 1559 bp, Homo sapiens
  misc_feature (925)..(925): n is a, c, g, or t
ttaaaatgctattatgaaacagattcattcattcattcatgttgcccacctggtccccatagtcatcggagttttccactcttgacgaacgaatacttgccctattttccaagctaagtcttgaataccttgtaatgttttacttcttgtggcatcctgcactttgtgtaaaatcaggagtggggagtgccaataaatatttgattgactaattgacagcttgagtcaaggttctggaagagaataaatacaagggaaaggcattccctttttcatttagaccatattttgcctaagccaaatggacgatttacagctaatcattgcgtcttaaccagggacagctggagcttactgcttgcctcctgcctagtcgtctttattccttctataaaggcagaaaacagaagggctctgcacacagcagtcacagacgctcatcaaagacaaaccactgacatggaaactgaacaagaaaaggcttcctggttcaaggctggcttttgggagccatgttcaagcatgccctaagtagcacagtcagcagcctttttccttcactctttaggggctggggttgaggaacaagattccctcaattttccaacaaataacctatttcagtgaaataaaaaaagggggggtggggcattggtgcagtcagtcattcatatgccaagttgtagccatgttagtatttcatgccagtaattctgtctagcagaaactcatcctggctcttttccattccttttagcaagattgcagttgtaaatcagcaggaatgtcctggagactgctccaggtgggttgtcgggagcagtctggaagaagaatcttcagaataatttaggttatgagtctaagagggaaggtcaatgctgctatttagaaccagagcactatgccaaatttggctttgganggatgcgttaaatgtcattcttggaatttgaatttagaatattttaaaaacacgatcgtttgtacattcacccctacaagatttagccagggttctcatctctgacctctgaacatcctctaaatttgcgagaccactatagtaataatccaatttgggttagtactttttactcataagaagagtttcatttgtagcttttagaggaaatggagtgagtatcattctgatctcaagggcactgtggacagaaattggatttgcagagttagtgtaggtcttggttctacctcttaataacagtatggccttagacaaatactttgtcctctctgggccctttctttctttctttctttctttctttctttctttctttctttctttctttctttctttctttctttccttctttcagaaacagagttgggtggaggttggaaggagggagaggatcggaaaaaataactattggtcactagccttagtacctgtgtgatgaaataaataatctgtacagcaaacccccgtgacatgagtttatctatataacaaacctgcacatgtacccttgaagctaaaatgcaagtttgtttgttttaaagaaacagttattcagaggaatgaatgccac

SEQ ID NO: 233326 - DNA, 316 bp, Homo sapiens
ttttttaataaggccattctacttatatgaacaatgtcatatccataacggtggattctgcagattaatgatactctaatttttatttataaacctgaaaaagctaggtgcatacaagaattagggcaatgactttagccaccgaaatgctggacatcagaaaagcacctgaagttatgcctagttgcacaaaacaaaaactttaatcaggtgccttcaagtggaaggacaaggcgattcctgaaacctctacagagacacctactatatcatctagtttttcatctttcttcagggcagggagtcctccctttcc

SEQ ID NO: 233327 - DNA, 257 bp, Homo sapiens
cagtccaccttcaattacttgtgctatctttagcattcaagatacatttctatatatacaccaaattgtaggcaactatgtaagggcaataaagcaattttctttttctggtatgtggtatcccctcaatttcgaagtcatacagtattggtttattttaattcaaatcaactccacaacttagtaaacgtttatcaaatgcctattgtgtgccagggtcagacataaattgcatataataaaatcacctttaaaac

SEQ ID NO: 233328 - DNA, 405 bp, Homo sapiens
ggccacagagggagaccttgttttttttttaaatgcacctggcatataacagtgcttaataaaaattttaagacaacttaagaaaaacaagcccctctaagattatctacattgactttgtgcaatccctctcattatgtattggtgaactcagaggaacaaaatgtttcaagtctaagtcacataatcagttgataaatctccaaagcaaacccgtcccctcccattatctagaaggctactttataactgaataaaaatcatgtttgacttgtccttttggcacggctagttacgttaaaggtacgtaatggaaaataaactagagctggctggctatggaggaaagagatagatctaactccgagcaagcaataccattcgcatggtagggcaagcacatgc

SEQ ID NO: 233329 - DNA, 257 bp, Homo sapiens
gaacccagatttgtttattccgaagttgtaagaccactaaggtcttaacagttattaacacttagaattcatacaagacatgagtagtcatgtatatgctgtgagtttttttacttgtcatgttggtgatctctttgtacatggttgccctctctggggatgggtagaacatatgactaattaaacattacaggggcatccattaatattaaacgagtaaggctttgtgctgctgaactccagctcatcctttaaca

SEQ ID NO: 233330 - DNA, 385 bp, Homo sapiens
gaggacagcttcgcctggggcgcagattcctcgagggctgggacggcgacgagggcctgagggttcgattcctgttccagcttgctgagtccagcctctgggaacgcggcagggtccgaagggaggaggcaggcgcagaggctctgctgccctcactctgcggtgtgaccttgggctgcttgtttagcgtctcggagcctcggttagtaagggaaataatgaatgtgaaaggtggggctcttgccgggccctcgctgagtgtgaacggagtggaactttttggggcaatcctacttgcgtccctaaaaggggatgtaaaaccctgtttcctcctgaactcctcagggactattaaaaatgcaaatatgccaaacaaatgtggtta

SEQ ID NO: 233331 - DNA, 220 bp, Homo sapiens
agggcaagaagaaactagctagtccctttttgcccttctgcttgtctgcagtgtgaagacacagcatttgtcccctctggagatgcagtagcaaggtgccaaattggaagaagagatagacagccctcgtcaggcaatgaacatgctggcctcttcattgcggaattcccagcctccagaactgtgtgaaataaatttctgttttttataaattacccag

SEQ ID NO: 233332 - DNA, 248 bp, Homo sapiens
atgtaataaagcatgttactttcatgactaggttttgaagatgtttggtacaatgttttaaattcattgcattttctggagaacaaaaagcccacctgtttgtaaggcatcctggtatgtttagaatttctcattgatttcaggaactctggccttgatgttaaagaaagtgatcacagacctttgtttaaggcaggcagggatgcatctgactgtcagggaaacaacacatctctgggggaacaaag

SEQ ID NO: 233333 - DNA, 463 bp, Homo sapiens
ggccccagttctgcttcttgaaaaatctagaaacagcatctcaatagcaaccatcagccagaattctgtatcagtttcaccttaagcagggcataaggactcctagacttccccaaggctgttattatttcccaccatcccccccaccacaatatttaaagtgtttaaatcatttattttgaaattcttatgtgatccaagaccactgtgcatttaagctagtttatttgtttattaaaacaaaagaagtagactgcagttacgttgtttctttttctgttgtttggtgtcaggagtagaatacatttggccagcttcatgagaggattagaaagttggagaaggaaaaatagaattgtttacggagccaggagaataattgtctataattatagatgcttgttttgaggtttggaaaaggtggtttaaaaaacttttaagaaaaaacatgataaacatctat

SEQ ID NO: 233334 - DNA, 428 bp, Homo sapiens
tcattgtagatttggaaagtattgagtaggagatgataatctataatcaggattctgagttggtaagattttatagatctgaaaaaagtaatttcttgaccttggcctcaataagaaagtcagaacttgacccttatttaccagcaccatcccccccaccacaatatttaaagtgtttaaatcatttattttgaaattcttatgtgatccaagaccactgtgcatttaagctagtttatttgtttattaaaacaaaagaagtagactgcagttacgttgtttctttttctgttgtttggtgtcaggagctgaagcaggagaatcacttgaacccaggaggcggaggttgcagtgagccaagatggcgccactgcactccagcctgagtgacagagggagactgtctcaaaaacaaaacaaaacaaaac

SEQ ID NO: 233335 - DNA, 4233 bp, Homo sapiens
cgcgaggcaatcgtccggtgtgtgagcccgggagccggaggtgtagcggcagagacattgttcttgccggctccctacggtgccgtgtgtgcgtgagagaagaccagtctttcctctagcatttgacattgtgcagcaaagaaatggttatggagaagcccagtccgctgcttgtagggcgggagtttgtgaggcaatattatactttgctgaataaagctccggaatatttacacaggttttatggcaggaattcttcctatgttcatggtggagtagatgctagtggaaagccccaggaagctgtttatggccaaaatgatatacaccacaaagtattatctctgaacttcagtgaatgtcatactaaaattcgtcatgtggatgctcatgcaaccttgagtgatggagtagttgtccaggtcatgggtttgctgtctaacagtggacaaccagaaagaaagtttatgcaaacctttgttctggctcctgaaggatctgttccaaataaattttatgttcacaatgatatgtttcgttatgaagatgaagtgtttggtgattctgagcctgaacttgatgaagaatcagaagatgaagtagaagaggaacaagaagaaagacaaccatctcctgaacctgtgcaagaaaatgctaacagtggttactatgaagctcaccctgtgactaatggcatagaggagcctttggaagaatcctctcatgaacctgaacctgagccagaatctgaaacaaagactgaagagctgaaaccacaagtggaggagaagaacttagaagaactagaggagaaatctactactcctcctccggcagaacctgtttctctgccacaagaaccaccaaaggctttctcctgggcttcagtgaccagtaaaaacctgcctcctagtggtactgtttcttcctctggaattccaccccatgttaaagcaccagtctcacagccaagagtcgaagctaaaccagaagttcaatctcagccacctcgtgtgcgtgaacaacgacctagagaacgacctggttttcctcctagaggaccaagaccaggcagaggagatatggaacagaatgactctgacaaccgtagaataattcgctatccagatagtcatcaactttttgttggtaacttgccacatgatattgatgaaaatgagctaaaggaattcttcatgagttttggaaacgttgtggaacttcgcatcaataccaagggtgttgggggaaagcttccaaattttggttttgtggtttttgatgactctgaaccagttcagagaatcttaattgcaaaaccgattatgtttcgaggggaagtacgtttaaatgtggaagagaaaaaaacaagagctgcaagagagcgagaaaccagaggtggtggtgatgatcgcagggatattaggcgcaatgatcgaggtcccggtggtccacgtggaattgtgggtggtggaatgatgcgtgatcgtgatggaagaggacctcctccaaggggtggcatggcacagaaacttggctctggaagaggaaccgggcaaatggagggccgcttcacaggacagcgtcgctgaagctccactgttggcaaagtcttggcagtggtacattattcatcgtgtttgcattcttgttaattttttttttggctttggaatgtgacacagcctttttgatcatttctttgatgtgaaaagcatctttggttatcagttaaattgaggtggacattatttccccaatttcacaacaggattcacattgttaatttataaatctagacttggagaattaaggactgagaaatgaccatatcttaaactatctacgacaaagtgaacttaaaaggacatgcccactgaattcaggtcctttgagtaaaaaaaaaatcttctgctgcacattttgtttaagtgttactgtttctgcctgttaatgctgggaacacaaatagtgcaatttgtgcaattggagaatcttgccttttttcttggctccccccaaaaatacaaaccaacagaaacttgttatgcactcatcaaaatgtactaatgggtactctgaactcattaacattgacatctgcaacaggaggcaacagggaaaaaatctcatcttcttttccagtagaaaatagtttgtgaaatgatgagggcattttatctgcttgctgtgaccagcgtgtgtacacataaaccttaacaagactacaagtatattccagaaggaaatcattttagttatgaactaaataataaaaattagaacttcaaatgcgatggtcttgactattagaccagatttagtagctccatatctaagatttttctacctgcccctcttcagtacagggatggctggctgctcaacacactcctcctccccttttttcctttctttaagctgtgtacagtgaaaattgtctttactgtatttttgttctctggtaatgtaataagcatgatggtgccttctattaatacatcattccagtcttgctggtaattttgtacagtatagtgtatgaattgctgtgctgcaaagccaaacagctgcaaaatgttgaaaaatcatcgaaatgtataaaaattgcagtatctttaaaatcagtaaaatggactagcatattatttatcttgttcttcagttaacaactttgtgttctctgtgggagggagggagtcctgtgtgtttgtggggagagggaaggaggaagtcagttatttgagtaagcctctagttgacttttctcttagcctgaatgtggacgttgaaacatatcacttcagggcttggaaaagtcagtcaacttgacgtacatttttagtgacattttaaaagcagtcagattctataaatggcaagtaagcctgaagtgaggatactgcaattttcggagaaaagaacagcagctctttaagtgtttgcattttctatttggggggcagggaactgtcattcattttgcacaattcttgaactgatgtcagcacccgagtggctcctgaatttaagtctgggacgacatcttttatttttacatgaatctttaaacaattctgtgagcaaagtttgtagctgctggattattgtctgtctttatagcaagttccagtaaaccacaagtatggcaaagcttatccaattttatgcttggagcagtcagtacataccagtttctgatgtttcaggcaggagtggggtaaataagtgtgaccacttaaagctgctcgttagcatggaagacttctccattctatctttgtaaaacagacaagatatgcacttgacatagtagcaaattggttctgaattatgcaactgtttgctatttagtaaactagcaaatgatgcatgtattttgtttttcatgtactgggcaatatgagtaaaatctgtccctttttccccctttgaatgaggtcttccatgtttgagggaaagtcttgcactattgcatatattttggggacacagattttcatagtttccatttttggggggcttaaggattttttttttttctgtttgaaacagttttatactttctgatatagtacttgaaattcttaccagaaaattactttggagttttgaagcctttattaatactacttttaaagaagcagttgttttattgtcaatgttttttttcccccaagcatattttcttgtatttctgtttccatatatatatatatatataatttccaattcaggatattgccctgccatccatgaaaactgttctggcaccaaaagtaatgacaaatgttaagtgtaataatagaaaagtagagcaaagagccattcagcttcagtctttacataccatgaataaaacattaaaacatcatatggagaagtttacatggtgattgttcacctgcagtactgtggagttttaacattttgtcctcttttcagtgaaacagagtaaaaatattcatctaccattactgttatttgctgattttgttttattttttgatggtaatattctatccttatgacactattgcaaccaaattggctttaccatcttggctttagtaggtatagaagacaatggattaccatctttattgctgtaatgtgttaagcattatatgctagtagaatctagtttaattgtttcaggtggaaagtattctttgagtttccatattgaatgtgtttggactaaacaaacaataaactactgatgtctgcagc

SEQ ID NO: 233336 - DNA, 759 bp, Homo sapiens
gggacgtccgtggtccttgtcgcacgtcgcagcgcctggcgcccgggaagaggtggttgtgaggcagacgaactcgcggctctccggcttccgaggcttccgagttgtcggaggaagggggcggcgagcaataagaacccgccgcacccggtcctcagcgactcttctgacctccgcgcgacgtacccgccgccgccgttggctggagcatttgacattgtgcagcaaagaaatggttatggagaagcccagtccgctgcttgtagggcgggagtttgtgaggcaatattatactttgctgaataaagctccggaatatttacacaggtaaattttaaacaaataatttggtatttttatctactttttttcttgggtatgactatatatattttgcatttcctgtctcctcattatctgacagtatctttgtaaacatgtctaaactgtattcaatattttattcatttgatggcaaaaagtgtttttaactgcaactcacagtaataaaaacattttatgtcatattctggtacataacacattcatatctatatatgcacacgcttattcttatatgtactctagtattttatttttagagtcatggtctcctctgtcactcagggtggagtgcagtgatatgatcatagcccactgtggcctcaaacttttggcctcaagcgatctcccagcttgcagcttgcattcccaaagtactgggattacaggcatgagccaccaagcccgacctttatt

SEQ ID NO: 233337 - DNA, 4322 bp, Homo sapiens
gggacgtccgtggtccttgtcgcacgtcgcagcgcctggcgcccgggaagaggtggttgtgaggcagacgaactcgcggctctccggcttccgaggcttccgagttgtcggaggaagggggcggcgagcaataagaacccgccgcacccggtcctcagcgactcttctgacctccgcgcgacgtacccgccgccgccgttggctggagcatttgacattgtgcagcaaagaaatggttatggagaagcccagtccgctgcttgtagggcgggagtttgtgaggcaatattatactttgctgaataaagctccggaatatttacacaggttttatggcaggaattcttcctatgttcatggtggagtagatgctagtggaaagccccaggaagctgtttatggccaaaatgatatacaccacaaagtattatctctgaacttcagtgaatgtcatactaaaattcgtcatgtggatgctcatgcaaccttgagtgatggagtagttgtccaggtcatgggtttgctgtctaacagtggacaaccagaaagaaagtttatgcaaacctttgttctggctcctgaaggatctgttccaaataaattttatgttcacaatgatatgtttcgttatgaagatgaagtgtttggtgattctgagcctgaacttgatgaagaatcagaagatgaagtagaagaggaacaagaagaaagacaaccatctcctgaacctgtgcaagaaaatgctaacagtggttactatgaagctcaccctgtgactaatggcatagaggagcctttggaagaatcctctcatgaacctgaacctgagccagaatctgaaacaaagactgaagagctgaaaccacaagtggaggagaagaacttagaagaactagaggagaaatctactactcctcctccggcagaacctgtttctctgccacaagaaccaccaaaggctttctcctgggcttcagtgaccagtaaaaacctgcctcctagtggtactgtttcttcctctggaattccaccccatgttaaagcaccagtctcacagccaagagtcgaagctaaaccagaagttcaatctcagccacctcgtgtgcgtgaacaacgacctagagaacgacctggttttcctcctagaggaccaagaccaggcagaggagatatggaacagaatgactctgacaaccgtagaataattcgctatccagatagtcatcaactttttgttggtaacttgccacatgatattgatgaaaatgagctaaaggaattcttcatgagttttggaaacgttgtggaacttcgcatcaataccaagggtgttgggggaaagcttccaaattttggttttgtggtttttgatgactctgaaccagttcagagaatcttaattgcaaaaccgattatgtttcgaggggaagtacgtttaaatgtggaagagaaaaaaacaagagctgcaagagagcgagaaaccagaggtggtggtgatgatcgcagggatattaggcgcaatgatcgaggtcccggtggtccacgtggaattgtgggtggtggaatgatgcgtgatcgtgatggaagaggacctcctccaaggggtggcatggcacagaaacttggctctggaagaggaaccgggcaaatggagggccgcttcacaggacagcgtcgctgaagctccactgttggcaaagtcttggcagtggtacattattcatcgtgtttgcattcttgttaattttttttttggctttggaatgtgacacagcctttttgatcatttctttgatgtgaaaagcatctttggttatcagttaaattgaggtggacattatttccccaatttcacaacaggattcacattgttaatttataaatctagacttggagaattaaggactgagaaatgaccatatcttaaactatctacgacaaagtgaacttaaaaggacatgcccactgaattcaggtcctttgagtaaaaaaaaaatcttctgctgcacattttgtttaagtgttactgtttctgcctgttaatgctgggaacacaaatagtgcaatttgtgcaattggagaatcttgccttttttcttggctccccccaaaaatacaaaccaacagaaacttgttatgcactcatcaaaatgtactaatgggtactctgaactcattaacattgacatctgcaacaggaggcaacagggaaaaaatctcatcttcttttccagtagaaaatagtttgtgaaatgatgagggcattttatctgcttgctgtgaccagcgtgtgtacacataaaccttaacaagactacaagtatattccagaaggaaatcattttagttatgaactaaataataaaaattagaacttcaaatgcgatggtcttgactattagaccagatttagtagctccatatctaagatttttctacctgcccctcttcagtacagggatggctggctgctcaacacactcctcctccccttttttcctttctttaagctgtgtacagtgaaaattgtctttactgtatttttgttctctggtaatgtaataagcatgatggtgccttctattaatacatcattccagtcttgctggtaattttgtacagtatagtgtatgaattgctgtgctgcaaagccaaacagctgcaaaatgttgaaaaatcatcgaaatgtataaaaattgcagtatctttaaaatcagtaaaatggactagcatattatttatcttgttcttcagttaacaactttgtgttctctgtgggagggagggagtcctgtgtgtttgtggggagagggaaggaggaagtcagttatttgagtaagcctctagttgacttttctcttagcctgaatgtggacgttgaaacatatcacttcagggcttggaaaagtcagtcaacttgacgtacatttttagtgacattttaaaagcagtcagattctataaatggcaagtaagcctgaagtgaggatactgcaattttcggagaaaagaacagcagctctttaagtgtttgcattttctatttggggggcagggaactgtcattcattttgcacaattcttgaactgatgtcagcacccgagtggctcctgaatttaagtctgggacgacatcttttatttttacatgaatctttaaacaattctgtgagcaaagtttgtagctgctggattattgtctgtctttatagcaagttccagtaaaccacaagtatggcaaagcttatccaattttatgcttggagcagtcagtacataccagtttctgatgtttcaggcaggagtggggtaaataagtgtgaccacttaaagctgctcgttagcatggaagacttctccattctatctttgtaaaacagacaagatatgcacttgacatagtagcaaattggttctgaattatgcaactgtttgctatttagtaaactagcaaatgatgcatgtattttgtttttcatgtactgggcaatatgagtaaaatctgtccctttttccccctttgaatgaggtcttccatgtttgagggaaagtcttgcactattgcatatattttggggacacagattttcatagtttccatttttggggggcttaaggattttttttttttctgtttgaaacagttttatactttctgatatagtacttgaaattcttaccagaaaattactttggagttttgaagcctttattaatactacttttaaagaagcagttgttttattgtcaatgttttttttcccccaagcatattttcttgtatttctgtttccatatatatatatatatataatttccaattcaggatattgccctgccatccatgaaaactgttctggcaccaaaagtaatgacaaatgttaagtgtaataatagaaaagtagagcaaagagccattcagcttcagtctttacataccatgaataaaacattaaaacatcatatggagaagtttacatggtgattgttcacctgcagtactgtggagttttaacattttgtcctcttttcagtgaaacagagtaaaaatattcatctaccattactgttatttgctgattttgttttattttttgatggtaatattctatccttatgacactattgcaaccaaattggctttaccatcttggctttagtaggtatagaagacaatggattaccatctttattgctgtaatgtgttaagcattatatgctagtagaatctagtttaattgtttcaggtggaaagtattctttgagtttccatattgaatgtgtttggactaaacaaacaataaactactgatgtctgcagc

SEQ ID NO: 233338 - DNA, 1727 bp, Homo sapiens
cagagggagaagtcagcggagaagctgggagctcctttggaggctgcggtgtccctgactctcctgaggggggctcactaacgggtgggtcccatgccacagtgtctgaggagaagcaggaagtgagtccctgaggagacgccgtgacctgagggcttcccttactgaggaggcctcgtgcttcatctgccacaagcggtgcccaggccggtggtgacaactgggacgatgctcaggcttctgagacttgctttggccttctacgggaggacggccgaccctgcagagcgacagggcccacagcagcagggcctcccacaaggtgacacccagttgacaactgtgcagggagttgtcacaagtttctgtggtgattatggcatgattgatgagtcgatctacttcagtagtgatgttgtgactggcaacgtgcctctaaaagttggacaaaaagttaatgtggttgtggaagaagataaaccacattatggattgagagcaatcaaggtggatgttgtgcctcgccatctttatggtgctggaccctcagactcaggaaccagagttttaattggatgtgttacttctataaatgaagataatatttatattagtaacagcatttatttttccatagccattgtttctgaagattttgtgccttataagggtgacttgttagaagttgaatattccactgagccaggcatctcaaacatcaaggcaacttctgtgaagcccatccgttgtattcatacggaagaggtctgcattactagcgtacatggaagaaatggggtgatagattatactatttttttcaccttggattctgtgaaacttcctgatggatacgtacctcaagtagatgatatcgtcaatgtggtcatggtggagagcattcagttctgctttatttggagagcgatttctatcaccccagtgcataaatcgtaatgacaaagcatttttattctgtttatctttccttttatgagcagtaaaggggctggtttaacttaaaaggttagcttagtaagcctaaatagtattttatatatgacttttctggcaaatctaattgagacactggccagtccaactggaccaggaacccagcttagggaaataacttattaattaaaaagcatgctaaattagcttgctagtcactggaggaaaggagttcttaattaaaatgaacacggccattaaatttgaattccatatttcccattagcagcagcggattccaggatgacggaggcctgggacggcccaaaagggaacgtcggagccaaagcatttaactgaaaaggcatcagggacagcatgttaaaggcatgatttaaagttacaatttgacttcagttttgagccccgttatgctgcctgtacaacctgtattgttccatagcctctttcatcttctctcacccacataacttgcggtgtttgttgttttacttgttccttcttccccatgctaggatgtaaactccacaatggcaggatgtcttttaatctggttttttttttcttttttctttctttttttttttctgttgtcattaaagcatcaccaagcacttagaagagtgcctggcagactcaatgagcagataaaatgttattaagttcaatgactgaatgactgggccagcaatgatacttacctgtggttcattcatcactggttccttaggaataaaattgttgagcaatgc

SEQ ID NO: 233339 - DNA, 334 bp, Homo sapiens
ctgtgtaagaggatggggtcggtgaggtggggtggtgtgagcaatggagctcaagggctcaaggtgcaggcctggactgatggccactaggaccaccccaatggcttcagggtcaggacaggaagggaatgtgattattgcagcaggtagtagggcagtatgagtgtattattcatatatgtgtgatgaaatggagcatcaaataatatatcccataggatagaaaggcacagtgagtgagtttgggttaaaaattcgatgagataaagtggttgtacctcctatgaaaacaatttaatttcttattatgaaggcattactcatgttcttcaga

SEQ ID NO: 233340 - DNA, 367 bp, Homo sapiens
ttgaccccatgccaccgggacaccctgggactctgtctgttggggattgcaggctgagctggctggggttgggagcaggttaggagaagatggggtctgatctcccagctgtctctcccaggtggaggttgagagcttcttggtgcccagggagagcgcctgccaggcctggctctgccctagcctgtgacgggacgtgctgcaggtggctggccaccgaggcttccgggagctggggagggcggctgtgaagatgtgcccgggccctccctgtttccagccttcctgcagggcctgtctctggagctgatgcagatggcaggaccaagtgccaagcctgggggcatcatagtgaaaaaaacgctta

SEQ ID NO: 233341 - DNA, 325 bp, Homo sapiens
ttaaatgttactgtatctgtaaagtgaagatatgatctctactctgccgtctcaaccatggctgcactttggaatcacctggggagctttgaaaaatacgtctaaatcccaccttcaagagattccaattttattaaggtgcagcctgggcattgagatttttaaacccaccacaagtaattcctatgtgcagctaaggctgtgaatctttgaattgggggatggctaagaaagccctctatagatttacttacaaacattagtagatgttatcgacaatctaaattgttttttgtttgtttgaccattacttcaactgtttaaa

SEQ ID NO: 233342 - DNA, 454 bp, Homo sapiens
caaaaagaaaaaggagttaataatgcctagctattttgaggattacagcttatatatctatatatatacagtgtctatcacatttactatttagtaaacttccattataacatggtagattattatatattttcaaaatagtccaccacattgaacccagtactaaaactgttcatggaaattactattcattaaatatactgggagtttagctaatgtcagataacctcgccagattatacaataaggggatcaaactaaaggaacctccaaaacctatctagctctaaaataaataacacaatgaaattaggcacacttagcaagtctgaaaacagtcaaaaagaagggtatagacaaaaatgttcccaaaaagaattattccacaattagctactgctcattttcaggaggaagtctgcaccaaggaaacgctgatacaaataggggctcc

SEQ ID NO: 233343 - DNA, 606 bp, Homo sapiens
gtttactgttagtatgtctcagacatggaggtcaggtgattgaatacaagaaccaaatagagtttttattcttgcccttagatgatagccagtgttgagactttgttaaacctcttgtttcacttagttgaaagtactttatacaaaaaaagcaagaggagccaaatctgttgagaaagtagaaaatatgacttggcttctaatggttcccctcagcccaaacagtcacaggcatctctcatttttgtttctacaaatgtttatataggtagcaactatcagtatcctcttgctcatagtaagttatttgatggtgcagactctatcaccgtatcttcaaaagtggctgactagggaatgcacacagtatgaatcgtattctctgataatgtctgtggatatatttgactgatttgcctcttagatgatgaagtctgatgtctccatggaaattccatttgagagagatttaaaaattaaacatcatgaatattaagcagtgctgcctggaagttcagctccaagtgacttaatcactttgtctgcagttttccttaaagaagccattgtttgaactaggaaggcatttgtttttctaaatagaaa

SEQ ID NO: 233344 - DNA, 608 bp, Homo sapiens
cagaaagtcgggtgtggggagagggtagtgatgaggattgttgagaaactaaagtgcatcccttggggaccagctgaggaagggagagagggaaaatgggtagggaaaagaaggaaaagaagttggacaaagagaaacaagtacatgatgctgtgaaaaacagcagagactgtcaacactcaggctgctacgttgaaccagcttcttgtattgtcttgggcttccggcatcctgttttatctggacaggtggaaaattcatttcttatgctgtctgttaaacactggatgagttgctgtgctgtgtgaaaatgtttgtgtctaaaaataatgggcttacacacagaagtcttcaaaatctaaaatggtattagacttaataatgagtgtatttcaggtgaaaatatgtctcctctcctttagtagctacctggggaaaatgaccctatgatagttaggctggcccttcagaattttgaccttgattggcttcctgtttctcactatttcttggaaaactgaggcgggagtgtgcctgtaaaataatgtcaaattaaaggcagtcttcaaaataggtaaggttcattatttattttgaattagtgctat

SEQ ID NO: 233345 - DNA, 424 bp, Homo sapiens
ggtcaggatgctgaaactgtcttcttagtggcttcttcactgcataccacagggccaggcacattgtgaatgtttggcaaatatttgtggaaggaatgaattgtgggctgaccgtgtgctctcagcctctatcagcatttcattctgtcacagccattttcccctgcaagattggtggaggggaaagggtaggcctcctgggagaggttctggatctttctgccatctgctttgttccatgggtcagccctgaaattagggcatttggatgggtttgcagcctcaaagtggagaatggattctgcctgcgaggatgtgtaagcatcacttcatcgatggtttgctgttactcaacttccagattaccttttgagcacccttttaggaaagagaggaaagttaataaattacattttacccactg

SEQ ID NO: 233346 - DNA, 455 bp, Homo sapiens
aggtcatgagggggaggctttattgacaacggagaaggcagagttctaggcaagttcacacaacactgctccaagggtccaggcacgggtcaaacccgtcaggaccaagggcctcttcacctcagggacctcagtccctcccaccatcctgaaccttcccacaccttttccagcaacccaaagatatccacccccaagccaccttctggacaaagtgagtggcagccactgttgtggagccaggaccagagttgggtctgaggcctaatcatgtgtggtgggcacagtaccccctctcctcagcctctggggacaggcaggaggtaggcaggggcagcagccccagcccacagagccctcactgcacgaggccgatgtggcaaaaggcaggagccctggcatctcctcctccctgtgcctgagcggggctctacaaagccgagcctcctcaggtc

SEQ ID NO: 233347 - DNA, 530 bp, Homo sapiens
cagaaaatacctgcttggcctcctctggttctccaagagaaggtatgtctgcaacgcatttaagttgcctagttatgtcaacaagacacagaattcactggcttctgaaaatgtacacatgttaggaaggtgatgacatttttctacagctctctcaacttcgtatgtagcagagctacagcaaagagtgtgtatttcttggtatatgtgcttattaagctatcacataccaattagagaaggtagctgtagattaacaaaggaacactctctgagaatttaaactgttgcatggtcactttacaaagtctaaatatttttccagatgatttaatgaagcaaacctggacttttttcttcaaggtcgtatcttcaaggaaatttttaaaatagctatttggaaagcaatggtatctcttcataggtaatagggtgagcaaggaaaaaaactgttttctttgctggtcacctctcataagatgttcaaacacatggcttatgactgttaagctaaacttcaatgcggccgt

SEQ ID NO: 233348 - DNA, 245 bp, Homo sapiens
gaccatgaacactatcatattggcatataactttctgtatgaagatccctctgccatggaatgcttcctctcaccccttttcactagttggcaaagttcttggccaagtaaaatgagaggaggagggggtagaatgaatttcatttaaagctcaacctagttcagaaatgttaaacaaaaccagagcaattgaatattcttctgatatcttgcagtatttttgttgaattcattttcttccacta

SEQ ID NO: 233349 - DNA, 932 bp, Homo sapiens
tattttttatttccactttcatctttttcatattgattctctttgactttcttttttgaactcaacagattccctgggtattaacccagcacaactcctttatgggtcattgcacattctggtatctcattaagaattgtcataaaaaagagatcccaggaggccttccagtgaaactctatcatcatgcaatcttgggatttctaagttggaagtcacagtccctttgcaaacataataaaacactttaaaatatttgctaaagttacaaaccaattatgtaaaaatttaaaaatcacctactacttttaaaagcagagaaggcatccatagactatttccttgcttacaagctcagtgaacatactgaattcacttataaaaagaattttctcaattttagttgcttttcaaaaaattcttattccttttatttgtaattctttgacattgttgctgcttcacagttttggtaattggacagtttggtctttattatgatattaacatttttacctgtcctgaaacaaggaaatacaatcaaagaaacagaagattggtggaccttgaaccacattatgatatcagatgacccagagtcatggttactaagttgcttaaatttttagtaacaaagatgtattagaaagtgacaggtcaattcaataatggtttttttggatacatttaattatataatccccttaagttgtgcttagtcagcagtatttaatctgttgtctattatatatctaactggtctgttatgtttattatatatttatatattgcttattcatatcttattggagtaactcatttttaaaacaatatatttcatctcctaggagaagaggatcgagtatgtgtttttattctttttcattaggacattggggtattttcttattgtgaaatgtattgaatatttc

SEQ ID NO: 233350 - DNA, 509 bp, Homo sapiens
tttgccaccaggagggggaaaaaggctggggtactagaagtaatagatttagtactacttgagagatttggaacatgctgtggacccagggttgttggtcatctctgcaacaggatggggatggcagatgtttgagcaaaatctatattaacatgctagcaaggactagttctagtttagctgtgtttcactcattttacacagaattagaattggccaggtgtggtggctcacgctgtaatcctagcactttgggaggctgaggtgggtggattgtctgagctcaggagtttgagaccagcctggggaacagggtgaaaccccatcactactaaaatacaaaaaaattagctgggcattgtggtacatggagtagctcccagctactctggaggctgaggcggagaatcgcttgaactaggaggtggagattgaagtgagccgagatcatgccactgtactcctgcctgggtgacagagcaagactctctctagctcaaaaaaaaaaa

SEQ ID NO: 233351 - DNA, 691 bp, Homo sapiens
ctaaataataaaatctacctcactttctttccacttgtcacttgtgtttggagcaacacaatggaaggagcaagctgtaacttgtgaacaggagacacattaatgaaataaagctccagagagagaactcaagctggcctgttgccgtgacgctgggctaatgacattgagctggaagagtgattcccctggagtccttatcaagtgacaccatcttaattacccagtgaaaagacagcccgtttccagcaaacaattacttcctgatcgatacccttgtcttgttaagtatgcttcctgaccatttatagccaaacatttgatgtacttttcctgagaagaaaaatcaccttcttagctatctctactcagcagaagcccctgcccacatcacacacaaaaccatctacatttagatattctgaatggttggaaactcctatttattatccttcggtgacttttatctttagatgaagaactgagaagagcacacaagttcctctcagcaacatgatttatgcttgaggctaaggcctcaacttggggaagggaagaaggttgtttcaagcctgtggcctcctgtcactccccacccctggaaggcccttcacttttgggtgtggcctagaggcctcatggacagcagtcccttctgacacccagtgagatatcatctgggagggctgcg

SEQ ID NO: 233352 - DNA, 654 bp, Homo sapiens
agagatggcattcttgctatgttgcccaggctggtctcaaactcttggcctcaagaaatcctcccaccttagcctccaaagggcttggattacaggcatgagcttcagtgcccagccttaattttatattttatgttgttctacttttacgagattttctacaatggtcatatattattgccataatcaaaataaaacaataacttctaaaagtaagaaaaaaacttaaaagaagaaagagtactgtctttgaagccaataacatttagcttcagattctggctgtgtaggttttgtcaagtcattcggcagttgttcttctgtaactcagtttcatcttctgtaaaatgttaatagtcattattacacagcttagatttgttttgaggagcataataaatataaaacactcacacaaactgtaatgaactacagagatgttgtttctgattttattatgtcttggaactgttttctactattatctctcggaactgttttcttattttcatacgttggtacctaatgtgagtagtgctgcttaaatgaccacaaggatcaccatatacatttatttaccttttaagtaaacattagtgctgggctggttctcttagtcagaatgtactgtgactaagggtacatcctttagat

SEQ ID NO: 233353 - DNA, 528 bp, Homo sapiens
cacgtaggtagctggcttatcattcagaagttttatagcatcttttatttatggagttttcagtacatggtatacatctgattcctgctagaatcagtgttcattcaacaaatacttttaagcaccgactatagactaggcacagaattccaaaaataagcaaacttctggttatcatcttgccaataagcctgcctcataataacaatcaaattacaaatacacataaagcacaagtcaacttccatttccagatacttgataaacaagatctctgaaccctccagctacgaaatcgcaaaaaatgctggataaaatattaaatatgtattttaatgtatcacagaaccagcaggaaaataataaaaattccacagaagccaaaagcaaagcaagacttgtggtgtaggccaggtgtggtagttcatacctataatcccagcagtttgggaggctgtggcaggaggattgcttgaagctaggagttcaagaccagcctaggcaacaaagtgagatcacatctctacc

SEQ ID NO: 233354 - DNA, 412 bp, Homo sapiens
ctgcctcttgttgcctgtgcgtcatcgtcattgggcaagtgagtctcacattttaaaatttcatacatgtggattttggaacttctgtttacactaaaagagataatattttaaacaactggcacattgtaactcctcagagatcgaatggttttgaggaatggaaattgggctgcatttaaattgaagcactgccatttactagctttgtaatctaatttttcagacttagtgtctcttttgtaaaaggggcataattgtttcagaggagttgtgaggataaaattttaaaatacaagtacataaatgcatatgaagaatttatcctagcacctggaccatagatgccacttcagtggtaatgactgctgtttttgttgctgaagtgtaatttgattttcctgtttttcac

SEQ ID NO: 233355 - DNA, 776 bp, Homo sapiens
gctcattttctcttgctgctaccatggaagaagcgactttcgcctcccgccgtgattctgaggcctttccagccatgtcaaactcaaaatgtgactgaaaaacagaagcatttggaatacgtaacagaagtcattaaaaagagccatgtaatatgtgcctgcttccccttctgccatgattgtaagtttcctgatgccttctcagccatgcagaactagtctcactctattgctcaggctggagtcagtggcgcaatctcagctcactccaacctccgcctcatgggttcaaatgattctcctgcctcagcctcccaagtagatgggattacaggcacatgcccccatgcccagctaatttttgtgtttttagtagagactagggtttcaccatgttagccaggctgttctcagactcctgacctcaggtgatccacctgcctcggccttccaaagtgctgggattacaggcatgagccactgcaccaagccttattctattgattattataagaagtgttaacatcttgaactatgattatatattcatcaatttaagcatatacatttgattttgttaagtcctcctgaagaagtctgtttataatattaaatatcctagttgatcactgttttaaaatttacttttttatatatttttttcacttaatgtaactctgatcaatgctacttcagtatgctggaagtggaattacaatgtggatattttaaatgaggaaaaaactggcttttaattttcaagtgagtcttatgta

SEQ ID NO: 233356 - DNA, 859 bp, Homo sapiens
gctcattttctcttgctgctaccatggaagaagcgactttcgcctcccgccgtgattctgaggcctttccagccatgtcaaactgcatccactgaaggtcttggaatgtatacctgatggataaggaggaactactattgcatgtgattcaacaattctacttctgacaaaatgtgactgaaaaacagaagcatttggaatacgtaacagaagtcattaaaaagagccatgtaatatgtgcctgcttccccttctgccatgattgtaagtttcctgatgccttctcagccatgcagaactagtctcactctattgctcaggctggagtcagtggcgcaatctcagctcactccaacctccgcctcatgggttcaaatgattctcctgcctcagcctcccaagtagatgggattacaggcacatgcccccatgcccagctaatttttgtgtttttagtagagactagggtttcaccatgttagccaggctgttctcagactcctgacctcaggtgatccacctgcctcggccttccaaagtgctgggattacaggcatgagccactgcaccaagccttattctattgattattataagaagtgttaacatcttgaactatgattatatattcatcaatttaagcatatacatttgattttgttaagtcctcctgaagaagtctgtttataatattaaatatcctagttgatcactgttttaaaatttacttttttatatatttttttcacttaatgtaactctgatcaatgctacttcagtatgctggaagtggaattacaatgtggatattttaaatgaggaaaaaactggcttttaattttcaagtgagtcttatgta

SEQ ID NO: 233357 - DNA, 205 bp, Homo sapiens
caaaatgtgactgaaaaacagaagcatttggaatacgtaacagaagtcattaaaaagaggtatgatgaatatgatgaacttagaatgatactgatcttcacaatgaagcataaagttaaaagcagataagtattgaaccttaaaaactccttatattatatagatttaatccaaatgtgagtattttgtggacttaaaggaggca

SEQ ID NO: 233358 - DNA, 832 bp, Homo sapiens
gctcattttctcttgctgctaccatggaagaagcgactttcgcctcccgccgtgattctgaggcctttccagccatgtcaaactcaaaatgtgactgaaaaacagaagcatttggaatacgtaacagaagtcattaaaaagagccatgtaatatgtgcctgcttccccttctgccatgattgtaagtttcctgatgccttctcagccatgcagaactcatgttttaaacatctgcaagaagacacactgtataactgtataaacagagtttgcagtctcactctattgctcaggctggagtcagtggcgcaatctcagctcactccaacctccgcctcatgggttcaaatgattctcctgcctcagcctcccaagtagatgggattacaggcacatgcccccatgcccagctaatttttgtgtttttagtagagactagggtttcaccatgttagccaggctgttctcagactcctgacctcaggtgatccacctgcctcggccttccaaagtgctgggattacaggcatgagccactgcaccaagccttattctattgattattataagaagtgttaacatcttgaactatgattatatattcatcaatttaagcatatacatttgattttgttaagtcctcctgaagaagtctgtttataatattaaatatcctagttgatcactgttttaaaatttacttttttatatatttttttcacttaatgtaactctgatcaatgctacttcagtatgctggaagtggaattacaatgtggatattttaaatgaggaaaaaactggcttttaattttcaagtgagtcttatgta

SEQ ID NO: 233359 - DNA, 429 bp, Homo sapiens
gtcctcagcctactcaacgtgaagacaatgagaagccctttgtgatgatccacgtccacctaatgaataaccaagtcatctgactccaacctaactctgggaaactgagaaatggcttctgtgtgctcaggaagaagaaacagatgggattggtgagcatctagccaatttccaccacaaatgctcattttggctgcctccaggccaaaggtaaaaactaaaaagccagagaatactaaatgttggccaagatgaggaaaacagaaactctcatcctctgctagttggaatgaaaattgatgcaacgtccctggaaaacagtttggtattacctagcaaagtagaacctgtgcctcccctacaacccagcaattccactcctggtatacaatcaaaataaacttttgtacttgtatcccaaataatata

SEQ ID NO: 233360 - DNA, 811 bp, Homo sapiens
tgtccataatctgtgaatcctgctgaaatcagctagactttgctccaggatgagggattggtccaattctgttccatctttccacgcatctttcatcaggttattaggaaagagtacacttcactggctgctctactgggaggctttatctccattaagtgaaccacagagaaaaaagaagagaagagttttacttctgtcatctggtgatacattgctttggtgaatacaagaaaccacaggataagcaacagggctctttggtaaattccacaggctctcctgatagggcagccaagtcttttcccagtagccagccctttgcactaaaacatgtggattttatttctatggatgttgtgagtgtggacctaaacttctctaagagaacttgtatttctcaagcctaaagatgtattacatttttttgtatttgtatttgatccacataaagaaggggaaaaaaatttgtgtgtgtggatagcattccaagaaggaactctagccccaggaaagctgctatttctgctcttctccagctacctgccaacaatttgtcctcaaaagaggctctttctgactatttacagatctgtcacttacagattggcaattttcatgcatttcattctgctttgctttacttcatactggcatcatctttatcagaaggatatataaatatagatatatggatatcgtttgtcttccctttctccacattaacatattccatgagtgcaggaagtgaaatggcatctttatttcattactctctggtccataatacattccctggcacaaagggaac

SEQ ID NO: 233361 - DNA, 401 bp, Homo sapiens
agaagtgctctgaagctctagcgctttgccacatgtttttcttcacaaaacaagatgttgtactcttgcttacattttttcctgtcattatccagggagttcaggaataaaaatgtcttatcttggttatttgtactcatcttcaagctcatcatttattgtgatcccatgtttctcggtggctggttggtgttccattttcagttgaagagatgcctgctgtggtatctcttctttttccttgtcatattaatattggatgatgatgataatgataagcattggaagaaaggaacaaatttgtctttcaagaagagcagagggacatacatgctcaaatatgcacacaagagaacatgagaataaaaaagaaagataaaatgtatccagaaatggtctta

SEQ ID NO: 233362 - DNA, 607 bp, Homo sapiens
atgattgtaaatatcttctcccacactgtggcttctcttttctttctcttaacagtgtcatttaaagaagcttttgttactgatgagacacaactacattttttcttttagcaaccttgcttttgaatcatatccaagaaaactttggctaatacaacatcgcaaagactttttcctaaaagttttagtttttacattcaggtctataatccattttggattaatactgtatacagtgccatgtatgcatcaaaattcagttttttgcaaacagatatccaaatactcaaggcgcatttgtttaaaagactatccttttgccatgaattcctcttttacctttttctaaagctgaatgactatatatgtgtagatctatttctggattctctaatctggtcaactgatgtatttgtctttatatcaatatcaactatatttattattacagctttaaaataaggattgaaatcaaatagtgttaacttctatgattttattttaaaattcaaagttgtttcagccattctgtcatttgaatttccacatgaatttttggatcagcttatccttttctattaaaaagcttactggacaacttaatatc

SEQ ID NO: 233363 - DNA, 327 bp, Homo sapiens
gatgtgcaatccagactcttcaacaggctaatttttcccctgcgcttgccatggttcccacctgtgggtgcgtcttaccacatcctcggacctaaccactctgtaattccatttttaaaaatagtgtctttgcccattctgaaatgacgaacgggaagcccagcagctcactcaccttctggaaaggattttgttttgcccctgaaatgaatatctaaaccagcaccaaaaagggaggaaaaaacaagttattggagagaccagttatcactctgtaagttccctttctccagtccctctcaatccctataccagcctccaatcaaa

SEQ ID NO: 233364 - DNA, 452 bp, Homo sapiens
tcagctgtaatggataaggacaccttagcatctccaatcgataggaaagaaagggcatagcacccaggaaattattctccatcgtgactcaccaatgaggcaggggataggggagaggcaggggattcggggagctgcagggcaaaggcaggtgagtctccataaaaaggttactgagaagcatgggactgtccctgggtgtttctttcagattattgtcagagtagttcagatagcttagtaataacttttggcttcccagaaatggataactgacataacttaaagatatgatcctaggcacagtggctcacacctgtaatctcaactgttttggaggctgagatgagaggattgcttgagcccaggagttcaaggctacagttagctatgatggggccactgcactccagcctgggtgatagaacaagactctgtttctaaaaaaaaaa

SEQ ID NO: 233365 - DNA, 430 bp, Homo sapiens
atgggaatccctttaagatcagtgtccatgagccttacctcgcaactcttccaagatcataaccaaagcctgttacagcggcggaggataacagtcagacaggaccaagctgaaggtactctttatcaccctgacttcaagtaactgtgaagcacacctctcacctgaacctcgccaacgagacacactgtggatgagaaggcagtgccgcatgacagggaacgcaggggctttgggtgacgtggggccgggtgacatgggatgaggtgacgtgggctgaggccacctgcctctcagctgctgggtgcctccctcaccaggtggctgccttgcttgggctcagaccagactcacggttctcaagcccccatacagcttctgtttataggggttcttctatctgcgttttctgctattaaaactgagaaaa

SEQ ID NO: 233366 - DNA, 629 bp, Homo sapiens
catgtgcattccacacagcagcttcctctgtcctgcttactcagtcatccttccccatcgaaccacttctccagaaatttgttgggatttctcttgtccacaggtgccccctcccaattcaaattctcctttggaagcattgatatgtttattatttattacaaagacatttctggaagaggtaaagataagcccatgtgcatttagtcaaccctcttggattggaagtcccactgaccttgtaatgaaggctggtgggcatgggtgtgtgcttttacatagacagacctgagcagactgtgcagtccttctaatcaatgacacatttacaagaaactcaaaaatatgcacagagatggaaggaaagcttttttttgttacataacacatttcagtgtctgttgattataatatattttaaatacgaaactaaaattatacgtgtccctaaagcacctcctcagaaccctaaaaattttgtagaatatactgggaaaaccactggcatgattaaaaaaaaaagagcatggagtttggagtcaaacaaacctgattcaaatcctggttcaaccatctgttctctccaaatgttagttcccacatcagtacctaccttctcagattgctgt

SEQ ID NO: 233367 - DNA, 452 bp, Homo sapiens
ataagtatcttgcgaaggctgtaatagcagagtggcattgagttactgtggctcttttatgctttgactagtaaggaagagaaagagagaaatgggttggcaaaaattaaccaaagactttttcagtaattattttaaaaagaaaaatgttatatttagaatggtattttctttaatggtctccaatccaagattttttgttaaatggtgagttttttttgcatgttggaaaccaaacagctattgctgttgtagtttagatatttttagggtgcctgagtgaactagaagagcagttagtcatgtccatttcctgggcacccagacatgtgaatctacctgtaaagggtcagtttgcagaggcttactaccattccctcagtgtggccatttaatggactaatgtgtcccatatgggctcactgtaattttattttttactctaacactta

SEQ ID NO: 233368 - DNA, 269 bp, Homo sapiens
cagtccagatccctgcattcgatccaagggaggcagactgctgggggaaattgagagtcctcgaggtgcccctggcagtgagcgggccagaaagagaagcaggaaggcgccagcatcacgaggaactgcttccctcaaaactgctgtcaggccaggcacggtggctcaggcctgtaatcccagcactttgggaggctgaggcaggcagatcacttgaggtcaggagtttgagaccagcctggccaacatggtgaaaccccgtctctact

SEQ ID NO: 233369 - DNA, 249 bp, Homo sapiens
tattactgcagattagttttgcctattccggaaagtcatataaatgcagtctttgatgtctggcttctttcagcgtagtatctggggtttatctatgttgttggtcatgtcagccattcttcttttctattgttgagtagtgttcaattgtatggaaatgccaaattttgtttacccattcatctattggtggaaatttgtgttgtttccagttttaggctattaggaataaagttaagagcatctgta

SEQ ID NO: 233370 - DNA, 398 bp, Homo sapiens
aagatagatggtaaatagatagatagatgatagataaagaaaatacatagctgttccagaaaacagaaatggataacttcatgaaccaaaagcagagtaatatactttagaaaggaagcgggccagaaaacccacagttgcaaaacaaatagaatttccaactgcctcttgtagccccttcctggaagtagtcacagcccagggtgtttgacttcttcctctgttttttgtttgtttgttgtttgcttttctgtggggtttttgttgttgttgtttgcttttaaaaaaaaattccctttccctgcttttttgtcacagcagcctttgtcacttcaaacaccgcaagtgttctttaaaaaaaattatatcaacctttcaattaaaatgcaacatgtctg

SEQ ID NO: 233371 - DNA, 363 bp, Homo sapiens
tcaagaagattttatacatgtccatttagcacaacttcaaaaatatagataatatgcatctctagcaaggttgtcaaaccaatatacccatacattgctagaaccaaaatatactgtgatatattattaaatattattgccaagaagtagaaaatgtgcatgctattttgcccaataattctacttgcatggcaaaaaaaaggaaccaggtatattcttcaagacgtttatgcaatattatattacataaaaatgttatgaagaatgtaattccacaatatggtattaattaaattattgagcacatctaattacttgaatattatgcagatcttcaatataataaattgaaacaatatgtca

SEQ ID NO: 233372 - DNA, 369 bp, Homo sapiens
cttttgtattacttattttttgtgcttgctgctataacagaatatctgaggctggttaatttataatgaacagacatttattggctgacatttcaggatgctatgaagtccaagaacgaggcgctggcatctagagagggccttcttgctgtgtcatcccatggaggaaggcatcacatggcagaagggcaaagagagaagaagggagagagccaaaggggccaaacttgtcattttataaggaatgcactcctaagataacagcattaatccattcataaaggcagagccctcatggcctaaccatctctctgagaggggacaaacattcccacagcaacagcctctcatgtggttttaccctcaagc

SEQ ID NO: 233373 - DNA, 503 bp, Homo sapiens
gcggccgccgcgggcccagctgtatggttaggccaccatcgttcgtcttgggaggactccagtgcttgttgccctagcattaattgaaagtggaatgaaaaacgaagatgcagtacggtttattagagataaacggcacggcgcttttaacagcaagcaacttttgtatttggagaaatatcattctcaaatgcggcttcgctttgtgtccggaattggtgggttcttggtctcactgacttcaagaatgaagctgcggaccctcgcgcttctcttattcctgactctggctgccatcgttggctgatgaaagagttccttttatttggtgagttcatccatcaagattgtcttcgaagctttgtctttgaagttttcacctattcccaaccactccccctggaagcttgtttcctgcactgttaagagcatggaccctgaaggcggactacctggattcaaaccctacctccacctcttattgggagaatgaccttgtgtaa

SEQ ID NO: 233374 - DNA, 248 bp, Homo sapiens
gacctctgtttcctttctctgctctgtgccatatgacttctctgctttcttattttttttccttagattagcttgaggccttgattcagcttgccaaattagatcataggatctagtaaacaatgatcttctacttcctgtgagaaaagggtggtttggagacctaaagagtatggtcacgtatgatacagaggatgttctgtgatcactgatattcaaaacagcttccccagcactctgtcccttta

SEQ ID NO: 233375 - DNA, 462 bp, Homo sapiens
ggctgagctgatgaagacactgagggacttaaggcagcccaagataattgtgttcagcactgtcccctgccctcgctgtggcatcagggcctcctatgacctggagcccagtcactgtctgttgaatgcctgctgtcagggtggatttatttaaagctttcttctggtcatttggcaactgaatcctaggccatgagtgtatgtcaaagggagcacagacccatcgtttcatatgcctgctcaatgtgaaccggaaaggaaaggggatgcaggaagggagggactgggggaaaagttgagttggagtcaataggagctttagagacctgtgtcccagagaatcagaaatgggaatctgaattgctagaatgagaatcaggtaggagagacacatgagacagttacccctgcacggatggttgtaaagaaacagtcagaaataaagggaagctgagtggaaaa

SEQ ID NO: 233376 - DNA, 222 bp, Homo sapiens
tagaaaaagcagatagttgtcaccaagagttgtccggaaacagtggcaagggaattattcctcaaggaaagtgcaattctctgagctgtaacagtggacaatggtcgaatagtcaccaaccacgatctgggctcacacatagcaaagaggtatattaactaggatgccctacacaggcggtctgtggatgagaaatccctatgcccctcacttcaccagggc

SEQ ID NO: 233377 - DNA, 428 bp, Homo sapiens
acactgccctgtggaccccctcatctggctgttcatttgtattctttctaagctggtaaatggccccttggacggcgcggcaagcttggtagaagaggcgaccctggtcctccagggcaatcaggacgagatggctacccgggacccctgggtttggatggcaagcctggactttcaggcccgaaaggggaaaagggagaccaaggacaagatggagctgctgggcctccggggccccctggacctcctggggcccggggccctcctggcgacactgggaaagatggccccaggggagcacaaggcccagcgggccccaaaggagagcccggacaagacggcgagatgggcccaaagggacccccagggcccaagggtgagcctggagtacctggttgtcaataaaatatttcctggcaacctggaaa

SEQ ID NO: 233378 - DNA, 143 bp, Homo sapiens
gctgtgagttccgtgaagggagaggtggtgtttgtcattcaccaagatctgtctagagctgtgccctccttacactggggaagtgggctgccagcctggggccccacagctggttttgcaaccagcacagtgctcagaacaga

SEQ ID NO: 233379 - DNA, 502 bp, Homo sapiens
ccttaagggaatgtgattatgtgattatggcactcaagtcacataagcaggctgctgtaacctttgtttctctgattttagattaactttctttacctctgttgttttgaaaatgttgtaaatgtctacaggaggccaaggaagatgccttccctcttcactgttgaacttcattatagattaacttccttttacctttctcacgcaaagatttcatgcctatcgcattgctttaagaagaaatgttaactatactattttaaattggaaaggaaatgaaaatgagacacatggaaaagaaaacaagtgataactaattaaattgtaacttataaaccagccttgtgtagaaaatgttataaccctatgaaactttgtttcctgtctatataagcaaggacttaacttttaactttggagcactgatcccatttttctggagtgtgtgcttcccaaatggctattcccagcttttcacttgaataaaatgtttaaaactgga

SEQ ID NO: 233380 - DNA, 333 bp, Homo sapiens
agtccgaggctggcgggccacccgggggccactgctccaggcctggtttgggatcacagatcaccctgctgacacgctccctgtcagcatctgcacggaggagtttgctggctgtggcctgcagcccacacatcccaaccacagacacgctctttccccaccttttggtccctctaacaactcaatgcccagaactttctattgcccaggactctcagggtcccttcggaggccggacagaccctcccctccccaggccttcgtgcagcccctgctgcatgccaggcccaccttggtgaggctgtgtcgggctgagctcctggtcattctgca

SEQ ID NO: 233381 - DNA, 217 bp, Homo sapiens
cagtcaaaaatattactaacattgataatccaacaaatgtcactataaaattgttatacctgaaaatccaaggttcaaacactttctcaaagttttctactaaacctgaacgacgaagataactacaatgaaatctatgcagtttaaaaatacagggaaaaaactgaaagaactcaagcactctttagaaaatgattataatatggatctagaaccc

SEQ ID NO: 233382 - DNA, 458 bp, Homo sapiens
caaagcaaaaggggtggaaggaaagttctgggagtggtggctaagttcatggcattgataagtgatggtttgatggtttcacaggtgtatatttaactccaaacacatcaagttgtatacgttaaatgttggtgactttttgtatgtcaatcatatttcaataaagtgggttttttttaaagagggaatcatgcatgacatatactttaaaagcttgagaaataccggttcaatgctcattgctagttgacaacccagtagggtgactatcgttaacaatacattgtatatgtcaaaatagctagaagaaaatatttgaaatgttgccgacacaaagacatgataaatgttcaagctgatggagatcctaaacaccccgacctgattatttacattctatgcatgtatcaaaatatcatgcgtatgtcaaaatacatacaagtattatgtatcaataa

SEQ ID NO: 233383 - DNA, 546 bp, Homo sapiens
agagacaggatgttagggtggtgcaaaagtaattgcggtttttgcaattacttttaatgccaaaaccgcagttacttttgcaccaacctaatacatcaagtattatcaatcatttacacctgagtataaatgaacacttttacccctttctcatagcaaaagaaagcagagggctagaggagaaaatttaaaaaaaaaattagaaaatctcttctgttttcgtgttttacctgggattgttgtgaatgttagtcccttgcttcaccgtattgtcatgtctttttatgttgactttaaacttggaagtactaggtaagggagaaatgaaatgtgttttgatatcctatagctttttcagaaaatactttcccaaaaccaagtagacacaaagctgcctggttatgaagtattctcatttaaatcaagcatgtgaaatggggaaataaatcttggacttttttctttattttatattctgctagtgaaacactgaactctgaaaaatgggcatgtcacgattgcttttaataaatctacttacctgtc

SEQ ID NO: 233384 - DNA, 167 bp, Homo sapiens
catggggccagcagtgttttcacaagtagtccagagggcagaagacagtcgcagtggtgccaagtgtggacagtttggccagatcccaaaaccagatcccagagccagatagccggcccctgcagcggcaccattgtttccagagaggccttcattatttctttaag

SEQ ID NO: 233385 - DNA, 400 bp, Homo sapiens
ctctactaaaaatttaaaaaaaaaaaaaacccacaaaaaattatccaggtgtggtagcctgtagtctcagctactcaggaggatgagctgggaggatcacttgaacccagaaggttgaagctgcagtgagctgagattgcaccattgcattccagcctggtgacagggtgagaccctatctcaaaaaataaagtaaaataaaaagatcagagaaagtatacattaaaattcaaggtgaaaaaacattcactttgcctgttttgtttgttccaacgaatagactcatctcataatattctgtatatttgtaacccattgtaaagatgttgcctattactcttagtgaggtggacactctaattagaatttttattaaattttattgtggtaacatacacat

SEQ ID NO: 233386 - DNA, 159 bp, Homo sapiens
cctctcggcaacttaggcaacttaacccactcatgcttcctcagactgctgcttcgcctgtgagcaagcctataagagagatcgagtcagggctcagtccatagtcccatctggatcaaccagatttgtttcccaggccctcccaccccaccacctcca

SEQ ID NO: 233387 - DNA, 409 bp, Homo sapiens
ataattaatcatctcagttccttttaatcctttctttacttgtaattctctgcatccttgagcccttttaaataattttttccaggcagttttagagaagaattgacaagtttacttatttttaatgaagctaaaaaattacagtgggaagatactgagtggtgttttgttttactctgctactgcaatagaatggagtttcaggacaactgtgatattccatgttttttcccaaacactgaatggcatcttctctcacattcttacatcaccaacacaaatttacatgttccatctctcttttcctagatgagactatttattttgtggaggggaggggtgttgcaaacagtcctctacactaccatcacaaatattagcatagtgtccaccataaaattatcttcca

SEQ ID NO: 233388 - DNA, 433 bp, Homo sapiens
tgacctaaattatgtctaaaccctagccacagaggaatctgggaaatgttaacttttactcttcgttgtcacaggaaggaacgctaattcatcttatatcctccactttgttttaatgtggagaactgcgaagttatgttagcagaagaaaataaccacaatttcttcattgtgggcaagttaatattgagttaggcacatagtgtatctaaggctaaaaatcattatgaactcagtagtcaaggaagtgccctaagaaaaagttgtaaagatattttaaaagaagctgagaacatgaagccattaagaaatggtgtgtttacagccgagctagtgtgtttaactttgtgcattgttgtaacaccatttgttttgatacaggatatcgtttttttttttaaggtgctttttcccatatgcctaaaatttgttt

SEQ ID NO: 233389 - DNA, 457 bp, Homo sapiens
agctgtaacactgcatggcccaagattccgttccttagaatccgtgaggccaagaaccccaggtcagagaacacgaggcttgccatcatcttggaagtggcccacgaccatcttgggagttctgggagcaaggacccccggtaacactctctaccagaaagaacaaaggtagatcgccagagacaactttagacccttttcagcttggagactgcaccagaggaatctacagacaaactttagtagcttttgactacctttaaccaacttatttgcttttccacaatttgctgaccccagagactcaaggccctttttcctttgacttgtcacaactctaaaaatgtattattctttgtagaagatgctctatcagctgaggttcagagccacctctttgagaattactcattccttggatacctcccatgtgtctatggaatatacacattaataa

SEQ ID NO: 233390 - DNA, 340 bp, Homo sapiens
cggctgcctgtcccacgccaaaaagcgccttgcccaggccttgatagatgcgtgctggtggaggaaggttggactggtcaggaaccaagacccgggccccaacaccttctgctcccctaggtttccctccttctttttcctggggccgcgaagagacctaacgcaaggggccctgggggtggggtgcagtcatgtgagtcgggccccggcggccctgcgctaggcctcccctcctgtcacacacttcctgaatcgggcgtcgcaaacggctgccacggccctcagctgcaagactggccgggtcgggggccgcagaccgggcctggccaggccgcggccg

SEQ ID NO: 233391 - DNA, 224 bp, Homo sapiens
catgcatttatttgcttatcatcttcgaccagatgtgagctcctgaggacagggaccagggctgcttgtcaccaccatgcccccagcatcacccagcacaggtttggcacagactaggagcccacaaatatttgctgttggaaaaatacatggccccagagctaacgttcaggctctgctctcacacaaacctgggtccaatccttcactgattcttttttttt

SEQ ID NO: 233392 - DNA, 449 bp, Homo sapiens
gaatagaaatccagagaaacttcatgattcactaactgaattgagcatttcttttgaaacttggcatacagaaacactaaataaaatggatacagtcatactgtttaccatgctgggttaaaaggaaaacaagataatgaaatctggattccagcgcatcaatttgtttcaaccaacctagagaaaaatcactgtgatcaactccccctgtgagaatgtccacaactctagtttcctcggggttcccctcagtcactccagactgaactggtgccaccgacgctcactatccagccctccaacacactaaacaggaggatgctaaggacatttacatgaatagtaaacagacataaggataatctattaatgaagagcagacctaaaatcactcaaggataaatacatttaaaaaaaaatcagcaaatgactcctcaacacataagaca

SEQ ID NO: 233393 - DNA, 484 bp, Homo sapiens
gagaacagaggatatcaacaaaaagaagggaatggtttgcatctgaggagcctgtgttgtttttgacacgggttaccagaaatcctatcctttgttgaagcacagttctgcctcttccttaggacagggtgtgtgtggacaggctgggagacctgcctataatatggagattttttgggcaccaaagggaacccaactatcaaattccccactgagtcaccaccgaacccagtacaggaagcctcaggcaatactgacttggcaattaatgggctaatctggccaagtcacacctcaagacagggcatgagttaacctaattaggccacccatgatgcataaattcaggagtccatttttccagaagggagtgcaggtgagagattgggaaggggggtagggggcatcagatagttctcaagtgcatccctttacaagagttctaaaaattcgacacctttgaggcccgtgcattatcttcctc

SEQ ID NO: 233394 - DNA, 1759 bp, Homo sapiens
  misc_feature (1147)..(1147): n is a, c, g, or t
  misc_feature (1222)..(1222): n is a, c, g, or t
ttaccttgtcacccaggctggagtgcagcctcaaactcctcttgcttcagcctctgagtagctggaattacaggcttgtaccaccatgcccagctaattgtcagattttttttttttgtagagggggtcttgctgtgtttttcccggctggtctcaaactcccggccttaagcagttgtcccgcttcagcctcccaaagtgctaggattacaggtgtgagccatcatgccctgcctaatatactggctttaaggaagctttcaggtgcccacactctgtcagacttgacttaattcttctaggctttaccaacacccccaaccccatggttgggggtggggcattacaaccaggctgtggtcacctctgaggcacaggtgtcagccacaatgccaccttttccggtgagtcagcgagtttgtctggaatacccctccgtaggtgagagctggggtcctgggctgggaccacgatgggccgtagcttctcaggaagccgaagctggccctggccagagctgtcttgcagacttgagatacagatggcttctttccccctcccgttttctttttgaaaatgtttttaactcggagcatgtgtcggcacggcgttctttccacgaggacagaagctgtcactgcacgcagcagagacactggttctgatccaaagccgattgtggcctgcttctgggtctaattatttggcaggtcaggtgctggggtactgtccagggtgtaatcaagactcaagcatttgggcatgggggtgaggaggaaccatggggaggggaaggaaaaaggagggggtgtgtgacttagcctgtccagaccacagagcgagtcaatccccctggaacagtggcgtccgctgctctgcggggagggtctgcccatgacctggtgtgggagccgaggccgccaccaacttgggcgcccagcccagaccctaggagagggaggagcctggagcagcctttccctggcgagattggccacattccattttcctctctgaccagagagccctctcacccctgggtgtacaggctctttccgctaacagaggccctcctccagccccattgtccccactgtgagaccaggagtgcccctttcccagccccaaaaaatgagtgcgctcccantgtgaggcacagagtgaaagcctcgtgttttagaacggcgggtgggaaggacttgatgcgccgtgttcttgcagnaagggcagggacgataccgccttgtgctttgcctggcacatggtaggggcctaggtatttgggcgaatggagtgatgtccagagaaagcaggactttggctcgggcaaggagtgggtggcagtagggaggactgtggtctgtggaagggtcactgtggctcttggctttctcctactgtccctgccgatggtgacagccagccagcctcctggccgcaccattgtaccgcctctttcttggcttggtcctgggcgtggatgtcagatttgctttgttcatgtaaaatgtggtgggatcatgtctccctcaaatcaaattccaaccaaaatcaaaacaaaacaaatcaagcgtctcagtgaagacagccctgagggttctgttgtctcagcctgggagcctgggagcctggtcgacctcacctgcttttcagattttgccatgtttattgcagacgtccccgtcctggtgctggccactcatcttcattacaggttaattctcacaacctccaggtgtggtatgcagtggttttaagg

SEQ ID NO: 233395 - DNA, 321 bp, Homo sapiens
actttttagttttgcttattaagttggtaaaattttgaatgactttctttactcttggacatctaatgatcttttgtaaagaaggggaagagaaccctttctgttcagaaataacacacaacttgattagtaggagaatttttcatgtgattctggaaagaatttgcaacacctgtttccaaagaaagcaagaaatatattgcatatttttctccccaaaatgtattttgtccaaactgaattggacacagagaacattccttaagtttggaataaataaactttctgaaaactgctcaggtaacaaagtagtaaagagcc

SEQ ID NO: 233396 - DNA, 1655 bp, Homo sapiens
gaaaaatgatgctctccccacttctctcccttccgtaagtatttcctaagtgcctactatgtaccagataccattctaggtgcaggggacatgtctgtaaacaaaacaaagtcctttctcttaaggaggttactttctagtagagacagacaaataaattaataaagagaggctctatcagaggtgaaagttctctgcagaaaatcaaagcagggggccaggtgtggtggctcacgcctgtaattccaacactttgggaggccgaggtgggcggatcatgaggtcaggagttcaagaccagcctgaccaacatggtgaagccccgtctctgctaaaaatacaaaaattagccaggcatagtggcatgtacttgtaattccagccactagggaggctgaggcaggggactcacttgaacccagcaggtggaggttgcagtgagctgagatcgcgctactgcactccagcctgggaaacagagcaagactctgtctcaaaacaaaacaaacaaacaacaaacaaacaaacaaaaatcaaagcaaagcaaggtaaggagatatgaagatctccaggaaggagaagtggtcagaaacagaatgagtcaggaaaggtcagggtaataaggtgttgtctgagtaaaggcctttgtagtgaaaggggagcagatagatacctacgtaaggaatgcccctggcagagaaaagagcagggacaaaggccctgtgcaggaagaatatcaaggggccagagtggcagaagcccagggaggtgggctgaggtgcagaaggtacgggcggagtggaaggctgagcaccagatcacacttggggccctggggttgggtttattctgaatgaggtttgaagtcaaagcagagatactatctggaagaacttgctccagcatgttttcaaaggacctttatctccaagaaaaaagaaatcgtatttgtcacatgacatacctttatataaaattatgtatacagtttcttttataatacacattgatggttttaggcaaaattatctatgtaatagttcccttgacaaaggtaacactcaactcggtttttctcaaagtagctgtggaacagatggctgccccagggctttccttcatgttaaaagaacaacagtaactacatgtaatcaaattaaaaataaagcaaatgcacatataatgacactaaaataaaataaatgcctctaattataggtgtgtatgtgattcctatgtctctgggctattctttatcagaactaagaatgaactctggctgctgggtttattccaaagcactatccctcccaaaaaggtctcaaagtcagtttggccaagggcagtgaactttcatattaaaaagagaaaaaggccgggtgtggtggctcatgcctgtaatcccagcactttgggaggtgaggtgggcagatcacctgaggtcaggagttgaagaccagcctggccaacttggtgaaacctgtctctactaaaaatacaaaaaagtagccagacatggtgatgggcacccgtgatcccagctactcaggaggctgaggcaggagaactgcttggatccaggaggcagaggttgcagtgagcctagatcatgccattgcattcctgcctgggcaacaagagtgaaactccatctc

SEQ ID NO: 233397 - DNA, 480 bp, Homo sapiens
agactatccagagactttggcccctgccgggtagactcagactgtaaagacggctgcttccgattcaggatagctctggagccttccccagattttccaaaaaagggagggggatgggggagcttttcccctaatttacatatttaattaaacttggccaggcacggtggctcctgtaatcccagcactttaggaggccaaggtaggaggattgcttgagcccaggagttcaaggccagcctaggcaacatggtgaaaccccatctccacaaaaaattagtcaggcatggtggcatgtgcctgcccatagtcccagctacatgggaggatcacttgagcccaagggttagaggctgcagtgagctatgatggtgccaccacactccagactgggcaacagagcatgaccctgtctcaaagaagagggaaaagagcattttctcacctatttttactaacaatgatgctctattttagcaa

SEQ ID NO: 233398 - DNA, 1672 bp, Homo sapiens
gcggggtcgtcgccgccagcggctccgagcgccggaagggccaggtcgcagggctcctggagctgcaggcggcgggaggggctacaaatgcttgactcagtgatgcagaacctttcagagttagctggaagccacagccctgcctcttgatgcagcctggatccagccggtgtgaagaggagaccccttccctcttgtggggtttggatcctgtgtttctagcctttgcaaaactctacatcagggatatcctggacatgaaggagtcccgccaggtgccaggtgtatttttgtacaatggacatccaataaaacaggtagatgtcttgggaactgtcattggagtgagagaaagagatgctttctacagttatggagtggatgacagcactggagttataaactgcatctgctggaaaaagttgaatactgagtctgtatcagctgctccaagtgcagcaagagagctcagcttaacctcacaacttaagaagctacaagagaccattgagcagaaaacaaagatagagatcggggacacgatccgagtcagaggcagtatccgcacatacagagaagagcgagagattcatgccaccgcttactataaagtggacgacccagtgtggaacattcaaattgcaaggatgcttgagctgcccactatctacaggaaagtttatgaccagccttttcacagctcagccctagagaaagaagaggcactaaggggagaaaacccaggaggaatgagaatgtgtgcatatttgctaatatatgcataaaagaactctgagaggagacacagagaaccgcaatccaggcgccctggacctccccagtctcacgagtttgctgagtgaaaaagccaaagaattcctcatggagaacagagtgcagagcttttaccagcaggagctggaaatggtggagtctttgctgtcccttgccaatcagcctgtgattcacagtgcctgctccgaccaagtgaattttaagaaggacaccacttccaaggcaattcatagtatatttaagaatgctatacaactgctgcaggacaaaggacttgttttccagaaagatgatggtttcgataacctatactatgtaaccagagaagacgaagacctgcacagaaagatccaccggatcattcagcaggacttgcagaaaccaaatcacatggcagaaggggctgtcacttcctggaaatcttgggcctgtgctcgcctgagacattccgcccgggctgagcgaggtgctgcttgaacccaaggttctggaagatcctgggagggaaccccagtggcccatggtgcgcaccacaggagggctcatcatcaccaagcgttagtagcaaaagaacacggcgaaccacgctgtggggggaccaccacacaaaaagggggaggtacaaccccccaggcggtcagacctatacaccactaattacgggaggcgaccatacatgagaggcgcagaccccaacaaccgaagtaagcaactacattctcgggcatgagagagggaacacagggtgggcactcatcgccaagaacagtgcagaggagcgacggatacaggcagagcaacaaaacacacccgcgccgccggacgctggtcacaacaacgaaacagcacgagtacgcatactacgcaaccacagcaa

SEQ ID NO: 233399 - DNA, 610 bp, Homo sapiens
gcggggtcgtcgccgccagcggctccgagcgccggaagggccaggtcgcagggctcctggagctgcaggcggcgggaggggctacaaatgcttgactcagtgatgcagaacctttcagagttagctggaagccacagccctgcctcttgatgcagcctggatccagccggtgtgaagaggagaccccttccctcttgtggggtttggatcctgtgtttctagcctttgcaaaactctacatcagggatatcctggacatgaaggagtcccgccaggtgccaggtgtatttttgtacaatggacatccaataaaacaggtagatgtcttgggaactgtcattggagtgagagaaagagatgctttctacagttatggagcggatgacagcatctggagctataaactgcatctgctgcccgtcgaaccctgagtctgcatcagctgttccacgtgtagcaagagagctcagcttaaccttactcacttatcgaacgtacatggcgaccatcgggcatgcccaccgcatggcgtcccggctccaccgaccccgtcgtcagacgcagctcttccgtacatcccgcccgactaccgtttagactctatgcccct

SEQ ID NO: 233400 - DNA, 1689 bp, Homo sapiens
gcggggtcgtcgccgccagcggctccgagcgccggaagggccaggtcgcagggctcctggagctgcaggcggcgggaggggctacaaatgcttgactcagtgatgcagaacctttcagagttagctggaagccacagccctgcctcttgatgcagcctggatccagccggtgtgaagaggagaccccttccctcttgtggggtttggatcctgtgtttctagcctttgcaaaactctacatcagggatatcctggacatgaaggagtcccgccaggtgccaggtgtatttttgtacaatggacatccaataaaacaggtagatgtcttgggaactgtcattggagtgagagaaagagatgctttctacagttatggagtggatgacagcactggagttataaactgcatctgctggaaaaagttgaatactgagtctgtatcagctgctccaagtgcagcaagagagctcagcttaacctcacaacttaagaagctacaagagaccattgagcagaaaacaaagatagagatcggggacacgatccgagtcagaggcagtatccgcacatacagagaagagcgagagattcatgccaccgcttactgtaagcacaagatatttctaccaaattggtggtttttctggatgtgcgtccagtaaacctcttgttcagctggaagtcaaactttcaaaaagttcagttaagataaagtggacgacccagtgtggaacattcaaattgcaaggatgcttgagctgcccactatctacaggaaagtttatgaccagccttttcacagctcagccctagagaaagaagaggcactaagcaatccaggcgccctggacctccccagtctcacgagtttgctgagtgaaaaagccaaagaattcctcatggagaacagagtgcagagcttttaccagcaggagctggaaatggtggagtctttgctgtcccttgccaatcagcctgtgattcacagtgcctgctccgaccaagtgaattttaagaaggacaccacttccaaggcaattcatagtatatttaagaatgctatacaactgctgcaggacaaaggacttgttttccagaaagatgatggtttcgataacctatactatgtaaccagagaagacgaagacctgcacagaaagatccaccggatcattcagcaggacttgcagaaaccaaatcacatggcagaaggggctgtcacttcctggaaatcttgggcctgtgctcgcctgagacattccgcccgggctgagcgaggtgctgcttgaacccaaggttctggaagatcctgggagggaaccccagtggcccatggtgcgcaccacaggagggctcatcatcaccaagcgttagtagcaaaagaacacggcgaaccacgctgtggggggaccaccacacaaaaagggggaggtacaaccccccaggcggtcagacctatacaccactaattacgggaggcgaccatacatgagaggcgcagaccccaacaaccgaagtaagcaactacattctcgggcatgagagagggaacacagggtgggcactcatcgccaagaacagtgcagaggagcgacggatacaggcagagcaacaaaacacacccgcgccgccggacgctggtcacaacaacgaaacagcacgagtacgcatactacgcaaccacagcaa

SEQ ID NO: 233401 - DNA, 789 bp, Homo sapiens
gcggggtcgtcgccgccagcggctccgagcgccggaagggccaggtcgcagggctcctggagctgcaggcggcgggaggggctacaaatgcttgactcagtgatgcagaacctttcagagttagctggaagccacagccctgcctcttgatgcagcctggatccagccggtgtgaagaggagaccccttccctcttgtggggtttggatcctgtgtttctagcctttgcaaaactctacatcagggatatcctggacatgaaggagtcccgccaggtgccaggtgtatttttgtacaatggacatccaataaaacaggtagatgtcttgggaactgtcattggagtgagagaaagagatgctttctacagttatggagtggatgacagcactggagttataaactgcatctgctggaaaaagttgaatactgagtctgtatcagctgctccaagtgcagcaagagagctcagcttaacctcacaacttaagaagctacaagagaccattgagcagaaaacaaagatagagatcggggacacgatccgagtcagaggcagtatccgcacatacagagaagagcgagagattcatgccaccgcttactataaagtggacgacccagtgtggaacattcaaattgcaaggatgcttgagctgcccactatctacaggacaaagataaggtggcattcacccccaggctctgactttcagcatcatgcaggggcttatctgtctggaggcagttacctcataataaactataaaatatagtcatcttgggaat

SEQ ID NO: 233402 - DNA, 1533 bp, Homo sapiens
gcggggtcgtcgccgccagcggctccgagcgccggaagggccaggtcgcagggctcctggagctgcaggcggcgggaggggctacaaatgcttgactcagtgatgcagaacctttcagagttagctggaagccacagccctgcctcttgatgcagcctggatccagccggtgtgaagaggagaccccttccctcttgtggggtttggatcctgtgtttctagcctttgcaaaactctacatcagggatatcctggacatgaaggagtcccgccaggtgccaggtgtatttttgtacaatggacatccaataaaacaggtagatgtcttgggaactgtcattggagtgagagaaagagatgctttctacagttatggagtggatgacagcactggagttataaactgcatctgctggaaaaagttgaatactgagtctgtatcagctgctccaagtgcagcaagagagctcagcttaacctcacaacttaagaagctacaagagaccattgagcagtacagagaagagcgagagattcatgccaccgcttactataaagtggacgacccagtgtggaacattcaaattgcaaggatgcttgagctgcccactatctacaggaaagtttatgaccagccttttcacagctcagccctagagaaagaagaggcactaagcaatccaggcgccctggacctccccagtctcacgagtttgctgagtgaaaaagccaaagaattcctcatggagaacagagtgcagagcttttaccagcaggagctggaaatggtggagtctttgctgtcccttgccaatcagcctgtgattcacagtgcctgctccgaccaagtgaattttaagaaggacaccacttccaaggcaattcatagtatatttaagaatgctatacaactgctgcaggacaaaggacttgttttccagaaagatgatggtttcgataacctatactatgtaaccagagaagacgaagacctgcacagaaagatccaccggatcattcagcaggacttgcagaaaccaaatcacatggcagaaggggctgtcacttcctggaaatcttgggcctgtgctcgcctgagacattccgcccgggctgagcgaggtgctgcttgaacccaaggttctggaagatcctgggagggaaccccagtggcccatggtgcgcaccacaggagggctcatcatcaccaagcgttagtagcaaaagaacacggcgaaccacgctgtggggggaccaccacacaaaaagggggaggtacaaccccccaggcggtcagacctatacaccactaattacgggaggcgaccatacatgagaggcgcagaccccaacaaccgaagtaagcaactacattctcgggcatgagagagggaacacagggtgggcactcatcgccaagaacagtgcagaggagcgacggatacaggcagagcaacaaaacacacccgcgccgccggacgctggtcacaacaacgaaacagcacgagtacgcatactacgcaaccacagcaa

SEQ ID NO: 233403 - DNA, 476 bp, Homo sapiens
accagaattaaacagaaaagataaataataagaaatagagtgagaattaatcaaatggaaaagagaaaatcaataggaagaattaattaaaccaaaagttgtttatttgaaagatccacagcattgacaaacttttagctagactgaccagtgtaagaagaggggattacaaatcaggaatgaagtaacattaccacgaactttacagaaataaaaaggattataaggtaatatttttaacaaatgtatgttgaaaaattggatatcataggtgaaactgacaattcctagaaaagaactgaagctgccttagaaatacgaaatctaaacagtcctgtaacaagtaaagagattgaggtagtaactaccacacacaaaaaaagcacatactcaaaagaatttactggtaaaatttaccaaacttctaaaaaagatttttttataattttttttcacagactcttccagaaaacaga

SEQ ID NO: 233404 - DNA, 511 bp, Homo sapiens
ttttttttaagctgataagttttcatgggtctttgttcttcaaagcctgttttcatttttttcctgttggttctcagaagaagttggcttttccaacatttttagccccaaattactggactttctattctctatatttttgcttgtgacatgactagttcttgtctgacttcatcttcatcttgtaatgccttactagaaggaatgaggaacaacttgcagacaccagtttgaagaatacttacgactgtaacattgtattctatgaataatgacatattgtaattgaggctaggaaatagagtctgtgctaggaagaaaaggagaatatgaatgtggtaatcaggttgtactctctgctgcaatatttaaattcaataaaaatcataaaacttatagagcagaaataaattttaattgtgacaaaaaaatacaaaaaaaatcaacaaaacaaaaagttgttttttgaaaagataagtagaattaacaaacctttgcttgcccaaggaaa

SEQ ID NO: 233405 - DNA, 816 bp, Homo sapiens
gtgaaaggttgtttcaccgacttccacatcgactttggaggcacttccgttggtaccatgttttccggggtgggaagattttttggctgattcctccaacgctgcacaattggcgctgtacgaggagtgggtgctgtcaggcaaacagagtgacatctttctgggagaccgtgtggaacgatgccaaagaattgagctgaagcagggctacacatttttcatcccttccggttggatccatgccgtctacacccctgtagactcttggtgttcggcggaaacatcctgcacagctttaacgtgcccatgcagctgcggatctacgagatcgaggacaggacgcgggagaaaaacaaattgtaggacacttccacccactctcacattttgactttttcaagtccttgagacctgggagttctagatacactcgagaaaccttttgttgtcatctcctgaggtcactcagcttgaagatgacttggacctccgaggaagggctgaggccaggtgccgctgagtgggccctgaggtcctctggtagacggatgacctgcaggctgggagcattgcatgccttgtgactgccttgccttttgttttggactgacgttggttaactcaatttggtgaggctccgagtctgtcaacaaataatgttgagcaaccgtatgtttaatgtccccaggcatgtggctgaaaccttttgaaggcgaagggtggaaggcgacaacctgtttgtaagtcaattctttgcaaatttttgtttcccgcagtcctctcttggaaaaaaaaataaataaataaataaaaatt

SEQ ID NO: 233406 - DNA, 763 bp, Homo sapiens
aataggtatggtccaaatgatcattaaattgccatctctcttatatttatcttttatttatctttccccccctcccagtggctctagtgaaagcagccttcccagaaaaggtaatgccgacatgccccattcccttacagccactgaatctatttggaaattgcaaataatttaccttccctctccccttccccctaccattggacttttttttttttccattgattttttttttttttttttccaggagaaaaacaaattgtaggacacttccacccactctcacattttgactttttcaagtccttgagacctgggagttctagatacactcgagaaaccttttgttgtcatctcctgaggtcactcagcttgaagatgacttggacctccgaggaagggctgaggccaggtgccgctgagtgggccctgaggtcctctggtagacggatgacctgcaggctgggagcattgcatgccttgtgactgccttgccttttgttttggactgacgttggttaactcaatttggtgaggctccgagtctgtcaacaaataatgttgagcaaccgtatgtttaatgtccccaggcatgtggctgaaaccttttgaaggcgaagggtggaaggcgacaacctgtttgtaagtcaattctttgcaaatttttgtttcccgcagtcctctcttggaaaaaaaaataaataaataaataaaaattgaattccttcatcagcatttgttttcacccagctggtttccattg

SEQ ID NO: 233407 - DNA, 218 bp, Homo sapiens
ggcacgagactcggagcctcaccaaattgagttaaccaacgtcagtccaaaacaaataatgttgagcaaccgtatgtttaatgtccccaggcatgtggctgaaaccttttgaaggcgaagggtggaaggcgacaacctgtttgtaagtcaattctttgcaaatttttgtttcccgcagtcctctcttggaaaaaaaaataaataaataaataaaaatt

SEQ ID NO: 233408 - DNA, 861 bp, Homo sapiens
gtgaaaggttgtttcaccgacttccacatcgactttggaggcacttccgttggtaccatgttttccggggtgggaagattttttggctgattcctccaacgctgcacaattggcgctgtacgaggagtgggtgctgtcaggcaaacagagtgacatctttctgggagaccgtgtggaacgatgccaaagaattgagctgaagcagggctacacatttttcatcccttccggttggatccatgccgtctacacccctgtagactcttggtgttcggcggaaacatcctgcacagctttaacgtgcccatgcagctgcggatctacgagatcgaggacaggacgcgggagaaaaacaaattgtaggacacttccacccactctcacattttgactttttcaagtccttgagacctgggagttctagatacactcgagaaaccttttgttgtcatctcctgaggtcactcagcttgaagatgacttggacctccgaggaagggctgaggccaggtgccgctgagtgggccctgaggtcctctggtagacggatgacctgcaggctgggagcattgcatgccttgtgactgccttgccttttgttttggactgacgttggttaactcaatttggtgaggctccgagtctgtcaacaaataatgttgagcaaccgtatgtttaatgtccccaggcatgtggctgaaaccttttgaaggcgaagggtggaaggcgacaacctgtttgtaagtcaattctttgcaaatttttgtttcccgcagtcctctcttggaaaaaaaaataaataaataaataaaaattgaattccttcatcagcatttgttttcacccagctggtttccattg

SEQ ID NO: 233409 - DNA, 615 bp, Homo sapiens
ctaaaacccatttgatgtctgaatctgaatggaggaatcttggcgttcagcagagtcagggatgggtccataatatgatccatgaatcagaacctcacatcttgctgttccggcgcccaccacccaagaagccaaagaaatgaagctggcgagctacttttcagactcaagctttacacagctgtccttacttcctaacatctttctgataacattattatgttgccttcttgtttctcactttgatatttaaaagatgttcaatacactgtttgaatgtgctggtaactgctttgcttcttgagtagagccaccaccaccatagcccagccagatgagtgctctgtggacccacagcctcagctgagtgtgaccctaggaggcacaatgtgctctgtatccagaacacacttggcagatggaggaagcatctgagtttgagaccatggctgttacagggatcatgtcaacttgctgtttttgttttttcctgcctggtgttgtatgtaaggtcacttgtggatttatgtttcagcgtactggaaactttccattttattcaagaaatctgttcatgttaaaagccttgattaacaaggaagtttttataatcta

SEQ ID NO: 233410 - DNA, 639 bp, Homo sapiens
  misc_feature (128)..(128): n is a, c, g, or t
  misc_feature (264)..(264): n is a, c, g, or t
  misc_feature (286)..(286): n is a, c, g, or t
ggtacagcgctggagctagaggaggctcaagagccttcctgccattgccctggacttgcccaagctgaaagtgtggctggagctagaggtggcagagagggggtgaccagcacagctccaacagcagnctcccacactgctcccagtcctgggcacagtggaagctatggaggcagagaccagggtgtgcaacctgggctcctctgcctcactggagagggacttctctcattcagcagagcagcagccctgctgctgaagagnctgctgctactgctgctggggntgtttgcctgcctacaggaggtgctggagagcaagaaaaggagcctgtgagcaggggttccaggaggtcctcctgctcccagaggcgacctcctcctccaggcatggaggtttgccctcagctaggcatctgggccatttgcctctaatgttctgcccaggatggcctcttcttgacaggcagacaggggttgagggggccagggggcatctccaaaggaagatttaaactcagcagctgcaccccagaatctccatgcctgcacctgcccaaggatttattcatagcttaactaagaatctcaaatttctaccataacactgaaataaagtttgactttttgaaacttcaat

SEQ ID NO: 233411 - DNA, 432 bp, Homo sapiens
agatcatgccaaatttctccccaaaatgatggtgctggtgcctgtttctgtcttcagtgttcaagagaccccattgcttcacgccctcaccgatatttgatgtagactttaagacacttgccaacctgaggagtgaaaagatgtgctattgttacttcactctgcgtttttctgagtattattggggataagcatcttggctatttgagttttctcttacatgacctgcctgtcaacgtccactgcccagttttccatggagtttttctttctctttttgatttataagatttctttatatattctggttactctttgtctatcacatacattgcaaatatttatcccagtctgtagtatatcttttaactttgtagggtgtgtgtgggggggcagtgtgtcataataaagcttttagttttgatgcagtca

SEQ ID NO: 233412 - DNA, 331 bp, Homo sapiens
acttgagtccgtcactaaatattttacaaattttaaacgtgttaagtaggccaggtgcagtggcacacacctgtaatcccagcactttgggatgctgaggcgggtggatcacttgaggtcaggagttcaagaccagcctggccaacgttgtgaaacctcatctctactaaaaatacaaaaattagccaggcgtggtggcgggcacctgtaatcccaggtactcaggatgctgagacaggagaaccccttgaacccaggaggtggaggttgcagtgagccaagatcgtggcactgcactccagcctgggcaacagagcaagaccctgtctca

SEQ ID NO: 233413 - DNA, 934 bp, Homo sapiens
ttcagtgaatactctctgtgggcctactatgtgccaggcattatgcaccagacgaaaacatatcttcttgagtaagccagtgctaagtcactgttcttgttcatatttggatcccttcccttttcaggttggttcattaacggaaatattaacagcaacttatacgtacttctccacttgttgctccaagagatttacagcctctttttctgtcttcagatactactttgaaaacaagatgaaagccatggaatctcccgagaaaaatgtacatcttacagactttcagtgagttctggaataccaggaaccagagcccacactaatgaacagcagtttcctaacctaatgcgagagatttgagatttcttctggctcccatgatcttctaattgtcttcttagcaagactaaacacatctccaagaaatgtgcactgccatgaatgtcttccagctatcttctatgacagcacttcccagtgtgttctgtggaataatggtacagggtgatattctatgaagaaaaatacggaaagtaatatactccacagtccgtatattagatcggactaataaaaataaatatggaaagtaatatattccacagtcatatattagatcgcctacacaacagcaatttgatatagtttaataggatttgaatgaataaaattaatgcccacagctactttcttctgccggtaaatatttttctgcccataatcttgctaaacagaattcatctgaacttacgttgtggccacaaatatccaacaattatacctaatcaaaacaaaaaccaactgatgttaaagaaaattaatcatttgctttgaataaatcaactattaagaaagctattataattgagccttacagtgccaaatatgtctgaaatgaaatgctgatgatcatatcaaacagacatttgca

SEQ ID NO: 233414 - DNA, 827 bp, Homo sapiens
tggctctctaatttcactaggttggttcattaacggaaatattaacagcaacttatacgtacttctccacttgttgctccaagagatttacagcctctttttctgtcttcagatactactttgaaaacaagatgaaagccatggaatctcccgagaaaaatgtacatcttacagactttcagtgagttctggaataccaggaaccagagcccacactaatgaacagcagtttcctaacctaatgcgagagatttgagatttcttctggctcccatgatcttctaattgtcttcttagcaagactaaacacatctccaagaaatgtgcactgccatgaatgtcttccagctatcttctatgacagcacttcccagtgtgttctgtggaataatggtacagggtgatattctatgaagaaaaatacggaaagtaatatactccacagtccgtatattagatcggactaataaaaataaatatggaaagtaatatattccacagtcatatattagatcgcctacacaacagcaatttgatatagtttaataggatttgaatgaataaaattaatgcccacagctactttcttctgccggtaaatatttttctgcccataatcttgctaaacagaattcatctgaacttacgttgtggccacaaatatccaacaattatacctaatcaaaacaaaaaccaactgatgttaaagaaaattaatcatttgctttgaataaatcaactattaagaaagctattataattgagccttacagtgccaaatatgtctgaaatgaaatgctgatgatcatatcaaacagacatttgca

SEQ ID NO: 233415 - DNA, 688 bp, Homo sapiens
ttcagtgaatactctctgtgggcctactatgtgccaggcattatgcaccagacgaaaacatatcttcttgagtaagccagtgctaagtcactgttcttgttcatatttggatcccttcccttttcaggttggttcattaacggaaatattaacagcaacttatacgtacttctccacttgttgctccaagagatttacagcctctttttctgtcttcagatactactttgaaaacaagatgaaagccatggaatctcccgagaaaaatgtacatcttacagactttcagtgagttctggaataccaggaaccagagcccacactaatgaacagcagtttcctaacctaatgcgagagatttgagatttcttctggctcccatgatcttctaattgtcttcttagcaagactaaacacatctccaagaaatgtgcactgccatgaatgtcttccagctatcttctatgacagcacttcccagtgtgttctgtggaataatggtacagggtgatattctatgaagaaaaatacggaaagtaatatactccacagtccgtatattagatcggactaataaaaataaatatggaaagtaatatattccacagtcatatattagatcgcctacacaacagcaatttgatatagtttaataggatttgaatgaataaaattaatgcccacagct

SEQ ID NO: 233416 - DNA, 522 bp, Homo sapiens
tatgtgtctgtctttagtgtggggttgatggggagagcggggggtggtctttaccactactttgaaaacaagatgaaagccatggaatctcccgagaaaaatgtacatcttacagactttcagtgagttctggaataccaggaaccagagcccacactaatgaacagcagtttcctaacctaatgcgagagatttgagatttcttctggctcccatgatcttctaattgtcttcttagcaagactaaacacatctccaagaaatgtgcactgccatgaatgtcttccagctatcttctatgacagcacttcccagtgtgttctgtggaataatggtacagggtgatattctatgaagaaaaatacggaaagtaatatactccacagtccgtatattagatcggactaataaaaataaatatggaaagtaatatattccacagtcatatattagatcgcctacacaacagcaatttgatatagtttaataggatttgaatgaataaaattaatgcccacagct

SEQ ID NO: 233417 - DNA, 913 bp, Homo sapiens
ttcagtgaatactctctgtgggcctactatgtgccaggcattatgcaccagacgaaaacatatcttcttgagtaagccagtgctaagtcactgttcttgttcatatttggatcccttcccttttcaggttggttcattaacggaaatattaacagcaacttatacgtacttctccacttgttgctccaagagatttacagactactttgaaaacaagatgaaagccatggaatctcccgagaaaaatgtacatcttacagactttcagtgagttctggaataccaggaaccagagcccacactaatgaacagcagtttcctaacctaatgcgagagatttgagatttcttctggctcccatgatcttctaattgtcttcttagcaagactaaacacatctccaagaaatgtgcactgccatgaatgtcttccagctatcttctatgacagcacttcccagtgtgttctgtggaataatggtacagggtgatattctatgaagaaaaatacggaaagtaatatactccacagtccgtatattagatcggactaataaaaataaatatggaaagtaatatattccacagtcatatattagatcgcctacacaacagcaatttgatatagtttaataggatttgaatgaataaaattaatgcccacagctactttcttctgccggtaaatatttttctgcccataatcttgctaaacagaattcatctgaacttacgttgtggccacaaatatccaacaattatacctaatcaaaacaaaaaccaactgatgttaaagaaaattaatcatttgctttgaataaatcaactattaagaaagctattataattgagccttacagtgccaaatatgtctgaaatgaaatgctgatgatcatatcaaacagacatttgca

SEQ ID NO: 233418 - DNA, 439 bp, Homo sapiens
acaacaacaaaaaaaacccagtggctacactggctacttctggccttatggttggtctcctccgttcctaaagggtacgtataaggcccaagccagagataaccatggtagaaactttccctgctgatgagcatgtgcactcctccaaaaactcaccctagagtagccttttgttcattataatagtaaaaaacacacccctgggtggagattttaaatgctaatgagacatgcgacatgtgtaccagcatgtacaaccacagagcgtgcatgcccaaggagacctcctgaaacatgcttgcgagtaacattcccctcatgcccctttgtgaataatcatgtaagattcgcataaagagaatcctccagcactagctgctgctggcttttttttgttgttgttgttgttgttttacacagagtcttgctctgtcactca

SEQ ID NO: 233419 - DNA, 808 bp, Homo sapiens
cagagtatgtgtattataaatatgttctgttcaggaccttgagctgctggtggtgtggtcgaagaatggcatagtccttgcactcaaaagctacagtatgtttgggacaaccggtcaaaccctgaaaacggtgaacagtaaaacaggagatacagttaaccctctaatgctttgtggcaactcttgttgaatggccgctgagtattcttggtttgtaacacttggtgatggccaagtgctcttgaaacagctaacttaaaatctcagcagttattttatttccagaggaaggaattctctctccctcggcgagatccagtccacagcttgcttcactcttagaacagcggcatcctctatttggtctcgcacggggaacttgctggggtaggggagaggtgttagagctttgaaaaagctttgcctctcggaggagtcaaaggggcagtaactgtatggggtgagaggaaggcctgcgaaataaaaaggcaaaggaaccgtttgaggaggctagttgccttctcggggccggtgtgtgtgcgggggtagtgttaagggggaggaaggagcccgggagcccggaggaccctcccggaggtgcgggcctgaaattccgctgggtgccgggaggctccgccctccggagtactgacggccttcgcagccaatgcgcagccaggacctcgcgttcgggagggcgggtacttcctactccagccctgggctcggagaaggccgcgttagttctttttctagggatgtctgcggaaggggcgccaggctgagggccagcctggagaaagaaaga

SEQ ID NO: 233420 - DNA, 445 bp, Homo sapiens
taaaacaaaagaaagaacaaataacaaatgaaaataaatacccaaaaaccagtcaaatgtgaaactggtgtcaggggtatgttctccatgttgagccccttctgtggaatatgacagtgtctctatttcgggtaaaggaaagaccaaaataactttccaagatgaaaagctaagagtgctgatctcatcacagacatagccagctcttcagttcagaccacctggaaaccctccccatgtcttttcagaacaatgtcctaagaaccataggggaagtggccataaaaaccatctttcctttgcagactggggtggggactctggccaatgccattctgttcttccataatatctttcccatcttgactgagcatcaaatgaggcccacacacaagattctcacccacggccgcataggcaagcaccggaagcaccccggcggccg

SEQ ID NO: 233421 - DNA, 524 bp, Homo sapiens
tcaagtccaagtcaccatactgatagataattggatctcaatgaaaaaaaaaattaggcaggacgtaatggctcatgcctgtaatcccagcactttgggaggctgaggcgggcggatcagttgagctcaggagttcgagaccagcctggccaacatggtgaaaccccgtctctactaaaaatacaaaaattagctgggcatggtggtgcacacctgtagtcccagctacttgggaggctgaggtaggagaatagcttgaacctgggaggtggaggttgcagtgagccgagaccgtgcctccagcctgggtgacagagcaagactctgtctcaaaaataataataataataataataataaaattgctgttactcgagcagtctctctggaacaattcaacctttcctatattttggaattcaggtgaccaaatcagaaccaaacagaacaatcccaaatctggagaaacatggtgattaaggggtatttttagttgcacgaaagagatcaagagagctttaaaa

SEQ ID NO: 233422 - DNA, 447 bp, Homo sapiens
tacctagagccctggactacccagagaagtagttttaagaaccaaaagaagagaagaattcaggagtaaatgaggcctggataacccaagggatcctgtgcttgcactgctgggattcaaatttgggggctgccaccaccacaagtttgtgagaagcccacagcctgcgcatgaagattgtgtcaagggaatagcagctgctgatgtgtggaattgattttttcagcaagggcctgcgattctgaatgcattaaggcagctccagttgtctgtagcagtcctctgtcagctgcccattggaagcatttttactggctcaggaaattcatgggtttgtggactgatgactccaacagattaggtacaaatccaagaaccacaaaacaaaatctaaccaagccaaacaacaatcaaacaataaaacagaacaaaaaaaaacctcaattt

SEQ ID NO: 233423 - DNA, 358 bp, Homo sapiens
ttttttaaaaaagaaaaaataaaaattctggaattggaaaatataatgaccatattgattgaaatatttgctaaggggttcaacagcaaatttgagtatgcagaagaaagaattggtgaacttgaagagaagacattggaaattatcaagtctaaggagcagaaagaaaaaagacaggagaaagtgaatagagcctaaggaagttatgagacatgatcaagtggaccagtatatacattgtggtagttcaaaaggagagaaaaagagataaaggctatataaaaaaataatggcagagaatttcctatatttgaggaagaacatgaataatcaaatccaagaagctcaacaaactcca

SEQ ID NO: 233424 - DNA, 423 bp, Homo sapiens
gagttttgctcttgttgcccaggctggagtgcaatggtgcgatcttggctcactgcaacctccacctcctgggttcaagcgattctcctgcctcagcctcctgagtagctgggattacaggcatgcgccaccatgcccagctaattttgtacttttagtagagacggggtttttccatgttcgtcaggctggtctcaaactcccgacctcaggtgatccgcccacctcagcctcccaaagtgctgggattacagacatgagccaccgtgcccggcctaaatataggtgtctcttacagcaactaggggcttcacaaaggtggcgacagtgggctctggtcttgagggatgactaaaagttttccaggcaggctaggaaggggaaggacattctgagcagagggaacagcatgggcaaaagcac

SEQ ID NO: 233425 - DNA, 465 bp, Homo sapiens
tcagatcaaaaggctagaagagccgtgaactagatgtagactgagtctcactaaaactgaagctcaacacccagctcagctcaacctctgtattaagccaattagtccttaccctctctgcctaacaaaggaagcaacaatctctttggtggaagagaacaacaactgcagtctctacttactacgaagaaaaggagaattggacatccaaagagggaagaccatatgaccaataatcagaagaaaaaaaaatttcaatcaaagtgaaatcacagataagctaaagagagcaaacaaggtctttaatttgattaatatgtttatttaaatgaagaaaaagaatcataaagtggataaaaagaaggagaattttgccaaataactactttataaataaccaagtagacctctagaattgaaaaagtaataatatctaaatattaggtaatagtggataggtttaac

SEQ ID NO: 233426 - DNA, 695 bp, Homo sapiens
gccactgcttattggccccataattgtattttctgcatcctcattgttcctggccacctaatgctgatgaaaaagtgggaagaatatttcttattccccactctaggtcacactttgacacagaagtgggcactcaagaaaaaatacttgtactctccgtgcaccacaaaaggctttgacagtatgcctctataatctgtgcctgatgtcccacttttcacatacacaaacctctgacttcatgtaggtaggcctggaaaccaatatgtgagacaggtatcactgggtccacaaaatataaactcctcccttttttgcctttgcacacacaagacctcagtaaagatctttattggaatctactcatgatggccccctgtaccagtttataaaatatgcatatttttgcctgtcttccaacagagattcaagcttttcctaaagcaagagttggcaaaatatggtctttgggataaatccggcttaccacctgttttggcagagcctgtgagttaagatagtttctatagatgaacatttgattatagggaatgctaattttgaagtaagtgaaatgctatttccccccaaataatattactattttcattagatttaagtcacaaagtaatttgtacttaattattattattatattttgaattttatcaataaaaattttgtggaaatttatt

SEQ ID NO: 233427 - DNA, 290 bp, Homo sapiens
cactcaggctggagtagtagtgccatctcagctcactgcaacttccacctcccaggttcgcacaattcttctgcctcagccgcctgagtagctgggattacaagcgtgcaccaccaccccggctaaattttctctttttagtagagagagggtttcaccatattggccaccattttctaataaaggaactagagatcattggaaaaacagctcattccaaggctagggaagggaaaacacaagatgagaacctggacaatcttgtagtctcagaaagtaaagatgtgctt

SEQ ID NO: 233428 - DNA, 3510 bp, Homo sapiens
  misc_feature (408)..(408): n is a, c, g, or t
  misc_feature (2466)..(2466): n is a, c, g, or t
  misc_feature (2495)..(2495): n is a, c, g, or t
  misc_feature (2568)..(2568): n is a, c, g, or t
  misc_feature (2635)..(2635): n is a, c, g, or t
  misc_feature (2697)..(2697): n is a, c, g, or t
gactccccctcccctcacgcccgcgacctgcgagctcccggagctggggaaggagcggacgccgcagagtccccgtccctggccatgcaagccggcctggcgaccccttcctccgctcccggattagctcccgcccggcacctgccttgccgcgacactgattgaaattcaagccggcccccgcctctgaccccggccggagcagggagggaaagagtgctgggagcggctttgctcctagaaggaggcccgggagtccaagaccgtggcggtgccaggggacggtcccctgggcgaggagagggaggggctgccccgagggcttccccgccgtctgctgctcgggtctccatccctccggtcctgcgggccggccctgcgaagccctgggaactggagtttcttggngttaacctcccgggctaacctacacataagggtgaaaaaccgggcagacaccctgccctgcccactcctccctcagggtggggagatggaagtgaaaccaggcccccaacccacacaacgaaagcgggaaagtctgaatggggttggggggtagtttacgatcttctctctttggcgtctgcggttaaatctatcacttccttctggccctaaacccctggcagaatctgatgtagtcaccacttagactcagccttggaagagaatgggtgggcttcaccgcattcggcattcaccacccccccttccccgcaaaaaaacaaaaaacgaacaaacaaacaaaaaactgcaggcaaaatgttagtgtttatgcagaggtgagttctcctggggggggaggggggggctctagctcccagcaggtgagactcattgcgccggggtctgatggaattgcacctggccatgctctcccaggcctgggagtagctgtggacataagctttaggcagcagaaattattagaggcgcttggacatatttggacgcctttatttagtaattgttgagaatcacttgttctgccagttccagaaccagcaacacccaccttgccgcccccgcccccaccccatcccttactgtgagtttcctccctctgctcagtgtggactcattggggagctcctcccagacttcccctgctctcctgtggccagtccctgagcctggtcatgactcctgggcagccgctgggaggctatgtcagaaacatccgaggactacagagaccttggtgataagtgtgtctttctttctctcctcttcttcctctcctgcatggcctccctctctgccagcactggaaagtcctgtttgatcaggtatgtgagcagttaaccccccatttccttccagccctccctgaaatcggtctcagtctccctgcttgcgtgggcttccctagctccgcgctcctgagatggtgacgtggggtgggggtgtggctttgtgcatctctagggctgaacgacactgctctccaggtatcaggaggaagagatgggctcccctgagaggatctccctcctgcctcctccctactctgctgcaccagagccgggtttacaccatgtagaaattggacgttatatattgaatgcctgggaaatcctccatatgccaggggattgcagtagggggctggagaggtgggggaagggcttgggctgacaatccctctccgtttctacctccactatggagggtccatggccaccgctgaagtcaaatctctgccatccttgggggctgactcacagtatggactcttttgaagtctaattcaatgtctttaattctgtcatagggatgagggagtgctgggaggttacagaggggaaattgtgtgtgattcttcgcaatgcctggagtccaggtgtagggcatggagttgggggtgccaagtattggcttttgaacctggagatggacatttgaccttcagcaaggaaatggttctcctcttagcattcgtggtgggtgctgttatgtgcttccttctccctctttgccccatgttggaggatagttgagtgctatagtcctggggtgagaatgattgtgccatgaagtttgtgcaactttaagaaattggtgtgagtgggccagagggaatgtgttgggtaggagaaggagataaagctgaaaaattagcttgaaccaggacttcgttgtaggcaggggaagccttagaaagttttttagcagggttgttatgtgatccaagccaggcttgggaaagctccagtgtcttaggggataaggagtgaatgggctacggggatgagggaagctaggcaggagctgcagcactgaacagaggcaagaaggtgacagtgaggatggacgggaagagggacatggtgatggaagaattggaagatcttaatagaccgtaggtgaggggaaccacatatctaactttgagattctgaacctaggagggaaagaagttggagtggggccaggtgtggtgactcacgcttgtaatcccancactttgggaggctaaggcgggaggatcncttgaacccagtagttcaagaccagcctcgccaacaaagtgagacctcatctctacaaaaaattaaaaaatcngccaggcatggtagcacactcctgtggttccagctacatgagagactgaggcaggaggattgcctgngcccaggaagttgaggctgcagtgagccacgatcgtgctactgcactccaacctgagtgacngagtgggaccctgtctcaaaacaaaaacaaaaaacaagttggagtgaggagagacgtttggcaaaaatgacaactttggtttgagacaagttcagttagaggagccagccggttgcagatgccggagtgggcgtgatgacacggaattgcagcgcgaaaggcctggggtgaggatttggggtgatcatccacattaaccacgaggtctggctgtggtttgaagttcaaagcatgcactggctcctgtcctgacgggtagagcatctctccctctggctcctaagagtacagcagctgctggcctgatgccccaaggcaggagggagcccgctgcgccactgccaccactaccaccaagctgccagcccttcacacctcctgccagatttagaatcagaacctagaacaaagtgtatcattctttttttttctctgtctgtgtctatctttttcatttgattaatttcctttgccagtccctgtgtgtatgtgtacattttaaaacaaaccatttgggtgaaaggaagagagcttttagtaggaagattttggaactcaagggagcagaaagaatgtgtagcacctaatagtagctagtggtctattaaatcgaatttttccaactgaaggtaggtcctgggtcctgggtgtcacaaagagcatacccctgcttctgggaggcctgcccagaattaattctaggaaagaaattaggccaggcacagtggctaacgccggtaatcccagcattttgggaggctgagacaggaggatggcctcccaaaaagtgagaccctttctcaaaaaaaaaaa

SEQ ID NO: 233429 - DNA, 450 bp, Homo sapiens
tgacaacgtggatgaacctagaggatgtaatgttgaagtcagttacagaacgacaaatatcatataatctcacatgtagaatctaaacaaagtctaacttatagagaagtagagagtagaatggtgataaccagaggctgggaggggaggggtgagtatagaaaaaagggatacattggtcaacaggtagaaacttatagttagataggaggagtagttctggtgttctattgcagagcatgttgactgtagttaataataatgtattatgtatttcgaaatagctaaagagagaactttaaatgttctcaccacaaagaaattataaatatttaaagtaatggatatactaattgctatactctggtgtgatcattccacaatgtgtacgtatattgaaacatcactttataccccataaatatgtaaaattattgttggccaattaca

SEQ ID NO: 233430 - DNA, 273 bp, Homo sapiens
ggaagcaggagaatcagatctttctggcccacagccccagccccagtgtggttcccaagttgccatgtcccttcccatccaaacttcagccggtctggtacacctggtacctggcaggacagcaggagggtagaggaggcagcggggctgggcctgggtgtgtgtggcgaggacgaggtgaaaggtagcgcgctgtggtctccagaacgtgccggcattgttttattttctgccttctaacgagagccacgtttcttgattgaaagcaccagc

SEQ ID NO: 233431 - DNA, 315 bp, Homo sapiens
taaaaaacaaatcaaatctataatataaaataatcaaatgtctaggttctctccacagttctatgacagaggcagggcaggatttattctggtttttataagtgaaaacctgaggctccaaaaaattgggacttcatagacactggggactactagaggagcggggaagagctgaaaaactacctattggatactgtgctcactacctgggtgatggaatcatttacacccttagacatacaaaggtatgaaatatacctttataacaaacctgcacatatacccccgattctaaaataaaagttgacaaaagta

SEQ ID NO: 233432 - DNA, 751 bp, Homo sapiens
ctgctgtctgcccttaataccttatctcaataacttctatcagaacaacaccatgaaataacacattaagtcatttcctaacaacttaacaccaaattgagaaataaattataacaaaggtggaacaaagttggaattctggctagtttatacctgcagtaaccatttcaacgcaccaaagggaggccacttaagagaagtcataattatcagcccattcttgatcctatctccaacacaattcccatccctcgagtgaggacccctaccataaggtatcctggtggtcatattgaggaatttttattgatctggaaagcctaaagaatccctgaaggtttttatcagagaacaaatgcaacagattatggcgaaaaaaaattcttgctgcatggtgagaagtaaatcaaagaagcacaagggagggccttttaaacattccatcaggggcctgtggaggacgtctggcggcgagtcaatcaagaagcagcatgaactggcagtagaatctacgaggaattttaaaatatacatttatatatacatgcatatactcttttttttcgatctgccattcctaggcagacttcctctgaattagcttccgtggtctctccacagacagttgtttttcccactctcccaccccagccccttatgcttccctcaccaccctagcacccccaccctccgccgcccccctagtgctggagacctgtgcaatatcattttccgcataatgaaatccgga

SEQ ID NO: 233433 - DNA, 647 bp, Homo sapiens
aaatggaagcaagaactaacgtctgccaagtcctgattgaggagcctgaagatatccacactgagcattgatctgtgcatcagtaagtctggatctaaagaggaagatccacactggagcacaggtcttctacaatgtagtcatcgtgccctgtgtgggggccaccatgggatgggccccaagaacatggtgtgaacaacaacagcaaaaatggtcttgacctcagagagttcaggtctactctgatgggaaagaaaatattacacagtgcccacctttccgatggagctgaaggagacggagtcagagggacttaaaacagtaacaacaacaacaaagtgacatggaatccatgaaagggagtgtgacagataagcaacttttcaactgtattcgcatttatagagtgttttaggaagggaggccacttaagagaagtcataattatcagcccattcttgatcctatctccaacacaattcccatccctcgagtgaggtctcactgtattacccaggctggagtacagtggtatgatcacagctaactgcaactttgatcgcctgagctcaaacaatcctacctcagtgtcccaaataagctgggaccacaggtgtatgcaaccacatgcggcttttgtaaaaaat

SEQ ID NO: 233434 - DNA, 739 bp, Homo sapiens
ccgcatccagggtgcccctccggcctcgccatgaggctcttcctgtcgctcccggtcctggtggtggttctgtcgatcgtcttggaagccaggcgttgtggtgcgcgcttggctacttgggaggctgagacaggagaactgcttgaacctaggaggcggaggttgcagtaagccgagatcgcaccatttgacacagcaagtctccgtctcaaaactacaacaacaacaacaacaacaaccaaattttgcacccctgcctcatcttcctggcaggcccagccccagcctagggggctccagaagtctccaacccctttgatggcctggaggagttaggaaagaccctggaggactacactcgggaattcatcaaccgcatcacacagagtgaacttcctgccaagatgtggggattggttttcagagacatttcggaaagtgaaggagaaactcaagactgactcatgaggacctgaagggtgacatcccaggaggggcctctgaaatttccaacaccccagcgcctgtactgaggacgccctccatgtgtgtccaatgtggtcacacgcccaggtgtgaccaataaaaatcctatggaaaattctctctggccaggcatggtggctgacgcctgtaatcccagcactttgggaggctgaggcgggcggatcacaaggtcaggagattgagcccatcctggctaacacggtgaaaccccgtctctactaaaaatacaaaa

SEQ ID NO: 233435 - DNA, 774 bp, Homo sapiens
ccgcatccagggtgcccctccggcctcgccatgaggctcttcctgtcgctcccggtcctggtggtggttctgtcgatcgtcttggaaggcccagccccagcctagggggctccagaagtctccaacccctttgatggcctggaggagttaggaaagaccctggaggactacactcgggaattcatcaaccgcatcacacagagtgaacttcctgccaagatgtggattgttttttatacacattcttgactgtgtcagataaactcaacactgactcctgatgacctcatcggtgatatacacctacgttcgtatctccactacccatcaccacacctctctgtcccccctaccccctcctcgcgcccccactcagccagtcacacaactgctctaaacggcggcgttcctttgtataaatacagctctccaggccaaggtcggtggtcattttgctgcgctgctgtgggcagaaacagcgcgcttaacagttgttatgcacggctgcgctactatgtgtaacgcagtacgtagagtggatattatttttacttcactcgaccacccatcgtgcaacctccgctccgtctccaactttcctacgtccctagtcactacactcttccccctcgtcgactgcccccccgcctcctattatagacattcccttccccccatgttaaccctcacacaatcctcgttctccgcttagttcatttcccccgtcccttccctccccgcgcgcccccccgcttgaactaatacacctcaccg

SEQ ID NO: 233436 - DNA, 580 bp, Homo sapiens
ccgcatccagggtgcccctccggcctcgccatgaggctcttcctgtcgctcccggtcctggtggtggttctgtcgatcgtcttggaagggattggttttcagagacatttcggaaagtgaaggagaaactcaagactgactcatgaggacctgaagggtgacatcccaggaggggcctctgaaatttccaacaccccagcgcctgtactgaggacgccctccatgtgtgtccaatgtggtcacacgcccaggtgtgaccaataaaaatcctatggaaaaaaaaaaaaaaaaaaaaaaaaaactcgagtttttttttttttttttttttttgaaccagcaattaataacactttttatttagcacattcacaaaagaaatggatctaaattatcattcattaatcacttttctgtgttttacagtgataacatattaaaaagtcagcattagaaaaggattagcatatgcagcaattaatacaagtgttacagagtatgaataattgcagaatatttgtgcagggacctgaacaactttccttaatggagttggatgccttatggatattggtgaattgga

SEQ ID NO: 233437 - DNA, 381 bp, Homo sapiens
acacactctacgagaacgctcgcacaacttcaattcccacaaaaggcttctaggattggttttcagagacatttcggaaagtgaaggagaaactcaagactgactcatgaggacctgaagggtgacatcccaggaggggcctctgaaatttccaacaccccagcgcctgtactgaggacgccctccatgtgtgtccaatgtggtcacacgcccaggtgtgaccaataaaaatcctatggaaaattctctctggccaggcatggtggctgacgcctgtaatcccagcactttgggaggctgaggcgggcggatcacaaggtcaggagattgagcccatcctggctaacacggtgaaaccccgtctctactaaaaatacaaaa

SEQ ID NO: 233438 - DNA, 342 bp, Homo sapiens
cctaggaggcggaggttgcagtaagccgagatcgcaccatttgacacagcaagtctccgtctcaaaactacaacaacaacaacaacaacaaccaaattttgcacccctgcctcatcttcctggcaggcccagccccagcctagggggctccagaagtctccaacccctttgatggcctggaggagttaggaaagaccctggaggactacactcgggaattcatcaaccgcatcacacagagtgaacttcctgccaagatgtggttagaacccttcccagggcacgggagggctggggtgtgtttgtgtggagccctggaggatgtccaagatgaacagattg

SEQ ID NO: 233439 - DNA, 401 bp, Homo sapiens
ctgagaccctgaatggatccttctgtggctgattcaactcaaatctgagtgatgttggatcaagcgcagccctcttgtcaccatgaagtaataagcttgataaggcactcactgaggatgactaagaagaaattcaagaggaaatcattgtctcttgaagattcctggacctgtgaatcttggttatgggaggaaaagcatcacatactggactttgatgaagagaatgcacagccttccagagaaggcaataccttgccccagccctgcaaggtattcctacccatctggaactgtgatggagtcttcaaaatgccattgcattgttctaccaagccagcggcttcaggatgatggctaatatagtaagaccagtaaaatccacgaccaagggccaaaaa

SEQ ID NO: 233440 - DNA, 375 bp, Homo sapiens
cctcagtccccatagcagatcctgctgcctgcccagggacccactgtgagacatgcccatcagtgacaccagaggtaggcctgaatatttcgatctcagttgtagaccttgaagcagccctgcaacttggtttctgcccctctcagctgcagactggagcagtactgcctgtccaaagtctcacccagtggtccagcaagagccttcctggggacctggaggagtcatacccattcacctgggcaacaggcctattcctgtgcacctgaagtagaccatcagcccagtaccagccctttggaccggtcgtggagacagtagagaccaccctgggcccagacaggatccatgcctgctagggcccctgctactagg

SEQ ID NO: 233441 - DNA, 321 bp, Homo sapiens
acatagatttatgtgtgcttataagtccctatagttgtataccaaatttttcataatgttcaggggttttcttcatcctgtagggaagcagctagattatggggtagacttttattttgtaatctcttgtggttttaatttttgttttttacagtgagtattgcatattttctataattggaaataaaaaagatatgttcattttgagggggggaagcaatatttcaccatacgaaactagaaaaaatagtttattacgcattgcatgcctgtatcaaaatatttcatataccccataaatatatacacctgtatacccac

SEQ ID NO: 233442 - DNA, 575 bp, Homo sapiens
caaaataataataataatagagtctagtcttcattttgccactaaaattatgtctctctatatatttatttattcaacacgtatttattgaaagcttgtcatgtgcctggcattgttctaggtgctaggaatatagcagtgaacagaatccacaagtcctcccctcagggagctttacattctagaaggggaagaagttctccccctcagctcaaaaaaaaaaaaattgaaaagaaaaatgccaaactcatccatcagctccaatctgagctgagccctcagggctgcctggttcattatgtgttttcctgttgattctcctattctgtacagcagcaatttcagactgtgcccactcttctcaaaatttgtcacctctgcagaccttgatattcctgctatctgcaggaatttctgtgtaggtgccttacagatcactcagattcattatggccagaaccaactccatgttgttcctctctgggctggcccttcccctgggcttcatcttagggatagcaccattacatacccactgttcaggacggaagcctgctgtcatcttggttgatcct

SEQ ID NO: 233443 - DNA, 582 bp, Homo sapiens
ctagctttcctttctctgctgggaagactccatgtttctaaggaaagtacctagagtgggcatagctttattgactaaaaaaagatggtaacccttatcttttttcctgcctgtaacttcctcagaactttggctagtggaaattcttcctgtttcctggcatatcactgaggaattctcggagtttccagttttacagaaactagtttctctttgttttttcttagttatatcacaggaagttggggagagaaaaatcagaatttattagatttttaaataaaaagataatacaattaattcataattatttacatttaactgagttctgtacttaccagtagcctccttttcacatgtctttcttatctaaattctttactttggtttgtgtttcggttggcttgagtatttaacactttaaataacgtaactgaggagggcttgtgttcaggatatactttctgaacctttacagacctaaaattagttgccagccaagctggactaaaaatcaggtcccctacaaaattagctactttggcctttcctacaaaattagctacattgtttatctctcta

SEQ ID NO: 233444 - DNA, 462 bp, Homo sapiens
gtaaatatctccaaatgggaaaattagacttatacataataaatagagtaatacatgaaatatcacaaagcaacttgtgactaggtgccaaatgtgtgggatgggcagaagagcaatagggacttaggaaagagaaggaatgtcatgctggtagacttcagggaagtttcataaaaggaagaattttaactcagcgtagaaagatgggtaaattttcctcatgtgaaggtgtactgcctggggtgctgcaggctggagatgagtattaaaataggaggagagtgagtgaaagcacaggaggaggaagggtcaggcaagtttggtgaacacagcaactggctatagaacaggagcagtgggagaaagtccagaaaggtctgctgagcttcagttgtacaaagctgtggagtttggcctttggtcatggctagattaggtctgaaagccttaattaaaaaaaaa

SEQ ID NO: 233445 - DNA, 506 bp, Homo sapiens
  misc_feature (425)..(425): n is a, c, g, or t
  misc_feature (444)..(444): n is a, c, g, or t
cacactgatttggcctgtcttccttcctttttgaatttaaatggaatcttaagttaccatgaacgttcctatttctcaggagaggtgtccatctacccatgccattttttttggcctttcactatctccttagacaactccaatttaggttccactcctgcacttcaataaaccttgaccaaacttcccaaactgctaaattcactggttggttttctatgctcatcttacttaatttctcagtatttgacactgactcccatttcctcaacacactcttctattggcttctttgagccacgttctcttcattttccttctgcttctctggttttccttctcagtctcctttgctgactcctctttttctgctgatctctaaatattccagttctctagggttgagtctagtatcacttcaaatnaccattcaagggtcttccnatttaaggaggataaagtaatgatatcttggccccctttctaccctcagaaaatcaacaaga

SEQ ID NO: 233446 - DNA, 1515 bp, Homo sapiens
tgcttgaagcctaactgtccaccagaaaggactgctctttgggtgagttgaacttcttccattatagaaagaattgaaggctgagaaactcagcctctatcatgtggaacagctctgacgccaacttctcctgctaccatgagtctgtgctgggctatcgttatgttgcagttagctggggggtggtggtggctgtgacaggcaccgtgggcaatgtgctcaccctactggccttggccatccagcccaagctccgtacccgattcaacctgctcatagccaacctcacactggctgatctcctctactgcacgctccttcagcccttctctgtggacacctacctccacctgcactggcgcaccggtgccaccttctgcagggtatttgggctcctcctttttgcctccaattctgtctccatcctgaccctctgcctcatcgcactgggacgctacctcctcattgcccaccctaagctttttccccaagttttcagtgccaaggggatagtgctggcactggtgagcacctgggttgtgggcgtggccagctttgctcccctctggcctatttatatcctggtacctgtagtctgcacctgcagctttgaccgcatccgaggccggccttacaccaccatcctcatgggcatctactttgtgcttgggctcagcagtgttggcatcttctattgcctcatccaccgccaggtcaaacgagcagcacaggcactggaccaatacaagttgcgacaggcaagcatccactccaaccatgtggccaggactgatgaggccatgcctggtcgtttccaggagctggacagcaggttagcatcaggaggacccagtgaggggatttcatctgagccagtcagtgctgccaccacccagaccctggaaggggactcatcagaagtgggagaccagatcaacagcaagagagctaagcagatggcagagaaaagccctccagaagcatctgccaaagcccagccaattaaaggagccagaagagctccggattcttcatcggaatttgggaaggtgactcgaatgtgttttgctgtgttcctctgctttgccctgagctacatccccttcttgctgctcaacattctggatgccagagtccaggctccccgggtggtccacatgcttgctgccaacctcacctggctcaatggttgcatcaaccctgtgctctatgcagccatgaaccgccaattccgccaagcatatggctccattttaaaaagagggccccggagtttccataggctccattagaactgtgaccctagtcaccagaattcaggactgtctcctccaggaccaaagtggccaggtaataggagaataggtgaaataacacatgtgggcattttcacaacaatctctccccagcctcccaaatcaagtctctccatcacttgatcaatgtttcagccctagactgcccaaggagtattattaattattaataaatgaattctgtgcttttaaaaaaaaa

SEQ ID NO: 233447 - DNA, 214 bp, Homo sapiens
ttttttaaaggttgacttattcttatagcccacagatctgaagtaacaaatcaggtgtgggcagttcatatctgccagaggttctcattcatctttttttttcttttcgtgggatggtttttttggtgagttgtttagtaccagtcttcccatttatgacctctaacaagaaacacagaaaagtattattgccaaagactaatactagttttcc

SEQ ID NO: 233448 - DNA, 290 bp, Homo sapiens
acttctcattcaacagtgaaattttgtctatcagctagtaggtatgaagttattttttagatttggagttatacaacagaattcctaactttgttttgatatgtagataagccctgatccagcttattttttctttgctaagtaactgaaactcttcacagcatgagttcaaactgacaaatttcaatttacagcaaattgaagtagaaacttaaagctcaaaaccctctaagccaagcatttttctgggcattgatactcctcttgggcatccccttcagtggtcttgc

SEQ ID NO: 233449 - DNA, 434 bp, Homo sapiens
atagcaccattcctattccaggaggcccaagccgactttctgaataaggttttacaggtgagcccaacagacatatttttctcttctaccaagagcttgtcctctcagttttgtatttctggagaaacaagactctctccctagtgaatgatgccagcaatggcctcaatcatttccattctcagcgcacaaatgcatgggtcacctgtgcagcatgaacacatcttagcatgaaaaccgttgcatgggattcaaacaacaggaactgctaaacatagaaacttgaatgttatttaatctttattttagataacagaggacagaaaacggtacatagatgaattaattcaaatagtttaactttcaaaaattccattctgaatgtagaatttctgaattaagttgacatttccaaaaccagttcagttattcat

SEQ ID NO: 233450 - DNA, 483 bp, Homo sapiens
ctattgcaacaggatttgacatgattagatataatgtttgttcttgacaactatttcttttttacctttggacttttgaaaacttgcattgtaatgtttttagaagaaacagatcaacacagaattccctttggttttataaaagagaaattccatcatgtaaactattttgctgccatctctagaaatgattagaatgattagagaaattcaagagttatatggtatggagcagccacaacggttatttggacaatttgaaattgataacaaaatattttaaaagaatgttcttagtatttaggcttcatagatatctctcttaatatctgtaaaaataaccatacaactgccttggttgtaaaccttagtagtaaagtgtttagatttctaccatgagatgtatgtttattaatcaattttgtgcatgactaaattgtattatagaagttttgaatgaggttaaaatacaatgtttaaaaa

SEQ ID NO: 233451 - DNA, 444 bp, Homo sapiens
gccttgaggcttcttcctacccacccaccgccatcctccgtccagttccataatgacagcgaggaggcagaaaccctaaatcctgaaacattttgagtggaacccagcacgcaggaacctgcgagattcttccgtttcgtcgaggtccgcatcgattgtattgacctccccgtgggccagcttgtctccttcatcgatcagccgaacgaagtctaggacagaactgtagaccaaaggaaatcgcaggcgtctttgcaaagctggtgggaagtaacccagcggctgctggaaaacgaatgggtgacctaagccggttccaccccctcccagggcgtcggcaaaaggagcttctcaccccactgcctcttattcgatcactaattcattttttagtttggttctgtttttaaaacaaaaattaaagaaaaaatagtttatttggtc

SEQ ID NO: 233452 - DNA, 325 bp, Homo sapiens
tcagggactagcatcctgactgtgctaacgcagtgtgatgtatttctaggaggcggggcaggcaggaagagatagctttctagaatatcaatttgtggtgagggctaaagataatgaggtcaggactcatgggggtcaccaaacaaagcctgagttcaaataactgcccacctttgggtgttctgagtttttagacttctttcctttaaattgtatttaccttccaatgaaagcaatgtgaaagggtccccattacacattctttttttttttttttttttttttatgagacagcgtctcactctgtcgcccaggctggagtgca

SEQ ID NO: 233453 - DNA, 384 bp, Homo sapiens
gtaaatcttaccagaaatgaggatgactggcttacaacgttagatactctaagttgccaataatttgtacagagcctgtgattgcaaaaccacaaacatttcacaatactggaaacctctaattaaccataataaatgacaggatgggtttgttttaaatacatggttaataatgcttactgctttaagaccataaactgtgtgattctctatggaggtgacagaggtaggctgcaaatggttttgcaaagtacgtttctacctctgcatgttaagtctgacccagaacattctactaatattggatcagcctctcatctgacgtaatttgcctgtgggaattgtatcggctgttaaactagctcctcttagtagctgtttgaa

SEQ ID NO: 233454 - DNA, 482 bp, Homo sapiens
ttagagatcgacaaacctagctccttatgttattgataagaaaactgaagtctaaagaatctaagtgattttgcccaaagtcacgtatctgattagtggcagtgttagacatagagtctcaatttaatccactctgcttcctctctgattctatttgcctgtggcccactcgacctccatcagtggtgttataatggcacaacgtaattcccaaatgccctcatactttgggatatatatgaagacttggcttaatcaactctaaaataatcagtaagttgagtcactaaatgaaaatacattggatcaacagggtgacttgagccatttgcaggtctaaatgctatttgatgaaaatttttaactttttgaaatggttatgctggtactattataaacatcttacattactgagccccaatgacatcaattgatagtcaccgtgttggtacttttattacatataaaactaggcacctaaa

SEQ ID NO: 233455 - DNA, 318 bp, Homo sapiens
catagggtctctctttcacaactactcaattctgccattgtagagtgtcagtagccatagacgatacataaacaaatggtcatggctatgttccaataaaattttatttacaaaaactgatgtcaggtcagatttggtctcttagctcatagtttgggaccctgctctagacaactctgcttctagccaaagctgccatctgattgcaattgcatgagagaccttaagcaagaccagtagaaaactgccttgttaagtctaatcagcccaatggatggtgggaaaaaataaaatggctgctttttaaattccattcaa

SEQ ID NO: 233456 - DNA, 149 bp, Homo sapiens
taaagatgaaggaaactaccatgagctcagaggatataaggaaatgaaatgaaagaaaattagattcagtggaactaagagaaacatagatgtaatcaacccatgtgcatctagtcagaggccaacttctctctagcaaaagtccccca

SEQ ID NO: 233457 - DNA, 503 bp, Homo sapiens
agtgtttcctgtggtaataagtttcttttttacggaagtgacattttctatctgagttaaataaaaggaatttcaccgtattaggttttattttggtttatttatttttttttactttttattatgaaaattatcaagcatatagaaaagtagaaacaatagtgtatcaactcccatatacctgtcatctagatctaacaattattatagttttccacatttgcttcatctattttcttatagtattttcagtatattagacattttaaatctaattttttaattttaatatttgtctctgcagtcatatctttataacacttaacgtaattagcaataattctctaatatgtgatattcatttcatattcagattttcccggatgttccgtaaaggtcttttacatgtggtttctctgaagcagagtacaagcaagagtacacattgcatttagttgttctctctcttaagtcttttttaatgtaaaactgcgtccaccttc

SEQ ID NO: 233458 - DNA, 558 bp, Homo sapiens
cagatgaggggaagaagtaaagatggaggctgtgggtccccatgtggcggggccctctgtactcctgccccgccgtggcggataatgggaaaccgcaaaggaacacactgtggccgtttcttcgggatggacccgcgcgtcctcactgcctttctctcgggatcctggggctcaagtgaactgatgccatccttggttcatcgtttgttcatgtaaggctccctcgtattttcatccgttcattttaataacgtgatgagcacttgtgaacctaccccactccaagaagtggacagcagagaaagcaatcaacatgcttctttctctcccattcccaccctgcctggcaacctccatctggagttttctccttctcctttttcttaaaagttttaacacatatacacacacttgctgaaaaacacacggcttgttgtgcttgtttccaagctgtatgggacggagtcacacagagtcttcgggacttgtcatggatccgatgatccactaattctagaacggctaataataataagcggccgctctagaagatccaag

SEQ ID NO: 233459 - DNA, 376 bp, Homo sapiens
ccagcaggcggcgcggggagagcccggctcggcacgtggtcagctccaagtcagccctgaaatgtccattactcacaaagaaaaggaaaatgctcatttgaaagaaattcttctctttgtcaatgctgaggcattctctcagccccagccccacagtgctccagtgtgtgaagggcaacagctgacggggaagttcagcacatctgtgctgaccagggctggaggcgatgccagtccgtgcagctgggaacgcctcctctgctatggctggagccactgctgaagggactccacctggcacctatgccaccaatggcccctgaacgggtatctaggcccacccttaataaagatgagctgctcataaaaaaaatca

SEQ ID NO: 233460 - DNA, 432 bp, Homo sapiens
tcgcctgcatcttcggagagaggtgctgagcccttcctcatggatacggggtcccgggaggcagccttcaccagggacctgcccaggaaaccagcagatgcccaggtcagccctgaaatgtccattactcacaaagaaaaggaaaatgctcatttgaaagaaattcttctctttgtcaatgctgaggcattctctcagccccagccccacagtgctccagtgtgtgaagggcaacagctgacggggaagttcagcacatctgtgctgaccagggctggaggcgatgccagtccgtgcagctgggaacgcctcctctgctatggctggagccactgctgaagggactccacctggcacctatgccaccaatggcccctgaacgggtatctaggcccacccttaataaagatgagctgctcataaaaaaaatca

SEQ ID NO: 233461 - DNA, 538 bp, Homo sapiens
cggcgcccccggacttcctgcaggtgccctacgaccccgcgctgggctcaccctccaggctcttccacccgtggaccgccgacatgccggcgcactcgccaggcgcactgccgcccccgcatcccagcttggggctgacgccgcagaagacgcacctgcagccgtccttcggggctgcgcacgagcttccccttacaccccccgccgacccctcgtacccctacgagttctcgccggtcaagatgctgccctcgagcatggcggctctgcccgccagctgcgcgcccgcctacgtgccctacgcggcgcaggccgcgctgcctccaggctactccaacctgctgcctccgccgccgccaccgcccccgccgcccacctgccgccagttgtcacccaacccggcccccgacgacctcccgtggtggagcatcccgcaggcgggcgccgggccgggggcctccggggttccgggaagcggcctctccggcgcctgtgccggggccccccacgcgccccgcttccccgcctctgcggccgc

SEQ ID NO: 233462 - DNA, 822 bp, Homo sapiens
gatcatgccattgcactccagcctgggtgacaagagtgaaagtctgtctcaaaaaaataaaaataaatatatatatatatatatttttttaatttttattttttagagacagggtcttactgtgccacccaagctagaatgcagtggcacaatcttgtctcactacccaatctcaaactcctgggctcaagtgatcttctccactcagcctcatgagtagctgggactacaggcatactccaccgcacctgggttttttgttttgtgttttgtacagacagggtctcactatgtttgtgttccctggatggtcttaaactcttggcctcaagcgatccttctgtgtcagcctcccaaagtgttgggattacaggcgtgagccaccacgtccagcctgtgtgtgtgtactaatagctacctagataacaatacttaacagcagttacctctagattacctcagcaccattgacaatcagcccgaagactttgtggtggggctgtcctgtgtgttgtagggtgttagcagtatccctgggtgcagtagtgtaacaatcaaaaatgtgtttggtagcataaaagtacaactatagttaacaacaatttattgtatattttagagtaactaacatagtgaaattagaatgttcctaacacacaaaaaagatacatacctgagggtatgaatatctgtcaccctgatttgattattatttattatatgtttatatcaaaatatcacatgtaccctgtaagtatgtataaatgttatgtataatttagatttattttaattttaataaaaaataaatatttaaaaatg

SEQ ID NO: 233463 - DNA, 416 bp, Homo sapiens
caaaatggattttttaaaaatagaaccagggcctccagtcttcctagccggggaaagagtcggatctgctgggattcttctgtcttggaatacaccacctaatccaaatggaaggattatatcttacattgtcaaatataaggaagtttgtccgtggatgcaaacagtatatacacaagtcagatcaaagccagacagtctggaagttcttcttactaatcttaatcctggaacaacatatgaaattaaggtaattattttgtgtatgactacttagtgttcaaacatttcattcattttaaaagtgtgggaggtttttctcaccttgtcaagcctttacagctgaatacagtcagtgactgacaacgttcacagtcatggcctcacacccacctgagattttaaaacttggtaaa

SEQ ID NO: 233464 - DNA, 268 bp, Homo sapiens
ttcctcctttttcctgtcttcctccctccctttagcctctctcacacaccctttctcactccctgtctcctctctccctctccccgctacctcctccctcctctctctctctctctctctgtctttcacatcacagtaaattttccttgttggaacttttccttttatcttctttatcaattaacattcatgtgttccagcatttagagcaatctgttctctttctgtccttagagcagtaattattttctgactcctaatgtcaaag

SEQ ID NO: 233465 - DNA, 441 bp, Homo sapiens
agcccggtgaaggcacctaggagtagggcctgcttaccctggaggagtcgggagcagcttccacagcaaggaggcttctaagaaatgatctccagtgcccaggctctgatgcccaacagacctgaagttacatcccaacctgaacaggcggcttttgctctccaggccttcattgccccacagtgggaacaataataatatgcaccttctaggtacccaaaagcacaagagacagtgaacggaaagtgcttggaagccccgtgcccaggtggtgctggccccagctgaactgcggggatagatgttgagtgtccaggttctagcatcatagaacagaatccggcctgttgggaaatcctgcctacaagtatacctccattaattagtgtcttctgtgaacatttttattaaaaaaagaagaaaagcttctcaacccaagcc

SEQ ID NO: 233466 - DNA, 476 bp, Homo sapiens
aagaactggaggaccaacattagcaacaggacctcccatttggcattttgttttcagatgtgcctagaagaaggagattacagcttcttggactgttgaagcctgggttcttcttgagttgtgaagatatcacctaaatcctatccacattttgtgcaccaggtttgtggacgcctaccaccattcattcattgcagtggctcagagaagatgaaaacaggactctttggggccaatgaagatccccaacagagctcagatgaccagagtggactggcttctaccctaaatacatacaacaatacttcccactctgaccttgctcactttatacaacaccacacaactagagagtggcagagctgctgtgggaacccaaatgccatctgactccaaagccttactctcaaccaccaccctgctgcctcctattctttcctgaaatcttcagtatagtcattattatgaagtaaaaa

SEQ ID NO: 233467 - DNA, 472 bp, Homo sapiens
atttgaaggaacgtaatcgtccttgcaaagtggaaaaatgacgggttaccagaggctgtcagaggcggctcgggtgagctgtcagcccatgcacaagtgactttttaattgaaatcggtttctgttctgcttcgctgggtccctgctctcttttagaaggctcacatccttcggcgaggacagacacagacaccacccagggaggcggtgtcaggaataaagtgagcttgtctcagcccacaaacagccgcgaatgtcagggcatgggagaataattagctattccaggagatagatttgttttcatttctaaccccaaagctaattgtaagaaatgaaatctgtgtttgtttttctttaggtatgtttgaatttacaagtcttaagtctttgggaactaggtcaactagaccttgcatatgcttacaccctggatgaataaagtctttatttacacctccacctctctcca

SEQ ID NO: 233468 - DNA, 468 bp, Homo sapiens
aaaagatgtccaagatagcaccatctagtctggtagttaagaacaaggctaaatctgggagcatttggtttataatttcatatgtcccccatcttgctcactggttttggccataataccttttgcaccgttgtatttgctgaccctttgcttttcttatcctacctcacctgcataaaggttacagctgtacacttgtagaattcctgattcaagagacttaagggctgaaagaatcttagagtcaggttcattcaaagcttatgtttgacagatgagaacattgaaattcagacttaaagctgacagtagtcattcaccaactagctttaaactagtaaacttctgattatgacatcaacttttgtatatctgaaattagaaataccattcaattccctaataccgcaagaaaatataaaaagtaatcatctcaaatatgatcattgtaagtcatctaaatgaata

SEQ ID NO: 233469 - DNA, 512 bp, Homo sapiens
tcaggtgaggtgttcaattggagatggagggatgggttcctacattcaggcaagtctgttataaagctgtataaaactacttgaaatagatactatcagataattgaggacaaaaggtctgccttatttcagctggcaaaaatggctttttagcaatttcacctagtgtttattaagcttgagaagaaaagctaaggatcttctggataaatcctgagatcatgggatcagttcagaaaacaagttctcttaaagggagaaaggaataaaaaatatgaatgtaataatatttaaactaacatcatttagggaatgatatgctgcatatatgtgattccatgtaattgaaaatacataaatactaaaacattgtattcattttcgacagaccctctttctaaagcgtttgttgtgttgtattacacgttaacactcatatttgtatgtagcaaatatttatttgataactgttacttgctggacactgagattaaacataatttaaccttctc

SEQ ID NO: 233470 - DNA, 218 bp, Homo sapiens
  misc_feature (210)..(210): n is a, c, g, or t
ggacaggcggggaggcaagaggctgagattctctatcagtatggcctgaacgctgggactctgagacctgggagaccaggtcttccctaacaactacactgcagtggaaagcctccctgaacttttttttttttttgagacggagtcttgctcttgttgcagtgagccgagatggcaccactgcactccagcctgggcaaaggagcaagnctgtctca

SEQ ID NO: 233471 - DNA, 433 bp, Homo sapiens
atgatgcatgcatcattctagaaacatccctttaagatcaggaataagacaagatgtccagtattacaattaccactgttgattaacattcttttagacgcataggccagtgtaactacaaaagataaagataagagatgaggaaaactgccaggtgcggtggctcatgcctgtaatcccaacactttgggagaccaaggcaggaggattgcttgagctcaggagttcgagaccagcctgggcaacatggtaagacctcgtctctacaaaaaatacaaaaattagtcaggcgtggttgcacgcgcctgtggtcccagttatttgggagtccaaggtaagaggattgcttgagcctaggaggtggaggttgcagtgagctgagatcacgcaactgctctccagcctaggcaactgagcgagactgtctcaaaaa

SEQ ID NO: 233472 - DNA, 476 bp, Homo sapiens
cagtttggttgatatttaaggtattcaatgggactttgtaacttcctcactatctgcgggtgtctggtattattgattgttggatcatcttcctcaagaatcagctcaaaaaggtttctggtttccccttcctacctcttcctgatccacacactttatttatttattttttgagacagatcaagactccgtctcaaaaaaaaagtacaattttgcccgctgaccattgttgggaatgatgcatctttctttccgctggacagcctggtggtcatgccctccagatggcagttgagtcctgagggggccaagtaggggattcaaactaatgctggtttaggcaccagaatccccttgttggaccgacatggtgctagatcaggagttggcacactatagcctgtgggatacatctggcctgtgacctgtttctgtgtggtctataaactaacaaagcttttcatatattttaaaga

SEQ ID NO: 233473 - DNA, 313 bp, Homo sapiens
gggtctcattcctgtgtcttcaagcttttccatggagtggcaaaatgattcaaatccagaaaggaagggagtgaagttattaggagctaactaaagttaaaaaaaaaaaaaaaaaaaaaaaaaggaagtgttttcttattgccttagactgcctgagctttcctggagaaccatcagcaccagtttcctttctgtggactgagagccactcagtagtagacacgaacagggaatgaacggcaatgaaggtacattttgctgatcaaataaaggatagatgctcactggatgtctgagaactttgagagaccga

SEQ ID NO: 233474 - DNA, 554 bp, Homo sapiens
tagatgttggggaaagaaacagaaacctaagaacagcaatcattaacacatgactgtcagccatggcaaggtaaggggtcaaaaataactcagcatgacagagagctagtaacaggaggtaggtcttagggacattacatcaaactttgtactccaataatagagattatactttcttcttaaacatacttgaaacattcgttaaaaaaaaaaaacaaacaaaaaactagcttgtattagggcacaaagaaaacctcagtaagttacatgaaatagaaatggcacagacagcagacagcagtctatgctaacaatgcaagaccagaaaataatgaactttaaccaaaggctatttccttggtaatttatatcattttagaaacacctaaggggaactggttcatgatgtatatctatcaatatagttctagatatctccctaacaagtccctaaattggtaaggaaccccatgagaccagacatcgagagagtgacatgacagaacgacacattcctgcagtgacccgcctcttccaacctcacgcacacgccc

SEQ ID NO: 233475 - DNA, 603 bp, Homo sapiens
ccttctggtctagacgcctctagtccctagagagtggcttaagcgaatcaaccataaggcctgtgtgtagggagctgccagggagcaagtttagggccacagtcctggactgctctcagttttctgtgcatttcacccctttgaaagtttctccctatatccctgtgcacgtgcctttctcttgatgggcacacacagtgagtaccagtgaagaagggcaagccaatgggctcctttcccagtgacactgacacctagccttgcaggtaaggaaacgacgtgctatgagaacattcgacctggaacatgcagtggggcctccctccttctcacggatcccagagaaccatctgtaggggaggtacagggggttgagttgtgttcccccgaaattcatgtccacctgaaacccctgaatgtgaccttatttggaatgatgacagagatgaggtcatgctggattagattgggcctgatttccatgactgggttcttgtaagaagaggagaggatgcagacacagggagaaagccaggtgatgacagaggcagaggctggagccacgtgtctgcaagccaaggaacctcaccaattgtggcagcc

SEQ ID NO: 233476 - DNA, 426 bp, Homo sapiens
acatgatatgagcgcaaaacagaaggggttgagtgacagaaggtaacatgatttgggagagagatgcaagattgggtatttgtggtcagagaatagtgatccacttgaattaaaggattcattaaaatgtttgtagcaggctcaatcatctcaacctttgataattttatcacatacatatgggattatatttagcctgaccaatttcaaagactttatttatgtttttgagacagagtcttgctttgttgctcagggtagattgtaacggatccatcacagctcactgcagccttgacctcccagggtcaagtgatccttccacctcagcctcccaagtagctgagactacaggcttggtggcacgctgagatcctgccactgcactctagcctgggctacagagtgagactccatctcaagaaa

SEQ ID NO: 233477 - DNA, 556 bp, Homo sapiens
tgtttttaagtattgagaaaaaccactttcatccactgcgtcacttttatggaggctacaataatcccgaatgatgattcatgtgggatgtaagggccacatcagtcttttcatcagcaccagcatcactgttattattttaagtcagggaaaactcagcaaaatgttcttgatggagggccacgccaccagggaactaactataggaaatttacacatttcagaagacatgctcctcagctcaagcacagacttctctagtgataacccctgttttcaaaactacctgtccaggccaggtgtggtggctctcacctgtaatcccagcattttgggaggccaagacaggaggattgcttgaggctaagagttcgagaccagcctgggcaatgtaacaagacacctccccgcccatctctacaaaaagaaaaaaattagccagacatggtggtgcagacccgttgtcctagctactcaggaggatagcatgagcccagaagtgtgaggctacaatgagtcatgatggtgcctgggcaacagagtgggaccctatctc

SEQ ID NO: 233478 - DNA, 649 bp, Homo sapiens
ccatgttggtcaggcaggtcttgaactcccgatctcaggtgatccacctccttggcacccccaaagtgctgggattacaggcatgagccaccgtgcccggcctactgagatattttaattgcctcaaatgatagcaggagttggagtggacagaaaggctaagtgcaaaaatcatcagtgtggggatataatctataggacaatgaatgtcaatgacctttaagacaatagcaagagtagaggtattgaggtcagaacaagggattttacaagagtgctgtattaatggttttggaagttaagatgacactgctcacaccctctttcacatggatttttggaagaaagaacacttaggaagactgcaagggaaattgagtcctcagggttttaactctcattgaatatcctctggtaaggactccagttagaagtggtcaactcagacctccttgaggggtctgagttactattaggaagaagcagaggtctggattcattttatccacctgagcccagtacacaatatgtaagatttttccatggttcttacaacaaagccgttttctttgaaaaccttgggaatccttaataaacaggaccccaactaattgtagacctgagaagccattaaaaaccagaatctgat

SEQ ID NO: 233479 - DNA, 476 bp, Homo sapiens
acaaagctgaggttgttggcattgtcagctccctctttgggatgctcctcagcttcccaaaagactcattataagtgccttgagagttcagctcaggaacttaacacacattcgaaccggcatttcggccactttgggggaatttttggtattatctcaactctactgctcttcatatgaaatgcagatgcccctgaagctccagagctgattccgtaggagtgtttgaaatagtagctcacatagtagattatcaaaactaaacaaaataatttgcttctgtatgtctctcaaaaataggttggatttcaatgtagtacttctcaaactattatattttaaggactgacctgatatttgaattttactcatcatttgacttttctagatggaatatgttgagggcaaagaccgtatctcacacatatttatatagtacctggcacataatactgtcaataaatgcttattgaata

SEQ ID NO: 233480 - DNA, 302 bp, Homo sapiens
tctgtatgttgctatcataatgaattcatatcatacatttttcaaaacccatagaatgtataggaccaaggataaaccctaatataaactatggaccttgggtgacaatgtaggttcattgattgtaacaaatgtaccactctgctgggggaacgttgatagtaagggagtgcgtatgtgtgtgtataggggaggagggaatatatgggaaatctctgtattctctgctcaattttactgtgaacctaaagctgttctggaaaatagtctatttaataaaaaaatatatatttaaaaatata

SEQ ID NO: 233481 - DNA, 464 bp, Homo sapiens
caatgcccctggcctccctcaatacccataaccctagaaaagaggaaagtaattgatccatagattccatccaagttctgctttcaaacacaactccatacacacacacaaagtggtgagcaaattctatctatacacttctataataactgacattcatattttcttctggaaaaatgccctatctgcctttaccactcacatccctgaggtatcctatgcacactgcctcaccaaacgacacctctcccttccaaggccagctatgatttctctcttaacgcactcttcagaggcctttccaggcctgttattctaatcaacttggtagttcctactactttcctacctttagaccctctccaagtccttagtacaagtataaaaatcctgtatggttgccgctgtgtctctatcatccatgtgtacaacaggaactatcataaccctggagtgagaaggaa

SEQ ID NO: 233482 - DNA, 521 bp, Homo sapiens
gctgtgtcaaccgaggctggactgcagtggtgcaatcttggctcactgcagcctctgccacccaggttcaaacgattttcctgtctcagtctccctagaattataggcacactccaccagaatcttggctcactgcagcctctgcctcccaggttcaagtgattttcctgtctcagcctcccaagtagctagaactataggcacactccaccacacccagcttatttttgtatttttagtagagatgaggtttgcctcatctctgttcaaggcgtgagccaccacgactggccaatataaaaacatttttctaaagtactggactgataaggtattttattaagtgagtgagttttcttcctaaacgtttttgttctatctggtcttgtgactttatgtttataaaataggaaacaaaatgcgtacctctgttgttacaaaaattaccgcggcgtcttttatatttcacatgcagtttttcacatggtagaaatcgcacagtttcccaaaagctggcaggg

SEQ ID NO: 233483 - DNA, 530 bp, Homo sapiens
ttttttttttgagacggagtctggctctgtcgcccaggctggagtgcagtggcgcgatctcggctcactacaagctccacctcccaggttcccaccattctcctgcctcagcctcccgagtagctgggactaccggtgccctccaccacgcccggctaatttttttgtattttttttagtggagatggggtttcaccttgttagccaggatggtgtcgatctcctgacctcgtgatccgcccgcctcggcctcccaaagtgctgggattccaggcgtgagccaccgcgcccggccgaaactatcagtgcttttaagtcacaaagctacccttggagaccggctgtgaggaaaaatccttcctaaaggtatccttaggctcgttcccacaggcctgtgctctgtgcccgccaagctcttctccttgtctccatgcatggcccctggcctcacatacaccccaatttttctcacctccagatctccagtagtttgaatttcttcccctaaaacacccttctgtcgtcttctc

SEQ ID NO: 233484 - DNA, 341 bp, Homo sapiens
gggtgacagagtgagaccttgtctcaaaaaacaaaaataaaaacaattaataaagtaagcagacagaagttatgaagcttaaaatctttaaacaaagattttgcctctaaaaatacatccaattttaaataaacctgttaagtaaacatcaagaatgtttctaaaccaggaatatgtcataatacaatagacatcttaacttcacttatcaaccaggtcaggatggataatttaaaaacaaacaaacaaacaaacaaacagaaacaagaagcaaagagaccagttaaaaggctattgtattatatttagtcatgagattaaaaaatggtggtgggaaaaaa

SEQ ID NO: 233485 - DNA, 179 bp, Homo sapiens
ctaaaacttcttttctcctctgtgtgaaacactttcttcctctttttcaatctcccctcaagcctattcttgttgtccttggccagtgcggtgaagcagttccttgcattgtgtgtaggacctcgccaaggacagagagagacacagcgtgggttggtgttgcattgcattagaggtgg

SEQ ID NO: 233486 - DNA, 718 bp, Homo sapiens
ccctctctctgcccgcaggtcggctgcctccaatcctgaggtcatcactcatcaagaggggataatcccagggacagcaggatctgcttcgttacttggatttaggagccagaaacccatcaggcaactaaacagtaacaatgacccgccattaaacacactgagagaagagcatgatgaagagtttgtacaagaagaagccaggagcacttgctgacaatgcttacagagacgcaggcttctatgagctctgcctgttgaactgcagtaaaaatagatctccttccccagagaggcttggatgtgggcacaatatcagttcagacgatggtcaatgcatgtacttaatagagtgaaaagactttggactgtgaagtcagattacctgggtctgaattgttattcttctacttctttgtagtatgctttcaccacattaaaaattgtctgagcctcaatttttttatctgcaaaatggagctaatacctacacaggggcttttaagagaatcaaatgcaacaatgtttgaaaagcaacatactcccctttatggaaaaagagcctgtaaaggaaccaatacaatggctgggcgtggtgactcacacctgtaatcctagcactttgggaggccgaggtgggtggattgcctgagctcaggagttcgagaccagcctgggcaacatggtgaaaccccgactctactaaaatacaaaagat

SEQ ID NO: 233487 - DNA, 268 bp, Homo sapiens
gcttgaaattagctttgatttttaaacttttacacttaacagcaaaatcaaccaaccaggaatattttttctgcatcttccatgaatttttcttctcttggtaatgaaaacaaagtcataggacagagaaacaaaggatttggagggcgcacaacaattaatttgaggtttatttcatcaaggaagaagtagttcaagttcaactctcaggaacttgtgataaatctatgttcccataaagaaggattgcattcacaatattgcactc

SEQ ID NO: 233488 - DNA, 327 bp, Homo sapiens
acatgggtcttttgcttttctaaggggttgcagaggaaaatatgattgaggactttggttatggcatcagtaaaggatctacaggggccttcttcagctttctgtcttctgtgcctccacccctgtccccatcaccaaaaacaaactcaacttgaatcgtccctgactctgattaatgtttgagaattcctatagtgactgaactatagttaagagtaactataatttatcgtctaaacttggccatttttgagagtgaagggaagtctggacaacaggtgtagaaagggcaaaccaggacttgcaattacccttgacatattttag

SEQ ID NO: 233489 - DNA, 766 bp, Homo sapiens
  misc_feature (664)..(664): n is a, c, g, or t
  misc_feature (686)..(686): n is a, c, g, or t
  misc_feature (701)..(701): n is a, c, g, or t
  misc_feature (707)..(707): n is a, c, g, or t
gttctggtctttctgggccagatttttatattggttttcagtaaatatctatctataatatttcattatagagtccagtagcttaatactgacactgacttgatacagcatgaagtttctagtgccacacacagtatttagaaaacctttaggcgtgaatgactcatgtgggatatatgtaaacataatgtttattttatctcacaaatgcatgtgaaatgtataattacatcttaggaatccaaaatggtctgcagagagtgagcggaggcaccagatcaatgttggttctttgcactggtgagattctgcctgatgaatattaaagatatcctgctttctgagaactctatcaccagatggcagttgggatatgggaggaactaaagcatcctgttttgtatctgtccagatcattatttctgtctcttgttttttcttcctggttcaggatacttttttaaggggttgagaattgaagattttccaaaagcgttcatgaatttagagcattccacccaatataataaaacctgttaagaatgtcagtctttgttcaaacatctgtttggtccatctccagtcattaaaatcagtgctgctgcatgacactcctaactcctgacttttaaatccaagtcataaagttgactttcagcacaanagatacttataaacaaataaanatttttaatttcccncctacngatgtaagctttgggactcctttgaccgggtgccattagacatcctgattatggtgaca

SEQ ID NO: 233490 - DNA, 162 bp, Homo sapiens
gaaatttataatttatttattatacaatccagtatcatttttacaaatatatccacatttcttcctcttttactctcatgcttcaaatttagtcaaacgaaagttatgcagactgtacatcaagtaaatgttccttaaatacaattccttcccactactgcc

SEQ ID NO: 233491 - DNA, 473 bp, Homo sapiens
cgaaacatacaaaagcttatcctggacttctggagatttcagaggtcacttgccagatagggttcatatgtatgaaagataaatccaccctgttttcctgtacattctaacactttgttttttagggctaagacagtatcttcccaactcccacaaatgcttcattgcatacaaacctcaataaccattaaccaaccagtttacttgggcaaagcctaaggctaaggaagacaaggtcatctgatgatcattcaataaccttagtactacaagacattacaagaccacgcattctgcctgctgccctcccaccgagtcaaccattccacaaatatacttctttgccatctaaggaaaaggttaggagggatacttgatgaactacggtactccagaagtactgtagttctaatgaagtacttctaaagaacagaagacttggaaggctaatgttccccagtagcatcaagggt

SEQ ID NO: 233492 - DNA, 344 bp, Homo sapiens
ccatgcagaggcacctttggtgatggtgaacttgagctccttgctatgagtggcaggtgagggacccctggagaactggcatttctcacctctgcacttgactctgcccctctcgcaactttgagggatgaatacgtcactttttccattccagtattggtgggtctctaacatttccagagaaggaagttctctagttatccccatgttccagggtctcctggcacagggcccctgaccctaggatgaggacttcccagtaagctgggcttggggcctccccacccagcttggggagccatcaggcctgcagccccagccagaccacccttgccacctctggg

SEQ ID NO: 233493 - DNA, 323 bp, Homo sapiens
tgagtaagagttttccaagtggcaaaaagagaggacattcaaaacacaaagacaaaaggtgcaaaggccatgatatgcccttgtgccttctctgctttctcctcagacaagcagctgggacagacacaaccaccccagcccatggccagaatgtaggacccaatcaacagagggagccagagggagggaggctgtctctgggctcctcttcagcctgggagagggagaaactgatatgaaggcttaaaaggagaaatatgccaacataattgagaagcattagttaaatcaagcctgctttgcagtttagcctgcattcttct

SEQ ID NO: 233494 - DNA, 1709 bp, Homo sapiens
  misc_feature (1111)..(1111): n is a, c, g, or t
gaaagaaaaagaaaaaagaaagagagattccaaccagcctttcttccctggttccctgacagctcagagttaaccattgtgcccctaagcctaacagcagctggagctgatagcctttcacagggcctgccagcagccttggagaaaccacgagcccatttaacaggcaggacgctgaggctctgataacaagtgcggtttcggacaagagcgggagaggagatggagaaacagaccctcgtgcgtggctggtggggatggaacaaggcccagcctggcagcttctcacatggtaaacacggaattaccatagggcccagcaatcccactcctggggatagaccccacagaactgacagcagggactgaaagaggtgtttgcacacacaagtgcacagcggcatgattcccaacagccccagggtggaagccaccccaggcgcccatcagtggataaacacagcatggtccaaccagacagtggaatattacgcagccatgaaaaggaagggaatccagacacgggctacagcgtggatgaaccttgaggacctcacgctcagtgagaggatccagacacaaaaggacgtatcctgtgtgatcccactcctgggaagtccctagagtcgtcagattcacagagacaggaaataggatgagtgagtgccaggggctggggagggggacagggagtgagtgtttcatggggacagagtttcagtttgggaagaggagaaagttctggagaggatggtggtgatggcggcacaacattgtagtgagaaaagagagagggagaggaagggctgaaagccccaagccccatcttccggctccagcgtcatatgagatgcgtgttcccgcggcctcaccgttgagtttgaaggcgtgatgtcagaatgcaggcccagcagggacaccccgggagatggtgggggtggctggcagggcgggtttcacctggactgcaccagcccaggtgtgacgggctctgggccagacccaggcacccaaggtgagaaggcagcatctctggtctcgggatacccaggcctccccgaggcggcagaactccggccgtacctcgcagcagctggtccgtggcacccanggtatgtcccattcatgcagtgcctttccagcctcttccagaaagaatttaattcacccgttcgcatatgaccacgggagaatcgcttgaacctgggagacggaggttgcagtgagccatgatcgcaccactgcactccagcctaggcgacagggcaagactctgtctcaaaacaaaaaaaaaaaaaaaaaaaggagaaatttccagaacaggcagatccacagagaatatgcatggatgtgtggttggaggagacgggggtgactgctaatgcggacggggtttccatttaaggcgatgaaacagttctggaattcagccagcacagtggctcacacctgtaatctcagcaacctgggagtccgaggtggggggattgcttgagaccaggagttcaagaccagcctgggcaatatagtgagaccccatctctagaagaaaagaattttaagttagccgtgcatgctggttcatgtctgcagccccagctactctggaggctgagatgggaggatcgcttgagcccaggaattcaaggcttcaccgagataaggaggtgccactgtagtccggcctgggcaacagatcgttaactctt

SEQ ID NO: 233495 - DNA, 337 bp, Homo sapiens
aagaatgaatgtttccatgttttacatccacagaatttctggtttttcctgttggagcccaaggagcaagggcagaatgaggaacatgatgtttcttaccgacagttactcatgacgtctccatccaggactgaggggggcatccttctccatctaggactgggggcatccttctccatccagtattgggggtcttcctcctccatccaggacttgggggtcatcctcctccatccaggacctgaggggtgtccttttctgcgcttccttggatggcagtctttcccttcatgtttatagtgacttaccattaaatcactgtgccgttttttcctaa

SEQ ID NO: 233496 - DNA, 578 bp, Homo sapiens
tgtatgaatgtgtcaatgcacagagagatctctgaaaagatgttcctggaaatgtcaacaatggttacctctgctggcaggatacaaggtgtttttctttttaatatttttctgggttaattaaaatgttctacatgagtatataccatctttataatccagaacaacaacaacaaaaaaaacagttaattaaaaactgaccctgagattgaatacagaaatggacagtggccaaccacatataaaaatagcacttggacccacagcctgcagccacctgcccaggaaaccaactgcttttctacaataaacaacccaggaagccagcctgttgtaagtcagccttgcaagaaaccagtgacactccagaaagctaaacaataacttctgtaacaattggcccaaatgaccaggacttggttaataaccaaatttccctgatttttgctcctacttccaacttaaggccaattggtaaaagtcaaatatgccccctcaccaatcacacaggatgtccatttctaggtagctcacctgcagcttccccatgatgacagtttccatcagggcatgcctga

SEQ ID NO: 233497 - DNA, 777 bp, Homo sapiens
tcccagctacccgggaggctgaggcaggagaatcacttaaatccaggaggtggaggttgcagtaagctgagattgtgccactgcactccagtctgggtgacagagtgagactacgtcttgaaaaaaaaaaaagagagaaaaaaaagaaagctgaggtgtctggacctgagccgggaaaggtgaggacaggataggccctgcagggccctggaccgtgttaagcagtttggtttttagcctaagagcaatggcatttatgactaagtgtgcaatttacaaaaactcctgtggctacggggttgttttcctgctaagccctgccctgccaagcaagcagaaaggtctcagagtgtgaatccacgagccatggaccgggagggcctcaggccagacaacaagtccctttccacccatccaccttgcgttctgagatggctgagctgtatgtgtcgccgtggctgggctgtgggccccagttgtttggtcatgcattagtctagatgctgctgtgaaagtgtgctgcagatgcggctcacactgacagtcagctgactgcaagagaaggagatcgccctcaataatgcaggagcctcatgaagtctgttggcagcctgaagagtaaatactgaggtttcccagagaagaaacccagcctggaatatcaactcctgcctgagtccccggcttgctggcttgcccttcacattgcagaattgccagcctgcacaattgtgtgggccaagttcttaaaataaatttcttagtatatggctgtgg

SEQ ID NO: 233498 - DNA, 196 bp, Homo sapiens
accaggtgaacacagaaaactatacctggctgaaatgagccacgtaggaaaacacaaaatgcacaacccctcaaacttccaccatctacctcagttcaccaccatgggtgttattaaccacacccaaacacagctgatgctacagtttttcatccaatttcagataacctccttccatgacttcacagtcaagctg

SEQ ID NO: 233499 - DNA, 469 bp, Homo sapiens
tagctctccatcccttgggctcctccaccactctgcctttactcctattgtagcatcctctgcactgagctgcttgccagcctccccgctagatcctcgagggctgagaaagcatctgtgttattcaactctggttgtgcctggcacccaggaagaatttatagaatgaaataagattcatggctgggtatggtggctcaagtctgtaatcccagcactttgggaggccgaggcaggtggatcacctgaggtcaagagttcgagatcagactggccaacatggtgaaaccccatctctactaaaaatacaaaaaaattagctgggtatggtggcatgcacctgtaaccccagctactctggagggtgaggcagaagaatcgcttgaacccgggaggtggaggttgcagtgagcggacatcgtgccactgcactccagcctgggtgacagagggagactccatctcaaaa

SEQ ID NO: 233500 - DNA, 430 bp, Homo sapiens
tcggggactgcagtccttctctcctggatgggttgggggtggggggctgttgagagctttcctcctccttttcttcttcctcctcctcctgtctccctaaccctggaagggggccatccactgaacttcggaaagaggtcaccctccctgaaagggggacttggattgctgcatccagagccaccccctgtggtccctcaatctagccacactcagttgctaaagcagggagaggtttcctagtccggtgttccggccccacgcaaacggagctcaggatgacgccacatgtgtgtttgggtcaaagcgcttttaactgtggctccaagaacagcctgtacagccacttgagtttcccagtaagaaggaatgtacaatagatgagactttactggcaaaacaatttttaaaagtaaagggagaagcagca

SEQ ID NO: 233501 - DNA, 606 bp, Homo sapiens
  misc_feature (243)..(243): n is a, c, g, or t
gggagagatatgagatgtatgaagagaatgaaaggggagtagaaaagtgtgatagatagagaagtgagtaatagggtatagagggtaaaggggaagaaaaagatagaatgtgattaataggaaaggaggggtttaataaaaatgattagaaaggtataaaaataataatataaatttaaaaataagtaaataatataataattaattaaattaaaaatttaaaaaataaataaaaaaatgatntaaaatttaaaaaaaaaaaaaaaaaaaaaaaaaaataaaaaaaaagaaattttcttcctctgcactcccactgccaccacaatttcacagcatcgctgagctaacactctcaagttgtgtccctgctccagggtcatgacagcatttcgaaaatgaagttttgcatatgttaaaagggcgttacaatgcgcttagtaacctgaaagctctagactttcgaaatactatagaagaatggagtgggctttaggcaggcacatagatgtcaggaagccctgtctttaaaattcacacacctctatcttggacactcactaatgggcatatttatttatttatttattatttattttttattttttg

SEQ ID NO: 233502 - DNA, 660 bp, Homo sapiens
tctgtctatggagcagccattcttttattcctttactttcctaataaagttgctttcactttactctgtggactcgacctgaattctattactcttttggggtctggattgggaccctttcctgtaatagaatcatatgcacttagaaggcatgcaatcaaaacttcttgaataaatgcatgataattatttgcaatgaggaccttgagtccttccttatctattttgtgcccccagcgaccagtgtagtgccaggcacatagcagatgctcagtgaatatctaccaaattaattagtgaagacctttgcttcctttgcaattactgctctgaagaaaaaaaaaaatcttgccatcttaaaaaaaagaaagaaaagaaacccatatagcagtgccaaacaaagtactgtggaatggttctcaaaaccatagctccctgatgggataatgtagtttaaatatagcagctatttttccctctagttggtttgttctttgatttttgtggaaagatttcaaaagttctcctccattgccctccttcctcaccccccaaggtgcttagactttaaatggtgaaatacttaaaatgcagagatggcctggcctcctgagcctggtagaagaaagaagagtgattaaatgcaattttaattttaaa

SEQ ID NO: 233503 - DNA, 384 bp, Homo sapiens
gtgtatattaaacacactactaagtaaccagtggttccaaaaataaatgtaaactaaaaggaaaactaaaaaatgttactaaataaatagaaacaaaaatattccaaaaattatgggatgcaatgaaagcagtgcttagagggaaatcactagctataaacatctacattagaaaaggaagaaaaatcttaatagcctaactgtacaccttcagactagaaaaagaagggctaactaaactgaaaacaaggagatggaagaaaataataaagattaaagtagaaataagtgaaatagagaatagaaaaaaaaatcaacaaaaccaaaagttgggattttttttaaagcttaacaaaatggacacatctttagctaaactgatac

SEQ ID NO: 233504 - DNA, 249 bp, Homo sapiens
aaggcacagactttacagtcacttatgtactttagaacttcaccaccactagggtagtcttactgatttcttatctttttgtaatgtcaagcacattttgcagggagtgagcacacaaatctttaaagtgatgtaaattgtcttctatcttctattggtgcatataagtgggtaaatagtcccgtttcctttgtgacccatttccatgctgcttagaatccctttatttcccctctctcttttgcccca

SEQ ID NO: 233505 - DNA, 470 bp, Homo sapiens
ccagaatgtcaccctttgaagaatgagtctttgtactttcctgtatgccacgatgtataatttataggatgtgttatctctgacctgatataaaagcctgcgtgtacaggttgagcagccctaatctgaaaatctgaaattcaaaatgctgcaaaatccaaaaccttttcattgccaacatgatgccccagctggagaattccacacctgactctgtgtgacaggctgcagtcagaacacaggcatacaacacagacattcagtgtccccccaggggaaaaggaaccctccccttcagctcagctatatccttctttttttttttttttaccctgagatcacaccacagcactccagcctgggtgacagagtgagactctgtctcaaaaaaaacaaaaacaacaacaacaaaaagaaagtattaagtaaattagcattcagaattaaatttatgtatagaaaatgttcac

SEQ ID NO: 233506 - DNA, 663 bp, Homo sapiens
aaagcatgcaagtttttaactcaaaatggcatggaatgaggtgggacatgaataaataatttaaacaatatagcccagtctccagtccagcagtttacagtcccgccctctcgctgtcgcagttctatgccttggcctccagagggagctcagcatctcagtcctgaggcctgaaaggggctgccttggatcatggatgcgctgggttttcagtctcagcaggacgaagtgataagtatgaggttgatggagccacgcgtcattgttcagataccatttcttccactttctaactgtatagcacttggcaggctgctcaaggctcaagttctcacctaaaaaatgtagataaaagtgtacctcacagggatagatgaggaataactgacttcatgtaagtgagtacagtgcttacctataaatggaagccagttagaggtgggttttcattgagaggggtgaagaggttaaaggctgttcttgttccatggggcggtctcctgtatttcattcttgtctcaagtaggaatttaaatcgttggaaagcttcttccacggtattgctgcactgctgtgtgcatggacctggcccctcccactccccctgcagccctacttcttgcttcccaaggtctaccaggactcagggctggggtcggaagg

SEQ ID NO: 233507 - DNA, 364 bp, Homo sapiens
cccgcatgtccagtgctcggtaggtgttgtccttccagcgagttgacgtgggagcttggtgacgagagcatcttgctgagctgctcaaagggctctggcccatgtgatccagccacgccttgaacccacaaccaccgggggcgggagggcaggaagagaactcagaatggggaggcatggagtaatgatacccattgctgaagggtgggggcattgcagggacagcctctctgggaatcctctcatctcctacagtcccaggtctcacccttcctcttctcctctgccctgggtctgtatcctcaggccaggtgaggcttcgcttatttgttcacttaacaatgagtttactgagcatttaaaa

SEQ ID NO: 233508 - DNA, 507 bp, Homo sapiens
tgtatctcattgaagctctcattagatggcagggaatgtgtgcttcttattcacagttgtatcctctgtatctagtgcagtgtttggcatagatgagggacacaggaaatgtatttgaataaattaatatttctgaagaaatttgtctagccttataagtgtattgatttaaatatgtattattaaggcagtaattcatattaaggtaaactttgttctgtgttaaacttttataaaaaaattaagatacacaataggctatatattgtggcatttttgcttctctcaattattcacgcctattctgctttgtctaagctttaacagccacagtcttgtggtagcaacccccacaatagctggcataatgcctggaaggaaataagacttcgaatgcttagaaggaaataaaagacttctatagggttgatctggtctggaagaaaataaaatactactaaagggctaatagtgcatttttaaaatctattgatgaaaaaaaaaaca

SEQ ID NO: 233509 - DNA, 1551 bp, Homo sapiens
tcattgtgaactagacagaagctagaagaaacatacaattctaattttaaaaggaaattgtactaaccagagatattctatcccaagtgaaattcaagtaaataaacgaaactactactactgagcacctattaaaggtcagaaattgtactggcactttcatacttaccattgtatttaatttagatcacagctcattaataaaggtattactgcccacaatatacacatagtagtacagaggaacaaaaaagtaacttgtcccactaattagctcaagagctgagactttaacttaggactcccgttatagctttaccactcatctcattgaaaaaataaaaaattaagagaattgtcaagagttagacatattagctagcctgattttcttttgtaataagattagtatacaagtagatattggaagtatggggaacatagtacattacgatttcagcaaagcatctgtcagaagtaatatagtattacaaactaacaattagggctcttaacacagataaaactcttaaatgctgcttctatcacttactctttatgtcactctgtccaagcatttaaactctctaagctatagcttcccccttatctctttaaaggggaaccatgatgatactatctcaccaggttttagttaagaccgaatggtaaaaatctacagaatgcatttagcatagtactgtcacatagtaaatggtaaattagtgttaactattattattaaggcatgatatctcttgaacaaaaataattggaatataacataattatgaatattcatgaagtattgtaaacaacagttattaaccccattcctattcaacttctgtcaatgtctgctttgttttataattcaccaagtatcttccagaaaagaaagattgtaatgggttcactacagaattatacagaactgctggctcaaaaagaaatatgattatttataataggaaatcaccagcaatgacaagaatgcattcacagaagattgcttaaataaattatgatagactaatcttgcacatgtagtgtaggaggaaataaaagactagaaggagatacaccagaagattaacatgattcatatctcttcaactaattaacaaacatattaaataccatttgggaaaagattacatttttttcaacagtatttggattcagatttccattttggaatggggtgggtttataaggagccattctgggagacagaactatctccaaggtgactggaaggggatgcctcaagttataagagctcaacagaccaagcacagtggctcacacctatagtcccagaactttgggaggccaggaattcaaaaccagccttgggcaaaaaagtgagaccttgtctctacaaaagctacgaaaagttagccaagcatggtggcacgcgcctgtagtcccagctactcaagaggctgaggtgggaggactgcttgagcccaggagttcgaggctgcagtgagccgagattgcaccactacactccagcctggatgacagagcaagatcccatctctt

SEQ ID NO: 233510 - DNA, 1105 bp, Homo sapiens
gctatgttggacctcttgtttcctagaatataagacactgtgtgggctcagatgctggggtcatggctgtatgtagtcttctgtgtgtatgtagtggaatgatggcagggaccaaatgttgtggaggtgtaggggctattaaaccccaggctatgatgtactcatgtactccagaagtagctccattcccaacatggttttgtctcatagcagttttggtcccagggagttgggtggtagtggtgggaggactcggtgtgtgttccttctctggatcaacgaaactgcatggacttcaggcaggtccctgaatccattgtgagaattgtgggacttgtctgtaactaggattacaggtatctccagtgctaatggcaactgctgaaatctctagcttaccttttctttctaatggggagtccctcttggctccaggcagatcttatttaggtgttttgcttccctgtgtatgctatcacactaacttgctcataaacacaacttgaacaacatctgtaatgcttaaacctaattattttaacatctgtaattcttaaacataattattttgttccctaacctaggaagcattacgtttttaaaaatttttttcaagacataatttaaaattcttaagttggtgaagaaaattcaccttacttggaagtcactgggctattaccattatcacattgtctgttgaaagaatagagtttggctatatgaataaagtaacaaaattacatatttacctactgaatcattcgtagaaatcatatgtacttcacatgatgtaaaagaaaatttctggccaggcgcggtggctcacgcctgtaatcccagcactttgggaggccgaggcaggcggatcgtgaggtcaggagatcgagaccatcctagctaacatggtgaaactccatctttactaaaaacaaacaaacaaacaaacaaaaaattatccgggcgtggtgaccgacgtctgtagtcccagctacttgggaggctgaggcaggagaatggcatgaaccaggggcggagcttgcagtgagccgagatagcgccactgcactccagcctgggagacacaacaagactccatctcaaa

SEQ ID NO: 233511 - DNA, 531 bp, Homo sapiens
cttgaggccaggagtttaagactagcctgggtaataatgcaagaccccatgaccccatctctatgaaaaactgtaaaaattaaccaggcatggtggtgttttgatttggtattaatttactcttagtaaacttgataaaatcagcactcttctcatacttttgttaccattactgtaagtaagtgtaataaggccttccttggtaaagagtttttgtgtatattaagtaaatatgcacatgaaagtatctcaaggtttaaagcactgtatagcactgtgtctatttcatttgaaaacgatagttgatacatgtacacaatgaggaccttatcagacccaagtgggctttttttttaaaaagacagaatcttgctctgttgcccaggctggagtacagtggcacagtcatagctcactgcagcctcaaactcctgaggcaggagaatcactagagcctgggaggcgaaggttgcagtgagccgagatcgcgccactgcactcctgcctggagacagagcgagactccatctc

SEQ ID NO: 233512 - DNA, 510 bp, Homo sapiens
cttgaggccaggagtttaagactagcctgggtaataatgcaagaccccatgaccccatctctatgaaaaactgtaaaaattaaccaggcatggtggtgttttgatttggtattaatttactcttagtaaacttgataaaatcagcactcttctcatacttttgttaccattactgtaagtaagtgtaataaggccttccttggtaaagagtttttgtgtatattaagtaaatatgcacatgaaagtatctcaaggtttaaagcactgtatagcactgtgtctatttcatttgaaaacgatagttgatacatgtacacaatgaggaccttatcagacccaagtgggctttttttttaaaaagacagaatcttgctctgttgcccaggctggagtacagtggcacagtcatagctcactgcagcctcaaactcctgggctcaagggatcctcctgcctcagcctcccaagcacgggcactacaggcgtgtccactgtgcccagctaattaag

SEQ ID NO: 233513 - DNA, 575 bp, Homo sapiens
gattgctactagcatctagcgggttaaggccagggatgctgctaaacatcctacaatgcacagaccccccacaacaaaaaaattatccagcccaagcagtacttgaaataatggaaagaatattaggctaggcattggagagttggactggaatctagactctgccattcgttagcagtgtgaacttcggtttatctaagtctcaaatttcttctttgggaagagtcatctgtaaatagatataagcgcattatgtgtaaataaaaggcataggataatattgattgagttgttaatcctagtccagttgatttagtaaagattatttctggagatctttacaaatggaatactgtcttaactgtgagtatatcttgaatgtgatcttgactaatccatataaaccagatgtcttctactttggccattgtgttccagaaagtaactgatttctttttctgttacatcttctttaagtgctcctagtctttacaggtattaataaacagtgaaatgactgagagtaacaggaaaaaacaagaaatactccttgaagaattttgatttgtagtctg

SEQ ID NO: 233514 - DNA, 431 bp, Homo sapiens
ggttgattctatatctttcccattgtgatttttcagtttgtaaaataacagtttttatgttaattttaattttctcttcctgtctcttttttataacattttgtgtatgtatataacattttacataaatgaaataaaaacatatatataaatctctaatccccacagccatgataacatcttggtataagttcttctatatttttctctatattcataaacatttagggtttttgattgtttaattgagtctttttttgttgtttgttttgagacaaagttctgtcacccaggcttgaatgcaatggtgtgatcatggctccctgtagccttgatctgtcaggaggattgcttgaacctgggaggtggaggttgcagtgagctgagatcgtgcagctgcactccagcctgggcaacagagtgagactaaa

SEQ ID NO: 233515 - DNA, 420 bp, Homo sapiens
aattgtgtaagctttttcccctttttgccttaactgccaagaaacctggagccactgtaatcagttcatctcaggtgcctgttaacatctaacccgtgttcccgacggccttgcttgtgttttcatccctaattgggtttagttctgtaagctgaatcgcattcctttataagtccatagcaaactctatataaattgaatagagctgaaaaatatattaactcgaccaaggttttatagctaatttacagttgcctacaatagtaatgcatgattgaactaatgacagtcctataacaaaaacactaatgacatttgtttttaacatttcctttagaatataatcatgggaattgaagagtgagttaaggtttagacctatgtctcttttcttccacttttatgactctgagatttaaa

SEQ ID NO: 233516 - DNA, 384 bp, Homo sapiens
agagctttggggtcatatcagaattcaaattccagctctgccatttcctacctgcatgatgttgggcaagttacttctctctctaatcttctgttcctttatcaataagtacagtatctaatgcataaagttaccttaaagattaaatgagataatgtatatgtggttggtacatactaaagtgcctcaacaaatgctaacttttattattatattaattattattgagattcagatctgtgaggcatctagggagaaataattaaatagaggcctgagattatgacaagagagtacactgagtaaaagagaaggaacaagaaattctgaaactggtgaaacattcagagattaacagagataaaagctagaaagaattagaga

SEQ ID NO: 233517 - DNA, 1837 bp, Homo sapiens
  misc_feature (1691)..(1691): n is a, c, g, or t
taaatttttatttcaataatttttgggatacaagtggttgtttacatggataagttctttaacggtgatttctgagattttagtgtacctgtctcccaagcagtgtgcactgtacccaatatgtagtcttttatccctcacccccgtcccaaccttccccctccgagtccctaaagtccattgtatcattcttacgcctttgcatcctgtgcttctttcttgcctcccatcaacacattctcctactgaagtatggtctttctaaactataaatgtaccactcccctgatcttactgctgccaagccaaattcctaggtcttataaacaagactggcttctttattgctccaaacttatatccctagcttaccatgcttttctcatttttatgccctcactcatgatgttctctctgcttgaaatctatcacatccttctgccccaactccttttacaagtaaactttctcttgaaagctgagccagatcaaatctagataggtgcctctcctcctagtgcctaaagtcctttatctagctgaattgtaattgcctcttatctctcccattagactatgtgtttaaagaagacagacctatgtcttagtttactgtatattcatagtgcctagcatattcatttaataaatgaatttttaataggcacttgattaatggttattgaattgtgttttcagagaattaaaaacaaagcctaggaaaacaggttaacaatgggaaatcatggaaggttcatgatcaggaaagtaacaggaatatgaagaagactggtcagattccacaactctgagccacaattatctttggaaggagtcatttacctgcatgtttaaaggtcacagcataactgtttcccttccttattcttctatccctgcaattatcttctctttctaccctctcctttagctatcacatctactgctaccacttcctttttcacttctgcagatgagttcctaattggtttcctgaagtaatttttaaatgacctctaaaatacaggattttccagtatcgacctagtctcctaggactgtattttaacccagcacttccacactggaaagtactattaaaaaaataactaaaaatgtgtaaaacaatttagcttcaagaatattacacaccactgtaaagtcagaaacctaaatgtatgagaatttagtatataaataatagcattaatatcgtagcactttgggaggccaagacagacagatcacctgaggccaagagtacgagaccagcctggcaacacggcaagactccatctctaccaaaaaaaaaaaaaaaactttaaaaactagacgggcatggtggtgtgcacctatagtcctagctactcaggaggctgaggcaggaggatcgcccaggtcaaagttgtagtaagccataagcacaccactgcactccaacctgggcaacagagcaagaccctgtttcaaaaaatatatatagcattaccacttaaagaatattacacagccaataaaaaaggatattatatagaatatctaaggagagaaacaagatggttaggggacagtgatgagacttactttttaccacatactcttttgtaccttttgtatttgtacctcatacatgtattacctagtcaaaaaaaaaaagaaaatttaaaaaaataagcttacttttgaaatantatataggtgtattacttcttgattcacaaagatgtacaacacattgttaggtgaaaaacgaaaccacaaaacagtattacagtattgtaatattaacgtgggcaacgggtgtatacatttaagcataatattcactagaggattg

SEQ ID NO: 233518 - DNA, 1010 bp, Homo sapiens
  misc_feature (404)..(404): n is a, c, g, or t
  misc_feature (439)..(439): n is a, c, g, or t
  misc_feature (441)..(441): n is a, c, g, or t
  misc_feature (747)..(747): n is a, c, g, or t
  misc_feature (834)..(834): n is a, c, g, or t
  misc_feature (852)..(852): n is a, c, g, or t
  misc_feature (865)..(865): n is a, c, g, or t
  misc_feature (868)..(868): n is a, c, g, or t
  misc_feature (881)..(881): n is a, c, g, or t
  misc_feature (964)..(964): n is a, c, g, or t
  misc_feature (980)..(980): n is a, c, g, or t
atcccaggtttacaaccaggcactgactacaagatctacctgtacaccttgaatgacaatgctcggagctcccctgtggtcatcgacgcctccactgccattgatgcaccatccaacctgcgtttcctggccaccacacccaattccttgctggtatcatggcagccgccacgtgccaggattaccggctacatcatcaagtatgagaagcctgggtctcctcccagagaagtggtccctcggccccgccctggtgtcacagaggctactattactggcctggaaccgggaaccgaatatacaatttatgtcattgccctgaagaataatcagaagagcgagcccctgattggaaggaaaaagacagacgagcttccccaactggtaacccttccacaccccantcttcatggaccagagatcttggatgttccttccncngttcaaaagacccctttcgtcacccaccctgggtatgacactggaaatggtattcagcttcctggcacttctggtcagcaacccagtgttgggcaacaaatgatctttgaggaacatggttttaggcggaccacaccgcccacaacggccacccccataaggcataggccaagaccatacccgccgaatgtaggacaagaagctctctctcaagacaaccatctcatgggccccattccaggacacttctgagtacatcatttcatgtcatcctgttggcactgatgaagaacccttacagttcanggttcctggaacttctaccagtgccactctgacaggctcacagaggtgccactacaacatcatagtggagcactgaaagaccaacanaggcataaggtcgggaanaggttgttacgtnggnaactctgtcaacnaaggcttgaaccaacctacggatgactccgtgctttgacccctacacagtttcccattaggccgttggagatgagtgggaacnaatgtcccggaatcangcttttaaactgttgtgccaattgcttaag

SEQ ID NO: 233519 - DNA, 1028 bp, Homo sapiens
  misc_feature (765)..(765): n is a, c, g, or t
  misc_feature (852)..(852): n is a, c, g, or t
  misc_feature (870)..(870): n is a, c, g, or t
  misc_feature (883)..(883): n is a, c, g, or t
  misc_feature (886)..(886): n is a, c, g, or t
  misc_feature (899)..(899): n is a, c, g, or t
  misc_feature (982)..(982): n is a, c, g, or t
  misc_feature (998)..(998): n is a, c, g, or t
atcccaggtttacaaccaggcactgactacaagatctacctgtacaccttgaatgacaatgctcggagctcccctgtggtcatcgacgcctccactgccattgatgcaccatccaacctgcgtttcctggccaccacacccaattccttgctggtatcatggcagccgccacgtgccaggattaccggctacatcatcaagtatgagaagcctgggtctcctcccagagaagtggtccctcggccccgccctggtgtcacagaggctactattactggcctggaaccgggaaccgaatatacaatttatgtcattgccctgaagaataatcagaagagcgagcccctgattggaaggaaaaagacagttcaaaagacccctttcgtcacccaccctgggtatgacactggaaatggtattcagcttcctggcacttctggtcagcaacccagtgttgggcaacaaatgatctttgaggaacatggttttaggcggaccacaccgcccacaacggccacccccataaggcataggccaagaccatacccgccgaatgtaggtgaggaaatccaaattggtcacatccccagggaagatgtagactatcacctgtacccacacggtccgggactcaatccaaatgcctctacaggacaagaagctctctctcaagacaaccatctcatgggccccattccaggacacttctgagtacatcatttcatgtcatcctgttggcactgatgaagaacccttacagttcanggttcctggaacttctaccagtgccactctgacaggctcacagaggtgccactacaacatcatagtggagcactgaaagaccaacanaggcataaggtcgggaanaggttgttacgtnggnaactctgtcaacnaaggcttgaaccaacctacggatgactccgtgctttgacccctacacagtttcccattaggccgttggagatgagtgggaacnaatgtcccggaatcangcttttaaactgttgtgccaattgcttaag

SEQ ID NO: 233520 - DNA, 744 bp, Homo sapiens
  misc_feature (481)..(481): n is a, c, g, or t
  misc_feature (568)..(568): n is a, c, g, or t
  misc_feature (586)..(586): n is a, c, g, or t
  misc_feature (599)..(599): n is a, c, g, or t
  misc_feature (602)..(602): n is a, c, g, or t
  misc_feature (615)..(615): n is a, c, g, or t
  misc_feature (698)..(698): n is a, c, g, or t
  misc_feature (714)..(714): n is a, c, g, or t
atcccaggtttacaaccaggcactgactacaagatctacctgtacaccttgaatgacaatgctcggagctcccctgtggtcatcgacgcctccactgccattgatgcaccatccaacctgcgtttcctggccaccacacccaattccttgctggtatcatggcagccgccacgtgccaggattaccggctacatcatcaagtatgagaagcctgggtctcctcccagagaagtggtccctcggccccgccctggtgtcacagaggctactattactggcctggaaccgggaaccgaatatacaatttatgtcattgccctgaagaataatcagaagagcgagcccctgattggaaggaaaaagacaaggacaagaagctctctctcaagacaaccatctcatgggccccattccaggacacttctgagtacatcatttcatgtcatcctgttggcactgatgaagaacccttacagttcanggttcctggaacttctaccagtgccactctgacaggctcacagaggtgccactacaacatcatagtggagcactgaaagaccaacanaggcataaggtcgggaanaggttgttacgtnggnaactctgtcaacnaaggcttgaaccaacctacggatgactccgtgctttgacccctacacagtttcccattaggccgttggagatgagtgggaacnaatgtcccggaatcangcttttaaactgttgtgccaattgcttaag

SEQ ID NO: 233521 - DNA, 294 bp, Homo sapiens
aaacaccagtattgattccttccacgacgaatcgatcctgtggcttgaaagaagcctctacctggaagctgtgggggagggatgaagtgcaagagaaaacatctgttaatctggacagaggcagcgtggcctgaaatgaagacataccaagcccatcctgggaagaagtgtttctccaggtggcagcctgcaggaagcagagctccttctgaacaggcttcccactggctcctttctttttgatatttttttccagctttgttaaggtatgacaaataaaaattgtgtatattt

SEQ ID NO: 233522 - DNA, 437 bp, Homo sapiens
tgccaagcctcattaatccacttaacaattattttttgagtgtgcctattatgtcagacactgttgtaggcacctgggatatgtaacaggataaaacggatacaattccttgccttttgggagtaattttaaatgcacttcaaaaattgatgcatttaagtagacagaaaagaagttgaattacataaaaccattaagagatggcatagtgtgtgtgctaatttggaatagtgaaagtcctttaggagtgactgaaatttgggaaactctgttctggtatttcagaacttttctgctgccttttcagggggaatgactctttaagaggcagagggggcctcgggggcagggtaggattcagaagaattggggatgccccggtggaataagcagccaaggggcactagaaccgaggcagatcccgtggcaggcgggag

SEQ ID NO: 233523 - DNA, 394 bp, Homo sapiens
aaaaaatcaaatactgcgtgttcttgcttataaagtaggagctaaacaatgggtacagacagacataaagatggaaataacagatactgggaactccaaaaaagtggagtttgggaagggggtaagggatgaaaagttacctattgagaaccacgttcactatttgggttaacgggtatgctagaagcccaatgtccaccagtacacaatatactcatgtaacaaacatgcacatgtacccccatatctaaaataaaatttaaaaaaagaaaatgatatacatgaccacataccaaatagaatgcaaatttatagttacagaagaatatttaggacattgtatgtaatttttgcatacagcaaggctaggaagccacagtagatttgagttaaa

SEQ ID NO: 233524 - DNA, 469 bp, Homo sapiens
aaaaacacagacaacagaatgaaaaaattggtcaattggacttgatcaaaattaagaacttttttgcatcgaagaatactatcaagaaagcaaagcaacaacctactgaatatgataaaataattgccaaccatatgtctgacaggatagtaatatccaaaatatataaagaacatgaataacgccaccacaatcaaagagataacctaattaaaagcaagcaaaggacttgaaaattctttgacattactcaaagaatatacacaaatgacaaacaagcacttgaaaagatgcttaacatcagtagtcattagagaagtgcaaatatcaatcacaattagatacccctttctacttagtaagatgtgtatgctaacgaaaaatggaaaataacatgaagtgacaagaaagtggtgaagtcagaacacttgtgcattgcttatgggaatgtaaaatggtgcagctgctg

SEQ ID NO: 233525 - DNA, 417 bp, Homo sapiens
agtggagaagaagacagaaaaggctgtggcctgatgaagcttacattcagacagacaactcacaattctgatgactggaaagtccaagatcatggcactggcatttgctcagcatctggtgagggccacgtactgtgtcaagacatggtagagacatggaaaggggctctaccgagttgctggaatagttggtgtgtgtcagatattatcgtaagacttggggaaggtaatcctgggctttacaagatgagtggagagaaaatggctctatctaattggcccttacacagagaccagcccgcttcatagttcaagatataaacctgccacacatatgaatgtaaacagctgtagatacagagtattttacaattgcacgctttcaagttattaaaatttctggatttgtttaattta

SEQ ID NO: 233526 - DNA, 219 bp, Homo sapiens
gtaacacttacatatttgtattgattcagtctactctctcaacgtgtaaccccgaattacacatttgggaggcagctggctagacttagaaaagaccatggaacaccccatcctcctcactctcaagcaaggtctgtaagatgaatgaacctgatttttaagctaatttatgagtcacacacttaaatatatatccgtaattgtaactttaatgtggcc

SEQ ID NO: 233527 - DNA, 351 bp, Homo sapiens
tgccccggaagcattgtgaagatctgaggagagagtaccactgtagaaaatgtgtcatgataggccaagcacggtggctcacgcctgtaatcccagcagtttgggaggccgaggcgggtggatcacgaggccaggagatcgagaccatcctggctaacacggtgaaaccccgtctctactaaaaatacaaaaaaattagccggacgtggtggtggcaggcacctgtagtcccagctactcgggaggctgaggcaggagaatggcgtgaacccaggaggcagagcttgcagtgagccgggatcgtgccactgcactccagcctgggcaacagagcgaaactccatctcaaaa

SEQ ID NO: 233528 - DNA, 469 bp, Homo sapiens
catctatctgcctctgcctccccaatgctgggattacaggtgtgagccactgcacccggtcgttaattagagagtcctgatctcagttggattgtttaaaagtgaaagtgaatgatgataatatttagtaaaatcatcttaatgcattttgacttttaacttcttcagatttttattaaagtatagagaatttagatgttttagaaaatcagtgcaatatgtttggattttggaaaacatgaaatttacataatttgaagacaaacctcattgcatttaatattctgtttccacatttgtgggtgttctggctacactggttattggaagacatttaaagatggcgggcggggtgtagtggctcacacctgtaatcccagcactttgggaggccaaggcgggcggatcatgaggtcaggagatcgagaccatcctggctaacacagtgaaaccctgtctctactaaaaa

SEQ ID NO: 233529 - DNA, 402 bp, Homo sapiens
cagcctcctgttgtaaggcactgaaacagcctgttcccagtaatggctccatctctgagcatggaggtagggatggtgggtcggggctgacctcgtacctgctgggagagcccacacctttgggaagagatcatggtcaatccccgccctttgggggctgccctccagaccaaagcgaaggaacccagaggcagaaacttcagcctttgtcaaacagacctgggtttaaatcttgatctaagttcctactagctgaatgggttcagtaagtctcttaacctctctgagcctcagtttcttcatctgcaaaaggggaataagaatatctttttctttttttctttttttttttgagatggagtttcactctgtcacccaggctggagtgcagtggcacgatct

SEQ ID NO: 233530 - DNA, 671 bp, Homo sapiens
tcacagaataaggtgtgtctagggaggggtgctttctctttagtggatagcaccttctggctctgtcctcgcatggtggagaggcagaggccctcccttgggcctattttataaggaccttaatcccattcctcacttcccaagatgccacttgctaaaaccgtcagttcgggagttaggatttcaaaatgtgcattttgagggacacatttagaccatagcgtaggtcatgtttttaaagttgctttcttggccctggaatggcaatgcagtcatctgaattggtcttaacctaccaggaatgggcttatattttgaaaatatttctcgataagggagtaaaataagttgtatgggttttttgtttaagaaaggattcctttgtttactctggtatgcttatccacttctgtgatgtcaaccatgggtagtgacctaacattaatttaattcaacagatatctttgtctgccttgattcctgcatcccctgggctccacagctattcacttgtattgattctgttaactcttacacattaactttgagctgtgtctccttccttttatcattttgtgagtaaagaattttaatttgccaacaaatcctaatgtggactttgtcacgttgtgaaataaagtgattttttggtatggaaatatgtgttaaga

SEQ ID NO: 233531 - DNA, 447 bp, Homo sapiens
  misc_feature (393)..(393): n is a, c, g, or t
aaatcattgcaagtgtataatatggtacacaggattgattcggacacattcatatgtcataccattacacaaagttttgccgtgggctccatttcccctcgagactttatcgacttagtgtacatcaagcgctacgaaggaaatatgaacattatcagttaaacccagcatattccaaactagtgatgtttgtccagacagaaatgagaggaaaattgtccccatcaataattgaaaaaaccatgccttccaacttagtaaacttcatcctcaatgcaaaagatggaataaaggcacacagaactccatcaagacgtggatttcatcataatagtcattcatgataccaaaagaagaaatgaggccgttctgctataaaatcatgtgtagtangttattgctgtttacttctaagtcaacgcacataaataatactgttaaactatt

SEQ ID NO: 233532 - DNA, 531 bp, Homo sapiens
aaatcattgcaagtgtataatatggtacacaggattgattcggacacattcatatgtcataccattacacaaagttttgccgtgggctccatttcccctcgagactttatcgacttagtgtacatcaagcgctacgaaggaaatatgaacattatcagttgtaagttgaaacattttgcccatatcttggaattactgcgagccattaataaatgttttccctttattcacagcttcaaagaaattatattttaattatttcctttttaaatttacttagtgggatcaacaattagacgtatcatgtagatatgcctagtgacactctgaaggtgccatttatataatggtcaatatttgcaacatctcttagacttttgcagcatatatcctgtagcactgagtatagatagatacttgtagcctaaaactttgggtatacattttttaaatcctaagaaacaaaattaattgtcagatataattttatatttgaattgcttataatgcacatatccagtaactggataa

SEQ ID NO: 233533 - DNA, 358 bp, Homo sapiens
gcatttggtagaactgtttcatattcagactaagggtttcatccaaaacctaagatttcaatttgtttcacgatattacataaagtacagtattcatgtggtgacttcaaagcaacaaaaatgttcaacactactcagtctatggaaggtgaaatactgttttaatatgttaaaaagcatattaaatgaacacattaatgagaggtagctcataaacagtacatttcagcagggcacagtggctcatgcctgtgatctcaacattttgggaggtggaggcacgaggatcttgagcccaggagttcgggatgagactgagcaacagacagagacctcgtctctacaaaaaaaattaaaa

SEQ ID NO: 233534 - DNA, 346 bp, Homo sapiens
gggagaccaaagacgccatgagacacaagcctgctgttagcccatgtgtacatatgaggaaattagagaaatagccctacattcagacaggtatagccacatacagcttggtaagcagaacatggactgtattccagctactaaatggcatgatagttcagtgccattgggcagtgaacagtctgcacaagtgcagcatccttgctacaaggatttctgatggcagagacagcaggaaacgagaggcaatgtaacaacatatgagggctctcaagtcaagtatctgggtttaattcctagaaatgatacttaccagctgtgtaaccttggggatattaaaaaccct

SEQ ID NO: 233535 - DNA, 445 bp, Homo sapiens
atatggtagccacaggccggaagtggctattgagcacttgaaatgtggctagtgagactgaggagctgaattcttcattttacttaattttaatgaatttaaatgtaattgccacatgtagctggtgactactgaactgctgtgttaattcagcactaattctagagctgtggttctagactcaacaaggtaaagcaagaacccacacgctacacgtgctaaactggaccatccaacacacagcgccggcagtaatactgcaggcagtctggcactgggtgggacctttaagtacaatgcatgcttcagagttggtagccgctggcaaatctggcaagtgtgcccaaagtgtcactctgttctagccccttccccaaaccagataatgtttccctcagcttcagcaaaagcagatgctaaccaggtgtgagcagcaacgggagag

SEQ ID NO: 233536 - DNA, 885 bp, Homo sapiens
ccccctctttgcctcgaagctgggtgctttccaggtgctgctggaagctgcagttggcaccttctatcacaggacactgacctcactatgagaaaaggcttttagaagctgagactctcgcaccgtggcctgagacgcctgcttccatcagtggcagggtccccgggacccctggcagagcctccaggacccctggcagaacccctgacagttacatctctttcccgagagaggcctcaggcccgggctgcccagctgctgcagtggcggcctgtgcccaccagagggcgcaggcccggcgctgcgcagctggaccgggctgtgcggaccaaatgctttttaattgaaaatttttttaattcaaaaaggatttgctgtttgttcgcaagtgcaggttttccttatgcaggagactaatgtcttgagtaaacagatccgggtccaaatccaccttcaaaggtactcgctgtttgcccaagggagtgaaagggcttccagaagcggccccgtctcctgggtaaacacggcgggaggagcgggcagggaccgcgtctgcgggaaggcggccgcagccagaggggattatgtcgcgggacatatgttgaaatttcatttggggagttagggaaaacaagaagcgggggtgggtggcgcttttctccagccaagataacctaaaaagggaaaaaatcccgagggagagagggtgggggcgcaatctgtgcgccctcgcggggaccggcgtggtgcaggcaggaaggggcgccttctccgccctcccccagcccgcgggccgggagagaggagctcagcccagcccggagggcccagccatgccctccccgtgaccctgtccccactcctggccacagagactgggacagc

SEQ ID NO: 233537 - DNA, 493 bp, Homo sapiens
caagcattctgagtagatgggactccaggtgtataccattgcccccagccagatgcctcttttatattttttcaggcttttctcctgtattgtatgtaaataacacttttcttcgttttctatatcaaaatagtaggagagcttatatgaactctataataatataacattgttagagaagaagtgttctaatgtcacatttctcaaaaatttcataattaaagggagcataggggtcagataaaaaggttatattgtgaaattattaaagaataattaaaatacagaaaatataaaaaatcttctgaatctgagtccaaaggaattggaaggcagagattggattaaggtaaattggggaagttgacaagagagctgacttatgctgaggaaggggagggctagaccaaggttgaaggagaaaggaatattccagtcctggattcagttgatgacagcaggacataggcttctctgacccccacaaaactga

SEQ ID NO: 233538 - DNA, 416 bp, Homo sapiens
tataattttgctgtaaaattattttctgctgtagaaaaaccaattaaagcaggagtgtcatcagggaaagactcttctcttcaggccttgtatcctacattttcactgcatgagaagcgcccaccagtgaaacacagggtagcaggaaacctggggtgggcagctaactaacccagcttcctaatcactgagactacttcgttacaatgtcttgccagacacagtcagcatgagtcatcctcacaactatatctaggagtctttccatcaaatgtgtgcaaatgcgggtttatggagaaatttatcttacttccttagtgttctctgttatattaaggtatatgttaaaaagttcatttataattaaaataattcttctaatttgctaataaaatgctttataccaacttcaattg

SEQ ID NO: 233539 - DNA, 295 bp, Homo sapiens
taattggtaagtactttctgtgtttcataatttagttcataaactgtccataccactgtccagtggtgacagggccataagtcgcgagtgtgtagctgtgttctgtcagttcccgcagctttcaaatcccgaggcgtctgcctcatctgtttctagactgggcatcatgtccatgactaatttttaatcacaattcattctccaacttgtcttattctaaatgttgttctaaaaagcctaatgtttgttttgttctcggcgttgacattggatggcgtggattcgtgctggggac

SEQ ID NO: 233540 - DNA, 444 bp, Homo sapiens
attttctctaaaaatctctttgatattttcctctttcccctctttttgtcaggtcctaaccccatagtcgcagggtaaagtaataggaagaattgatggtagatatggatagaggtggtcttctacattgcgtccacaaagtcaaggggaaatattcacctgttgttaacttaatttgtatatgagatgttaaccaaatgttggggctaaattgcagtagatgtgttacttattgttgtaagcgcctagggtaatatttatatcccttgagtttggctgctttttttaatcaaatctcttttccccactttttcattgtttcactcatgcactctcaatcacatacaaagtgatcttgtcatcaaacttcctgtacactcaatccctgataatctaataaaaattcagtgttatttctaaaacgtatgcacagacccggagatt

SEQ ID NO: 233541 - DNA, 493 bp, Homo sapiens
agctgtgttcatttaggacatgggtattgaaatggagttttgaaggctggctgaggggcctgcactccatccctcccacagtgccctcagctcctccaccttccccacatgaaccagtccgcacctatcacacctacggtgggccgtggtcccaccccagctttcaggtatttccggagagggtagacgcagctctaggtcaggaaggattgtttccttcccttctctccttctgcagctctgcttggttctggctggcttttgctggagttgaaagactcaagtgtgctaagaagggagtcctggccatcacagttgtagtgccagtgtccccagctgctccggttccccaacaactcacagacaaccgtggtctggagggtgtgtgactctgaaaagccaaaaccccagaactccaaagttacaagaggtcaaaacagtggctctctccacctccgctcctacctcctcccaaaatgcatgaaattccctt

SEQ ID NO: 233542 - DNA, 293 bp, Homo sapiens
tgttacttatcatttgttgaaattttcaggattctggggtaattaagggttaaacattggtagactctgccaggatggcgtctgagtagaggaaaggaggagacaaggattaactgtacagaataaaagcaaaagaactaagttttttaaacttgaaaaagaaacagaattgtgcaatcattcatttctatgatccaccctctcagcaaaataaactgcagctatcactttccaaacgatgaagtgatacttctaagttttttcatggtgtcccaatatttttcagaacatta

SEQ ID NO: 233543 - DNA, 523 bp, Homo sapiens
caaacatttgtttgggtgtgctagtaaggttcttgttattgattgtgtgggcaaacattatgcatgatgagttatacagcctgatattgggaggaagcgtttggaaatagggtaaaatcatagaagatgggaaaggtgtttataagtagattacattaccgtggagggaagccactacaatattttcacgcaaacagctcagagtgaggatatcatacttaactatcttttgctattgtcatccaaacaaatgggctttgttggcgaaaatctcttggcctgcttactgcagaaaaggaaaattggactcctactgatttggatgttctacctgtataatctgaataaaacaaatgacaaagtgccccctgacaactcagcttgtgtgtagttgactacagttatcactcagtttctaggctttgtttaccattctagattatttttttccagagaaactaccaatgaattgtacagagcagaggatgctgtagaatagaatttctgcaccctatatggccat

SEQ ID NO: 233544 - DNA, 407 bp, Homo sapiens
gcgggcgaggcaggagcgcgggctccccctgcctccggagcgccggcgggggacggcggggcaggagatgtgcctgtccttagcggcccaggaagcagcatgcaccccgatgcgaccgacagtggcggcgccggcctcagccccgcgcgggccgcaggcgccggcggccgtcctgtctcgggcttcaggggcgagcggcggccagagtccccgggggacgccgaggcagcagcggcggcgccgggggccccgggcggccggagctggtggaagcccgtggcggtggccgcacttgccaccgtggccctctccttcctggggcccggcagcggggaggcggcgggggccgcggggctgagctccgtcctgctcaggctcagcctgtacctgagctgcgctgcggccac

SEQ ID NO: 233545 - DNA, 581 bp, Homo sapiens
cagatgctttcctgaacaccatctccaggtatctgaaataatggagaccctgaatacacttgaatatgccactactccctggctctgcagctttgtgagagcttctttaagaatattattttatacatcttcctcttacttcacctaaaccttcccatctgcccccactactggtcagtctcttcagctatttgggaatagctgtgaaaggagggggctgggcaagcttgtctctacaaaggacatccaactcaagcaatctgagatcttcagagttacttcttaggaccaagggacaatgaggtccactggtagaatccctatgatctatagatttctattcccttgaatttgacctttcagagtctccatgctttactgatatctatatgtgtgaggtagaggtgaaatctgtacagctagaagtaagctgggcatttctataagatataaaagcaatggtttcattcactcaaatcagacttaaggatgtatccctatgggcaggaaacccaattctaagaaacttacaaaatataatctctttagaagttgaacttttagtgtttaaaaaaaaaaaa

SEQ ID NO: 233546 - DNA, 371 bp, Homo sapiens
tgccctggaaacagaaagaatgagaggtccagacagagaaaagctcaggttaggaacgggtctcctctgggatttccaacccaccaagccatgtcctcttgggaggaggagaaaagggcaacaaaactggcagaatccttattccacagcctgtccccaaacaccatctttcactgatggtaataattcaagtaagagaagtggagattaagtagttgctgaactaaggatcagagagcaataactgaagcttggcaggcctggtaatttatctcctatgcaatgtttttcagatgttcctgagatattcaagtctagagaccaggcttatttggagtatgtgtcatagggaaggcaacagtggggggtgt

SEQ ID NO: 233547 - DNA, 218 bp, Homo sapiens
ggttatgattctgtatggtttctttggtgctgcattagacttgagctctgattgaaaattcttccacgctcgctacattccaaaactttatctccaatatgaatttccagatgcctcacaaggtctgagctccatctgaaggctttcccatgcttgtcacattcatagggcttttctccactatgaattctatgatgtcgaataaagtgtgagctctg

SEQ ID NO: 233548 - DNA, 319 bp, Homo sapiens
ctttaacacgttaatgtggcaaatgacaatttcaaattctttctgagtattaaagtagtttttcacttttgatgtaaagccaagatcctatttgctatgtcttatttagaaattttgtctctaggtctattaatgatattggtctttaattttatttttcatactacatttggtatcaagatcatttatatcagcttcacagaacaagttgattaccttttcttttgaaaattttagataaaaattctaagtataagactcacataatctgtgttttgacagttagaaataattaggtaataaaatcatttagctttag

SEQ ID NO: 233549 - DNA, 450 bp, Homo sapiens
agaccatggggaagcttctttcctagtcgaggagcaagacaatgatgacctgaactaggactatggcaatggggagagggattagaagggattggaagggacaggccctgacagttgattggcagtggggaatgaaggtgagggaagctcagtgatcgggtggaggcaattcaagtgacctcatgggtggtggtccattcatggacatggggaagacagcagcagaagcaagtttgggatgaagatgatgagttttcagtgtggaacttttagctgagtatgttttgtgagcgtttctgtgtgagtcagtctagaaatggcaactgaagccatagatgtttggaattttccagctaagagagaaaaggagtaggcttaggaaaagccccagaagacactaatggcagaaggatggacagaaggagagaagcccaagaaggaatgtgggaa

SEQ ID NO: 233550 - DNA, 477 bp, Homo sapiens
gaaatggtgtttagatcattagggctccatcctcataaatggattaatattatcgtggatgtgggttcacccctttttgctctccctctctttctttcaccccttcttggttttctgccttctgccatgggatagggcaacaaaaaggctgtcaccaaatgctggccccttcatcttggacttcttaccctccagaatcatgagtcaataaatttctgtttattataaattacccagtttcaggtattctgttacagcagcacaaaatggacaagggcatgatatattttcacttttatcactatgacatatgtctgtaattatatttttgaaagttaactttaatattagcattgaatgtttttttatattccctttttttcctgcaatttttttggcatagtgtattatttttaatccttttatttataatcattgtggatccttataataaaagtgagtcacttctaagcaaca

SEQ ID NO: 233551 - DNA, 1651 bp, Homo sapiens
acagtggctcaagcctctaatccccacactttgagaggccaaggtaggaggatggttcaagaccagcctaggcaacacagtgggaccctgtctccaccaataaataaataagattaaataaggaacacattatttgacattaaaatggtaatccttagaaaatccaaaacacaaactgttaacagtagttatctctctgagaaatccaagggaagaattttacgcttctccatctcctcaatttcttgcgggtcatgtgcatgttctattttcataatttaggaaactatttgcttatgattttccctgacaacattctcaccaatagaagaggaaatgacctttttctaatccctctacatctcccttcttactggatctttatgtatgttgtaatgccataaagttaaaagtgagaggtcagctcagatatcttattctctagcctgatatatattgtctttgtacaaacagatagtcttcatactgggagctagtgtggtggtacagaatgagcactagactgtgagtccaaatactaatttttttttttctttgagactgagtctcactttgtcacccaggctggagtgcagtggtgcaatctctagctgcagctactgtggtgcactctagttgcagctactctggaaactgaggcaagagaattgcttgaacccagaagctatccaaggctatagtatgctataatgctatgattgcacctgtaaatagccaccgtaccccagcctgggcaacatagcgagacctctctcttaaaaataaaacctcaaatttcctatgttaaaacatagaattatgtaataattttaaacatttaaaagatcaaattcttaatattctgccacctgctatttttatcaacacatatttagaaatctttcattggtgtatatacagctacctcacttcttttgccagctgtatagcattccactgtacaaatatattacgattcatttaaccagtccttctataaagaatgcttttactaactcatgcaacatataattacactgagtgcctattagagcaggtcccgttctgggcattagagatacacaagtgaacaaagcaaagtccttgacctgatggagcttacattccagtggggggaagtcagacaaaagtccatcatagtacgtcagctggtgtagactaaggagaaaaacaacgcagggcctaggagctcagtaacaggtgggatgggtggggagaagttgctattttatagtgtggccagggtaggcctctctaatagggtaaatataagcagaaaccagagggaactgagagagcagggcatgatgatatatgggtgaagaatgttagggcaaaggcaacagccaacgcaaaggccccgaggtgagagcatcactgagagagagtatttgagaaaacaaggtggctagcgtgcatggaatctgatgagaaaggtagatggtagtaaaacatgtcagggtggaggaaaacaaaccatgcagggccactttaaggacttttcgacaggggagtggcatgactggacttacgtttcaacacaatcactctgctttgttaagaacagattaaaagaaaacaaagatcaaagcaatgggtccagttatctcagtgggagacaatggtttaa

SEQ ID NO: 233552 - DNA, 454 bp, Homo sapiens
aacacatttttctcatgttttgcagaactccaagctctcccattttcctcctttatgctcctgccagttctgcaaatgtgggagtcgcccaaggctttgttcatcagccctcttacctaatcacatttcttccaagatgtcttatccaagcccatagttttaaatgccatctgtgttcaaattagtcttttcaacagattgagtgtcattgaggaagagtgtgacaaacagaagcagatgtcataattttcagtgtcgatagcaattcccaaagcataagctctatgagggcaggaggtctggtctgttttgagcactggttgtatggctagcacatagtagatgacaagtatttttttaaataagtgaatgaacgaagtgtttccaaaacattggtcccaggaggtgttctgtgacaaatgggttctatgaataaataacttggggaaacatg

SEQ ID NO: 233553 - DNA, 1741 bp, Homo sapiens
ggatcactctttgttgtgggggcggtcctgagcctggtaggatgtttagtggcatccctggcttctacccactggatgccaggagcacccccccgtcaagttgtgacaaccacagatgtctccagagattacagatgttccctggtgggcagttgagaaccactgctctgaatggttattgtccccgagacgatgttctgttcctcacagtctcctgcacagctaccttgacggggcgatcacctgcactattttaaaccatctctctcagatttcaccaggatgcaagtcatttcatcagtgggaaactcaccagggtgacctgcctcaagtgctacacagggagggacagtctgaatttcccccagtctttagccctgtcgctgtggaggggagggggtagcagggacaggactgctaggacaccttgctcagccacagccccacttgtaaccgcgctggcgattgtgacacttgtagagcaaggaaatcagcagctcatggaatgtgaaggagcacctttgtccccagagagatttagataaaggttcaaggtgaggctaccctcccctccctgaggctgattttggtgagaggtgtggtcatcttgtagtatcaagactacaggcatgggcttgagaattaggaggagcctgagtgagaatcctggctctcttcccagctttacaagcctggacaaatcctttgacctcgctgagtctcaggttcctcatcagaagtaagaggacctcccatatatcttccagggcacttatcggccttggtaatggatattaaggccactggctttggaatccagcagactttgtttcaaatgctgactcggccactttactagctgtgtgatcttgggcaaattactttatctctctgagccttgttttccttatttttatttatttatttatttttttgagtctcgctctgtcacccaggctggagggcagtggcacaatcttggctcactgcaacctccacctcctggcaattctcctgcctcagcctcctgagtagctgggactacaggcgcacgccaccaggcctggctattttttgtatttttagtataggcgggatttcatcatattggccaggctggtctcaaactcctgacctcaagtgatccgctggccttggcctcccaaagtgttgggattacaggcatgagccaccacgcccggcccttgttttccttatctatatctgcagtaataacagtatttacctccaagattgcaaggatgaaaggataatatatgtaaaagacaccctaggtgccggcacctggtggatactctatgatcaccttcagcttcacacagcaggctaaggccattctttgggaacaggaagaccaggctgttcccactgtgtatgggtgctgctgagtactcagaggcagtgggcagttaagaggagaagagttctgggatcagaaaagtgcccaggactggccttttattcatatgttcaagaggtgttcattcatccaggccctggatcaggctactggaggtaaaagaataagtgaaacagagccagtcctgcccttgtgtagcagacaggctgtctggatactgtccataaaaataaaatgtgatcggctgggcacggtggctcacaactgtaatcccagctctctgggaggcccaggcgggtggatcacgaagtcaggagtttgagaccagcctgaccaacatggtgaaaccctgtctctact

SEQ ID NO: 233554 - DNA, 1587 bp, Homo sapiens
gccgttgtcagtggctgactcacaggctgaggccaaactgagcagtttctggcagttgattgtggatgagaaaaagcaggttttcacttctgagaaattcctggtcatggcttcagaggatgccctgtgtactgtgttgcatctgacagagagacttttccttgaccacccgcatagactcactggcaacaaagttcagcagtaccaccgggctctggtggcggtgctcctgagccgcacctggcacgtccgcaggcaggctcagcagacagttcggaagctgctgtcctctcttgggggctttaagctggcgcacggactcttggaggagctgaagactgtcctcagttctcacaaggtgctgcccttagaggctttggtgactgatgctggagaggtgactgaggcaggcaaggcctacgtgcctccacgggtcctgcaggaggctctgtgtgtcatctccggtgtgccagggctcaagggtgatgtcaccgacactgaacaactggcccaggaaatgctgatcatctcccaccacccatccttagttgccgtgcagtctggactttggccagcacttcttgccaggatgaagatcgatcctgaagcctttatcaccaggcacctggatcagatcattcccaggatgaccacacagagtcccctaaaccagtcctccatgaatgccatgggctccctttccgtcctgtcgccggaccgggtcctcccacagctcatcagcaccatcactgcctccgtgcagaaccctgcactgcgcctggtgacgcgggaggagtttgccattatgcagacccctgctggggagctgtatgacaaatccatcattcagagtgcccagcaggacagcataaaaaaggccaacatgaagcgagagaacaaagcttattccttcaaagagcagatcatcgagctggagctgaaggaggagataaagaagaagaaaggcatcaaagaggaggtgcagctgaccagcaagcagaaggagatgctgcaggcccagctagacagggaggcgcaggtccggaggcggctgcaggagctggatggggagctggaggcggcgcttggactgctggacatcatcctggccaagaacccgtccggcctgacccagtacatccctgttttggtcgactcttttctgcccttgctgaagtctcccctggctgctcccaggatcaagaaccccttcttgtccttggctgcctgtgtcatgccctctaggctcaaggctttgggcactttggtgagccacgtgaccctgcgcctgctgaagccagagtgtgtcctggataagtcctggtgccaggaagagctgtcggtggctgtgaagagggcggtgatgctgctgcacacccacaccatcaccagcagggtgggcaagggggagccaggtgctgcgcccttgtccgcgccagccttctccttagtcttcccgtttctgaagatggtgctgacggagatgccccaccacagtgaggaggaggaggagtggatggcccagattcttcagatcctcactgtccaagcccagctgagggcctcccccaacaccccacccgggcg

SEQ ID NO: 233555 - DNA, 224 bp, Homo sapiens
ggcccaaaaccccggaaatttattgtctcacagttctgaggccaaaagtccaaactcaaggcgtcggcaggactggcttcctctgcagggtgcagggagagtccgttccacgtctggctcctgtcttctggaggctgccgccatccttggcgttccttagctcataggcgcatccctctgatctctacctccatctgcacagccccttctccatgtgtcttctc

SEQ ID NO: 233556 - DNA, 1275 bp, Homo sapiens
gaacaatggggctccaggcaattagtcagtaatataaagtgagaaagccagagagcagagcctcctcagcagtctgtcatctataatcagagggcagacagtcctgaaaaccaggcagaggacttaacctaaaaggagcagaacattagaaaaggttgaattttcagctactatcagtctctaacaccaaagtcaggactctaataaggaaggagtgagaccctgagacaaaggacaggactctaatgtccgtagaacttcaagctcctctgaactctttgttcaagaatggtaccaccaacccgaagactatgcagacacctcaaatgaggtaggtaccctacaagacaatgcattcttggcagggcatggtggctcatgcctgtaatcccagcactctgagaggccgaggcagacagaccacttgaaatcaggagttcaagaccagcctggccaacatggtgaaaccccgtctctactaaaaaatacaaaaattagccaggtgtggtggtgcacatcccagctactcaggaggctgaggcaggagaatcgtttgacccggggaggcggaggttgcagtgagctgagatcatgccactgcattccagcctgggcgacagttaagagtgagactctgtctcaagaaaaacaaaaaacaagaaaacaatgcattctttctgttcctgtatccccctggccaccagataaatcaccaagatcagataccatcacgcctgctaagggaggagtggaatcaaaaattgaaggaactgcaagaccaggctaatacacaccagcagaaactgaaaataagcccgggaatggatactacggggcctagatcaaggggtgaggggtgagggctggggagcagataagagagagtttatagatatgtgggcactttcctttaatacagatctcacactttgtcaaggatgctgggtgggcaggttctgatacatcatgggactggtatttgacaatagaaataagctacatgggctgggcgcggtggctcacgcctgtaatcccagcactttgggaggccaaggtggaaggatcacgagttcagaagatcaagaccatcctggccaacatggtgaaacccgtctctactaaaaatacaaaacttagctgtggggtagtggtgtgtgcctgtaatcccagctactcaggaggctgaggcaggagaatcgcttaaaccagggagttgaagtttgcagtgaggcaagattgtgtcacagcactccagcctggcaacagagtgagact

SEQ ID NO: 233557 - DNA, 382 bp, Homo sapiens
actccagcctgggcaatagggccagaccttgtctcaaaaaacaaaaagaaaaagaaaaaaagaagatgaaatcagaagatttgggtgtagttaaggaaacatatttgtcagcagaattttgggggtgagctggaaattatggaatgcttttctgggtaaaattcaccagtctcaggccttcttttcccaaaatagaactctgtgctccagtaagtttgggaaatcctcatttaattaaagagtttcttaaccataagaatcctcagagccttccatatgctaatgtgcattgtcagtttccaaggctaggaagtggcatttctctggatctataaggtctcaagatgcccttgagactgtattctacctgatgcatggctcc

SEQ ID NO: 233558 - DNA, 911 bp, Homo sapiens
gtgactacctgagtgctgcaacaatgcataagacacattcctttagcttaagagtctaacatatggaatgggcataaaaatacagacatagacgatcaaagtagaagtgcaatgtgtcgaggagaatggcagaaagtggaaatgctatggaagtttagagtgcaaagtgatttctttccatccaaggaacctattttcatattttaattgagcctgctaagatggggagtattttgccagtttctgaaaaagtgagaatttctccatataggataaaatatgagtaaggtgaataggaaaatcaggtacaattttcttgtagtaatttatgtggactgtaatgcaggaggtaacaaagaaaagagtgagcgttttaaccagactagacaactgtggactgggaaagatattaatgggtgatgagaagtctctgaagggtttggacctcacacaaagatgagatctcataaactggcatgagtgaggagtgctggaaatggctgatgagagacctgtctgggactttatttaagtggtttataggtagaaataacaggagttaaaaaaaaatagatatgagacccactacagagatagaatgaaaataaattagcagttagtcatgcagataaggaaagagtagtcacctgtgtgtagtggagatcaaatgcaccagtagtaagatagcattctggatggatgcagccatggcattgcaaagaggatatcttcatgtgtgcaatagaagtcatgaggtataggttgttgtgagattaaatgaaagtatgtacatgaagtggatttttaattaaaatactctaagtaagtgaataatattagttttattatgaaagtttagaataacatgacttgaaagatagtactattttattaacagagctgtagaaata

SEQ ID NO: 233559 - DNA, 511 bp, Homo sapiens
agctgaaagaaggaatcttctctttcttggtcctgtcatctctcctgcacttcactgggtcatcaggattagaacaagagctgctgttgaggtttcaacatatggaaatgaccaggggcaagaaactggaaagacaccatgagatccaatcccaaaaccagagggcagagttctggtgccaaaattggccttgaggccttgccctgctacaggcctgtcatcaccaagccagcttggacaggtgcttggctggacagccagcagtcagagtcatttcagctgggatggaaataaatctgagggtagattgtggccagacaccggccaagcttcttatctagtcaatctgagtgttctgtaagcgtgtgaaaaacattctcagagattaaaatggactttttaaataagtggctctaggaaaacaggcaggcatttgaaaaaaattagagctcacaccatacacaaaaataaactccaaataagtcagagatctaaatgtaaaaaaaaaaaa

SEQ ID NO: 233560 - DNA, 328 bp, Homo sapiens
gcttgcatctatttgtctgagggctttctctggacattaaagcttactccatccacatgtacagcaggacaggagtattggataattaatgcactcaggagcaaccctcaacaataaccaactggagtgggtgtatacatacctcagctcccttacccctctgcagtgaatgttctatgctgccacccagaggtctccagtgggattgaccccagttgcttacagggataagttacttgataggacatgctttataaacttccttttgttcctactttcacttcttcagatctggtatcacctcccaaataaacttacttccactgga

SEQ ID NO: 233561 - DNA, 203 bp, Homo sapiens
gctagaatgaatggttgggcactaacaaatattttcacaacctaagcccatactcgcagttgtttgctgaacagacaatcaataaatcaaacagcccttccatgtagaaattaagaaggaaacacaacaccaaaactcattattaaatagcattttgtatttgaaaactcattattaaatagcaaataaattgcactaaaata

SEQ ID NO: 233562 - DNA, 314 bp, Homo sapiens
gaatagagaacccagaaataaattgaaacatatgtggtcaactaatttttgacaagggcaccaagaggacactgtggggaactgatagtctctttgacaaatgatgcaaggaaactggatttccaaatgcaaaagaatgaaattggatgctattttttaccatacataaaaaccaacttaaaatggatcaaagacctaaatgtaacatctgaatttatacaaatcctagaagaggatataggtagaacttctttgatattgacattggaaatgattttttgaatatcacaccaaaaaaaaaaggctaccaaaac

SEQ ID NO: 233563 - DNA, 296 bp, Homo sapiens
tgatcaaagggagcccgagcctgagctcggatgtgtgtcaacaccgtggctcccagggccatgaccttatccattcatcaatatggagaaaagggctctctgcgcttaagaggaaggcagtggaagagaggaggcccttctttgttcttttgggcctgacaagaagcaggcacaacctgtgctggttagggggttaagaagttctgttaactttcaggttttcttggatttctgctcacatccaggagctgggtggaatcccagggccttctgctgagagcaagcacatatctgga

SEQ ID NO: 233564 - DNA, 398 bp, Homo sapiens
gtcttttgctaccctttcaatctttatgccccaggagtagcaaactgttagttttgaaccatatgaaattgccctttttgtaggtcaaatatcagcagattaatagggttcagtcgactgggtgcgatgtctcacacttgtaatcccagcactataggaggccaaggcaggcagatcatttgaggccaggaattcaagaccagcctagccaacgtgctgaaaccctgtctctactaaaaatataaaaattagccagacatggtaatgcattcctgtaatctaagctacttgggaggctgaggcaggagaattgattgaacccaggaggtggaggttgcagtgagctgagattgcgccactatactccagcctgggtgacagagcgagactctgtctca

SEQ ID NO: 233565 - DNA, 523 bp, Homo sapiens
ggaatcataccatatacacttttctaaatcttgctttttttccacttagcataatatcctagagatattttcatgtaagtacattagaatgtcctcattcctttttatggttccatggtgctttattgtatggatgtaactttatttttccagtcccctactggtgaacgtttgcttcaaatcttttgctcttccaaacaatgctgattttgtgcatatataattatgagcaccttagtgagtgtgcccgtggcataaacttgcggaagtagaattgttaggccaaaaggcatgtgcaacctgatgtaattgtatcaagaatgtatctgaatgcctgtcacctctcactcttgtcaatacagtgtgttaccaacctttttgacctttgccgatcagataggtgataatgttctctcttttcacttgtgttattatgagtgtggttgagccatttgtatttcgttttttgtagattgtttctatcttttgccgtttattaaaatttaatgtttaccttatcaaa

SEQ ID NO: 233566 - DNA, 1481 bp, Homo sapiens
agaactcccctgtttcccgagtgcataggaaagtgcttagcattgaatgtggagcgatagaatgaacaaagaaatgacaaaatgactaggtggatgaatgcatagcttaatatcagcgaggcaggaagtaaacaaagagacactgagcaccaagtaattcaatacaattcatcatgagaacttatctttaagctcctgtttcatgaggttagatactgtccaacatggttcttacagcacttgttttagctgacagcactggcattcagtgaaaattacagtgggcttgagtatctttggaaataacggttttgcaaatttgattaccattaaacagcctttataaaacacctacctgagtaggaatggagtatatatgttagccaagacttaattattcatctcaggaattggcacactatctgttggctaaagccatcttcctgtctacttaccttatctgtttttatagagcccatattctaaaaatgatttttacatttttatatgtttggggaaaaaaattcaaaagaatgatacatgataattacatgaattttgaatttttttgcccaccaacgaagttttattggaacacagcccgggaaacaacaacaacaaaaatgatactgaaaataataaatctatttatggacaaaagaataggagtcaaaaataggaggcaagagagcacactggaatttagggaaaaagaaagaaaggcaatttttggagcaagaatcatcattaatgtgtgtgatttgaggtgatacatggttaatgaacatttgctaattttttataattacacaaaatccatataaatatatttactttgattatatataaatatattaatattgttaaaaaattaaaacacttctaataaacaaaatcccttgaccactgagttatcacatcccaattccaggtccctctctggatcttttatgatggtcagcaagcatgcctgccagacgagccaaagggaaacatctttattgtattggatagtacacaaacccaatgtttactccttaggaaaacaccatctctatctttcaaggctcttcactatacaagcatccgtgaaaaatagttcgtaacaaagacaggtcttctgctcacaagatctgtagaaacatgagacccatagagaattgtctcccaacaatttccttcagagaggatttgcacttgattgcatcaagagccatggtatcctagcactttgggaggccgaggcgggcagatcacgaggtcaagagattgagaccatcctggctgacacggtgaaaccctgtctctactaaaaatacaaaaaaaattagcctggcatggtggcaggtgcctgtagtcccagctgcttgggaggctgaggaaggagaatggcttgaatccgggcggcagagcttgcagtgagctgagattgcgccactgcattccagcctgggtgacagagcgagactccatctcaaaag

SEQ ID NO: 233567 - DNA, 405 bp, Homo sapiens
gagagggtggctcccaaaggggctagaaaaggtataaaagggccagttcccaaatgcctgctttcctgacccagatcacaagacaaagcagcaccattgtttatcctctcatcccacagtctattgggggatgctcctgcccaggtggccccacatcccttaagcccagctttccttggggacaggggtgtagcggaatagtatggcttgagacagggatgtcaggcgggaatcggcaggcagcaggtgggcacctggccacagcagagccttgcctcacagcgcggctcctcctgacccagctgaccgcgtctccttgagtggcccagggaagagcttcagggaccttcaggcagatcctcccaccagcaaatgttaagaggtagaatgcaaggcgtttaatga

SEQ ID NO: 233568 - DNA, 488 bp, Homo sapiens
gctactggttgtcagtgacctcagtgctttcaggctatgtccttgtttactctgacagcaaggtggtattggagtgttatagggttacagagaagaccttcaattatcaattataggttttaaatttaccctggcttttaaaggactagggtacacttttttctttactacttccatttctttttctttctctttgacttcttttttgtctctctttttttctctttctgacttcctctttgtctcttcccctctctcactgtttctctttctctctgacttcctctttgtctctgtctcttcctctctctctctgactttctgtctctttctctctttcctttctgctggtctttccctgcctctgccagctgcttatgctgctgttctcccttctccttccccttttgatggcttcggcggtgtgagactgccacctctttggatttttgtactgcgtgcaataactccataatttccttgtggta

SEQ ID NO: 233569 - DNA, 274 bp, Homo sapiens
ctactggaagaactgctttatgttggctggagctgttttgtggctgggaagtagagatgagaataccatggcagctgcttgaaccatttggtgagaaacaggtagagagctactcaatcagggtaagaattgataaggaaaacagcatgatgtgacctctaacctaacccttccaaaagctcactaggttcaaaaccattccttccctttttctctctctccctacttacttctcctcttcttctcatcctctgcccctctgatctctttcttg

SEQ ID NO: 233570 - DNA, 452 bp, Homo sapiens
tacactgattctccaaacttggcagctgactgcatggagggctcatgatgaagaaacctcttttgccatcctgaggattctctgattcatattcgcctagatgtgctggaaacagtactggaccaaggtgcaaacttgagtctagtgaggtactaatgggctgaagtttttctgagcgtcactttcctcatctgtataatgaggggttggccaaggaaacccataaggttatcttccagctgactttctaattggtgaaccctttggaaaaggggtgcagcttgcttctggtcttcatcctcaagtatgctgtgcttggacaggggccaaaactaattcctccactcaccatttgcccagcataactacaacagtacctggcacatcgtggatgcttattaaatatttattgcaggaatgagtaaatataactaactgatcataaggtaaaa

SEQ ID NO: 233571 - DNA, 388 bp, Homo sapiens
tctctgacatgggtgagagatcctttataccccggatgccttcacatggaacaacctgtcttttttaaggggaagcaatttgggtcaacaagcatttatctaacaatagactggcttaccccacacccattctgaacctcctttcccttaccagtctccactctagaggctggaaaaatgagtatcttcttttctcatcttctgtagctgtagggaacatttgacagtgtcctggcagtgagagataggcagaaacctgcttgggttttggagaagcttgctttttaataaatgggacagatgtatctggcaccatcccttcctcctatatcctgccttgaatagggatgtgataccttgagccatggcatccacattgtgactgtaa

SEQ ID NO: 233572 - DNA, 382 bp, Homo sapiens
atcgatctcaggacaaggcctataaaaagagacaaagatgattatataataatggggtcagttcagcaagaggatataacaattgtaaataaatatgcacgcacctggcatggcggagcatgcatataatcccggaactttgggaggctgaggctagctgcttgcttgagctcaggagtttaagaccaggtgggcaacatggtgaaaccccatctctacaaaaaacagaaaaattatccaggtgtggaggcatacacctgtagtcccagctacttggaaggctggggtgggagaattgcttcagccagggaggttgagtctgcactaagctgtgatcttgccactgcatttcagtttgggtgacacagtgagaccctctcca

SEQ ID NO: 233573 - DNA, 411 bp, Homo sapiens
gttgaggtggggaggagcacatttcttcctggaagaagggcagtgtgttcagaagcacagaagcctgaggagggtgatggggtggctgcgggcgatcagctgagctggtgagtgggagtgggaggaaggactgggccaggtctcagtgccggctcccgagggcttcagtggagcccggtgccttcaggtccatgccgtagttgtccaccgcggagcagtcccgtgggaaggccagggcagctggacctcactccttaaagaggaatattaatcacgaatactttgagctgcaggtaacaggaaacgcaaccagcagagtctgaaaccaccacaacaacgcactttgtttacctagcaagaagcctgaaggttggcagtttcagggtgggtttgacagctccacgatgtctc

SEQ ID NO: 233574 - DNA, 792 bp, Homo sapiens
  misc_feature (13)..(13): n is a, c, g, or t
  misc_feature (214)..(214): n is a, c, g, or t
  misc_feature (341)..(341): n is a, c, g, or t
  misc_feature (359)..(359): n is a, c, g, or t
  misc_feature (418)..(418): n is a, c, g, or t
  misc_feature (429)..(429): n is a, c, g, or t
actattcttattnaaaaacctcaaattgatttaagatatgacacatttaggacactgcacactgcaccacatgaagggaaaagcaggtttctgttcccacatggaatacacggttttcctaaatccttaaacagacaaacagaaaagtgtattcaattatgattttaaacatattttctgttagcactggggctcaggggtttggggttccttnaattttaaagacaatgactcagggtggtagaaagagctggggatctgctgcaggtgagctgtggggtggcggggtccactccagtctgcgtgagtgtggggccccagggtgtgggcgtggaggtagntgtaagggtgggtgtaantgtgggtgggtgtgagtgtgggcgtggaggtagatgtaagcatgagtgtaagtgtgggngtggaggtagntgtaagcgtggacgcggactgcatgagtgtggggccccacggtgtggacgtgggtgtaagcgtgggtgtgcaggtagatgtaagtgtgggtgggtgtatgagtgcagcagcattacacagtatctttgaagtcaattagacaagagttgctcttctgccatttactagctacatgacctcaggagatttaattaaccctttcaaacacaatcgcctcacttatgaaataggagtgataatacttgccttgcaagcttgttgagaaaattgaatgtgacaaggcttgtgaagcacctggcatgtggtagacacatatgccattgctctccagcctgggagacagagcaagactgtctcaaaacc

SEQ ID NO: 233575 - DNA, 849 bp, Homo sapiens
tctgcccacctgctcctaaagttataagaaccctgacagggcaggacaaagtctttttttggagttgggaaggcacccaatgctcactttgcccctctgttgttgatgtttttaatattcctcaagtcaaaaacaaacacaggactctctcaacagaacaacgtaaagacagtctgcctgaggccacccaaagctgtcaggatttctaggacactggaacatttctttcctcaaaaagtggccacttcccattgctttttcccacactgcccttgagtgttgaggtctgggctcattgactcaccccctggactttggcatgaccatgatgagcgctcatcactgctgctgatggtgccgcctttgcttgggaggtcattctgatgctcattcaccttcatggactgcttcaaaggcaagcatccagcacctcgggcttactttccctgagatccaagaagaagcaaaaataaaatacaataaaaaatctaaaatttagagattctttccaagagaacagcttcaaactcagtgtcagatttcatgaataatggatgtgttgatacactcaactttcagcaaaaagaacagcacagcctctgacggtcccctcctcgacacaacttaatctgccttccacttaacaggctttgtttatctgtttttccccttagccgggccttcaacgctgcaccaggttataatgagaggacattttttgagcacaggcacccttgaacagaaatggcaattaactagtatcatcacaaatgctccaggcctttagtctttctcatggtgatgcctggagcaaaaaatgtgtttactcaagacagagcctattccggt

SEQ ID NO: 233576 - DNA, 372 bp, Homo sapiens
tctgcccacctgctcctaaagttataagaaccctgacagggcaggacaaagtctttttttggagttgggaaggcacccaatgctcactttgcccctctgttgttgatgtttttaatattcctcaagtcaaaaacaaacacaggactctctcaacagaacaacgtaaagacagtctgcctgaggccacccaaagctgtcaggatttctaggacactggaacatttctttcctcaaaaagtggccacttcccattgctttttcccacactgcccttgagtgttgaggtccgcaggcacgtggcctccctccaggctgctgaccctttcctcaccctgtctaccctaggcccatcattcctgactttacaccagc

SEQ ID NO: 233577 - DNA, 1161 bp, Homo sapiens
ggagactgcgaaagacaacagtggggacaactgagtgagcctccactgaatgtctgcagagaccggccagatgaggggatgatggagttgcctgcttgactcgttcctgtacttttatcccaacaaaacatgacacacaccgagatgtgaaagctgtcgacttttctttgtaaatgtttctacccaggaagacatgatttcacccaccatgaagccttctggaagcacattcctctgacgctgcagcagcgaaggacagggaaaagagaagttatcatttctttctcagaacctggccccatgagcctcagtgtagccctagttcctgggatcagcaccaacaggcagggaggagaggctctggcgccctgcagacagcaccaggttcttggcatcaggagctggatacagagtccctgataatcccagccacagaatatttcaaactcaccgacatgtcctctaaatatcagatatgaaaaggcttccactcttgcacctgtcttgctattattttacagatgtgttctaaaagctataaagacggaaatcactattagtgtgtcacttatgtgatattcagacacctgagctctgtgatgattttaatgccccacaggtctttcagaaatccacctcatatacctcagaacgcccctccatctgcaagggaacgcatgtggaacaggtggagaaggaattcttttaggcccatgggtagaattgtaaggactcttgtaaatgcttcttctgtagtagagaagctggacggtatgtgtgtgtgcttatgcgtgtttgaatggacgcaggaaaaatcaataatctgcttgcatcaacacctaaataaaaccaaaataatcccatgatttgcctaaaaccaaattaatctctaggaaaagcctgctgtgacagagttgtgtgggggcgggaattacaaaagaaacgcagaatttccccgagcttccgctttgcaggaatctctgttccgttactcactattttgagagagccctgcttcttcctccttctccccaccacacgtcaatgtcattttcacaggggggaggctacaggaagcacacatctgcagtgtgtcacctcccgaggctgacagatctactcagtatttgtttgggttgaaaatagttatttttttgtact

SEQ ID NO: 233578 - DNA, 554 bp, Homo sapiens
ggagactgcgaaagacaacagtggggacaactgagtgagcctccactgaatgtctgcagagaccggccagatgaggggatgatggagttgcctgcttgactcgttcctgtacttttatcccaacaaaacatgacacacaccgagatgtgaaagctgtcgacttttctttgtaaatgtttctacccaggaagacatgatttcacccaccatgaagccttctggaagcacattcctctgacgctgcagcagcgaaggacagggaaaagagaagttatcatttctttctcagaacctggccccatgagcctcagtgtagccctagttcctgggatcagcaccaacaggcagggaggagaggctctggcgccctgcagacagcaccaggttcttggcatcaggagctggatacagagtccctgataatcccagccacagaatatttcaaactcaccgacatgtcctctaaatatcagatatgaaaaggcttccactcttgcacctgtcttgctattattttacagatgtgttctaaaagctataaagacggaaatcac

SEQ ID NO: 233579 - DNA, 972 bp, Homo sapiens
  misc_feature (36)..(38): n is a, c, g, or t
ggcagggggtcgttgggcagaaagttaagtttggannngcctcgcgttagaaacatagtttaaaggacagggaaaagagaagttatcatttctttctcagaacctggccccatgagcctcagtgtagccctagttcctgggatcagcaccaacaggcagggaggagaggctctggcgccctgcagacagcaccaggttcttggcatcaggagctggatacagagtccctgataatcccagccacagaatatttcaaactcaccgacatgtcctctaaatatcagatatgaaaaggcttccactcttgcacctgtcttgctattattttacagatgtgttctaaaagctataaagacggaaatcactattagtgtgtcacttatgtgatattcagacacctgagctctgtgatgattttaatgccccacaggtctttcagaaatccacctcatatacctcagaacgcccctccatctgcaagggaacgcatgtggaacaggtggagaaggaattcttttaggcccatgggtagaattgtaaggactcttgtaaatgcttcttctgtagtagagaagctggacggtatgtgtgtgtgcttatgcgtgtttgaatggacgcaggaaaaatcaataatctgcttgcatcaacacctaaataaaaccaaaataatcccatgatttgcctaaaaccaaattaatctctaggaaaagcctgctgtgacagagttgtgtgggggcgggaattacaaaagaaacgcagaatttccccgagcttccgctttgcaggaatctctgttccgttactcactattttgagagagccctgcttcttcctccttctccccaccacacgtcaatgtcattttcacaggggggaggctacaggaagcacacatctgcagtgtgtcacctcccgaggctgacagatctactcagtatttgtttgggttgaaaatagttatttttttgtact

SEQ ID NO: 233580 - DNA, 355 bp, Homo sapiens
ggagactgcgaaagacaacagtggggacaactgagtgagcctccactgaatgtctgcagagaccggccagatgaggggatgatggagttgcctgcttgactcgttcctgtacttttatcccaacaaaacatgacacacaccgagatgtgaaagctgtcgacttttctttgtaaatgtttctacccaggaagacatgatttcacccaccatgaagccttctggaagcacattcctctgacgctgcagcagcggtaaggtttgtaggaaatacaacagtggatatgcctcctaataatacttaatttctttctcatttacctgcagttatttttaaaatctcgcagccgtattaaat

SEQ ID NO: 233581 - DNA, 476 bp, Homo sapiens
actcagggctagtgctacagaaatcccacttgggtgtgcacatgtggttaacattttcaaaggggagttttagtctgtatgtagggtaaaggcaagaaaggccatgacaagatcaacagtttactcaaaactaagcccaagaaaagcagttataaaggtcctgtctccatgcatctgaggtgtagcacagcccctaccacagttatgtctgcagaggggcataaacttcagtctataaaaacaaacagctttacatcaatcacaattaggattcagggtgttacttgttgatatatgtgaatagttacatatagctatatatgtataaatagttacatatagctatatacgtataaatccagttatacatatgtatgtatatgtataagtcttctcagtaaagccataggtaaataaatatttaaagtaatggaggaaattcttaacatgaaagtagcaaagactgtagaatgaca

SEQ ID NO: 233582 - DNA, 473 bp, Homo sapiens
gggtttcattcccagctctgccactaaatttactgtgtccttaattggcaagttgcttaacatcttggcactgttatctctttatctgttaaaggagagagtttgattagattgtctttaagaccattcccacttccagctctaaaagtctgtatttaagtgactctaagagactgtaataataatagataacatttgttgaccattaccttatgccatttacatgttgatttaatgctcataacaaccgtatgaggcaggcactgttattcccattttacagttgagaaaattgagactcagtttaaaacatgcacggggaacaaggtagctttttggggtggtggaaatgttctaacacttggttctggtcatggttgcagaactctgtagatttagagttgtatatttcgagtgggtgaattttataatatgtaaattgtacctcaataaagctgttgaaaagaaataaa

SEQ ID NO: 233583 - DNA, 1716 bp, Homo sapiens
  misc_feature (889)..(889): n is a, c, g, or t
  misc_feature (1136)..(1136): n is a, c, g, or t
gtgagagaatgcttgtctgtgaaagtcacctgtaagatgagaacttaaaaatgattgagttggctgggcacggtggctaatgcctataatcccagaactttggggggctgaggtgggtgaatcactttgagctcaggagtttgagaccagcctgggcaacatggggagacccttcctctactaaaaacacaaaaattaatcaggcatggtggctaacacctgtaatcccagctactcagctggctgagtctgaaggatcacttgagcctgggaggcagaggttgcagtgagcggagactgcaccaccgcactccagcctgggagacagagtgagaccctgtctccaatatatatatatattaaataaatggttaagagctaaccaaagcatatagaggaatagctttatagcaaataatgtaatgtggaaatgcatagggcaggatagaactttgcaacttcaagaaaatagaacacaggaggctaatgcctgtaatcccagcattttgggaggccaaggtgggagaattccttgagcccaggagtttaagtttaagaccagcctgggaaaagtagcaagacctcatcattatgaaaaaattaaaaatcagccaagtgcagtggtgcttgcccagagtcctagctactcaggaggctgaggcaggaggacccagcatgagcacaggagttcaaggctatggtgagctatgatcatgccctgcacttcagcttgggtgacagaccagaattccatctcaattttttaaacgaaaatagaagaaagacaggcgattggaacaagagaagactgaataagagtggtgtcataattggaggggtataaaggggtcaggtcttgaaaggactggcagaggactttgaggagatnagagtttgtctaagctctagagaagatcttgaagaatttttggcagtgaggtaaggttatctaatttatgtttatacatatctttctgaatattttgtagataatttgttggagtagtgaaagggagggaatgagaggatggatgctatttgcagtggttgagccataaatgggcattgggttagtctcagattatgacagtgaaaatggtgaaaatggacaagatccgaacatactttggatattnaatctaaaaggcctgttgatagagggaatatggatttatgaagggaataagaaggaaatgccaagcctgtctccagcgtttcgagtttagcaattgcttgaatggctgtgttatttaatgagatagtagcatcaagaggagaaatagtttttcagagtggatgaagttttgatatttagattatttaatattgagattcttctgatttatgcagtaaggaatataagataggcattaaaaataaggtgcaaaacttattttgaatccaaagcttaaaagaaatgtcaaagcaggaaacaaaatacaccagccatccatacagatggtacttaaaaccgcagagagatgagaaggtccaggattgagtcaaaaagaatcatcttttgttgtgtgatcaaccactccagtttgcctaagatgaggttttcctggcatgtgagactttcagtgctacacccagcaaagccctggcaaactcgatgagttgattatcctatctgtagttctgatgagagaatatctaagaagacatatttacctaagccagacaccagactagtgactagtggtctgcaccact

SEQ ID NO: 233584 - DNA, 635 bp, Homo sapiens
cgttttcctgaactcctaacctcagtcaatactgcctcgggacctggcgctgcctgggagatccagaagaaaggaagcatcttggcccctgccttgggggcgacacgaccgtccccaaacacagcgagtcactggcctgggtctttgtgcagaggcccctctaggagcggggaaccaacgatggcacgaacattgatttgaggaggatgcttcgcagtttacgaaaaaatgagtgctagaggcgttcagaaacgggaaagatcactttgtgctcctgtgatctgaaggctgcgtgaagaagatgaggcttggaaaataggtgattctcacaagaaggcttcaataatctccatgttagagatgaagagactcaagtaactgaaagttacttaaggccaatggggaccctgtgcagctatatatccagtgtcccaagcactgtgtctggcatgttagtaaacatgtttcataggttctgtcaggtgagctgttgtgctgtatgtctgacctgaattgccttttaggagggaatcagtacttggaagctggaatacatcagggatacccctaaaacgagagactatttttttccattggattctgacataaataaattttgcctactttgacagtca

SEQ ID NO: 233585 - DNA, 802 bp, Homo sapiens
cgttttcctgaactcctaacctcagtcaatactgcctcgggacctggcgctgcctgggagatccagaagaaaggaagcatcttggcccctgccttgggggcgacacgaccgtccccaaacacagcgagtcactggcctgggtctttgtgcagaggcccctctaggagcggggaaccaacgatggcacgaacattgatttgaggaggatgcttcgcagtttacgaaaaaatgagtgctagaggcgttcagaaacgggaaagatcactttgtgctcctgtgatctgaaggctgcgtgaagaagatgaggcttggaaaataggacttaccacattacaggacagaccacagtgcatgtctgtctgctccaacagaagtggctttcttgagggaaggaattctgccttgttcaactttatattcccccacagtgccttgcagaaagtaggagcccagaaaatgtgtactgaattgctcagaattgtgtggtgaggtagaaagtattgcttaatctctccgagacctcaatttccttatttgtaaattaaactgctgattaatttctaaagttcttttgagttacagaattctgttacccaacaaggtttcagagattgagaagattgaattatttgatttctaaattctttttcaacttcaatattaaatgattttatataaacaaaaaataaaaaaaaaaaaaaagggggggggtaaaaaagaaccgggggggcaagttagggtaccggtttttggaaagggggccagggggggattaaaaggggggggggtaaaaggggtggaa

SEQ ID NO: 233586 - DNA, 629 bp, Homo sapiens
  misc_feature (20)..(20): n is a, c, g, or t
  misc_feature (57)..(57): n is a, c, g, or t
ctataatgtctgatgacagncctgggctgctcaactccccctctagagttttgcggntacttccgtaggatgaatttcagcactgcaggaacatctgagggggctaaaatatcttcatgcaagcttccaaacccataaactattttgctatcaattaaaacaaaaatattaattaaaaacaataaaaaggacagcacggttcgtttttcctttagtcaggaaggacgttggtgttgaggttagcatacgtatcaaggacagtaactaccatggctcccgaagttttgccaaaacctcggatgcgtggccttctggccaggcgtctgcgaaatcatatggctgtagcattcgtgctatccctgggggttgcagctttgtataagtttcgtgtggctgatcaaagaaagaaggcatacgcagatttctacagaaactacgatgtcatgaaagattttgaggagatgaggaaggctggtatctttcagagtgtaaagtaatcttggaatataaagaatttcttcaggttgaattacctagaagtttgtcactgacttgtgttcctgaactatgacacatgaatatgtgggctaagaaatagttcctcttgataaataaacaattaacaaata

SEQ ID NO: 233587 - DNA, 505 bp, Homo sapiens
  misc_feature (13)..(13): n is a, c, g, or t
  misc_feature (23)..(23): n is a, c, g, or t
tcccccgggctgncaggaattcngcggccgcgtcgacacggctgcgagaaagacgacagaagggggacagcacggttcgtttttcctttagtcaggaaggacgttggtgttgaggttagcatacgtatcaaggacagtaactaccatggctcccgaagttttgccaaaacctcggatgcgtggccttctggccaggcgtctgcgaaatcatatggctgtagcattcgtgctatccctgggggttgcagctttgtataagtttcgtgtggctgatcaaagaaagaaggcatacgcagatttctacagaaactacgatgtcatgaaagattttgaggagatgaggaaggctggtatctttcagagtgtaaagtaatcttggaatataaagaatttcttcaggttgaattacctagaagtttgtcactgacttgtgttcctgaactatgacacatgaatatgtgggctaagaaatagttcctcttgataaataaacaattaacaaata

SEQ ID NO: 233588 - DNA, 561 bp, Homo sapiens
ggtcacaacggcaccctcccgctttctctctgcctcggatttagtcgtgactgtgtgtctccgccgtggtgcagcttcaggcctctcccgcatctactctctcacgcttccgctgcggcctgagggagggcggcgggcggaccacggaccggaaggacgttggtgttgaggttagcatacgtatcaaggacagtaactaccatggctcccgaagttttgccaaaacctcggatgcgtggccttctggccaggcgtctgcgaaatcatatggctgtagcattcgtgctatccctgggggttgcagctttgtataagtttcgtgtggctgatcaaagaaagaaggcatacgcagatttctacagaaactacgatgtcatgaaagattttgaggagatgaggaaggctggtatctttcagagtgtaaagtaatcttggaatataaagaatttcttcaggttgaattacctagaagtttgtcactgacttgtgttcctgaactatgacacatgaatatgtgggctaagaaatagttcctcttgataaataaacaattaacaaata

SEQ ID NO: 233589 - DNA, 530 bp, Homo sapiens
gcaggaggggaaggatgggcttcctgcaacctcccttgccccacggcttcccatcctacccccggccgcgttagctgaaggccagcagggacgcaaaagtttttaggccccttaggtctttaaggacgttggtgttgaggttagcatacgtatcaaggacagtaactaccatggctcccgaagttttgccaaaacctcggatgcgtggccttctggccaggcgtctgcgaaatcatatggctgtagcattcgtgctatccctgggggttgcagctttgtataagtttcgtgtggctgatcaaagaaagaaggcatacgcagatttctacagaaactacgatgtcatgaaagattttgaggagatgaggaaggctggtatctttcagagtgtaaagtaatcttggaatataaagaatttcttcaggttgaattacctagaagtttgtcactgacttgtgttcctgaactatgacacatgaatatgtgggctaagaaatagttcctcttgataaataaacaattaacaaata

SEQ ID NO: 233590 - DNA, 441 bp, Homo sapiens
taaattcgcggccgcgtcgacctttagtcaggaaggacgttggtgttgaggttagcatacgtatcaaggacagtaactaccatggctcccgaagttttgccaaaacctcggatgcgtggccttctggccaggcgtctgcgaaatcatatggctgtagcattcgtgctatccctgggggttgcagctttgtataagtttcgtgtggctgatcaaagaaagaaggcatacgcagatttctacagaaactacgatgtcatgaaagattttgaggagatgaggaaggctggtatctttcagagtgtaaagtaatcttggaatataaagaatttcttcaggttgaattacctagaagtttgtcactgacttgtgttcctgaactatgacacatgaatatgtgggctaagaaatagttcctcttgataaataaacaattaacaaata

SEQ ID NO: 233591 - DNA, 867 bp, Homo sapiens
  misc_feature (469)..(469): n is a, c, g, or t
  misc_feature (471)..(471): n is a, c, g, or t
  misc_feature (483)..(483): n is a, c, g, or t
  misc_feature (491)..(491): n is a, c, g, or t
taaattcgcggccgcgtcgacctttagtcaggaaggacgttggtgttgaggttagcatacgtatcaaggacagtaactaccatggctcccgaagttttgccaaaacctcggatgcgtggccttctggccaggcgtctgcgaaatcatatggctgtagcattcgtgctatccctgggggttgcagctttgtataagtttcgtgtggctgatcaaagaaagaaggcatacgcagatttctacagaaactacgatgtcatgaaagattttgaggagatgaggaaggctggtatctttcagagtgtaaagtaatcttggaatataaagaatttcttcaggttgaattacctagaagtttgtcactgacttgtgttcctgaactatgacacatgaatatgtgggctaagaaatagttcctcttgataaataaacaattaacaaataaaaaaaaaaaaaaaaaaaaaaaaaaaananaaaataaaaaanaaaaaaanaaaaaaagaatagaaaaaaaaaaaaaaaaagaagggggggggggtaaataaaactctacggggggggacgacaagtattatgaggcgcagcccgctttatgctttatgaaggggggcgccttctaatagaggggtgtgcattaataaatgagcgacagacggcggcggcggtatttaaaaaagacagggtggtgaggggagaaaacagtatgcggggttgttcttggaaggaggaccacatactcagtggggggggtggataatggggggacacactacgtaaagatagtacggtcggggaatgaaaacattggagctttgaggtgaaacacgaggaattaggcgtcgagagtgtgtgtggattattagagatgga

SEQ ID NO: 233592 - DNA, 861 bp, Homo sapiens
  misc_feature (585)..(585): n is a, c, g, or t
  misc_feature (689)..(689): n is a, c, g, or t
attctgcttttgcgcgcggctacagcacggttcgtttttcctttagtcaggaaggacgttggtgttgaggttagcatacgtatcaaggacagtaactaccatggctcccgaagttttgccaaaacctcggatgcgtggccttctggccaggcgtctgcgaaatcatatggctgtagcattcgtgctatccctgggggttgcagctttgtataagtttcgtgtggctgatcaaagaaagaaggcatacgcagatttctacagaaactacgatgtcatgaaagattttgaggagatgaggaaggctggtatctttcagagtgtaaagtaatcttggaatataaaggtctccctctgtcacccaggccgtagtgctgtagtgcgatcatggctcactgcagcctcaacctcccaggctcaagggatcttcctgcctcagcctcccaagaagctggcactataggcatgtgccaccacacctggctaacttctttatttttagtagagacagggtttcaccatattacctgggctgtgcttgaattcctgggctcaggcgatccgtccaccttggcctcccaaagtgtngggattacaggcgtgagccactgtgcctggcataatttggtattttttgatagtagccatcctaataggtatgaggtggtatcatgtggtttgattgcattccngattattgtgtctgagcatctttcatgtcttatggcattgatgtatctttggcagaaatgtttattcagttctgctcattttcaaatttggtatttggtcaatggttgaagtgttctgtatatatctggatatttaccccttatcagatattgattgtcacctattttctcc

SEQ ID NO: 233593 - DNA, 808 bp, Homo sapiens
  misc_feature (20)..(20): n is a, c, g, or t
  misc_feature (57)..(57): n is a, c, g, or t
  misc_feature (664)..(664): n is a, c, g, or t
  misc_feature (666)..(666): n is a, c, g, or t
  misc_feature (670)..(670): n is a, c, g, or t
ctataatgtctgatgacagncctgggctgctcaactccccctctagagttttgcggntacttccgtaggatgaatttcagcactgcaggaacatctgagggggctaaaatatcttcatgcaagcttccaaacccataaactattttgctatcaattaaaacaaaaatattaattaaaaacaataaaaaggacagcacggttcgtttttcctttagtcaggaaggacgttggtgttgaggttagcatacgtatcaaggacagtaactaccatggctcccgaagttttgccaaaacctcggatgcgtggccttctggccaggcgtctgcgaaatcatatggctgtagcattcgtgctatccctgggggttgcagctttgtataagtttcgtgtggctgatcaaagaaagaaggcatacgcagatttctacagaaactacgatgtcatgaaagattttgaggagatgaggaaggctggtatctttcagagtgtaaagtaatcttggaatataaagaatttcttcaggttgaattacctagaagtttgtcactgacttgtgttcctgaactatgacacatgaatatgtgggctaagaaatagttcctcttgataaataaacaattaacaaataaaaaaaaaaaaaaaaaaaaaaaaaaaaaaacaagnanaaangcagaaaagagaagaaagaagaacaaagaaggaagcataaagaagaaaaacgaggaagaaagagaggaggcgagagcggcagccaagaaaacggagacgaggagcggaaaacacgggcggcgacacacgcaggcgggg

SEQ ID NO: 233594 - DNA, 1182 bp, Homo sapiens
  misc_feature (818)..(818): n is a, c, g, or t
  misc_feature (836)..(836): n is a, c, g, or t
  misc_feature (839)..(839): n is a, c, g, or t
  misc_feature (870)..(870): n is a, c, g, or t
  misc_feature (878)..(878): n is a, c, g, or t
  misc_feature (886)..(886): n is a, c, g, or t
  misc_feature (891)..(891): n is a, c, g, or t
  misc_feature (893)..(893): n is a, c, g, or t
  misc_feature (942)..(942): n is a, c, g, or t
tgtgagctcctagaagtcagcttcttcacttttaccccagccacacggttattcgcgtaaggttggttataatttaaatgtcggtttgtgcacatggtttgggactctgtgtatgagtacgactaatatcttccatttactaagaagataaagaggtcgataaataaggaggtcaagcccgttttgcaaggtcacacaggaaagaagcagaccacgaaatgaacttcggctgtcacctgcggtgggcgcactagaggtcttttgaactccttcggctaccgtcgccgcgttctcgctgtgcactcttattctgcgcctgcgcgcggctacagcacggttcgtttttcctttagtcaggaaggacgttggtgttgaggttagcatacgtatcaaggacagtaactaccatggctcccgaagttttgccaaaacctcggatgcgtggccttctggccaggcgtctgcgaaatcatatggctgtagcattcgtgctatccctgggggttgcagctttgtataagtttcgtgtggctgatcaaagaaagaaggcatacgcagatttctacagaaactacgatgtcatgaaagattttgaggagatgaggaaggctggtatctttcagagtgtaaagtaatcttggaatataaagaatttcttcaggttgaattacctagaagtttgtcactgacttgtgttcctgaactatgacacatgaatatgtgggctaagaaatagttcctcttgataaataaacaattaacaaataaaaaaaaaaaaaaaaaaaaaaaaaaaaaaatttttggggggcttgggcccngaaaaagtttttaaaccnttncttggggggggggggcccgtggtttggaacngggcaagngggtcccnaggananccgggcggactgggggtgggttttctcccccataaaaaaggccggcggnacggagggtttcggactaccgcagggttgcgcggggttcccggttctcccacgggtcgcccggcttcgcatcaccgccgccgccgcggggaaaacaacacaggcaaatcgaaaaaacaagagaacaaaaaaaagaaagaagcaaaacaaaaaaatagaaagaccacacaagaacaaagaacaagacaagaatcacacaaatacgagaaaagatagagagaagaaaagaagaacgagataa

SEQ ID NO: 233595 - DNA, 794 bp, Homo sapiens
agtttcaggggccccccccacccggtttctagccaacaatgaaatatacagccagtgtcagcacagttttgcccatagtaccatccaattaagggattggcagcttcccattctctagcaccagatccatttaattaaaatggtttaaatggctgaggaggaacaggttccccaattcacagccccaatttagaaaggcctgtgccttgaaccagttttctaatttgggcttttaggagatgccctctgaaataattcatcatgttgatttttctaaccattagtgtaaatgggacttctttgccctcattttaactagccaactagttaatcagaaaatgatagtctctgtagttttaaaaaattgttaatgctcgtgccgaataaggacgttggtgttgaggttagcatacgtatcaaggacagtaactaccatggctcccgaagttttgccaaaacctcggatgcgtggccttctggccaggcgtctgcgaaatcatatggctgtagcattcgtgctatccctgggggttgcagctttgtataagtttcgtgtggctgatcaaagaaagaaggcatacgcagatttctacagaaactacgatgtcatgaaagattttgaggagatgaggaaggctggtatctttcagagtgtaaagtaatcttggaatataaagaatttcttcaggttgaattacctagaagtttgtcactgacttgtgttcctgaactatgacacatgaatatgtgggctaagaaatagttcctcttgataaataaacaattaacaaata

SEQ ID NO: 233596 - DNA, 1054 bp, Homo sapiens
  misc_feature (1054)..(1054): n is a, c, g, or t
tgtgagctcctagaagtcagcttcttcacttttaccccagccacacggttattcgcgtaaggttggttataatttaaatgtcggtttgtgcacatggtttgggactctgtgtatgagtacgactaatatcttccatttactaagaagataaagaggtcgataaataaggaggtcaagcccgttttgcaaggtcacacaggaaagaagcagaccacgaaatgaacttcggctgtcacctgcggtgggcgcactagaggtcttttgaactccttcggctaccgtcgccgcgttctcgctgtgcactcttattctgcgcctgcgcgcggctacagcacggttcgtttttcctttagtcaggaaggacgttggtgttgaggttagcatacgtatcaaggacagtaactaccatggctcccgaagttttgccaaaacctcggatgcgtggccttctggccaggcgtctgcgaaatcatatggctgtagcattcgtgctatccctgggggttgcagctttgtataagtttcgtgtggctgatcaaagaaagaaggcatacgcagatttctacagaaactacgatgtcatgaaagattttgaggagatgaggaaggctggtatctttcagagtgtaaagtaatcttggaatataaagaatttcttcaggttgaattacctagaagtttgtcactgacttgtgttcctgaactatgacacatgaatatgtgggctaagaaatagttcctcttgataaataaacaattaacaaataaaaaaaaaaaaaaaaaaaaaaccgtcctgcagcagtctgcctcctttttcaacatgacagatgccgctgtgtccttcgccaaggacttcctggcaggtggagtggccgcagccatctccaagacggcggtagcgcccatcgagcgggtcaagctgctgttgcaggtgcagcatgccagcaagcaaatcactgcagataagcaatacaaaggctttatagactgggtgggccgtattccaaggagcaaggaggtttgtccttctgcgcggtaacctggccaatgtatn

SEQ ID NO: 233597 - DNA, 1204 bp, Homo sapiens
tgtgagctcctagaagtcagcttcttcacttttaccccagccacacggttattcgcgtaaggttggttataatttaaatgtcggtttgtgcacatggtttgggactctgtgtatgagtacgactaatatcttccatttactaagaagataaagaggtcgataaataaggaggtcaagcccgttttgcaaggtcacacaggaaagaagcagaccacgaaatgaacttcggctgtcacctgcggtgggcgcactagaggtcttttgaactccttcggctaccgtcgccgcgttctcgctgtgcactcttattctgcgcctgcgcgcggctacagcacggttcgtttttcctttagtcaggaaggacgttggtgttgaggttagcatacgtatcaaggacagtaactaccatggctcccgaagttttgccaaaacctcggatgcgtggccttctggccaggcgtctgcgaaatcatatggctgtagcattcgtgctatccctgggggttgcagctttgtataagtttcgtgtggctgatcaaagaaagaaggcatacgcagatttctacagaaactacgatgtcatgaaagattttgaggagatgaggaaggctggtatctttcagagtgtaaagtaatcttggaatataaagaatttcttcaggttgaattacctagaagtttgtcactgacttgtgttcctgaactatgacacatgaatatgtgggctaagaaatagttcctcttgataaataaacaattaacaaatactttggacagtaagtctttctcagttcttaatgataatgcagggcacttactagcataagaattggtttgggatttaactgtttatgaagctaacttgatttccgtgttttgttaaaatttcattgttctagcacatcttaactgtgatagttgtccgttcattgcagttacttggcctgggctatggattaaaagtgtctccatggcctgtaagactactgtactggtgggtctaagaagagatagaatctaataaaatctatcctgggcttcattgcactatttggtagctgtggcaacaacacattagttgaaatagctcattcaaatgtagggttcttatcagaatgggttcttaataacaaggtaacagttgtactgacatggggattttttctatccgaaaacgtacttactcgagggtccgttatatgcc

SEQ ID NO: 233598 - DNA, 802 bp, Homo sapiens
tgtgagctcctagaagtcagcttcttcacttttaccccagccacacggttattcgcgtaaggttggttataatttaaatgtcggtttgtgcacatggtttgggactctgtgtatgagtacgactaatatcttccatttactaagaagataaagaggtcgataaataaggaggtcaagcccgttttgcaaggtcacacaggaaagaagcagaccacgaaatgaacttcggctgtcacctgcggtgggcgcactagaggtcttttgaactccttcggctaccgtcgccgcgttctcgctgtgcactcttattctgcgcctgcgcgcggctacagcacggttcgtttttcctttagtcaggaaggacgttggtgttgaggttagcatacgtatcaaggacagtaactaccatggctcccgaagttttgccaaaacctcggatgcgtggccttctggccaggcgtctgcgaaatcatatggctgtagcattcgtgctatccctgggggttgcagctttgtataagtttcgtgtggctgatcaaagaaagaaggcatacgcagatttctacagaaactacgatgtcatgaaagattttgaggagatgaggaaggctggtatctttcagagtgtaaagtaatcttggaatataaagaatttcttcaggttgaattacctagaagtttgtcactgacttgtgttcctgaactatgacacatgaatatgtgggctaagaaatagttcctcttgataaataaacaattaacaaatactttggaaaaaatattttatttaaaagacatcctc

SEQ ID NO: 233599 - DNA, 968 bp, Homo sapiens
tgtgagctcctagaagtcagcttcttcacttttaccccagccacacggttattcgcgtaaggttggttataatttaaatgtcggtttgtgcacatggtttgggactctgtgtatgagtacgactaatatcttccatttactaagaagataaagaggtcgataaataaggaggtcaagcccgttttgcaaggtcacacaggaaagaagcagaccacgaaatgaacttcggctgtcacctgcggtgggcgcactagaggtcttttgaactccttcggctaccgtcgccgcgttctcgctgtgcactcttattctgcgcctgcgcgcggctacagcacggttcgtttttcctttagtcaggaaggacgttggtgttgaggttagcatacgtatcaaggacagtaactaccatggctcccgaagttttgccaaaacctcggatgcgtggccttctggccaggcgtctgcgaaatcatatggctgtagcattcgtgctatccctgggggttgcagctttgtataagtttcgtgtggctgatcaaagaaagaaggcatacgcagatttctacagaaactacgatgtcatgaaagattttgaggagatgaggaaggctggtatctttcagagtgtaaagtaatcttggaatataaagaatttcttcaggttgaattacctagaagtttgtcactgacttgtgttcctgaactatgacacatgaatatgtgggctaagaaatagttcctcttgataaataaacaattaacaaataaaactcaccaaaaaagggggccaacaccgctgtaaaaaataaattcgcctttttccgcaaagcatatataaatttttgtgttttcctttgtgggcccggcttggccccaagtcttttttatttttgggaaggttttatctctgcgggcccgattttggaccttacttgggccaattcgccctttaaggggggggaattcac

SEQ ID NO: 233600 - DNA, 1168 bp, Homo sapiens
  misc_feature (892)..(892): n is a, c, g, or t
  misc_feature (996)..(996): n is a, c, g, or t
tgtgagctcctagaagtcagcttcttcacttttaccccagccacacggttattcgcgtaaggttggttataatttaaatgtcggtttgtgcacatggtttgggactctgtgtatgagtacgactaatatcttccatttactaagaagataaagaggtcgataaataaggaggtcaagcccgttttgcaaggtcacacaggaaagaagcagaccacgaaatgaacttcggctgtcacctgcggtgggcgcactagaggtcttttgaactccttcggctaccgtcgccgcgttctcgctgtgcactcttattctgcgcctgcgcgcggctacagcacggttcgtttttcctttagtcaggaaggacgttggtgttgaggttagcatacgtatcaaggacagtaactaccatggctcccgaagttttgccaaaacctcggatgcgtggccttctggccaggcgtctgcgaaatcatatggctgtagcattcgtgctatccctgggggttgcagctttgtataagtttcgtgtggctgatcaaagaaagaaggcatacgcagatttctacagaaactacgatgtcatgaaagattttgaggagatgaggaaggctggtatctttcagagtgtaaagtaatcttggaatataaaggtctccctctgtcacccaggccgtagtgctgtagtgcgatcatggctcactgcagcctcaacctcccaggctcaagggatcttcctgcctcagcctcccaagaagctggcactataggcatgtgccaccacacctggctaacttctttatttttagtagagacagggtttcaccatattacctgggctgtgcttgaattcctgggctcaggcgatccgtccaccttggcctcccaaagtgtngggattacaggcgtgagccactgtgcctggcataatttggtattttttgatagtagccatcctaataggtatgaggtggtatcatgtggtttgattgcattccngattattgtgtctgagcatctttcatgtcttatggcattgatgtatctttggcagaaatgtttattcagttctgctcattttcaaatttggtatttggtcaatggttgaagtgttctgtatatatctggatatttaccccttatcagatattgattgtcacctattttctcc

SEQ ID NO: 233601 - DNA, 713 bp, Homo sapiens
tgtgagctcctagaagtcagcttcttcacttttaccccagccacacggttattcgcgtaaggttggttataatttaaatgtcggtttgtgcacatggtttgggactctgtgtatgagtacgactaatatcttccatttactaagaagataaagaggtcgataaataaggaggtcaagcccgttttgcaaggtcacacaggaaagaagcagaccacgaaatgaacttcggctgtcacctgcggtgggcgcactagaggtcttttgaactccttcggctaccgtcgccgcgttctcgctgtgcactcttattctgcgcctgcgcgcggctacagcacggttcgtttttcctttagtcaggaaggacgttggtgttgaggttagcatacgtatcaaggacagtaactaccatggctcccgaagttttgccagcattcgtgctatccctgggggttgcagctttgtataagtttcgtgtggctgatcaaagaaagaaggcatacgcagatttctacagaaactacgatgtcatgaaagattttgaggagatgaggaaggctggtatctttcagagtgtaaagtaatcttggaatataaagaatttcttcaggttgaattacctagaagtttgtcactgacttgtgttcctgaactatgacacatgaatatgtgggctaagaaatagttcctcttgataaataaacaattaacaaata

SEQ ID NO: 233602 - DNA, 448 bp, Homo sapiens
  misc_feature (33)..(33): n is a, c, g, or t
  misc_feature (36)..(36): n is a, c, g, or t
gagggccggggggggtgttgagatcgtttgccnttngcaaaggacgttggtgttgaggttagcatacgtatcaaggacagtaactaccatggctcccgaagttttgccaaaacctcggatgcgtggccttctggccaggcgtctgcgaaatcatatggctgtagcattcgtgctatccctgggggttgcagctttgtataagtttcgtgtggctgatcaaagaaagaaggcatacgcagatttctacagaaactacgatgtcatgaaagattttgaggagatgaggaaggctggtatctttcagagtgtaaagtaatcttggaatataaagaatttcttcaggttgaattacctagaagtttgtcactgacttgtgttcctgaactatgacacatgaatatgtgggctaagaaatagttcctcttgataaataaacaattaacaaata

SEQ ID NO: 233603 - DNA, 410 bp, Homo sapiens
  misc_feature (24)..(24): n is a, c, g, or t
ttaggtctttgccggacaactttngttaaatccttccttggcatactaccatggctcccgaagttttgccaaaacctcggatgcgtggccttctggccaggcgtctgcgaaatcatatggctgtagcattcgtgctatccctgggggttgcagctttgtataagtttcgtgtggctgatcaaagaaagaaggcatacgcagatttctacagaaactacgatgtcatgaaagattttgaggagatgaggaaggctggtatctttcagagtgtaaagtaatcttggaatataaagaatttcttcaggttgaattacctagaagtttgtcactgacttgtgttcctgaactatgacacatgaatatgtgggctaagaaatagttcctcttgataaataaacaattaacaaata

SEQ ID NO: 233604 - DNA, 460 bp, Homo sapiens
attctgcttttgcgcgcggctacagcacggttcgtttttcctttagtcaggaaggacgttggtgttgaggttagcatacgtatcaaggacagtaactaccatggctcccgaagttttgccaaaacctcggatgcgtggccttctggccaggcgtctgcgaaatcatatggctgtagcattcgtgctatccctgggggttgcagctttgtataagtttcgtgtggctgatcaaagaaagaaggcatacgcagatttctacagaaactacgatgtcatgaaagattttgaggagatgaggaaggctggtatctttcagagtgtaaagtaatcttggaatataaagaatttcttcaggttgaattacctagaagtttgtcactgacttgtgttcctgaactatgacacatgaatatgtgggctaagaaatagttcctcttgataaataaacaattaacaaata

SEQ ID NO: 233605 - DNA, 1316 bp, Homo sapiens
tgtgagctcctagaagtcagcttcttcacttttaccccagccacacggttattcgcgtaaggttggttataatttaaatgtcggtttgtgcacatggtttgggactctgtgtatgagtacgactaatatcttccatttactaagaagataaagaggtcgataaataaggaggtcaagcccgttttgcaaggtcacacaggaaagaagcagaccacgaaatgaacttcggctgtcacctgcggtgggcgcactagaggtcttttgaactccttcggctaccgtcgccgcgttctcgctgtgcactcttattctgcgcctgcgcgcggctacagcacggttcgtttttcctttagtcaggaaggacgttggtgttgaggttagcatacgtatcaaggacagtaactaccatggctcccgaagttttgccaaaacctcggatgcgtggccttctggccaggcgtctgcgaaatcatatggctgtagcattcgtgctatccctgggggttgcagctttgtataagtttcgtgtggctgatcaaagaaagaaggcatacgcagatttctacagaaactacgatgtcatgaaagattttgaggagatgaggaaggctggtatctttcagagtgtaaagtaatcttggaatataaagaatttcttcaggttgaattacctagaagtttgtcactgacttgtgttcctgaactatgacacatgaatatgtgggctaagaaatagttcctcttgataaataaacaattaacaaataaaaaaaaacaaaaaaacaatataacaaaaaaaaaaaaaaaaaaaaaactcccggggcctccttttcgcgcggggcgcgggaacaacaggcggcgtttggaatgggcgcactggggccaaagtgggttcctggccccagttttctttggtcccaagggggagaacccgcgggggcccccaaaaagggagagcccgataaaaatcgcaaaaaacgccggggtagcccggcttaagagacccccggaaaaaaaccacaaacaaccaacaaacgaggggcgcaatccgacgaggcaggacgcccacaggtgtgcaaacacaaagccgggcggggggaaacacgtcgtagaacagtggccgataacaaacgcatccgcggcgaagagaaagacaaccaggggcaaagtcatcatacagaagcagagtagagagccgagcgacatagaaagatcaaccagcgaagaggaggggacagcacgcaatgggaagctaaaaagcgggaagacggccagtcgcgaaggacaattcaagcgataacgaaaccgtcgtcggc

SEQ ID NO: 233606 - DNA, 1097 bp, Homo sapiens
  misc_feature (795)..(795): n is a, c, g, or t
  misc_feature (797)..(797): n is a, c, g, or t
tgtgagctcctagaagtcagcttcttcacttttaccccagccacacggttattcgcgtaaggttggttataatttaaatgtcggtttgtgcacatggtttgggactctgtgtatgagtacgactaatatcttccatttactaagaagataaagaggtcgataaataaggaggtcaagcccgttttgcaaggtcacacaggaaagaagcagaccacgaaatgaacttcggctgtcacctgcggtgggcgcactagaggtcttttgaactccttcggctaccgtcgccgcgttctcgctgtgcactcttattctgcgcctgcgcgcggctacagcacggttcgtttttcctttagtcaggaaggacgttggtgttgaggttagcatacgtatcaaggacagtaactaccatggctcccgaagttttgccaaaacctcggatgcgtggccttctggccaggcgtctgcgaaatcatatggctgtagcattcgtgctatccctgggggttgcagctttgtataagtttcgtgtggctgatcaaagaaagaaggcatacgcagatttctacagaaactacgatgtcatgaaagattttgaggagatgaggaaggctggtatctttcagagtgtaaagtaatcttggaatataaagaatttcttcaggttgaattacctagaagtttgtcactgacttgtgttcctgaactatgacacatgaatatgtgggctaagaaatagttcctcttgataaataaacaattaacaaataaaaaaaaaaaaaaaaaaaaaaaaaaaanantgtgtggcgcgcggcctatgggccctctaagaaaagttcttctaaaaccattccggtggggcgcgcggcgggcccccatgtgggctacggcgacccgtggcgccacaaggggtgttccccaggggaaaccccggggccaggagaccacagggcggcggggttttctccaccccaattaaaaaagcgcccggggggggaccccggagccgttcgagcacaatcccccagaaggggatccggaggggccaacgcgggggtcttctcaacagggggtcccaagggagtcgaaataaaatacag

SEQ ID NO: 233607 - DNA, 1278 bp, Homo sapiens
  misc_feature (816)..(816): n is a, c, g, or t
  misc_feature (818)..(818): n is a, c, g, or t
tgtgagctcctagaagtcagcttcttcacttttaccccagccacacggttattcgcgtaaggttggttataatttaaatgtcggtttgtgcacatggtttgggactctgtgtatgagtacgactaatatcttccatttactaagaagataaagaggtcgataaataaggaggtcaagcccgttttgcaaggtcacacaggaaagaagcagaccacgaaatgaacttcggctgtcacctgcggtgggcgcactagaggtcttttgaactccttcggctaccgtcgccgcgttctcgctgtgcactcttattctgcgcctgcgcgcggctacagcacggttcgtttttcctttagtcaggaaggacgttggtgttgaggttagcatacgtatcaaggacagtaactaccatggctcccgaagttttgccaaaacctcggatgcgtggccttctggccaggcgtctgcgaaatcatatggctgtagcattcgtgctatccctgggggttgcagctttgtataagtttcgtgtggctgatcaaagaaagaaggcatacgcagatttctacagaaactacgatgtcatgaaagattttgaggagatgaggaaggctggtatctttcagagtgtaaagtaatcttggaatataaagaatttcttcaggttgaattacctagaagtttgtcactgacttgtgttcctgaactatgacacatgaatatgtgggctaagaaatagttcctcttgataaataaacaattaacaaataaaaaaaaaaaaaaaaaaaaaaaaaaaaaaaaaaaaaaaaaaaaaaaaananaaaaaaaaaaggggggggcgccccacaaaataccctccggggggggacgcccaaacgagcaaccccccttttgggaaaagggggcccccacaagagggggcacaaaaaacggcggcgggcggtaacaaacggcgagcggacaaaccgagcgcgcggggacaacgggagcgacagaccccccaccgccgtgggggcgaccgacccggggccccaaccccaccgacggagcagacccgccgcagggcgaagacaacaacagcgcgagatgtcgggcaacccaccgcacgaagcgcggcgacagctgccctcacgctatctggaacgattcagggcgcggcgataaaccgagcccacacacccgcaagccagacaacacgccgcccgccacacgcagacgccaccacaccccgccccaccaactacggcagctcagcgcagaacctcgcaaccccgccgcaca

SEQ ID NO: 233608 - DNA, 946 bp, Homo sapiens
  misc_feature (802)..(802): n is a, c, g, or t
  misc_feature (804)..(804): n is a, c, g, or t
  misc_feature (808)..(808): n is a, c, g, or t
tgtgagctcctagaagtcagcttcttcacttttaccccagccacacggttattcgcgtaaggttggttataatttaaatgtcggtttgtgcacatggtttgggactctgtgtatgagtacgactaatatcttccatttactaagaagataaagaggtcgataaataaggaggtcaagcccgttttgcaaggtcacacaggaaagaagcagaccacgaaatgaacttcggctgtcacctgcggtgggcgcactagaggtcttttgaactccttcggctaccgtcgccgcgttctcgctgtgcactcttattctgcgcctgcgcgcggctacagcacggttcgtttttcctttagtcaggaaggacgttggtgttgaggttagcatacgtatcaaggacagtaactaccatggctcccgaagttttgccaaaacctcggatgcgtggccttctggccaggcgtctgcgaaatcatatggctgtagcattcgtgctatccctgggggttgcagctttgtataagtttcgtgtggctgatcaaagaaagaaggcatacgcagatttctacagaaactacgatgtcatgaaagattttgaggagatgaggaaggctggtatctttcagagtgtaaagtaatcttggaatataaagaatttcttcaggttgaattacctagaagtttgtcactgacttgtgttcctgaactatgacacatgaatatgtgggctaagaaatagttcctcttgataaataaacaattaacaaataaaaaaaaaaaaaaaaaaaaaaaaaaaaaaacaagnanaaangcagaaaagagaagaaagaagaacaaagaaggaagcataaagaagaaaaacgaggaagaaagagaggaggcgagagcggcagccaagaaaacggagacgaggagcggaaaacacgggcggcgacacacgcaggcgggg

SEQ ID NO: 233609 - DNA, 767 bp, Homo sapiens
tgtgagctcctagaagtcagcttcttcacttttaccccagccacacggttattcgcgtaaggttggttataatttaaatgtcggtttgtgcacatggtttgggactctgtgtatgagtacgactaatatcttccatttactaagaagataaagaggtcgataaataaggaggtcaagcccgttttgcaaggtcacacaggaaagaagcagaccacgaaatgaacttcggctgtcacctgcggtgggcgcactagaggtcttttgaactccttcggctaccgtcgccgcgttctcgctgtgcactcttattctgcgcctgcgcgcggctacagcacggttcgtttttcctttagtcaggaaggacgttggtgttgaggttagcatacgtatcaaggacagtaactaccatggctcccgaagttttgccaaaacctcggatgcgtggccttctggccaggcgtctgcgaaatcatatggctgtagcattcgtgctatccctgggggttgcagctttgtataagtttcgtgtggctgatcaaagaaagaaggcatacgcagatttctacagaaactacgatgtcatgaaagattttgaggagatgaggaaggctggtatctttcagagtgtaaagtaatcttggaatataaagaatttcttcaggttgaattacctagaagtttgtcactgacttgtgttcctgaactatgacacatgaatatgtgggctaagaaatagttcctcttgataaataaacaattaacaaata

SEQ ID NO: 233610 - DNA, 335 bp, Homo sapiens
catttaaaaattgagatcaaatccagacctctggcttcttctgtagaatgaggtgagctggcagtgttgggaccgagccgtgagtagctgtccccgttaagtggggcactgctgtcctgtttgccacagccagtcctagctatcgctcctttttgtttcagacattgacgtagtgtatcagttgccgtttttgttttaacatgattacgccattcagttccctacaatagagataagaggaaaaagaaacatttctcttgcttatctctctattcaaaagtgagaaaataaaagctggaccaagaatggtatgtttaaaaacggtggaagagaac

SEQ ID NO: 233611 - DNA, 3284 bp, Homo sapiens
  misc_feature (3276)..(3276): n is a, c, g, or t
ggactgtactggttctgagattctgtgcaagcctcatggaaatgaagctgccaggccaggaagggtttgaagcctccagtgctcctagaaatattccttcaggggagctggacagcaaccctgaccctggcaccggccccagccctgatggcccctcagacacagagagcaaggaactgggagtacccaaagaccctctgctcttcattcagctgaatgagctgctgggctggccccaggcgctggagtggagagagacaggcaggtgggtactgtttgaggagaagttggaggtggctgcaggccggtggagtgccccccacgtgcccaccctggcactgcccagcctccagaagctccgcagcctgctggccgagggccttgtactgctggactgcccagctcagagcctcctggagctcgtggagcaggtgaccagggtggagtcgctgagcccagagctgagagggcagttgcaggccttgctgctgcagagaccccagcattacaaccagaccacaggcaccaggccctgctggggctctactcatccaagaaaggcttctgacaatgaggaagcccccctgagggaacagtgtcagaaccccctgagacagaagctacctccaggagctgaggcagggactgtgctggcaggggagctgggcttcctggcacagccactgggagcctttgttcgactgcggaaccctgtggtactggggtcccttactgaggtgtccctcccaagcaggtttttctgccttctcctgggcccctgtatgctgggaaagggctaccatgagatgggacgggcagcagctgtcctcctcagtgacccgcaattccagtggtcagttcgtcgggccagcaaccttcatgaccttctggcagccctggatgcattcctagaggaggtgacagtgcttcccccaggtcggtgggacccaacagcccggattcccccgcccaaatgtctgccatctcagcacaaaaggcttccctcgcaacagcgggagatcagaggtcccgccgtcccgcgcctgacctcggctgaggacaggcaccgccatgggccacacgcacacagcccggagttgcagcggaccggcaggctgtttgggggccttatccaggacgtgcgcaggaaggtcccgtggtaccccagcgatttcttggacgccctgcatctccagtgcttctcggccgtactctacatttacctggccactgtcactaatgccatcacttttgggggtctgctgggagatgccactgatggtgcccagggagtgctggaaagtttcctgggcacagcagtggctggagctgccttctgcctgatggcaggccagcccctcaccattctgagcagcacggggccagtgctggtctttgagcgcctgctcttctctttcagcagagattacagcctggactacctgcccttccgcctatgggtgggcatctgggtggctaccttttgcctggtgctggtggccacagaggccagtgtgctggtgcgctacttcacccgcttcactgaggaaggtttctgtgccctcatcagcctcatcttcatctacgatgctgtgggcaaaatgctgaacttgacccatacctatcctatccagaagcctgggtcctctgcctacgggtgcctctgccaatacccaggcccaggaggaaatgagtctcaatggataaggacaaggccaaaagacagagacgacattgtaagcatggacttaggcctgatcaatgcatccttgctgccgccacctgagtgcacccggcagggaggccaccctcgtggccctggctgtcatacagtcccagacattgccttcttctcccttctcctcttccttacttctttcttctttgctatggccctcaagtgtgtaaagaccagccgcttcttcccctctgtggtgcgcaaagggctcagcgacttctcctcagtcctggccatcctgctcggctgtggccttgatgctttcctgggcctagccacaccaaagctcatggtacccagagagttcaagcccacactccctgggcgtggctggctggtgtcaccttttggagccaacccctggtggtggagtgtggcagctgccctgcctgccctgctgctgtctatcctcatcttcatggaccaacagatcacagcagtcatcctcaaccgcatggaatacagactgcagaagggagctggcttccacctggacctcttctgtgtggctgtgctgatgctactcacatcagcgcttggactgccttggtatgtctcagccactgtcatctccctggctcacatggacagtcttcggagagagagcagagcctgtgcccccggggagcgccccaacttcctgggtatcagggaacagaggctgacaggcctggtggtgttcatccttacaggagcctccatcttcctggcacctgtgctcaagttcattccaatgcctgtgctctatggcatcttcctgtatatgggggtggcagcgctcagcagcattcagttcactaatagggtgaagctgttgttgatgccagcaaaacaccagccagacctgctactcttgcggcatgtgcctctgaccagggtccacctcttcacagccatccagcttgcctgtctggggctgctttggataatcaagtctacccctgcagccatcatcttccccctcatgttgctgggccttgtgggggtccgaaaggccctggagagggtcttctcaccacaggaactcctctggctggatgagctgatgccagaggaggagagaagcatccctgagaaggggctggagccagaacactcattcagtggaagtgacagtgaagattcagagctgatgtatcagccaaaggctccagaaatcaacatttctgtgaattagctggagtaggagtctgggagtggagaccccaggaaacagcatgagatgctcagtcggcttggggaaggactgaagggcagctgccaagacctcagttacctcctgacctgagggtggagagtggcaggaagcaagcatgtttgctgtgcacttaggaaaggctggtgagccagagggactgatcaggccccattcactctctactcattaaaaggtcctgagccacgaagcgcttcccattttgaactttctgtcctcacagattctgtttgacagaatctaagggccatcagggaactcttttcatcttgcaaagagaaaaagccagtctttccagaataaatattcatctgtttgaaanaaaaaaaa

SEQ ID NO: 233612 - DNA, 3251 bp, Homo sapiens
  misc_feature (3243)..(3243): n is a, c, g, or t
ggactgtactggttctgagattctgtgcaagcctcatggaaatgaagctgccaggccaggaagggtttgaagcctccagtgctcctagaaatattccttcaggggagctggacagcaaccctgaccctggcaccggccccagccctgatggcccctcagacacagagagcaaggaactgggagtacccaaagaccctctgctcttcattcagctgaatgagctgctgggctggccccaggcgctggagtggagagagacaggcaggtgggtactgtttgaggagaagttggaggtggctgcaggccggtggagtgccccccacgtgcccaccctggcactgcccagcctccagaagctccgcagcctgctggccgagggccttgtactgctggactgcccagctcagagcctcctggagctcgtggagcaggtgaccagggtggagtcgctgagcccagagctgagagggcagttgcaggccttgctgctgcagagaccccagcattacaaccagaccacaggcaccaggccctgctggggctctactcatccaagaaaggcttctgacaatgaggaagcccccctgagggaacagtgtcagaaccccctgagacagaagctacctccaggagctgaggcagggactgtgctggcaggggagctgggcttcctggcacagccactgggagcctttgttcgactgcggaaccctgtggtactggggtcccttactgaggtgtccctcccaagcaggtttttctgccttctcctgggcccctgtatgctgggaaagggctaccatgagatgggacgggcagcagctgtcctcctcagtgacccgcaattccagtggtcagttcgtcgggccagcaaccttcatgaccttctggcagccctggatgcattcctagaggaggtgacagtgcttcccccaggtcggtgggacccaacagcccggattcccccgcccaaatgtctgccatctcagcacaaaaggcttccctcgcaacagcgggagatcagaggtcccgccgtcccgcgcctgacctcggctgaggacaggcaccgccatgggccacacgcacacagcccggagttgcagcggaccggcaggaaggtcccgtggtaccccagcgatttcttggacgccctgcatctccagtgcttctcggccgtactctacatttacctggccactgtcactaatgccatcacttttgggggtctgctgggagatgccactgatggtgcccagggagtgctggaaagtttcctgggcacagcagtggctggagctgccttctgcctgatggcaggccagcccctcaccattctgagcagcacggggccagtgctggtctttgagcgcctgctcttctctttcagcagagattacagcctggactacctgcccttccgcctatgggtgggcatctgggtggctaccttttgcctggtgctggtggccacagaggccagtgtgctggtgcgctacttcacccgcttcactgaggaaggtttctgtgccctcatcagcctcatcttcatctacgatgctgtgggcaaaatgctgaacttgacccatacctatcctatccagaagcctgggtcctctgcctacgggtgcctctgccaatacccaggcccaggaggaaatgagtctcaatggataaggacaaggccaaaagacagagacgacattgtaagcatggacttaggcctgatcaatgcatccttgctgccgccacctgagtgcacccggcagggaggccaccctcgtggccctggctgtcatacagtcccagacattgccttcttctcccttctcctcttccttacttctttcttctttgctatggccctcaagtgtgtaaagaccagccgcttcttcccctctgtggtgcgcaaagggctcagcgacttctcctcagtcctggccatcctgctcggctgtggccttgatgctttcctgggcctagccacaccaaagctcatggtacccagagagttcaagcccacactccctgggcgtggctggctggtgtcaccttttggagccaacccctggtggtggagtgtggcagctgccctgcctgccctgctgctgtctatcctcatcttcatggaccaacagatcacagcagtcatcctcaaccgcatggaatacagactgcagaagggagctggcttccacctggacctcttctgtgtggctgtgctgatgctactcacatcagcgcttggactgccttggtatgtctcagccactgtcatctccctggctcacatggacagtcttcggagagagagcagagcctgtgcccccggggagcgccccaacttcctgggtatcagggaacagaggctgacaggcctggtggtgttcatccttacaggagcctccatcttcctggcacctgtgctcaagttcattccaatgcctgtgctctatggcatcttcctgtatatgggggtggcagcgctcagcagcattcagttcactaatagggtgaagctgttgttgatgccagcaaaacaccagccagacctgctactcttgcggcatgtgcctctgaccagggtccacctcttcacagccatccagcttgcctgtctggggctgctttggataatcaagtctacccctgcagccatcatcttccccctcatgttgctgggccttgtgggggtccgaaaggccctggagagggtcttctcaccacaggaactcctctggctggatgagctgatgccagaggaggagagaagcatccctgagaaggggctggagccagaacactcattcagtggaagtgacagtgaagattcagagctgatgtatcagccaaaggctccagaaatcaacatttctgtgaattagctggagtaggagtctgggagtggagaccccaggaaacagcatgagatgctcagtcggcttggggaaggactgaagggcagctgccaagacctcagttacctcctgacctgagggtggagagtggcaggaagcaagcatgtttgctgtgcacttaggaaaggctggtgagccagagggactgatcaggccccattcactctctactcattaaaaggtcctgagccacgaagcgcttcccattttgaactttctgtcctcacagattctgtttgacagaatctaagggccatcagggaactcttttcatcttgcaaagagaaaaagccagtctttccagaataaatattcatctgtttgaaanaaaaaaaa

SEQ ID NO: 233613 - DNA, 2518 bp, Homo sapiens
  misc_feature (2510)..(2510): n is a, c, g, or t
ggactgtactggttctgagattctgtgcaagcctcatggaaatgaagctgccaggccaggaagggtttgaagcctccagtgctcctagaaatattccttcaggggagctggacagcaaccctgaccctggcaccggccccagccctgatggcccctcagacacagagagcaaggaactgggagtacccaaagaccctctgctcttcattcagctgaatgagctgctgggctggccccaggcgctggagtggagagagacaggcagctcctctgcatctctgctcctggacatgggagaaatgccctcaataacactgtctacccaccttcatcacaggtgggtactgtttgaggagaagttggaggtggctgcaggccggtggagtgccccccacgtgcccaccctggcactgcccagcctccagaagctccgcagcctgctggccgagggccttgtactgctggactgcccagctcagagcctcctggagctcgtggagcaggtgaccagggtggagtcgctgagcccagagctgagagggcagttgcaggccttgctgctgcagagaccccagcattacaaccagaccacaggcaccaggccctgctggggctctactcatccaagaaaggcttctgacaatgaggaagcccccctgagggaacagtgtcagaaccccctgagacagaagctacctccaggagctgaggcagggactgtgctggcaggggagctgggcttcctggcacagccactgggagcctttgttcgactgcggaaccctgtggtactggggtcccttactgaggtgtccctcccaagcaggtttttctgccttctcctgggcccctgtatgctgggaaagggctaccatgagatgggacgggcagcagctgtcctcctcagtgacccgcaattccagtggtcagttcgtcgggccagcaaccttcatgaccttctggcagccctggatgcattcctagaggaggtgacagtgcttcccccaggtcggtgggacccaacagcccggattcccccgcccaaatgtctgccatctcagcacaaaaggcttccctcgcaacagcgggagatcagaggtcccgccgtcccgcgcctgacctcggctgaggacaggcaccgccatgggccacacgcacacagcccggagttgcagcggaccggcaggctgtttgggggccttatccaggacgtgcgcaggaaggtcccgtggtaccccagcgatttcttggacgccctgcatctccagtgcttctcggccgtactctacatttacctggccactgtcactaatgccatcacttttgggggtctgctgggagatgccactgatggtgcccagggagtgctggaaagtttcctgggcacagcagtggctggagctgccttctgcctgatggcaggccagcccctcaccattctgagcagcacggggccagtgctggtctttgagcgcctgctcttctctttcagcagagattacagcctggactacctgcccttccgcctatgggtgggcatctgggtggctaccttttgcctggtgctggtggccacagaggccagtgtgctggtgcgctacttcacccgcttcactgaggaaggtttctgtgccctcatcagcctcatcttcatctacgatgctgtgggcaaaatgctgaacttgacccatacctatcctatccagaagcctgggtcctctgcctacgggtgcctctgccaatacccaggcccaggaggaaatgagtctcaatggataaggacaaggccaaaagacagagacgacattgtaagcatggacttaggcctgatcaatgcatccttgctgccgccacctgagtgcacccggcagggaggccaccctcgtggccctggctgtcatacagtcccagacattgccttcttctcccttctcctcttccttacttctttcttctttgctatggccctcaagtgtgtaaagaccagccgcttcttcccctctgtggtgcgcaaagggctcagcgacttctcctcagtcctggccatcctgctcggctgtggccttgatgctttcctgggcctagccacaccaaagctcatggtacccagagagttcaagcccacactccctgggcgtggctggctggtgtcaccttttggagccaacccctggtggccacagaggccagtgtgctggtgcgctacttcacccgcttcactgaggaaggtttctgtgccctcagttacctcctgacctgagggtggagagtggcaggaagcaagcatgtttgctgtgcacttaggaaaggctggtgagccagagggactgatcaggccccattcactctctactcattaaaaggtcctgagccacgaagcgcttcccattttgaactttctgtcctcacagattctgtttgacagaatctaagggccatcagggaactcttttcatcttgcaaagagaaaaagccagtctttccagaataaatattcatctgtttgaaanaaaaaaaa

SEQ ID NO: 233614 - DNA, 696 bp, Homo sapiens
tctggttcacctggacccatcagataagaattttatggggctggaggaggttcccaggggagggaacatacatctgaattcttctctgcttcccaggaaatgagtctcaatggataaggacaaggccaaaagacagagacgacattgtaagcatggtgagggactgctcctgggaggttctaggaaggaaagggtggagaccaaggcagtcggtggtttctagctcttcctacccataggttaaggaaaccttcataggtgagtaaagcttagccatttcctacagctgggaacttcccatcctgggcccctggtgtctctgtgggtccctcctcccttgaagttggtccaggagagcaggacatttactccattgcctataactccactcctgaccctcctgtgtacaggacttaggcctgatcaatgcatccttgctgccgccacctgagtgcacccggcagggaggccaccctcgtggccctggctgtcatacagtcccagacattgccttcttctcccttctcctcttccttacttctttcttctttgctatggccctcaagtgtgtaaagaccagccgcttcttcccctctgtggtgagtttcacctttctttctgtgggagaggcctgactctaagctttgggtcctatctgtgatgggaagtggtgtggaaaaagagagatggcaggcc

SEQ ID NO: 233615 - DNA, 3413 bp, Homo sapiens
  misc_feature (3405)..(3405): n is a, c, g, or t
ggactgtactggttctgagattctgtgcaagcctcatggaaatgaagctgccaggccaggaagggtttgaagcctccagtgctcctagaaatattccttcaggggagctggacagcaaccctgaccctggcaccggccccagccctgatggcccctcagacacagagagcaaggaactgggagtacccaaagaccctctgctcttcattcagctgaatgagctgctgggctggccccaggcgctggagtggagagagacaggcagctcctctgcatctctgctcctggacatgggagaaatgccctcaataacactgtctacccaccttcatcacaggtgggtactgtttgaggagaagttggaggtggctgcaggccggtggagtgccccccacgtgcccaccctggcactgcccagcctccagaagctccgcagcctgctggccgagggccttgtactgctggactgcccagctcagagcctcctggagctcgtggagcaggtgaccagggtggagtcgctgagcccagagctgagagggcagttgcaggccttgctgctgcagagaccccagcattacaaccagaccacaggcaccaggccctgctggggctctactcatccaagaaaggcttctgacaatgaggaagcccccctgagggaacagtgtcagaaccccctgagacagaagctacctccaggagctgaggcagggactgtgctggcaggggagctgggcttcctggcacagccactgggagcctttgttcgactgcggaaccctgtggtactggggtcccttactgaggtgtccctcccaagcaggtttttctgccttctcctgggcccctgtatgctgggaaagggctaccatgagatgggacgggcagcagctgtcctcctcagtgacccgcaattccagtggtcagttcgtcgggccagcaaccttcatgaccttctggcagccctggatgcattcctagaggaggtgacagtgcttcccccaggtcggtgggacccaacagcccggattcccccgcccaaatgtctgccatctcagcacaaaaggcttccctcgcaacagcgggagatcagaggtcccgccgtcccgcgcctgacctcggctgaggacaggcaccgccatgggccacacgcacacagcccggagttgcagcggaccggcaggctgtttgggggccttatccaggacgtgcgcaggaaggtcccgtggtaccccagcgatttcttggacgccctgcatctccagtgcttctcggccgtactctacatttacctggccactgtcactaatgccatcacttttgggggtctgctgggagatgccactgatggtgcccagggagtgctggaaagtttcctgggcacagcagtggctggagctgccttctgcctgatggcaggccagcccctcaccattctgagcagcacggggccagtgctggtctttgagcgcctgctcttctctttcagcagagattacagcctggactacctgcccttccgcctatgggtgggcatctgggtggctaccttttgcctggtgctggtggccacagaggccagtgtgctggtgcgctacttcacccgcttcactgaggaaggtttctgtgccctcatcagcctcatcttcatctacgatgctgtgggcaaaatgctgaacttgacccatacctatcctatccagaagcctgggtcctctgcctacgggtgcctctgccaatacccaggcccaggaggaaatgagtctcaatggataaggacaaggccaaaagacagagacgacattgtaagcatggacttaggcctgatcaatgcatccttgctgccgccacctgagtgcacccggcagggaggccaccctcgtggccctggctgtcatacagtcccagacattgccttcttctcccttctcctcttccttacttctttcttctttgctatggccctcaagtgtgtaaagaccagccgcttcttcccctctgtggtgcgcaaagggctcagcgacttctcctcagtcctggccatcctgctcggctgtggccttgatgctttcctgggcctagccacaccaaagctcatggtacccagagagttcaagcccacactccctgggcgtggctggctggtgtcaccttttggagccaacccctggtggtggagtgtggcagctgccctgcctgccctgctgctgtctatcctcatcttcatggaccaacagatcacagcagtcatcctcaaccgcatggaatacagactgcagaagggagctggcttccacctggacctcttctgtgtggctgtgctgatgctactcacatcagcgcttggactgccttggtatgtctcagccactgtcatctccctggctcacatggacagtcttcggagagagagcagagcctgtgcccccggggagcgccccaacttcctgggtatcagggaacagaggctgacaggcctggtggtgttcatccttacaggagcctccatcttcctggcacctgtgctcaagttcattccaatgcctgtgctctatggcatcttcctgtatatgggggtggcagcgctcagcagcattcagttcactaatagggtgaagctgttgttgatgccagcaaaacaccagccagacctgctactcttgcggcatgtgcctctgaccagggtccacctcttcacagccatccagcttgcctgtctggggctgctttggataatcaagtctacccctgcagccatcatcttccccctcatgttgctgggccttgtgggggtccgaaaggccctggagagggtcttctcaccacaggaactcctctggctggatgagctgatgccagaggaggagagaagcatccctgagaaggggctggagccagaacactcattcagtggaagtgacagtgaagattcagagctgatgtatcagccaaaggctccagaaatcaacatttctgtgaattagctggagtaggagtctgggagtggagaccccaggaaacagcatgagttcacaggtgcttactcaggaagtcaggacatttttggcctttggcttaacttccagatgctcagtcggcttggggaaggactgaagggcagctgccaagacctcagttacctcctgacctgagggtggagagtggcaggaagcaagcatgtttgctgtgcacttaggaaaggctggtgagccagagggactgatcaggccccattcactctctactcattaaaaggtcctgagccacgaagcgcttcccattttgaactttctgtcctcacagattctgtttgacagaatctaagggccatcagggaactcttttcatcttgcaaagagaaaaagccagtctttccagaataaatattcatctgtttgaaanaaaaaaaa

SEQ ID NO: 233616 - DNA, 2995 bp, Homo sapiens
ggactgtactggttctgagattctgtgcaagcctcatggaaatgaagctgccaggccaggaagggtttgaagcctccagtgctcctagaaatattccttcaggggagctggacagcaaccctgaccctggcaccggccccagccctgatggcccctcagacacagagagcaaggaactgggagtacccaaagaccctctgctcttcattcagctgaatgagctgctgggctggccccaggcgctggagtggagagagacaggcaggtgggtactgtttgaggagaagttggaggtggctgcaggccggtggagtgccccccacgtgcccaccctggcactgcccagcctccagaagctccgcagcctgctggccgagggccttgtactgctggactgcccagctcagagcctcctggagctcgtggagcaggtgaccagggtggagtcgctgagcccagagctgagagggcagttgcaggccttgctgctgcagagaccccagcattacaaccagaccacaggcaccaggccctgctggggctctactcatccaagaaaggcttctgacaatgaggaagcccccctgagggaacagtgtcagaaccccctgagacagaagctacctccaggagctgaggcagggactgtgctggcaggggagctgggcttcctggcacagccactgggagcctttgttcgactgcggaaccctgtggtactggggtcccttactgaggtgtccctcccaagcaggtttttctgccttctcctgggcccctgtatgctgggaaagggctaccatgagatgggacgggcagcagctgtcctcctcagtgacccgcaattccagtggtcagttcgtcgggccagcaaccttcatgaccttctggcagccctggatgcattcctagaggaggtgacagtgcttcccccaggtcggtgggacccaacagcccggattcccccgcccaaatgtctgccatctcagcacaaaaggcttccctcgcaacagcgggagatcagaggtcccgccgtcccgcgcctgacctcggctgaggacaggcaccgccatgggccacacgcacacagcccggagttgcagcggaccggcaggctgtttgggggccttatccaggacgtgcgcaggaaggtcccgtggtaccccagcgatttcttggacgccctgcatctccagtgcttctcggccgtactctacatttacctggccactgtcactaatgccatcacttttgggggtctgctgggagatgccactgatggtgcccagggagtgctggaaagtttcctgggcacagcagtggctggagctgccttctgcctgatggcaggccagcccctcaccattctgagcagcacggggccagtgctggtctttgagcgcctgctcttctctttcagcagagattacagcctggactacctgcccttccgcctatgggtgggcatctgggtggctaccttttgcctggtgctggtggccacagaggccagtgtgctggtgcgctacttcacccgcttcactgaggaaggtttctgtgccctcatcagcctcatcttcatctacgatgctgtgggcaaaatgctgaacttgacccatacctatcctatccagaagcctgggtcctctgcctacgggtgcctctgccaatacccaggcccaggaggaaatgagtctcaatggataaggacaaggccaaaagacagagacgacattgtaagcatggacttaggcctgatcaatgcatccttgctgccgccacctgagtgcacccggcagggaggccaccctcgtggccctggctgtcatacagtcccagacattgccttcttctcccttctcctcttccttacttctttcttctttgctatggccctcaagtgtgtaaagaccagccgcttcttcccctctgtggtgcgcaaagggctcagcgacttctcctcagtcctggccatcctgctcggctgtggccttgatgctttcctgggcctagccacaccaaagctcatggtacccagagagttcaagcccacactccctgggcgtggctggctggtgtcaccttttggagccaacccctggtggtggagtgtggcagctgccctgcctgccctgctgctgtctatcctcatcttcatggaccaacagatcacagcagtcatcctcaaccgcatggaatacagactgcagaagggagctggcttccacctggacctcttctgtgtggctgtgctgatgctactcacatcagcgcttggactgccttggtatgtctcagccactgtcatctccctggctcacatggacagtcttcggagagagagcagagcctgtgcccccggggagcgccccaacttcctgggtatcagggaacagaggctgacaggcctggtggtgttcatccttacaggagcctccatcttcctggcacctgtgctcaagttcattccaatgcctgtgctctatggcatcttcctgtatatgggggtggcagcgctcagcagcattcagttcactaatagggtgaagctgttgttgatgccagcaaaacaccagccagacctgctactcttgcggcatgtgcctctgaccagggtccacctcttcacagccatccagcttgcctgtctggggctgctttggataatcaagtctacccctgcagccatcatcttccccctcatgttgctgggccttgtgggggtccgaaaggccctggagagggtcttctcaccacaggaactcctctggctggatgagctgatgccagaggaggagagaagcatccctgagaaggggctggagccagaacactcattcagtggaagtgacagtgaagattcagagctgatgtatcagccaaaggctccagaaatcaacatttctgtgaattagctggagtaggagtctgggagtggagaccccaggaaacagcatgaggtgagggtgtgagggaagtgctcctgatgttgagg

SEQ ID NO: 233617 - DNA, 3530 bp, Homo sapiens
  misc_feature (3522)..(3522): n is a, c, g, or t
ggactgtactggttctgagattctgtgcaagcctcatggaaatgaagctgccaggccaggaagggtttgaagcctccagtgctcctagaaatattccttcaggggagctggacagcaaccctgaccctggcaccggccccagccctgatggcccctcagacacagagagcaaggaactgggagtacccaaagaccctctgctcttcattcagctgaatgagctgctgggctggccccaggcgctggagtggagagagacaggcagctcctctgcatctctgctcctggacatgggagaaatgccctcaataacactgtctacccaccttcatcacaggtgggtactgtttgaggagaagttggaggtggctgcaggccggtggagtgccccccacgtgcccaccctggcactgcccagcctccagaagctccgcagcctgctggccgagggccttgtactgctggactgcccagctcagagcctcctggagctcgtggagcaggtgaccagggtggagtcgctgagcccagagctgagagggcagttgcaggccttgctgctgcagagaccccagcattacaaccagaccacaggcaccaggccctgctggggctctactcatccaagaaaggcttctgacaatgaggaagcccccctgagggaacagtgtcagaaccccctgagacagaagctacctccaggagctgaggcagggactgtgctggcaggggagctgggcttcctggcacagccactgggagcctttgttcgactgcggaaccctgtggtactggggtcccttactgaggtgtccctcccaagcaggtttttctgccttctcctgggcccctgtatgctgggaaagggctaccatgagatgggacgggcagcagctgtcctcctcagtgacccgcaattccagtggtcagttcgtcgggccagcaaccttcatgaccttctggcagccctggatgcattcctagaggaggtgacagtgcttcccccaggtcggtgggacccaacagcccggattcccccgcccaaatgtctgccatctcagcacaaaaggcttccctcgcaacagcgggagatcagaggtcccgccgtcccgcgcctgacctcggctgaggacaggcaccgccatgggccacacgcacacagcccggagttgcagcggaccggcaggctgtttgggggccttatccaggacgtgcgcaggaaggtcccgtggtaccccagcgatttcttggacgccctgcatctccagtgcttctcggccgtactctacatttacctggccactgtcactaatgccatcacttttgggggtctgctgggagatgccactgatggtgcccagggagtgctggaaagtttcctgggcacagcagtggctggagctgccttctgcctgatggcaggccagcccctcaccattctgagcagcacggggccagtgctggtctttgagcgcctgctcttctctttcagcagagattacagcctggactacctgcccttccgcctatgggtgggcatctgggtggctaccttttgcctggtgctggtggccacagaggccagtgtgctggtgcgctacttcacccgcttcactgaggaaggtttctgtgccctcatcagcctcatcttcatctacgatgctgtgggcaaaatgctgaacttgacccatacctatcctatccagaagcctgggtcctctgcctacgggtgcctctgccaatacccaggcccaggaggaaatgagtctcaatggataaggacaaggccaaaagacagagacgacattgtaagcatggacttaggcctgatcaatgcatccttgctgccgccacctgagtgcacccggcagggaggccaccctcgtggccctggctgtcatacagtcccagacattgccttcttctcccttctcctcttccttacttctttcttctttgctatggccctcaagtgtgtaaagaccagccgcttcttcccctctgtggtgcgcaaagggctcagcgacttctcctcagtcctggccatcctgctcggctgtggccttgatgctttcctgggcctagccacaccaaagctcatggtacccagagagttcaagcccacactccctgggcgtggctggctggtgtcaccttttggagccaacccctggtggtggagtgtggcagctgccctgcctgccctgctgctgtctatcctcatcttcatggaccaacagatcacagcagtcatcctcaaccgcatggaatacagactgcagaagggagctggcttccacctggacctcttctgtgtggctgtgctgatgctactcacatcagcgcttggactgccttggtatgtctcagccactgtcatctccctggctcacatggacagtcttcggagagagagcagagcctgtgcccccggggagcgccccaacttcctgggtatcagggaacagaggctgacaggcctggtggtgttcatccttacaggagcctccatcttcctggcacctgtgctcaagttcattccaatgcctgtgctctatggcatcttcctgtatatgggggtggcagcgctcagcagcattcagttcactaatagggtgaagctgttgttgatgccagcaaaacaccagccagacctgctactcttgcggcatgtgcctctgaccagggtccacctcttcacagccatccagcttgcctgtctggggctgctttggataatcaagtctacccctgcagccatcatcttccccctcatgttgctgggccttgtgggggtccgaaaggccctggagagggtcttctcaccacaggaactcctctggctggatgagctgatgccagaggaggagagaagcatccctgagaaggggctggagccagaacactcattcagtggaagtgacagtgaagattcagagctgatgtatcagccaaaggctccagaaatcaacatttctgtgaattagctggagtaggagtctgggagtggagaccccaggaaacagcatgagccatagaacaccctcatcttcatgcttctccaagctcaagagcctaagagccaggccaggcacggtggctcacgcctgtggtcccggcactttgggaggccgaggcgggtggattacttcacaggtgcttactcaggaagtcaggacatttttggcctttggcttaacttccagatgctcagtcggcttggggaaggactgaagggcagctgccaagacctcagttacctcctgacctgagggtggagagtggcaggaagcaagcatgtttgctgtgcacttaggaaaggctggtgagccagagggactgatcaggccccattcactctctactcattaaaaggtcctgagccacgaagcgcttcccattttgaactttctgtcctcacagattctgtttgacagaatctaagggccatcagggaactcttttcatcttgcaaagagaaaaagccagtctttccagaataaatattcatctgtttgaaanaaaaaaaa

SEQ ID NO: 233618 - DNA, 726 bp, Homo sapiens
ccaccccccacccttcactccaggcaacagggagcccgcggcggtcaccccctaccccagccctcagctcacgcccgggcgcccactggcccgcaccaccccagcccgcgcccgcgccagtcccgccggtcaccagctcgggccccagacacgacccgagaaacgtccgcggccgcggcgagccccctccgggcatcccatccctcacttcgcttctctttccagaaggcgcctgacgagcccgtttcccgggaaagcggaagctccagctgctcctccgagcccaggctgggctcctgcctgaagagctcctctccgggctcggccgccgcctccccccttgtcccgggctgaggcacggggagggcgctccgcagacaccccggcagcgccgcccgccctccgcgacctgcggctgcctcctgagcgcgcatctcggccgggaagccgctggctgggctccgaccgccgggcagggacgggccgcgccacccggggcctggagcccgggccctgccggggagtcagggaagggaggctcgggccggggcgtccgaccccgaagtgctcgagcgcccggaacccgggtggaccctctcgcccgcccagcgcagcgttggaccggccgggactcgggggaccatgcgcccggcgctcgtaactccgcgccgactccgggaggcccgcggggcgcctgccggggccggaggagggggtccggggccc

SEQ ID NO: 233619 - DNA, 349 bp, Homo sapiens
tacctggaagcaagtccaaaggaagctgacagttaacaaagacagaggcagcgcaccaagacaaacgatgtatatcatttgtttcctccctgtcccttattctgagcccaacagaaataaatgagaagacaaaaatgatagtcattcagctggggacaaatgggatcaccttgcctgctggaagcaaccgaaatgctctgcacttagcactcagtgagcagagagcagggcagcccctcagcagggttacagtttagtttgtccacccaattttggacagtattaacaactgcctttattctataatttggtatataaatctataaagggacattgatatatgacagtt

SEQ ID NO: 233620 - DNA, 393 bp, Homo sapiens
ttttatgaggggttgtcagaatttgtatacatctctggctaactccagaggccatacacaggttatcaagagacatcctttgctatttgactctagttcatactaaatacacattcaacagtgatttttatatagcagaaccctacagtccacaatctcgaaaatgtgaaaaatgagttcctagcccatcaaaccgccaatttatttccctaacttgcactaaaacatcctaaaacctatgaatcaatcctctaaggaactcaaattaatcacggctatcaatccattatagaaggtatttttctacctttctaaaacattatgctatgcttaatagtaaagttttgagaaccaaataaattctcttaatttttattttctcatcttacagga

SEQ ID NO: 233621 - DNA, 418 bp, Homo sapiens
ttgccagtttcatctatgttgtatgtagtcctagttaattcactttttttgctgttaacagtggctttcaagcattgtggtctgtgatcccattacattgtcgaaagttattgaggatccaaaagatattttgtttacatatgttatgtatttaccatattagaagttaaaactgagaatttaaagatattagtctgttttaaaacaataatttaaaaactcatatgttaacataaacattttaatgtaggaaaaacaacttcaaaaatatagtgagaagagtgatattgttttacatattttgcagatctctttaatgtctagcttactagaagacagctggtttctcgtagctgttttgcattcgatctgttgcaatatgttattttggcaataaatactgtcagttgtttacttt

SEQ ID NO: 233622 - DNA, 648 bp, Homo sapiens
tgagacggagtctcgctcagtcgcccaggctagagtgcaatggcacaatcttggctcactgcaagctccgaaaaaaaggcatttaaaagctgattttatgcaatgagttctgcttctggctaactagctagtatcagaccaatgttcttgccaagaacaattaaaaaggtgaataaaatgtacaatctgtactatttaaacatgaaaaagctaccaaggaagtgagagatcaagctcccagaaagaagacaagcccgtggaggacagctcaatatttggagtcactttttccttctagacatttatcaatgttaagtagtgcctgggaggctgaacagccaaacaaaatctaagaggcgaagtaaatacgcagagcctgatgcattctcatgagcgtgagatacaaaaattagagttgaagatctgccataaagaaaaagtcctggtaaaatcaccatagaatttcagctgggtactagaagaactacactaggtggtacgttaatgtggcgtgtaccagttcacaaaagctggctgtgtgtatcgcttcccagtgccatcttcagtgatgtaacattggtaatctgaaattggcaacagtggaagtattcacactatggaaactggcaaatgctacagatcagaact

SEQ ID NO: 233623 - DNA, 546 bp, Homo sapiens
gttcctcaggcccgtcctgcctcgcctttcgctctgcgtctgcccggggcagcccgagctgggaccttctggcgggagccgcagcttttcagggcaactgtccttgtccctgggggacggccagtgtacgcggggacacttgcggccccagcccactgccggcctggaggaaaggacgcgggggacccccatacgtgaccagcggctgcagcgcagctcgggctcacagcggggcggccggagcagcctggacccccgacgcccgcgccgtccagtccggggactcggaggctgagcccgtagggggccggcccgggggccatgggcgtccccgccctgccttttgctgggccacggagctttgaggacagtttcgcctgctgataaaatccgttcccagcactttcgaaaggcagggcggggctcaagccgtccctggaggttaaaatgcgcgtcctcgcagcttttcaaatcagcctctccttatctcctcagccgcgggcggggcaggggcctggtctccggatggaggaggaggtgcggccg

SEQ ID NO: 233624 - DNA, 490 bp, Homo sapiens
atgaactaagcaaaggctcacgatgcctttagcacagtacatggcaatgaatacaacaatgaatgttggctttggttcatatgagtactagaaatgattaaataagacccctgctaagaaaaagaaaagccgggcgcctagtaggcactgaatgcccccttccctgtaaggcaccctcgaggtctccgagtctggagcctgtaatcaggcatagactcaagatgaacatgagccgacattttctgcctcgcacagggacagctcagcttctgtgtgcaaagggctgagccgccgacttcacggttcagttttccctgccacgtgggtacagccaccctctccttttacggaagacggtctgagaggctgctggcttgagttttctctgagcagagctgggcacatttacgcaacagataagcctgccctacccgggtcggatccacccgggaagagagaaagtgtgtgcaagtgaaagctcacaaatgtg

SEQ ID NO: 233625 - DNA, 443 bp, Homo sapiens
aactcctgggctcaagggatcctcctgccttggcctcctgagcagcttcaactacaggtatgggccgctgccttctgctgaaagctgagagaagaaagctctgacaagtcgggtgctggcagcaccatgctatgacttggaattttcttcaaaactttctattctgtggagaagccagaaaatggaatgcactacaattagcaaaaaataccttgtggagagatttagagcccaatcataatttacatttgcagatacgtagatctctaagtgcatggcttctgccctgattactaattaatgaggtgcaaaactgcctgctggaaggaaacagtactgattatgtcagtcttatgggacagagcagctctccagtctaggatggtagaagattcttttaacatacatttcagtaaattaaaagtacaaaaaagggacagaag

SEQ ID NO: 233626 - DNA, 299 bp, Homo sapiens
aaaagaaggaaatgacagatttggtcctgacagcctgggaggcagagaggagagagatggagccaagagaatggggctggggccacgttttcttgtggggcaattccgtgtcactgggccagagcatgcttattgtgaagacttcccctcagtgtcctctggggaagggtcagctgtgaggcagtggggcgtgagaatacgatgaaacagggaaacctggaagctgccgattcccaggccttgaaggggtgttctgatgtctttgacattccagcaaacatattttcacaggaaaactc

SEQ ID NO: 233627 - DNA, 348 bp, Homo sapiens
gctacactgctgcaggataaaccttttatttttataattttgtgtactcaaaagcttatatcagtgaagatagatatttcttcaatctaattactattagttattttaatggaatcaatcactttgaaaagaggattacaggcgtgagccaccacacccagctattttactgtaacttttctaagtggtcgacaaataaagatagtcttatgtgtggcttggtaatttttgtggttaatatataatatgaaaaaattataggttccatgcatatatgatcagccatgtcaaagcaagtattgagttgtttggcatttcatagtatgtatagttaaaagtagattctaa

SEQ ID NO: 233628 - DNA, 250 bp, Homo sapiens
cctcagcctcccgagtagctgggattatagacacccaccaccatgcctggctattttttttttaaatgtaatactgtttatttaacttcaaaaacatttcagcattctaaacatacaaaaaaaatgttgcaaatcgtgtttaagtacaggaggttcttgaactttcattgatgcagtggctcttcactttgctgacaatgaagagttctacagcttgtttaaaaactaccccactttactcaaaaaaaaa

SEQ ID NO: 233629 - DNA, 553 bp, Homo sapiens
tgtggacctggacggtagcctgggcactggaatcctggcccttcccagacctgctgagccagcgccagcatcctaaccccagggaccccagggacgcctgtgcgcagtcgctcagagaagccccaggacgcctgttcgcagtcactcggagaagccccaggatgcctgtgcgcagtcacttggagaagtcccaggacgcttgcgcgcagtcactcggagaagccccaggacccctgtgcacagtcactcggagaagccccaagctgactcaactctgttgaaacgactgttgtaagcagatcttggaggtcgcccgtggtctctgcctccagtgttactcccaagacggctgtgttgtgtggcagagggattctgaaggcatggtgaagttcaccaacccgctgaccttaaaacagggaggtgcctccgggcctgacctcatcacaccaacactttagaagcggagtttcctctggcgggtgcagaagggatggccagaaagagccactcatggggggactccaccggcccctgctgcttgaagatggagggg

SEQ ID NO: 233630 - DNA, 417 bp, Homo sapiens
ttattccttatagccttactatcttcaaagcttacttacaaatacactcatttgtaaagagaggagtcatcagtatttgtaaaataattactgttggcttatattactctttaagtgattgaacttcattggaagaaagtctaagaatgcagagtggtaaaaggaagctggtttcctttttaaaaaagaaccctactgtggacacaggaattaactagaccagtgaatagggaagacaataatggtagcaacatgccaagatgattaaatgtggaaatatataaagacgtgaaaggtaatataatacccacaagaaatgggaaaaggtcaggttacttggaaaagtataaagacattgcacagtttggtcagaataagtacaataatatagacagccaccctctcaactgcctgttt

SEQ ID NO: 233631 - DNA, 368 bp, Homo sapiens
aaagtgctgggaaagtatttttttctaagcttcagtttacttgtgaataaaatggaggttatagagtttgccatctgtgattgttagaattaaattgtaggatacatgcaaagcagttagcaaagtacgtagcacgtaagaagtgcttgataaatgttagctcccattatctctagatcattaagtcttattcataataagagttaggctagtctaacaataagttagttattagtgctaaggaaaattaaaattttttggtacatgagctgagatctaattattgagccattgtttacaagagacatatggctatatgatttttactttctaatctcaactatgaaatgttgctcccagaaaatttt

SEQ ID NO: 233632 - DNA, 945 bp, Homo sapiens
ttttaagtggctttattaagatataaatcccataccatacaattcatccatttaaagtgtacaagtcaacagattttagtattacattattaatatttttaactgtggtaaaatatatgtaacacaaattttgtcattttaaccatttttaagtgtacaattcagtggcagtaattacatctacaatgctgtacaaccatcactactacctatttccaaaacttttcatcaacgagcagttttaaacaagtgatacggatgttgtccatgttccttcccttccgcttcccattgctgcttgtacctgaataaatctggagttctgagtgcaaggaagaattggtgggtggagggttgggggcggtgacaaatgggcagacaaccaactttgcattggttgtaacattttccagggtaagtctccactcagcatatgagttttgcatagtgggacggaaaaggggtgatgttttaataacaatgacttttccacattctgggaagtgacaaagaattatgttggagagtgtctgttctttagttttagagaacactgtttagcctttctggtttcttcttgagaagatgaagaactgggtccttgagtctagagtaagagtaattatgaaaaaagaatctgttctgatttacagagggcccagtcacacagcagcaggaagggcccaaggagggaggaccgagaaactccaagcagggacttctgacattagctttcacgttttccttttctacattgagatgcccttatagtaggtggcatcaagcgttcagtaaatcttgtcaactgcatcccaatgccagctttgttctgcaatgctttgggtaaaaacaggagtgcaggagtaggttaagaaaaacaggctgcaaaaacaatttaggataccaagaaatgatcagtccatataggcagatccatggagacag

SEQ ID NO: 233633 - DNA, 887 bp, Homo sapiens
ttttgtttttttgtttttttttttcagtagagacggggttttgccatgttggccaggctggtcttgaacaactgacttcaagtgatccacccacctcagcctccaaaagcgctgagattactggggtaagccactgagcctgctctcgtccaatgagccaatattcttaaaaataacatgattaacaaaattatatcactttaagagtgtgactagaacccagatttctgaattttaaatcttgctgccaaagtaggcttttgccctactatctcctttctaatatactaaatcactgtttcattgttatttctataagatatataattctcttacatacaaatgtaaaaggtactatactaaaaataaatgtaaatgatgaaaagatatttcccgcatcctccaaaattattgattatatgcaaataagatacatacgaatctttgtgctaaaacttgaaggctaatttttcaaatttattgattattgattatatgcaactaagatacatacaaaattattgattatatgcaaataagatacatacaaatctttgtgccaaagcttgaagcctaatttttcaaatttactcaatgattcaagaaaattcaaattaatgtactttttcttaggcaggaaaagacaacttttagatttaaaaggctataccaactttaattttttaaaaactttttaccaacttgaacagcctttgacttggtgagctatatatagcacatactatactgagaaagggaggctactttggaagctctgataaatatcaagacattagaacaccattgttttaaagacaagtgcctttttttgtctctccttaaaaggaaaaaaacaaacaacaaaactacatacatatataaagttc

SEQ ID NO: 233634 - DNA, 833 bp, Homo sapiens
ttttgtttttttgtttttttttttcagtagagacggggttttgccatgttggccaggctggtcttgaacaactgacttcaagtgatccacccacctcagcctccaaaagcgctgagattactggggtaagccactgagcctgctctcgtccaatgagccaatattcttaaaaataacatgattaacaaaattatatcactttaagagtgtgactagaacccagatttctgaattttaaatcttgctgccaaagtaggcttttgccctactatctcctttctaatatactaaatcactgtttcattgttatttctataagatatataattctcttacatacaaatgtaaaaggtactatactaaaaataaatgtaaatgatgaaaagatatttcccgcatcctccaaaattattgattatatgcaaataagatacatacgaatctttgtgctaaaacttgaaggctaatttttcaaatttattgattattgattatatgcaactaagatacatacaaaattattgatttcaaatttactcaatgattcaagaaaattcaaattaatgtactttttcttaggcaggaaaagacaacttttagatttaaaaggctataccaactttaattttttaaaaactttttaccaacttgaacagcctttgacttggtgagctatatatagcacatactatactgagaaagggaggctactttggaagctctgataaatatcaagacattagaacaccattgttttaaagacaagtgcctttttttgtctctccttaaaaggaaaaaaacaaacaacaaaactacatacatatataaagttc

SEQ ID NO: 233635 - DNA, 178 bp, Homo sapiens
gccatctccacctcagcagctatgaatgtgcctcactcttaactccactgattttcttccccattcccagaaggcccttctctcttctcattgtccatccaaaccacaacaccctcctggttatattacacctctaccagaattcttggtaaaaaatttccagtctcttatgttggga

SEQ ID NO: 233636 - DNA, 866 bp, Homo sapiens
atggggtagagattgggttgtggcaaagaatagaggagccaggacacgtccgactgagagctgagatctgagcgaaaccttgaaaggtggtgtgagagtcagccaagtggatatttgggggaaaagttttccaagcaaagggaacagtgagagtcaaggtctccttggtgtgtggtactgcaaggagccctctgtggctgacgcggggtgaaccaagatgagagtaagtaggaaatgaagccaaagcatagtggtagccatatcgtggagggcatatgggccagttaaggactttagggagcctttgaaaggtttgagcagaggagggatataatcaacttccatttcaaatggagcccccaatctgctctgtgcaacagacactgggaagtgggaggtaggcatagaatcagaaaactaagagagggtatacagtaagctattgcaaaagatggcagcgattccatcgggatagcagtggggtggcagagaaatggaatggttagattttgaatccgtttggaaggtagaccatcaaataggcagatcaaatatgagacaaacagaggagataaatatttctaattccagcttctagaagcttatgcagattatttcaacacaacaatcctcatattttgatgtttttctgaagtagttttttaaatattgaaatgaggaaaaaaaaatcagctaaaataaacaaaagaagcaataaggaaaaataaatcctgcaaactgtggcccttggccagcgacagaggaggaagtcaaagtttccaccaggccaaggtgggtggatggcttgagccccagagttcaagaccagcctgggcaacatggtgaaaccccgtctttacagaaaa

SEQ ID NO: 233637 - DNA, 584 bp, Homo sapiens
agaattctaagaagtaatcatttctcccattttgaaaatgggaaaactgaggcatagagagattaagaaacttgcccaaagtcattcaatgaaggtttgaacccagataatctgtcctcagagccctgctgtgctagtttcttacaaaatcttgggaaaaaaaatttttttggaggatacttggggctttcatttggcgtagactgggtagtttatacctcaaatggagggataatcttgactagactgaacctcgcaacagggttaacaataaaattacatggcagatgcacccccagggcaccattattatacatagcagggcctcagtaaatggtattctttcccttctcttcagacccataaaatcagctttttttaaaaagggactttcttagttttgtttacctctggatccattcctggtacatagaagacgctcagtaaatacttgcggaaggcagagaggatgctttggggtcactggatgtgatgatcactcacagttgttggggcatctgcaaatacagtggtaccattagatggtgggttttataaatacagccctgggtgaagggggctta

SEQ ID NO: 233638 - DNA, 448 bp, Homo sapiens
gctgtgtgtctctgtctcggcagagtgtagggtttgctggtagttttttccctactgctacaaacttacacataaaggcccaaaacaccttacccttgtattctatagtacatctagccatacatctagctgtgtagaggctgtagattaccaatgatgataaatcagtgtctcacaagagaagagacgatttccttcctcaactataatacctagatttattgtgtaaattcccaaacctttttcatattttgtaaatgcttcaaaggtgaaaagaatgtttatttcttcttgatccaaggaggaagcatgctttcaataccagtcactccctgcatcaaaatgcacagatttttactttgatggggtctttgttgatacatccttggtgctgaggtttatgctaaaaaaaggataagccatctgaagggatctttattctacactg

SEQ ID NO: 233639 - DNA, 423 bp, Homo sapiens
ttctcagtggttccttacctaatacatataaatttataaatagtatgatttttttaacaaattaatacctttcactttaagatataagattccttgtctagctgttttgaactcaaacctaacatgtataaatctcttcagcttaaaaagaaccagggcaattttaattcatgtccccttaagaaaaagtatttttcaaccatgtctttctcttcagcactacaaagtaatgtacctgtgaatggtgactatatttttttgttgctgattttgttacattagcttggtgcaccattgtatatataatgatctcagctttgaacgtagaaaaaatatctttgttcctgggcaaatcaattcaatttctagtattgcataagaagcacactgtaaaaataaatcactcctccatgctgtaggcta

SEQ ID NO: 233640 - DNA, 701 bp, Homo sapiens
cctggtaacagaacaagactacgtctcaaaaaaaaaaaaaaaaaaaaaaaaaggactggtccagggagagtttgctttgtaaccccgacaatcctggagggaatttggtgtttggttaaggaaaagagagaagttaaaagtcatgagttacatccagcagtgtaaaaacgaaatacccgccgggcgcggtgtctcacgcctgtaatcccagcactttgggaggccgaggcaggcggatcacaaggtcaggagttcctggccaacatggtgaaaccgcatctctactaaaaatacaaaaattagctgggtttggtggtgtgtgcttatagtcccagttacttgggaggctgaggcaggagaatcggttgaacccgggaggcggaggttgagtgagattgctccactgcactccaggcctggcgacagagggagtatgtctcaaaacaaacaaatgccatgtagaggttgctgatgaagtgatgtttcccaaattcccatgtcagcaaatggcaagctgacctccctgtgcgtctctctgccaagaactgccacctgccttctctgggctcttcccggatagcttatgaagtccacagcctttgaatctggcctagagggtggtttttctcttctgcacccagccaagtgttttaggagaggtgcggctctctgtgagggaacacagggcatgttgaacttgt

SEQ ID NO: 233641 - DNA, 499 bp, Homo sapiens
cctggtaacagaacaagactacgtctcaaaaaaaaaaaaaaaaaaaaaaaaaggactggtccagggagagtttgctttgtaaccccgacaatcctggagggaatttggtgtttggttaaggaaaagagagaagttaaaagtcatgagttacatccagcagtgtaaaaacgaaatacccgccgggcgcggtgtctcacgcctgtaatcccagcactttgggaggccgaggcaggcggatcacaaggtcaggagttcctggccaacatggtgaaaccgcatctctactaaaaatacaaaaattagctgggtttggtggtgtgtgcttatagtcccagttacttgggaggctgaggcaggagaatcggttgaacccgggaggcggaggttgagtgagattgctccactgcactccaggcctggcgacagagggagtatgtctcaaaacaaacaagaaaggttgtgataagggattttccaaatcccatttcggggctcgcct

SEQ ID NO: 233642 - DNA, 151 bp, Homo sapiens
ctgggacttgggcggctgagaagctgacctccctagttgagtcaactgccatgggctaatagtcaaagagaaagaacgagctctcaagagcaagggcaatcacagcagagaaaattctggtttgcctaatcttacattcctgtcttttacc

SEQ ID NO: 233643 - DNA, 158 bp, Homo sapiens
ttgcctctgcttctcccactcccagcacctcacagacagctgtgaagcccatatctctgaacggttttcatatactctcccccaggagccttcagtggctccctagtacccactgaccaagcaggcagttaaaacacctcctcagtgtggccttatgt

SEQ ID NO: 233644 - DNA, 452 bp, Homo sapiens
taaatttttaacttttttatttagagctttccagcagtactgacacaggtgttataaactttccctgccaagatgtggccttttcctaacgaaaagttccaaaggaatggagattgagactggagtagtttcttagaggaggtggctactccgatcctcttcactccaaaataaagtgtactcccgctcacttccctcaaaacaaatccaccacttataaatgtgcaacctgtggggccatttttgaaacgtgtaataaataggaggatgtggccaattttcagctgaaacactccccagatatgcctccaagcactgtgtacaccaccatcttgtaggtgttctgaatgtccccaagccccatgttttgctcacgaggcatgccaccctaactccctgctgctggaaatgagaatatgtctgagggtaacagatgaacagtaataaatggc

SEQ ID NO: 233645 - DNA, 672 bp, Homo sapiens
ttttttccagacttaccttgtcaataataggctgcttaggttaccctattcgtttgtagccctaatcaccctaatttcactaggttgtcaaggaccaggccaaccacctcagcaggctgtgatgttgggaggaggcccacctgggtttgcaaaggttgagcacagcagcggctgggatgatagcagctgactcctgtattgactgagtgcccagtcagtgctggggaccatgccaagggctttcttgcatcatctcatctcatcctgaccacagctccgtgaggtgggtactattatcactcatctttaatcggtggggaatatggggctgcgaaaggggtagcaacctgcccaaggttacagtttagaagctgcagaggctggacctaagagtgtagctgggcccttccttccccaggcagccttggtgcctaggcgagccactttggtgtggacgagggggctcctgtggctgacattcatctagtctaggatgtcgccacattccaggttgtccagttcgctctgcatgtggtcgatgtactgattgatctccttcacgcgcttgcggttcctcatgatctcatccttgtgaatctgaggagtgaaaccaaagcccgattccttacatcagatcattggttaatatctttcactgaatccagtttgagg

SEQ ID NO: 233646 - DNA, 620 bp, Homo sapiens
ttagaccaccttgtttttgacttgcagaattgctttcgctcagttgtatttggtgcttaagatttctgtgaaactaacttccgaaattcatgttggggtgttaaggaaattgacctctgagttgccaagtcctgaggattcaggctggaattggggtgaagcaagttgaggcactttgggccctgaatttaaggaggtactggctcccaaggtaacacaagtgttggatgggcaccgtcctggtagaattccctcctctttgggttccttagcactgcccttttctggtctttcactgattgactctaggtctggctatgtgattttcacggctttggccaatggggtattggcaaatctgctccctaagtcctgtgcattgggacttgccctctcggaaagaatgctgccctgagaccatcacgctgtaaagaagcttgcaagaaagatcacatgaagaggtccaggtgttccagctgtgtcaggcctctgccaacagctagcaccaactactagagcatgctaagatgtgaacgagaccatcttggactttgcatctgactgtctgcctatgtgcactagaacttgatataaaggtatgttttactgtgggtcttggt

SEQ ID NO: 233647 - DNA, 150 bp, Homo sapiens
atgaagaggtccaggtgttccagctgtgtcaggcctctgccaacagctagcaccaactactagagcatgctaagatgtgaacgagaccatcttggactttgcatctgactgtctaactgagtgcagccacacacatgagcccaggtgaaa

SEQ ID NO: 233648 - DNA, 778 bp, Homo sapiens
gaacttctaagctaaaagatttatcttgaaagattccaactgttggaattcactttgttttaaatagaaataaatgtgtttcaaatgaaagtctgatgatttaatgatcacaaaagtgatgagtttaataaatgagttttttctcacctgctcaatggcactcaatgaaggtttgaaatgcctttttttcctgaaattctttaagtattataccctttgattttctagaaaactttccttagtcggcattccagcttgtgttaaaaaataaagaggaagtccttccttcttaaactggacatatggcaacattttttgtgtgtgatttcatatttgtaggacataaacctgaaaattatattcattaaatttattatgtgaatgaggttactcttctttaaagataaattaactctactgcaagaaaattgtttcatcaattacactgcaatgtaagtaaaatgatacagatgatctttgaattttggaagtatttgatttttttttcctattctgctaaggaagaaagactgactaatgttacagaactttctaatttgccttgtaaatgaagcatgtgttgtgaattttaaatcttttcttccgttggctttgtataagtgtttcccaatttttttttgtggggggtggggggtgcgttaattcttgctctcttctcaccaaagacctttttagacatttttttttgatcatcctccaccacacatatactgtaaatcagtttatgtatcacatatatatctgcactctgtactta

SEQ ID NO: 233649 - DNA, 480 bp, Homo sapiens
caggcattgtaggcaaaaggatgggtgaatattttaagtgagagatgttatgcatagtacacaggtgagtggtgatgagtgaagctggaaaagtaggcaagaactgaaagaaaattcacctgtccaccatggcttggaagtagtaattaccctgatggtagtagagaagtattaaatgttttaatagcaaatgaacattttagaaaaatcatgaaagctgaagcatggaaaagagattagaaaagaaaccccatgagattggaaacagaaatagctctaaagatatactaaagtcttccaagtaagaaatgtgtgcatatactatactaatcataattagaactaaggatgtgtgtaacttcacaaagagagatctcttgatgtcaaggctaggaatggaagcctaggtattgataacattcaaagggctactacataaagcaaagtgttcttggggagaataaaaagggcagagaggaa

SEQ ID NO: 233650 - DNA, 477 bp, Homo sapiens
tttttttctagccctttttgtaatatatctgggaaaaatattccattgtagattaggttatgagtagacatttaatatctctaaccaagatgtcttcttaaggtgatttatgtgtagcatcacatgattcattttatcatataaaataaaaaaatatactttgtataatatgaaagagtaattcctatgaaatccattaaaatgtttagatatgttttaaaagcaaaatatttacaattgattattggtacataagaattcagaagtaacatggtttcataaatacaaaatgtatccaattgattctcaactatatagtgacttattttatggttggctggtgaaatgcagctatttgatgtagcttttggggctacgctacacagtttaatgatggtatgcaatttatttatatattttgttcaattgtatttccactttcttttttataataaaacctgttcaaaataaacagat

SEQ ID NO: 233651 - DNA, 543 bp, Homo sapiens
gagcccatggtgaccctgcaccccagagctgggaagggtgggctggaagcttaattaccagcacactcagctttagagttacatagagttatgttaggattccattagttttggaattgtcaggggtgatttgatttcacattttcatgggatatgggattgggatgagtcttcagtctcctggtttgtttctggaatagagtgggccacacctcccaggagtctcccccagggaactcaagacaatcactttagaattcaagaaaacaaaaataatgtgtctcacttcgttcataaagaaggcctttgacaacgtggccaaaaaggggcagagcctaagggacagactcttagaaagatgcccttggaacagggtcccgcagagtgttcctctcaaattctttagaactttacactgttttgtggggccaccctctcccacgccctttcctaacaacagtgtctttcttgatagagtatgtttcaaatttgtagactgtttgcacaataaaataaagttcctcccaaatcaagaatctgtaa

SEQ ID NO: 233652 - DNA, 397 bp, Homo sapiens
taaaacacacacatcataattgttacatgaaaggattactggatagattaaacaaaataacctgaaatacatagtaaaccacagtcagaacattcagtattagaactgcctcccaacccttgcccaggccttacactctcacctcggataccctcttctgttagatatgctgagaaaagtctcccaatctcgtaacacctaactcaaaaactgaagccttctctagtcagctcaatcagaagtcattctcccttcctctaaaatcctatatcttacttgcacaggatttagcatgtgcagcatattctctcagagttacttatgtatcattttgtttcccctcatgacctctcgtgctcaaaaaattaaatgggtggctggacatggtggctcacat

SEQ ID NO: 233653 - DNA, 516 bp, Homo sapiens
tctattttaggtatacttcataaaatacctccttccacatgattctgagttggaaagataccaacaggatgtatgtggtgcaagtgttcaagcattttaagtaggataaaatgatacaggaaatagcatcagcaatgaaagaatcgttggctatctcctcatatgattgatatgaagaaaaaaggtttagttaacttaaactaaaagtcagactgaattccaccattggattcctatttttatctcattcccactcctacttcagtttcatggtctagatactattcttaaaaacacttccttattaatagaaattgtattccctgaatattgtcatttcaactagttctcctaagatgtttaaattttgtttatttatttaaaatgtatttgttaatcattagatgtacagaatttatttataatctaggtaatccaaaggtatcattacaaaattctttaataaacagaaatgtaaaagcacatataatccaagtctgagaatggtaaaaggct

SEQ ID NO: 233654 - DNA, 843 bp, Homo sapiens
tgcggttcacaccatcggctaggtagcgaggccggttgtgaatctgttctgggaaattcactagaaacattaaccaataggattttggtgagcttagcttctgtattcctactgccgcccagaaaaggggcagggctctgcagccgccaggacagacgagcaccccatgcctatacctccctccccgagctaagtcccagggcatctgggccttgcctggagactgggctagctctgtaggctcggagagcctggggagggtgccaaccccacctctagtattttgggagatagggaaagtgaaccgacttccccttcccatacccctcagggtggttccctaccagccaggcttactacttctagaagaaagcagagtgccagggagtgagattgcatccctgggcttagaagtgacggagagaagacttgtttagtattttgccatcagcacaaggaaaaccaggagagagtctgcctccaggactctgagccttctgcctcgtatgttcagaaggtggataggtcttcccactccagcatggcttgaactcttaggggtctgcagtgctccatctccattggtggccccagctcagtaactatacctggtacatttcctgtgtgcaatcagtaccttgaaggcagaacattctgaataaagttggaaaaagaacagctttgctttgcaaagattgatgacagactggttcctcagaggcctaggctacccgtcacccctttttccagagcgagggcctggaatgaaggcagtttatcctctgtccctggagccgggcgtgggctggccctccggggcaccgacccacgggtgccgcgatg

SEQ ID NO: 233655 - DNA, 780 bp, Homo sapiens
aactaggctagtacgaggctgggtaaattggcagaggaggtttggattttgtgtgtgggagggtattttttgggggtagttgtctgtaactttcctaagtgctttttttccttttcttttttaaagtaagttgcaggctttggcttggaaaaccccagggggatggggggcagaaacctgaggctgctgcccctttatctgccttcacggtactgtccccttcccccagctcctccctgaccccatgggccaggcctcagaccttccagctaaccgcttcccatgagccactactctgatgtcagcctataaccaaaggagctggggggtccaggcctggtgaccaacctttctcagcccactcaatcagggtgctccccacctgcaggcaggaggcaacaccctatctgctaccatcagccccttccagagcccatctgccccgcccagccctgccctgcccagccataccctgctctgccccatctgggggtgccctgctcagggatgggctggcagggctgtacccagcctccctggtaagcagagactcaagaaacctctggggtcctgttttctggtcgtgtgatcccaggggtgcacatgggccccttgggtgtctgaacagaagggcatgggagggagggctgcacccctgcagtcttactctgctggtgtagcgggcagctgcccactcccaccccaccctgcaccgcgggctcctgagtcggcagattaagcattttataaattgtattttaaatacatgttttaaacttg

SEQ ID NO: 233656 - DNA, 240 bp, Homo sapiens
cgcagcgcggggagggggtgggggaggagggaaagcggcgagtaagatggaagatgaggaggtcgctgagagctgggaagaggcggcagacagcgggggaaatccaaatctcctcccaaagtgcccattgtgattcaggacgatagccttcccgcggggccccctccacagatccgcatctcctgagtcggcagattaagcattttataaattgtattttaaatacatgttttaaacttg

SEQ ID NO: 233657 - DNA, 3437 bp, Homo sapiens
aaaggctaggtacgaggcctgggtgtgggtggaagatgaggaggtcgctgagagctgggaagaggcggcagacagcgggggaaatccaaatctcctcccaaagtgcccattgtgattcaggacgatagccttcccgcggggccccctccacagatccgcatcctcaagaggcccaccagcaacggtgtggtcagcagccccaactccaccagcaggcccacccttccagtcaagtccctagcacagcgagaggccgagtacgccgaggcccggaagcggatcctgggcagcgccagccccgaggaggagcaggagaaacccatcctcgacaggccaaccaggatctcccaacccgaagacagcaggcagcccaataatgtgatcagacagcctttgggtcctgatgggtctcaaggcttcaaacagcgcagataaatgcaggcaagaaaagatgccgccgttgctgccgtcaccgcctcctgggtcgtccgccacgggttgcactgccgtggcagacagctggacttgagcagagggaacgacctgacttacttgcactgtgatcccccttgctccgcccactgtgaccttgaaccccatgcactgtgacctccccccttctcccccttcccactgtgattggcacatcgacaagggctgtcccaagtcaatggaaagggaaagggtgggggttaggggaaggttggggggacccagcaaggactcagagagtcagacagtgccacttggccacttggggtaaagccagtgccagcaataacagtttatcatgctcattaatttgggatttcaaaacacaaatgaaaactcacacccacccacccccaagtgcatgtctccatcacttaaaaagtaagttccatttgaaaatatcctttcttttttttttcttcctatttttgtttgtttatacaaatatctgatttgcaagaaaaagtgcatgggaggggttttagtggtttaatgaatttttaattaagaaagggtagtttggtagtctacttaaaaatgtttctgggaaattcactagaaacattaaccaataggattttggtgagcttagcttctgtattcctactgccgcccagaaaaggggcagggctctgcagccgccaggacagacgagcaccccatgcctatacctccctccccgagctaagtcccagggcatctgggccttgcctggagactgggctagctctgtaggctcggagagcctggggagggtgccaaccccacctctagtattttgggagatagggaaagtgaaccgacttccccttcccatacccctcagggtggttccctaccagccaggcttactacttctagaagaaagcagagtgccagggagtgagattgcatccctgggcttagaagtgacggagagaagacttgtttagtattttgccatcagcacaaggaaaaccaggagagagtctgcctccaggactctgagccttctgcctcgtatgttcagaaggtggataggtcttcccactccagcatggcttgaactcttaggggtctgcagtgctccatctccattggtggccccagctcagtaactatacctggtacatttcctgtgtgcaatcagtaccttgaaggcagaacattctgaataaagttggaaaaagaacagctttgctttgcaaagattgatgacagactggttcctcagaggcctaggctacccgtcacccctttttccagagcgagggcctggaatgaaggcagtttatcctctgtccctggagcctggggtttgctttggctccttgaggtggaagagactaagagggcagctgcccagagcagctgtgtgtacctggctcctctcaggcttcctgatcccttccgttgcactgcgccttatccctcagccagccagacagcctccctgctcctgaccagcagatacgtttcggagtggttggtgtggtttttgtgatgagggcagcacgtggtggccaaggtggcaagctgagtctcacaggctcactccctcgttggttccctgtgggaatggtaggccaggcccagtaagccatgccccaacacgtcctctcctccggaggaagggccagctgccagctgagtcagcagctagtccatagcacagccttataactgtaaagccaggcattgcccatgagcagagctggaaccagagcttcagtcagtaagagggaggattaccttcaggagaaggcaaggaagaaaactggctgctatctttatagttccactgccctaaccaagtgtccacattctaaatgtgtagtgtccatcccttatgtaatagtggtttcccgcccaaagtgagactttccttttaattggagaagggtatagaggtagtccaggtgggaacgccagaagtgctgattgcccagccattgggaccacctgttcttgccccactaccctctagtgggaggccaaagtaaaggctggctggtgggtgtctgtggattgaggatgtggcagggactggtcctcccacctccctctggccaaagatgggctttgcccgctgtgtgcctgtcaccacccaccagcagtcatgccctgggcttcccaaatggagaggtagcaggcaacgtttttaaaaagaaagaaaacaggaaactgtattgtgtcgggggaggcgggagggagatgaggaaacggtttggattttgtgtgtgggagggtattttttgggggtagttgtctgtaactttcctaagtgctttttttccttttcttttttaaagtaagttgcaggctttggcttggaaaaccccagggggatggggggcagaaacctgaggctgctgcccctttatctgccttcacggtactgtccccttcccccagctcctccctgaccccatgggccaggcctcagaccttccagctaaccgcttcccatgagccactactctgatgtcagcctataaccaaaggagctggggggtccaggcctggtgaccaacctttctcagcccactcaatcagggtgctccccacctgcaggcaggaggcaacaccctatctgctaccatcagccccttccagagcccatctgccccgcccagccctgccctgcccagccataccctgctctgccccatctgggggtgccctgctcagggatgggctggcagggctgtacccagcctccctggtaagcagagactcaagaaacctctggggtcctgttttctggtcgtgtgatcccaggggtgcacatgggccccttgggtgtctgaacagaagggcatgggagggagggctgcacccctgcagtcttactctgctggtgtagcgggcagctgcccactcccaccccaccctgcaccgcgggctcctgagtcggcagattaagcattttataaattgtattttaaatacatgttttaaacttg

SEQ ID NO: 233658 - DNA, 3922 bp, Homo sapiens
aaaggctaggtacgaggcctgggtgtgggtggaagatgaggaggtcgctgagagctgggaagaggcggcagacagcgggggaaatccaaatctcctcccaaagtgcccattgtgattcaggacgatagccttcccgcggggccccctccacagatccgcatcctcaagaggcccaccagcaacggtgtggtcagcagccccaactccaccagcaggcccacccttccagtcaagtccctagcacagcgagaggccgagtacgccgaggcccggaagcggatcctgggcagcgccagccccgaggaggagcaggagaaacccatcctcgacaggccaaccaggatctcccaacccgaagacagcaggcagcccaataatgtgatcagacagcctttgggtcctgatgggtctcaaggcttcaaacagcgcagataaatgcaggcaagaaaagatgccgccgttgctgccgtcaccgcctcctgggtcgtccgccacgggttgcactgccgtggcagacagctggacttgagcagagggaacgacctgacttacttgcactgtgatcccccttgctccgcccactgtgaccttgaaccccatgcactgtgacctccccccttctcccccttcccactgtgattggcacatcgacaagggctgtcccaagtcaatggaaagggaaagggtgggggttaggggaaggttggggggacccagcaaggactcagagagtcagacagtgccacttggccacttggggtaaagccagtgccagcaataacagtttatcatgctcattaatttgggatttcaaaacacaaatgaaaactcacacccacccacccccaagtgcatgtctccatcacttaaaaagtaagttccatttgaaaatatcctttcttttttttttcttcctatttttgtttgtttatacaaatatctgatttgcaagaaaaagtgcatgggaggggttttagtggtttaatgaatttttaattaagaaagggtagtttggtagtctacttaaaaatgtttctgggaaattcactagaaacattaaccaataggattttggtgagcttagcttctgtattcctactgccgcccagaaaaggggcagggctctgcagccgccaggacagacgagcaccccatgcctatacctccctccccgagctaagtcccagggcatctgggccttgcctggagactgggctagctctgtaggctcggagagcctggggagggtgccaaccccacctctagtattttgggagatagggaaagtgaaccgacttccccttcccatacccctcagggtggttccctaccagccaggcttactacttctagaagaaagcagagtgccagggagtgagattgcatccctgggcttagaagtgacggagagaagacttgtttagtattttgccatcagcacaaggaaaaccaggagagagtctgcctccaggactctgagccttctgcctcgtatgttcagaaggtggataggtcttcccactccagcatggcttgaactcttaggggtctgcagtgctccatctccattggtggccccagctcagtaactatacctggtacatttcctgtgtgcaatcagtaccttgaaggcagaacattctgaataaagttggaaaaagaacagctttgctttgcaaagattgatgacagactggttcctcagaggcctaggctacccgtcacccctttttccagagcgagggcctggaatgaaggcagtttatcctctgtccctggagcctggggtttgctttggctccttgaggtggaagagactaagagggcagctgcccagagcagctgtgtgtacctggctcctctcaggcttcctgatcccttccgttgcactgcgccttatccctcagccagccagacagcctccctgctcctgaccagcagatacgtttcggagtggttggtgtggtttttgtgatgagggcagcacgtggtggccaaggtggcaagctgagtctcacaggctcactccctcgttggttccctgtgggaatggtaggccaggcccagtaagccatgccccaacacgtcctctcctccggaggaagggccagctgccagctgagtcagcagctagtccatagcacagccttataactgtaaagccaggcattgcccatgagcagagctggaaccagagcttcagtcagtaagagggaggattaccttcaggagaaggcaaggaagaaaactggctgctatctttatagttccactgccctaaccaagtgtccacattctaaatgtgtagtgtccatcccttatgtaatagtggtttcccgcccaaagtgagactttccttttaattggagaagggtatagaggtagtccaggtgggaacgccagaagtgctgattgcccagccattgggaccacctgttcttgccccactaccctctagtgggaggccaaagtaaaggctggctggtgggtgtctgtggattgaggatgtggcagggactggtcctcccacctccctctggccaaagatgggctttgcccgctgtgtgcctgtcaccacccaccagcagtcatgccctgggcttcccaaatggagaggtagcaggcaacgtttttaaaaagaaagaaaacaggaaactgtattgtgtcgggggaggcgggagggagatgaggaaacggtttggattttgtgtgtgggagggtattttttgggggtagttgtctgtaactttcctaagtgctttttttccttttcttttttaaagtaagttgcaggctttggcttggaaaaccccagggggatggggggcagaaacctgaggctgctgcccctttatctgccttcacggtactgtccccttcccccagctcctccctgaccccatgggccaggcctcagaccttccagctaaccgcttcccatgagccactactctgatgtcagcctataaccaaaggagctggggggtccaggcctggtgaccaacctttctcagcccactcaatcagggtgctccccacctgcaggcaggaggcaacaccctatctgctaccatcagccccttccagagcccatctgccccgcccagccctgccctgcccagccataccctgctctgccccatctgggggtgccctgctcagggatgggctggcagggctgtacccagcctccctggtaagcagagactcaagaaacctctggggtcctgttttctggtcgtgtgatcccaggggtgcacatgggccccttgggtgtctgaacagaagggcatgggagggagggctgcacccctgcagtcttactctgctggtgtagcgggcagctgcccactcccaccccaccctgcaccgcgggctcctgagtcggcagattaagcattttataaattgtattttaaatacatgttttaaacttgaaaaaaaaaaaaaaaaaaaaaaaaaaaaaaaaagggggggccccaaaatttcccccggggggccccattgcccccaggtttttttgttgtacaagggggcgcccaataatggggaacggcctcggattatatataaacgcaaaggcgaagcggggccggcttgtattaaaaaccggcttgtaagacgaggaacaaacggcggtacgactgggggcacctttgtggagaaaggcaaccccttaactttggtggagggtgggaccatatatgtgggcaacaaacattaatcacataccagaagattttataagagccctccagggggaacattatttaaaacttttgaacggtgtatatctatgtggtggttaaaacccaaccgcggcaaaatagtgactgtgccaggcttgaaaaggaattgtgcggcagtacggattttgtaatttcgtgaaaaatttttattccaggggagcttgtagtaaata

SEQ ID NO: 233659 - DNA, 3467 bp, Homo sapiens
aaaggctaggtacgaggcctgggtgtgggtggaagatgaggaggtcgctgagagctgggaagaggcggcagacagcgggggaaatccaaatctcctcccaaagtgcccattgtgattcaggacgatagccttcccgcggggccccctccacagatccgcatcctcaagaggcccaccagcaacggtgtggtcagcagccccaactccaccagcaggcccacccttccagtcaagtccctagcacagcgagaggccgagtacgccgaggcccggaagcggatcctgggcagcgccagccccgaggaggagcaggagaaacccatcctcgacaggccaaccaggatctcccaacccgaagacagcaggcagcccaataatgtgatcagacagcctttgggtcctgatgggtctcaaggcttcaaacagcgcagataaatgcaggcaagaaaagatgccgccgttgctgccgtcaccgcctcctgggtcgtccgccacgggttgcactgccgtggcagacagctggacttgagcagagggaacgacctgacttacttgcactgtgatcccccttgctccgcccactgtgaccttgaaccccatgcactgtgacctccccccttctcccccttcccactgtgattggcacatcgacaagggctgtcccaagtcaatggaaagggaaagggtgggggttaggggaaggttggggggacccagcaaggactcagagagtcagacagtgccacttggccacttggggtaaagccagtgccagcaataacagtttatcatgctcattaatttgggatttcaaaacacaaatgaaaactcacacccacccacccccaagtgcatgtctccatcacttaaaaagtaagttccatttgaaaatatcctttcttttttttttcttcctatttttgtttgtttatacaaatatctgatttgcaagaaaaagtgcatgggaggggttttagtggtttaatgaatttttaattaagaaagggtagtttggtagtctacttaaaaatgtttctgggaaattcactagaaacattaaccaataggattttggtgagcttagcttctgtattcctactgccgcccagaaaaggggcagggctctgcagccgccaggacagacgagcaccccatgcctatacctccctccccgagctaagtcccagggcatctgggccttgcctggagactgggctagctctgtaggctcggagagcctggggagggtgccaaccccacctctagtattttgggagatagggaaagtgaaccgacttccccttcccatacccctcagggtggttccctaccagccaggcttactacttctagaagaaagcagagtgccagggagtgagattgcatccctgggcttagaagtgacggagagaagacttgtttagtattttgccatcagcacaaggaaaaccaggagagagtctgcctccaggactctgagccttctgcctcgtatgttcagaaggtggataggtcttcccactccagcatggcttgaactcttaggggtctgcagtgctccatctccattggtggccccagctcagtaactatacctggtacatttcctgtgtgcaatcagtaccttgaaggcagaacattctgaataaagttggaaaaagaacagctttgctttgcaaagattgatgacagactggttcctcagaggcctaggctacccgtcacccctttttccagagcgagggcctggaatgaaggcagtttatcctctgtccctggagcctggggtttgctttggctccttgaggtggaagagactaagagggcagctgcccagagcagctgtgtgtacctggctcctctcaggcttcctgatcccttccgttgcactgcgccttatccctcagccagccagacagcctccctgctcctgaccagcagatacgtttcggagtggttggtgtggtttttgtgatgagggcagcacgtggtggccaaggtggcaagctgagtctcacaggctcactccctcgttggttccctgtgggaatggtaggccaggcccagtaagccatgccccaacacgtcctctcctccggaggaagggccagctgccagctgagtcagcagctagtccatagcacagccttataactgtaaagccaggcattgcccatgagcagagctggaaccagagcttcagtcagtaagagggaggattaccttcaggagaaggcaaggaagaaaactggctgctatctttatagttccactgccctaaccaagtgtccacattctaaatgtgtagtgtccatcccttatgtaatagtggtttcccgcccaaagtgagactttccttttaattggagaagggtatagaggtagtccaggtgggaacgccagaagtgctgattgcccagccattgggaccacctgttcttgccccactaccctctagtgggaggccaaagtaaaggctggctggtgggtgtctgtggattgaggatgtggcagggactggtcctcccacctccctctggccaaagatgggctttgcccgctgtgtgcctgtcaccacccaccagcagtcatgccctgggcttcccaaatggagaggtagcaggcaacgtttttaaaaagaaagaaaacaggaaactgtattgtgtcgggggaggcgggagggagatgaggaaacggtttggattttgtgtgtgggagggtattttttgggggtagttgtctgtaactttcctaagtgctttttttccttttcttttttaaagtaagttgcaggctttggcttggaaaaccccagggggatggggggcagaaacctgaggctgctgcccctttatctgccttcacggtactgtccccttcccccagctcctccctgaccccatgggccaggcctcagaccttccagctaaccgcttcccatgagccactactctgatgtcagcctataaccaaaggagctggggggtccaggcctggtgaccaacctttctcagcccactcaatcagggtgctccccacctgcaggcaggaggcaacaccctatctgctaccatcagccccttccagagcccatctgccccgcccagccctgccctgcccagccataccctgctctgccccatctgggggtgccctgctcagggatgggctggcagggctgtacccagcctccctggtaagcagagactcaagaaacctctggggtcctgttttctggtcgtgtgatcccaggggtgcacatgggccccttgggtgtctgaacagaagggcatgggagggagggctgcacccctgcagtcttactctgctggtgtagcgggcagctgcccactcccaccccaccctgcaccgcgggctcctgagtcggcagattaagcattttataaattgtattttaaatacatgttttaaacttgaaaaaaatacaaaaactgaaaaaaaaaaaa

SEQ ID NO: 233660 - DNA, 3505 bp, Homo sapiens
cgcagcgcggggagggggtgggggaggagggaaagcggcgagtaagatggaagatgaggaggtcgctgagagctgggaagaggcggcagacagcggggaaatagacagacggttggaaaaaaaactgaagatcacacaaaaagagagggaaatccaaatctcctcccaaagtgcccattgtgattcaggacgatagccttcccgcggggccccctccacagatccgcatcctcaagaggcccaccagcaacggtgtggtcagcagccccaactccaccagcaggcccacccttccagtcaagtccctagcacagcgagaggccgagtacgccgaggcccggaagcggatcctgggcagcgccagccccgaggaggagcaggagaaacccatcctcgacaggccaaccaggatctcccaacccgaagacagcaggcagcccaataatgtgatcagacagcctttgggtcctgatgggtctcaaggcttcaaacagcgcagataaatgcaggcaagaaaagatgccgccgttgctgccgtcaccgcctcctgggtcgtccgccacgggttgcactgccgtggcagacagctggacttgagcagagggaacgacctgacttacttgcactgtgatcccccttgctccgcccactgtgaccttgaaccccatgcactgtgacctccccccttctcccccttcccactgtgattggcacatcgacaagggctgtcccaagtcaatggaaagggaaagggtgggggttaggggaaggttggggggacccagcaaggactcagagagtcagacagtgccacttggccacttggggtaaagccagtgccagcaataacagtttatcatgctcattaatttgggatttcaaaacacaaatgaaaactcacacccacccacccccaagtgcatgtctccatcacttaaaaagtaagttccatttgaaaatatcctttcttttttttttcttcctatttttgtttgtttatacaaatatctgatttgcaagaaaaagtgcatgggaggggttttagtggtttaatgaatttttaattaagaaagggtagtttggtagtctacttaaaaatgtttctgggaaattcactagaaacattaaccaataggattttggtgagcttagcttctgtattcctactgccgcccagaaaaggggcagggctctgcagccgccaggacagacgagcaccccatgcctatacctccctccccgagctaagtcccagggcatctgggccttgcctggagactgggctagctctgtaggctcggagagcctggggagggtgccaaccccacctctagtattttgggagatagggaaagtgaaccgacttccccttcccatacccctcagggtggttccctaccagccaggcttactacttctagaagaaagcagagtgccagggagtgagattgcatccctgggcttagaagtgacggagagaagacttgtttagtattttgccatcagcacaaggaaaaccaggagagagtctgcctccaggactctgagccttctgcctcgtatgttcagaaggtggataggtcttcccactccagcatggcttgaactcttaggggtctgcagtgctccatctccattggtggccccagctcagtaactatacctggtacatttcctgtgtgcaatcagtaccttgaaggcagaacattctgaataaagttggaaaaagaacagctttgctttgcaaagattgatgacagactggttcctcagaggcctaggctacccgtcacccctttttccagagcgagggcctggaatgaaggcagtttatcctctgtccctggagcctggggtttgctttggctccttgaggtggaagagactaagagggcagctgcccagagcagctgtgtgtacctggctcctctcaggcttcctgatcccttccgttgcactgcgccttatccctcagccagccagacagcctccctgctcctgaccagcagatacgtttcggagtggttggtgtggtttttgtgatgagggcagcacgtggtggccaaggtggcaagctgagtctcacaggctcactccctcgttggttccctgtgggaatggtaggccaggcccagtaagccatgccccaacacgtcctctcctccggaggaagggccagctgccagctgagtcagcagctagtccatagcacagccttataactgtaaagccaggcattgcccatgagcagagctggaaccagagcttcagtcagtaagagggaggattaccttcaggagaaggcaaggaagaaaactggctgctatctttatagttccactgccctaaccaagtgtccacattctaaatgtgtagtgtccatcccttatgtaatagtggtttcccgcccaaagtgagactttccttttaattggagaagggtatagaggtagtccaggtgggaacgccagaagtgctgattgcccagccattgggaccacctgttcttgccccactaccctctagtgggaggccaaagtaaaggctggctggtgggtgtctgtggattgaggatgtggcagggactggtcctcccacctccctctggccaaagatgggctttgcccgctgtgtgcctgtcaccacccaccagcagtcatgccctgggcttcccaaatggagaggtagcaggcaacgtttttaaaaagaaagaaaacaggaaactgtattgtgtcgggggaggcgggagggagatgaggaaacggtttggattttgtgtgtgggagggtattttttgggggtagttgtctgtaactttcctaagtgctttttttccttttcttttttaaagtaagttgcaggctttggcttggaaaaccccagggggatggggggcagaaacctgaggctgctgcccctttatctgccttcacggtactgtccccttcccccagctcctccctgaccccatgggccaggcctcagaccttccagctaaccgcttcccatgagccactactctgatgtcagcctataaccaaaggagctggggggtccaggcctggtgaccaacctttctcagcccactcaatcagggtgctccccacctgcaggcaggaggcaacaccctatctgctaccatcagccccttccagagcccatctgccccgcccagccctgccctgcccagccataccctgctctgccccatctgggggtgccctgctcagggatgggctggcagggctgtacccagcctccctggtaagcagagactcaagaaacctctggggtcctgttttctggtcgtgtgatcccaggggtgcacatgggccccttgggtgtctgaacagaagggcatgggagggagggctgcacccctgcagtcttactctgctggtgtagcgggcagctgcccactcccaccccaccctgcaccgcgggctcctgagtcggcagattaagcattttataaattgtattttaaatacatgttttaaacttg

SEQ ID NO: 233661 - DNA, 3713 bp, Homo sapiens
ggcttgcgcggaccaaggaggcatgtccggcttcgcaggaaagcgggaggaggcagccgagggcggggggaaattgaatcctctttgggctactcaactctgctaaaatcccccaccatccgtcacggtggacgagtcgggttttttttctctttcacttttactccaagaagagtttgtgggcaggcaggcaggtctcacggggactctgccaaagcaaccgaaagctctgcggggcagctcctctgccactcagcgatccgaggccccgggaaggtctaggagttcgcttgtcggagtccagggaaatagacagacggttggaaaaaaaactgaagatcacacaaaaagagagggaaatccaaatctcctcccaaagtgcccattgtgattcaggacgatagccttcccgcggggccccctccacagatccgcatcctcaagaggcccaccagcaacggtgtggtcagcagccccaactccaccagcaggcccacccttccagtcaagtccctagcacagcgagaggccgagtacgccgaggcccggaagcggatcctgggcagcgccagccccgaggaggagcaggagaaacccatcctcgacaggccaaccaggatctcccaacccgaagacagcaggcagcccaataatgtgatcagacagcctttgggtcctgatgggtctcaaggcttcaaacagcgcagataaatgcaggcaagaaaagatgccgccgttgctgccgtcaccgcctcctgggtcgtccgccacgggttgcactgccgtggcagacagctggacttgagcagagggaacgacctgacttacttgcactgtgatcccccttgctccgcccactgtgaccttgaaccccatgcactgtgacctccccccttctcccccttcccactgtgattggcacatcgacaagggctgtcccaagtcaatggaaagggaaagggtgggggttaggggaaggttggggggacccagcaaggactcagagagtcagacagtgccacttggccacttggggtaaagccagtgccagcaataacagtttatcatgctcattaatttgggatttcaaaacacaaatgaaaactcacacccacccacccccaagtgcatgtctccatcacttaaaaagtaagttccatttgaaaatatcctttcttttttttttcttcctatttttgtttgtttatacaaatatctgatttgcaagaaaaagtgcatgggaggggttttagtggtttaatgaatttttaattaagaaagggtagtttggtagtctacttaaaaatgtttctgggaaattcactagaaacattaaccaataggattttggtgagcttagcttctgtattcctactgccgcccagaaaaggggcagggctctgcagccgccaggacagacgagcaccccatgcctatacctccctccccgagctaagtcccagggcatctgggccttgcctggagactgggctagctctgtaggctcggagagcctggggagggtgccaaccccacctctagtattttgggagatagggaaagtgaaccgacttccccttcccatacccctcagggtggttccctaccagccaggcttactacttctagaagaaagcagagtgccagggagtgagattgcatccctgggcttagaagtgacggagagaagacttgtttagtattttgccatcagcacaaggaaaaccaggagagagtctgcctccaggactctgagccttctgcctcgtatgttcagaaggtggataggtcttcccactccagcatggcttgaactcttaggggtctgcagtgctccatctccattggtggccccagctcagtaactatacctggtacatttcctgtgtgcaatcagtaccttgaaggcagaacattctgaataaagttggaaaaagaacagctttgctttgcaaagattgatgacagactggttcctcagaggcctaggctacccgtcacccctttttccagagcgagggcctggaatgaaggcagtttatcctctgtccctggagcctggggtttgctttggctccttgaggtggaagagactaagagggcagctgcccagagcagctgtgtgtacctggctcctctcaggcttcctgatcccttccgttgcactgcgccttatccctcagccagccagacagcctccctgctcctgaccagcagatacgtttcggagtggttggtgtggtttttgtgatgagggcagcacgtggtggccaaggtggcaagctgagtctcacaggctcactccctcgttggttccctgtgggaatggtaggccaggcccagtaagccatgccccaacacgtcctctcctccggaggaagggccagctgccagctgagtcagcagctagtccatagcacagccttataactgtaaagccaggcattgcccatgagcagagctggaaccagagcttcagtcagtaagagggaggattaccttcaggagaaggcaaggaagaaaactggctgctatctttatagttccactgccctaaccaagtgtccacattctaaatgtgtagtgtccatcccttatgtaatagtggtttcccgcccaaagtgagactttccttttaattggagaagggtatagaggtagtccaggtgggaacgccagaagtgctgattgcccagccattgggaccacctgttcttgccccactaccctctagtgggaggccaaagtaaaggctggctggtgggtgtctgtggattgaggatgtggcagggactggtcctcccacctccctctggccaaagatgggctttgcccgctgtgtgcctgtcaccacccaccagcagtcatgccctgggcttcccaaatggagaggtagcaggcaacgtttttaaaaagaaagaaaacaggaaactgtattgtgtcgggggaggcgggagggagatgaggaaacggtttggattttgtgtgtgggagggtattttttgggggtagttgtctgtaactttcctaagtgctttttttccttttcttttttaaagtaagttgcaggctttggcttggaaaaccccagggggatggggggcagaaacctgaggctgctgcccctttatctgccttcacggtactgtccccttcccccagctcctccctgaccccatgggccaggcctcagaccttccagctaaccgcttcccatgagccactactctgatgtcagcctataaccaaaggagctggggggtccaggcctggtgaccaacctttctcagcccactcaatcagggtgctccccacctgcaggcaggaggcaacaccctatctgctaccatcagccccttccagagcccatctgccccgcccagccctgccctgcccagccataccctgctctgccccatctgggggtgccctgctcagggatgggctggcagggctgtacccagcctccctggtaagcagagactcaagaaacctctggggtcctgttttctggtcgtgtgatcccaggggtgcacatgggccccttgggtgtctgaacagaagggcatgggagggagggctgcacccctgcagtcttactctgctggtgtagcgggcagctgcccactcccaccccaccctgcaccgcgggctcctgagtcggcagattaagcattttataaattgtattttaaatacatgttttaaacttg

SEQ ID NO: 233662 - DNA, 3638 bp, Homo sapiens
gggatagaagtgccagaatgaggtggcgttccagcccctgtggccaggggttagggctgaggagcagttcctgtggcctgtcagagctggtcgcaagcttacttttttgggacacccttcttgaggagtggaaattttgctgtctggtcagaggccagagaatcatgcatgggtagaattagggagggagaggaaagtgatgagaggtgggtgtgggacatggacagggcctccttagtcaggagcatgatttgtgaagctgtgtttgctctttgtcagcggaaatccaaatctcctcccaaagtgcccattgtgattcaggacgatagccttcccgcggggccccctccacagatccgcatcctcaagaggcccaccagcaacggtgtggtcagcagccccaactccaccagcaggcccacccttccagtcaagtccctagcacagcgagaggccgagtacgccgaggcccggaagcggatcctgggcagcgccagccccgaggaggagcaggagaaacccatcctcgacaggccaaccaggatctcccaacccgaagacagcaggcagcccaataatgtgatcagacagcctttgggtcctgatgggtctcaaggcttcaaacagcgcagataaatgcaggcaagaaaagatgccgccgttgctgccgtcaccgcctcctgggtcgtccgccacgggttgcactgccgtggcagacagctggacttgagcagagggaacgacctgacttacttgcactgtgatcccccttgctccgcccactgtgaccttgaaccccatgcactgtgacctccccccttctcccccttcccactgtgattggcacatcgacaagggctgtcccaagtcaatggaaagggaaagggtgggggttaggggaaggttggggggacccagcaaggactcagagagtcagacagtgccacttggccacttggggtaaagccagtgccagcaataacagtttatcatgctcattaatttgggatttcaaaacacaaatgaaaactcacacccacccacccccaagtgcatgtctccatcacttaaaaagtaagttccatttgaaaatatcctttcttttttttttcttcctatttttgtttgtttatacaaatatctgatttgcaagaaaaagtgcatgggaggggttttagtggtttaatgaatttttaattaagaaagggtagtttggtagtctacttaaaaatgtttctgggaaattcactagaaacattaaccaataggattttggtgagcttagcttctgtattcctactgccgcccagaaaaggggcagggctctgcagccgccaggacagacgagcaccccatgcctatacctccctccccgagctaagtcccagggcatctgggccttgcctggagactgggctagctctgtaggctcggagagcctggggagggtgccaaccccacctctagtattttgggagatagggaaagtgaaccgacttccccttcccatacccctcagggtggttccctaccagccaggcttactacttctagaagaaagcagagtgccagggagtgagattgcatccctgggcttagaagtgacggagagaagacttgtttagtattttgccatcagcacaaggaaaaccaggagagagtctgcctccaggactctgagccttctgcctcgtatgttcagaaggtggataggtcttcccactccagcatggcttgaactcttaggggtctgcagtgctccatctccattggtggccccagctcagtaactatacctggtacatttcctgtgtgcaatcagtaccttgaaggcagaacattctgaataaagttggaaaaagaacagctttgctttgcaaagattgatgacagactggttcctcagaggcctaggctacccgtcacccctttttccagagcgagggcctggaatgaaggcagtttatcctctgtccctggagcctggggtttgctttggctccttgaggtggaagagactaagagggcagctgcccagagcagctgtgtgtacctggctcctctcaggcttcctgatcccttccgttgcactgcgccttatccctcagccagccagacagcctccctgctcctgaccagcagatacgtttcggagtggttggtgtggtttttgtgatgagggcagcacgtggtggccaaggtggcaagctgagtctcacaggctcactccctcgttggttccctgtgggaatggtaggccaggcccagtaagccatgccccaacacgtcctctcctccggaggaagggccagctgccagctgagtcagcagctagtccatagcacagccttataactgtaaagccaggcattgcccatgagcagagctggaaccagagcttcagtcagtaagagggaggattaccttcaggagaaggcaaggaagaaaactggctgctatctttatagttccactgccctaaccaagtgtccacattctaaatgtgtagtgtccatcccttatgtaatagtggtttcccgcccaaagtgagactttccttttaattggagaagggtatagaggtagtccaggtgggaacgccagaagtgctgattgcccagccattgggaccacctgttcttgccccactaccctctagtgggaggccaaagtaaaggctggctggtgggtgtctgtggattgaggatgtggcagggactggtcctcccacctccctctggccaaagatgggctttgcccgctgtgtgcctgtcaccacccaccagcagtcatgccctgggcttcccaaatggagaggtagcaggcaacgtttttaaaaagaaagaaaacaggaaactgtattgtgtcgggggaggcgggagggagatgaggaaacggtttggattttgtgtgtgggagggtattttttgggggtagttgtctgtaactttcctaagtgctttttttccttttcttttttaaagtaagttgcaggctttggcttggaaaaccccagggggatggggggcagaaacctgaggctgctgcccctttatctgccttcacggtactgtccccttcccccagctcctccctgaccccatgggccaggcctcagaccttccagctaaccgcttcccatgagccactactctgatgtcagcctataaccaaaggagctggggggtccaggcctggtgaccaacctttctcagcccactcaatcagggtgctccccacctgcaggcaggaggcaacaccctatctgctaccatcagccccttccagagcccatctgccccgcccagccctgccctgcccagccataccctgctctgccccatctgggggtgccctgctcagggatgggctggcagggctgtacccagcctccctggtaagcagagactcaagaaacctctggggtcctgttttctggtcgtgtgatcccaggggtgcacatgggccccttgggtgtctgaacagaagggcatgggagggagggctgcacccctgcagtcttactctgctggtgtagcgggcagctgcccactcccaccccaccctgcaccgcgggctcctgagtcggcagattaagcattttataaattgtattttaaatacatgttttaaacttg

SEQ ID NO: 233663 - DNA, 2892 bp, Homo sapiens
aaaggctaggtacgaggcctgggtgtgggtggaagatgaggaggtcgctgagagctgggaagaggcggcagacagcgggggaaatccaaatctcctcccaaagtgcccattgtgattcaggacgatagccttcccgcggggccccctccacagatccgcatcctcaagaggcccaccagcaacggtgtggtcagcagccccaactccaccagcaggcccacccttccagtcaagtccctagcacagcgagaggccgagtacgccgaggcccggaagcggatcctgggcagcgccagccccgaggaggagcaggagaaacccatcctcgacaggccaaccaggatctcccaacccgaagacagcaggcagcccaataatgtgatcagacagcctttgggtcctgatgggtctcaaggcttcaaacagcgcagataaatgcaggcaagaaaagatgccgccgttgctgccgtcaccgcctcctgggtcgtccgccacgggttgcactgccgtggcagacagctggacttgagcagagggaacgacctgacttacttgcactgtgatcccccttgctccgcccactgtgaccttgaaccccatgcactgtgacctccccccttctcccccttcccactgtgattggcacatcgacaagggctgtcccaagtcaatggaaagggaaagggtgggggttaggggaaggttggggggacccagcaaggactcagagagtcagacagtgccacttggccacttggggtaaagccagtgccagcaataacagtttatcatgctcattaatttgggatttcaaaacacaaatgaaaactcacacccacccacccccaagtgcatgtctccatcacttaaaaagtaagttccatttgaaaatatcctttcttttttttttcttcctatttttgtttgtttatacaaatatctgatttgcaagaaaaagtgcatgggaggggttttagtggtttaatgaatttttaattaagaaagggtagtttggtagtctacttaaaaatgtttctgggaaattcactagaaacattaaccaataggattttggtgagcttagcttctgtattcctactgccgcccagaaaaggggcagggctctgcagccgccaggacagacgagcaccccatgcctatacctccctccccgagctaagtcccagggcatctgggccttgcctggagactgggctagctctgtaggctcggagagcctggggagggtgccaaccccacctctagtattttgggagatagggaaagtgaaccgacttccccttcccatacccctcagggtggttccctaccagccaggcttactacttctagaagaaagcagagtgccagggagtgagattgcatccctgggcttagaagtgacggagagaagacttgtttagtattttgccatcagcacaaggaaaaccaggagagagtctgcctccaggactctgagccttctgcctcgtatgttcagaaggtggataggtcttcccactccagcatggcttgaactcttaggggtctgcagtgctccatctccattggtggccccagctcagtaactatacctggtacatttcctgtgtgcaatcagtaccttgaaggcagaacattctgaataaagttggaaaaagaacagctttgctttgcaaagattgatgacagactggttcctcagaggcctaggctacccgtcacccctttttccagagcgagggcctggaatgaaggcagtttatcctctgtccctggagcctggggtttgctttggctccttgaggtggaagagactaagagggcagctgcccagagcagctgtgtgtacctggctcctctcaggcttcctgatcccttccgttgcactgcgccttatccctcagccagccagacagcctccctgctcctgaccagcagatacgtttcggagtggttggtgtggtttttgtgatgagggcagcacgtggtggccaaggtggcaagctgagtctcacaggctcactccctcgttggttccctgtgggaatggtaggccaggcccagtaagccatgccccaacacgtcctctcctccggaggaagggccagctgccagctgagtcagcagctagtccatagcacagccttataactgtaaagccaggcattgcccatgagcagagctggaaccagagcttcagtcagtaagagggaggattaccttcaggagaaggcaaggaagaaaactggctgctatctttatagttccactgccctaaccaagtgtccacattctaaatgtgtagtgtccatcccttatgtaatagtggtttcccgcccaaagtgagactttccttttaattggagaagggtatagaggtagtccaggtgggaacgccagaagtgctgattgcccagccattgggaccacctgttcttgccccactaccctctagtgggaggccaaagtaaaggctggctggtgggtgtctgtggattgaggatgtggcagggactggtcctcccacctccctctggccaaagatgggctttgcccgctgtgtgccctgcccagccataccctgctctgccccatctgggggtgccctgctcagggatgggctggcagggctgtacccagcctccctggtaagcagagactcaagaaacctctggggtcctgttttctggtcgtgtgatcccaggggtgcacatgggccccttgggtgtctgaacagaagggcatgggagggagggctgcacccctgcagtcttactctgctggtgtagcgggcagctgcccactcccaccccaccctgcaccgcgggctcctgagtcggcagattaagcattttataaattgtattttaaatacatgttttaaacttg

SEQ ID NO: 233664 - DNA, 2581 bp, Homo sapiens
aaaggctaggtacgaggcctgggtgtgggtggaagatgaggaggtcgctgagagctgggaagaggcggcagacagcgggggaaatccaaatctcctcccaaagtgcccattgtgattcaggacgatagccttcccgcggggccccctccacagatccgcatcctcaagaggcccaccagcaacggtgtggtcagcagccccaactccaccagcaggcccacccttccagtcaagtccctagcacagcgagaggccgagtacgccgaggcccggaagcggatcctgggcagcgccagccccgaggaggagcaggagaaacccatcctcgacaggccaaccaggatctcccaacccgaagacagcaggcagcccaataatgtgatcagacagcctttgggtcctgatgggtctcaaggcttcaaacagcgcagataaatgcaggcaagaaaagatgccgccgttgctgccgtcaccgcctcctgggtcgtccgccacgggttgcactgccgtggcagacagctggacttgagcagagggaacgacctgacttacttgcactgtgatcccccttgctccgcccactgtgaccttgaaccccatgcactgtgacctccccccttctcccccttcccactgtgattggcacatcgacaagggctgtcccaagtcaatggaaagggaaagggtgggggttaggggaaggttggggggacccagcaaggactcagagagtcagacagtgccacttggccacttggggtaaagccagtgccagcaataacagtttatcatgctcattaatttgggatttcaaaacacaaatgaaaactcacacccacccacccccaagtgcatgtctccatcacttaaaaagtaagttccatttgaaaatatcctttcttttttttttcttcctatttttgtttgtttatacaaatatctgatttgcaagaaaaagtgcatgggaggggttttagtggtttaatgaatttttaattaagaaagggtagtttggtagtctacttaaaaatgtttctgggaaattcactagaaacattaaccaataggattttggtgagcttagcttctgtattcctactgccgcccagaaaaggggcagggctctgcagccgccaggacagacgagcaccccatgcctatacctccctccccgagctaagtcccagggcatctgggccttgcctggagactgggctagctctgtaggctcggagagcctggggagggtgccaaccccacctctagtattttgggagatagggaaagtgaaccgacttccccttcccatacccctcagggtggttccctaccagccaggcttactacttctagaagaaagcagagtgccagggagtgagattgcatccctgggcttagaagtgacggagagaagacttgtttagtattttgccatcagcacaaggaaaaccaggagagagtctgcctccaggactctgagccttctgcctcgtatgttcagaaggtggataggtcttcccactccagcatggcttgaactcttaggggtctgcagtgctccatctccattggtggccccagctcagtaactatacctggtacatttcctgtgtgcaatcagtaccttgaaggcagaacattctgaataaagttggaaaaagaacagctttgctttgcaaagattgatgacagactggttcctcagaggcctaggctacccgtcacccctttttccagagcgagggcctggaatgaaggcagtttatcctctgtccctggagcctggggtttgctttggctccttgaggtggaagagactaagagggcagctgcccagagcagctgtgtgtacctggctcctctcaggcttcctgatcccttccgttgcactgcgccttatccctcagccagccagacagcctccctgctcctgaccagcagatacgtttcggagtggttggtgtggtttttgtgatgagggcagcacgtggtggccaaggtggcaagctgagtctcacaggctcactccctcgttggttccctgtgggaatggtaggccaggcccagtaagccatgccccaacacgtcctctcctccggaggaagggccagctgccagctgagtcagcagctagtccatagcacagccttataactgtaaagccaggcattgcccatgagcagagctggaaccagagcttcagtcagtaagagggaggattaccttcaggagaaggcaaggaagaaaactggctgctatctttatagttccactgccctaaccaagtgtccacattctaaatgtgtagtgtccatcccttatgtaatagtggtttcccgcccaaagtgagactttccttttaattggagaagggtatagaggtagtccaggtgggaacgccagaagtgctgattgcccagccattgggaccacctgttcttgccccactaccctctagtgggaggccaaagtaaaggctggctggtgggtggtgacaggcacacagcgggcaaagcccatctttggccagagggaggtgggaggaccagtccctgccacatcctcaatccacagacaccca

SEQ ID NO: 233665 - DNA, 2959 bp, Homo sapiens
gggtacccggatcccccccagacgtccgtatgatcagacagctggacttgagcagagggaacgacctgacttacttgcactgtgatcccccttgctccgcccactgtgaccttgaaccccatgcactgtgacctccccccttctcccccttcccactgtgattggcacatcgacaagggctgtcccaagtcaatggaaagggaaagggtgggggttaggggaaggttggggggacccagcaaggactcagagagtcagacagtgccacttggccacttggggtaaagccagtgccagcaataacagtttatcatgctcattaatttgggatttcaaaacacaaatgaaaactcacacccacccacccccaagtgcatgtctccatcacttaaaaagtaagttccatttgaaaatatcctttcttttttttttcttcctatttttgtttgtttatacaaatatctgatttgcaagaaaaagtgcatgggaggggttttagtggtttaatgaatttttaattaagaaagggtagtttggtagtctacttaaaaatgtttctgggaaattcactagaaacattaaccaataggattttggtgagcttagcttctgtattcctactgccgcccagaaaaggggcagggctctgcagccgccaggacagacgagcaccccatgcctatacctccctccccgagctaagtcccagggcatctgggccttgcctggagactgggctagctctgtaggctcggagagcctggggagggtgccaaccccacctctagtattttgggagatagggaaagtgaaccgacttccccttcccatacccctcagggtggttccctaccagccaggcttactacttctagaagaaagcagagtgccagggagtgagattgcatccctgggcttagaagtgacggagagaagacttgtttagtattttgccatcagcacaaggaaaaccaggagagagtctgcctccaggactctgagccttctgcctcgtatgttcagaaggtggataggtcttcccactccagcatggcttgaactcttaggggtctgcagtgctccatctccattggtggccccagctcagtaactatacctggtacatttcctgtgtgcaatcagtaccttgaaggcagaacattctgaataaagttggaaaaagaacagctttgctttgcaaagattgatgacagactggttcctcagaggcctaggctacccgtcacccctttttccagagcgagggcctggaatgaaggcagtttatcctctgtccctggagcctggggtttgctttggctccttgaggtggaagagactaagagggcagctgcccagagcagctgtgtgtacctggctcctctcaggcttcctgatcccttccgttgcactgcgccttatccctcagccagccagacagcctccctgctcctgaccagcagatacgtttcggagtggttggtgtggtttttgtgatgagggcagcacgtggtggccaaggtggcaagctgagtctcacaggctcactccctcgttggttccctgtgggaatggtaggccaggcccagtaagccatgccccaacacgtcctctcctccggaggaagggccagctgccagctgagtcagcagctagtccatagcacagccttataactgtaaagccaggcattgcccatgagcagagctggaaccagagcttcagtcagtaagagggaggattaccttcaggagaaggcaaggaagaaaactggctgctatctttatagttccactgccctaaccaagtgtccacattctaaatgtgtagtgtccatcccttatgtaatagtggtttcccgcccaaagtgagactttccttttaattggagaagggtatagaggtagtccaggtgggaacgccagaagtgctgattgcccagccattgggaccacctgttcttgccccactaccctctagtgggaggccaaagtaaaggctggctggtgggtgtctgtggattgaggatgtggcagggactggtcctcccacctccctctggccaaagatgggctttgcccgctgtgtgcctgtcaccacccaccagcagtcatgccctgggcttcccaaatggagaggtagcaggcaacgtttttaaaaagaaagaaaacaggaaactgtattgtgtcgggggaggcgggagggagatgaggaaacggtttggattttgtgtgtgggagggtattttttgggggtagttgtctgtaactttcctaagtgctttttttccttttcttttttaaagtaagttgcaggctttggcttggaaaaccccagggggatggggggcagaaacctgaggctgctgcccctttatctgccttcacggtactgtccccttcccccagctcctccctgaccccatgggccaggcctcagaccttccagctaaccgcttcccatgagccactactctgatgtcagcctataaccaaaggagctggggggtccaggcctggtgaccaacctttctcagcccactcaatcagggtgctccccacctgcaggcaggaggcaacaccctatctgctaccatcagccccttccagagcccatctgccccgcccagccctgccctgcccagccataccctgctctgccccatctgggggtgccctgctcagggatgggctggcagggctgtacccagcctccctggtaagcagagactcaagaaacctctggggtcctgttttctggtcgtgtgatcccaggggtgcacatgggccccttgggtgtctgaacagaagggcatgggagggagggctgcacccctgcagtcttactctgctggtgtagcgggcagctgcccactcccaccccaccctgcaccgcgggctcctgagtcggcagattaagcattttataaattgtattttaaatacatgttttaaacttg

SEQ ID NO: 233666 - DNA, 3427 bp, Homo sapiens
cgcagcgcggggagggggtgggggaggagggaaagcggcgagtaagatggaagatgaggaggtcgctgagagctgggaagaggcggcagacagcgggggaaatccaaatctcctcccaaagtgcccattgtgattcaggacgatagccttcccgcggggccccctccacagatccgcatcctcaagaggcccaccagcaacggtgtggtcagcagccccaactccaccagcaggcccacccttccagtcaagtccctagcacagcgagaggccgagtacgccgaggcccggaagcggatcctgggcagcgccagccccgaggaggagcaggagaaacccatcctcgacaggccaaccaggatctcccaacccgaagacagcaggcagcccaataatgtgatcagacagcctttgggtcctgatgggtctcaaggcttcaaacagcgcagataaatgcaggcaagaaaagatgccgccgttgctgccgtcaccgcctcctgggtcgtccgccacgggttgcactgccgtggcagacagctggacttgagcagagggaacgacctgacttacttgcactgtgatcccccttgctccgcccactgtgaccttgaaccccatgcactgtgacctccccccttctcccccttcccactgtgattggcacatcgacaagggctgtcccaagtcaatgggttggggggacccagcaaggactcagagagtcagacagtgccacttggccacttggggtaaagccagtgccagcaataacagtttatcatgctcattaatttgggatttcaaaacacaaatgaaaactcacacccacccacccccaagtgcatgtctccatcacttaaaaagtaagttccatttgaaaatatcctttcttttttttttcttcctatttttgtttgtttatacaaatatctgatttgcaagaaaaagtgcatgggaggggttttagtggtttaatgaatttttaattaagaaagggtagtttggtagtctacttaaaaatgtttctgggaaattcactagaaacattaaccaataggattttggtgagcttagcttctgtattcctactgccgcccagaaaaggggcagggctctgcagccgccaggacagacgagcaccccatgcctatacctccctccccgagctaagtcccagggcatctgggccttgcctggagactgggctagctctgtaggctcggagagcctggggagggtgccaaccccacctctagtattttgggagatagggaaagtgaaccgacttccccttcccatacccctcagggtggttccctaccagccaggcttactacttctagaagaaagcagagtgccagggagtgagattgcatccctgggcttagaagtgacggagagaagacttgtttagtattttgccatcagcacaaggaaaaccaggagagagtctgcctccaggactctgagccttctgcctcgtatgttcagaaggtggataggtcttcccactccagcatggcttgaactcttaggggtctgcagtgctccatctccattggtggccccagctcagtaactatacctggtacatttcctgtgtgcaatcagtaccttgaaggcagaacattctgaataaagttggaaaaagaacagctttgctttgcaaagattgatgacagactggttcctcagaggcctaggctacccgtcacccctttttccagagcgagggcctggaatgaaggcagtttatcctctgtccctggagcctggggtttgctttggctccttgaggtggaagagactaagagggcagctgcccagagcagctgtgtgtacctggctcctctcaggcttcctgatcccttccgttgcactgcgccttatccctcagccagccagacagcctccctgctcctgaccagcagatacgtttcggagtggttggtgtggtttttgtgatgagggcagcacgtggtggccaaggtggcaagctgagtctcacaggctcactccctcgttggttccctgtgggaatggtaggccaggcccagtaagccatgccccaacacgtcctctcctccggaggaagggccagctgccagctgagtcagcagctagtccatagcacagccttataactgtaaagccaggcattgcccatgagcagagctggaaccagagcttcagtcagtaagagggaggattaccttcaggagaaggcaaggaagaaaactggctgctatctttatagttccactgccctaaccaagtgtccacattctaaatgtgtagtgtccatcccttatgtaatagtggtttcccgcccaaagtgagactttccttttaattggagaagggtatagaggtagtccaggtgggaacgccagaagtgctgattgcccagccattgggaccacctgttcttgccccactaccctctagtgggaggccaaagtaaaggctggctggtgggtgtctgtggattgaggatgtggcagggactggtcctcccacctccctctggccaaagatgggctttgcccgctgtgtgcctgtcaccacccaccagcagtcatgccctgggcttcccaaatggagaggtagcaggcaacgtttttaaaaagaaagaaaacaggaaactgtattgtgtcgggggaggcgggagggagatgaggaaacggtttggattttgtgtgtgggagggtattttttgggggtagttgtctgtaactttcctaagtgctttttttccttttcttttttaaagtaagttgcaggctttggcttggaaaaccccagggggatggggggcagaaacctgaggctgctgcccctttatctgccttcacggtactgtccccttcccccagctcctccctgaccccatgggccaggcctcagaccttccagctaaccgcttcccatgagccactactctgatgtcagcctataaccaaaggagctggggggtccaggcctggtgaccaacctttctcagcccactcaatcagggtgctccccacctgcaggcaggaggcaacaccctatctgctaccatcagccccttccagagcccatctgccccgcccagccctgccctgcccagccataccctgctctgccccatctgggggtgccctgctcagggatgggctggcagggctgtacccagcctccctggtaagcagagactcaagaaacctctggggtcctgttttctggtcgtgtgatcccaggggtgcacatgggccccttgggtgtctgaacagaagggcatgggagggagggctgcacccctgcagtcttactctgctggtgtagcgggcagctgcccactcccaccccaccctgcaccgcgggctcctgagtcggcagattaagcattttataaattgtattttaaatacatgttttaaacttg

SEQ ID NO: 233667 - DNA, 2706 bp, Homo sapiens
  misc_feature (27)..(27): n is a, c, g, or t
ggttaagcggatatcgtcgacccacgncgtaaagccagtgccagcaataacagtttatcatgctcattaatttgggatttcaaaacacaaatgaaaactcacacccacccacccccaagtgcatgtctccatcacttaaaaagtaagttccatttgaaaatatcctttcttttttttttcttcctatttttgtttgtttatacaaatatctgatttgcaagaaaaagtgcatgggaggggttttagtggtttaatgaatttttaattaagaaagggtagtttggtagtctacttaaaaatgtttctgggaaattcactagaaacattaaccaataggattttggtgagcttagcttctgtattcctactgccgcccagaaaaggggcagggctctgcagccgccaggacagacgagcaccccatgcctatacctccctccccgagctaagtcccagggcatctgggccttgcctggagactgggctagctctgtaggctcggagagcctggggagggtgccaaccccacctctagtattttgggagatagggaaagtgaaccgacttccccttcccatacccctcagggtggttccctaccagccaggcttactacttctagaagaaagcagagtgccagggagtgagattgcatccctgggcttagaagtgacggagagaagacttgtttagtattttgccatcagcacaaggaaaaccaggagagagtctgcctccaggactctgagccttctgcctcgtatgttcagaaggtggataggtcttcccactccagcatggcttgaactcttaggggtctgcagtgctccatctccattggtggccccagctcagtaactatacctggtacatttcctgtgtgcaatcagtaccttgaaggcagaacattctgaataaagttggaaaaagaacagctttgctttgcaaagattgatgacagactggttcctcagaggcctaggctacccgtcacccctttttccagagcgagggcctggaatgaaggcagtttatcctctgtccctggagcctggggtttgctttggctccttgaggtggaagagactaagagggcagctgcccagagcagctgtgtgtacctggctcctctcaggcttcctgatcccttccgttgcactgcgccttatccctcagccagccagacagcctccctgctcctgaccagcagatacgtttcggagtggttggtgtggtttttgtgatgagggcagcacgtggtggccaaggtggcaagctgagtctcacaggctcactccctcgttggttccctgtgggaatggtaggccaggcccagtaagccatgccccaacacgtcctctcctccggaggaagggccagctgccagctgagtcagcagctagtccatagcacagccttataactgtaaagccaggcattgcccatgagcagagctggaaccagagcttcagtcagtaagagggaggattaccttcaggagaaggcaaggaagaaaactggctgctatctttatagttccactgccctaaccaagtgtccacattctaaatgtgtagtgtccatcccttatgtaatagtggtttcccgcccaaagtgagactttccttttaattggagaagggtatagaggtagtccaggtgggaacgccagaagtgctgattgcccagccattgggaccacctgttcttgccccactaccctctagtgggaggccaaagtaaaggctggctggtgggtgtctgtggattgaggatgtggcagggactggtcctcccacctccctctggccaaagatgggctttgcccgctgtgtgcctgtcaccacccaccagcagtcatgccctgggcttcccaaatggagaggtagcaggcaacgtttttaaaaagaaagaaaacaggaaactgtattgtgtcgggggaggcgggagggagatgaggaaacggtttggattttgtgtgtgggagggtattttttgggggtagttgtctgtaactttcctaagtgctttttttccttttcttttttaaagtaagttgcaggctttggcttggaaaaccccagggggatggggggcagaaacctgaggctgctgcccctttatctgccttcacggtactgtccccttcccccagctcctccctgaccccatgggccaggcctcagaccttccagctaaccgcttcccatgagccactactctgatgtcagcctataaccaaaggagctggggggtccaggcctggtgaccaacctttctcagcccactcaatcagggtgctccccacctgcaggcaggaggcaacaccctatctgctaccatcagccccttccagagcccatctgccccgcccagccctgccctgcccagccataccctgctctgccccatctgggggtgccctgctcagggatgggctggcagggctgtacccagcctccctggtaagcagagactcaagaaacctctggggtcctgttttctggtcgtgtgatcccaggggtgcacatgggccccttgggtgtctgaacagaagggcatgggagggagggctgcacccctgcagtcttactctgctggtgtagcgggcagctgcccactcccaccccaccctgcaccgcgggctcctgagtcggcagattaagcattttataaattgtattttaaatacatgttttaaacttg

SEQ ID NO: 233668 - DNA, 2683 bp, Homo sapiens
aaaggctaggtacgaggcctgggtgtgggtggaagatgaggaggtcgctgagagctgggaagaggcggcagacagcgggacccacccacccccaagtgcatgtctccatcacttaaaaagtaagttccatttgaaaatatcctttcttttttttttcttcctatttttgtttgtttatacaaatatctgatttgcaagaaaaagtgcatgggaggggttttagtggtttaatgaatttttaattaagaaagggtagtttggtagtctacttaaaaatgtttctgggaaattcactagaaacattaaccaataggattttggtgagcttagcttctgtattcctactgccgcccagaaaaggggcagggctctgcagccgccaggacagacgagcaccccatgcctatacctccctccccgagctaagtcccagggcatctgggccttgcctggagactgggctagctctgtaggctcggagagcctggggagggtgccaaccccacctctagtattttgggagatagggaaagtgaaccgacttccccttcccatacccctcagggtggttccctaccagccaggcttactacttctagaagaaagcagagtgccagggagtgagattgcatccctgggcttagaagtgacggagagaagacttgtttagtattttgccatcagcacaaggaaaaccaggagagagtctgcctccaggactctgagccttctgcctcgtatgttcagaaggtggataggtcttcccactccagcatggcttgaactcttaggggtctgcagtgctccatctccattggtggccccagctcagtaactatacctggtacatttcctgtgtgcaatcagtaccttgaaggcagaacattctgaataaagttggaaaaagaacagctttgctttgcaaagattgatgacagactggttcctcagaggcctaggctacccgtcacccctttttccagagcgagggcctggaatgaaggcagtttatcctctgtccctggagcctggggtttgctttggctccttgaggtggaagagactaagagggcagctgcccagagcagctgtgtgtacctggctcctctcaggcttcctgatcccttccgttgcactgcgccttatccctcagccagccagacagcctccctgctcctgaccagcagatacgtttcggagtggttggtgtggtttttgtgatgagggcagcacgtggtggccaaggtggcaagctgagtctcacaggctcactccctcgttggttccctgtgggaatggtaggccaggcccagtaagccatgccccaacacgtcctctcctccggaggaagggccagctgccagctgagtcagcagctagtccatagcacagccttataactgtaaagccaggcattgcccatgagcagagctggaaccagagcttcagtcagtaagagggaggattaccttcaggagaaggcaaggaagaaaactggctgctatctttatagttccactgccctaaccaagtgtccacattctaaatgtgtagtgtccatcccttatgtaatagtggtttcccgcccaaagtgagactttccttttaattggagaagggtatagaggtagtccaggtgggaacgccagaagtgctgattgcccagccattgggaccacctgttcttgccccactaccctctagtgggaggccaaagtaaaggctggctggtgggtgtctgtggattgaggatgtggcagggactggtcctcccacctccctctggccaaagatgggctttgcccgctgtgtgcctgtcaccacccaccagcagtcatgccctgggcttcccaaatggagaggtagcaggcaacgtttttaaaaagaaagaaaacaggaaactgtattgtgtcgggggaggcgggagggagatgaggaaacggtttggattttgtgtgtgggagggtattttttgggggtagttgtctgtaactttcctaagtgctttttttccttttcttttttaaagtaagttgcaggctttggcttggaaaaccccagggggatggggggcagaaacctgaggctgctgcccctttatctgccttcacggtactgtccccttcccccagctcctccctgaccccatgggccaggcctcagaccttccagctaaccgcttcccatgagccactactctgatgtcagcctataaccaaaggagctggggggtccaggcctggtgaccaacctttctcagcccactcaatcagggtgctccccacctgcaggcaggaggcaacaccctatctgctaccatcagccccttccagagcccatctgccccgcccagccctgccctgcccagccataccctgctctgccccatctgggggtgccctgctcagggatgggctggcagggctgtacccagcctccctggtaagcagagactcaagaaacctctggggtcctgttttctggtcgtgtgatcccaggggtgcacatgggccccttgggtgtctgaacagaagggcatgggagggagggctgcacccctgcagtcttactctgctggtgtagcgggcagctgcccactcccaccccaccctgcaccgcgggctcctgagtcggcagattaagcattttataaattgtattttaaatacatgttttaaacttg

SEQ ID NO: 233669 - DNA, 2450 bp, Homo sapiens
tgcggttcacaccatcggctaggtagcgaggccggttgtgaatctgttctgggaaattcactagaaacattaaccaataggattttggtgagcttagcttctgtattcctactgccgcccagaaaaggggcagggctctgcagccgccaggacagacgagcaccccatgcctatacctccctccccgagctaagtcccagggcatctgggccttgcctggagactgggctagctctgtaggctcggagagcctggggagggtgccaaccccacctctagtattttgggagatagggaaagtgaaccgacttccccttcccatacccctcagggtggttccctaccagccaggcttactacttctagaagaaagcagagtgccagggagtgagattgcatccctgggcttagaagtgacggagagaagacttgtttagtattttgccatcagcacaaggaaaaccaggagagagtctgcctccaggactctgagccttctgcctcgtatgttcagaaggtggataggtcttcccactccagcatggcttgaactcttaggggtctgcagtgctccatctccattggtggccccagctcagtaactatacctggtacatttcctgtgtgcaatcagtaccttgaaggcagaacattctgaataaagttggaaaaagaacagctttgctttgcaaagattgatgacagactggttcctcagaggcctaggctacccgtcacccctttttccagagcgagggcctggaatgaaggcagtttatcctctgtccctggagcctggggtttgctttggctccttgaggtggaagagactaagagggcagctgcccagagcagctgtgtgtacctggctcctctcaggcttcctgatcccttccgttgcactgcgccttatccctcagccagccagacagcctccctgctcctgaccagcagatacgtttcggagtggttggtgtggtttttgtgatgagggcagcacgtggtggccaaggtggcaagctgagtctcacaggctcactccctcgttggttccctgtgggaatggtaggccaggcccagtaagccatgccccaacacgtcctctcctccggaggaagggccagctgccagctgagtcagcagctagtccatagcacagccttataactgtaaagccaggcattgcccatgagcagagctggaaccagagcttcagtcagtaagagggaggattaccttcaggagaaggcaaggaagaaaactggctgctatctttatagttccactgccctaaccaagtgtccacattctaaatgtgtagtgtccatcccttatgtaatagtggtttcccgcccaaagtgagactttccttttaattggagaagggtatagaggtagtccaggtgggaacgccagaagtgctgattgcccagccattgggaccacctgttcttgccccactaccctctagtgggaggccaaagtaaaggctggctggtgggtgtctgtggattgaggatgtggcagggactggtcctcccacctccctctggccaaagatgggctttgcccgctgtgtgcctgtcaccacccaccagcagtcatgccctgggcttcccaaatggagaggtagcaggcaacgtttttaaaaagaaagaaaacaggaaactgtattgtgtcgggggaggcgggagggagatgaggaaacggtttggattttgtgtgtgggagggtattttttgggggtagttgtctgtaactttcctaagtgctttttttccttttcttttttaaagtaagttgcaggctttggcttggaaaaccccagggggatggggggcagaaacctgaggctgctgcccctttatctgccttcacggtactgtccccttcccccagctcctccctgaccccatgggccaggcctcagaccttccagctaaccgcttcccatgagccactactctgatgtcagcctataaccaaaggagctggggggtccaggcctggtgaccaacctttctcagcccactcaatcagggtgctccccacctgcaggcaggaggcaacaccctatctgctaccatcagccccttccagagcccatctgccccgcccagccctgccctgcccagccataccctgctctgccccatctgggggtgccctgctcagggatgggctggcagggctgtacccagcctccctggtaagcagagactcaagaaacctctggggtcctgttttctggtcgtgtgatcccaggggtgcacatgggccccttgggtgtctgaacagaagggcatgggagggagggctgcacccctgcagtcttactctgctggtgtagcgggcagctgcccactcccaccccaccctgcaccgcgggctcctgagtcggcagattaagcattttataaattgtattttaaatacatgttttaaacttg

SEQ ID NO: 233670 - DNA, 2080 bp, Homo sapiens
tttatttccattcagggcctggcgttttcatttataattacatggccccgtcggtccgtatcaatttccattggccatcagcacaaggaaaaccaggagagagtctgcctccaggactctgagccttctgcctcgtatgttcagaaggtggataggtcttcccactccagcatggcttgaactcttaggggtctgcagtgctccatctccattggtggccccagctcagtaactatacctggtacatttcctgtgtgcaatcagtaccttgaaggcagaacattctgaataaagttggaaaaagaacagctttgctttgcaaagattgatgacagactggttcctcagaggcctaggctacccgtcacccctttttccagagcgagggcctggaatgaaggcagtttatcctctgtccctggagcctggggtttgctttggctccttgaggtggaagagactaagagggcagctgcccagagcagctgtgtgtacctggctcctctcaggcttcctgatcccttccgttgcactgcgccttatccctcagccagccagacagcctccctgctcctgaccagcagatacgtttcggagtggttggtgtggtttttgtgatgagggcagcacgtggtggccaaggtggcaagctgagtctcacaggctcactccctcgttggttccctgtgggaatggtaggccaggcccagtaagccatgccccaacacgtcctctcctccggaggaagggccagctgccagctgagtcagcagctagtccatagcacagccttataactgtaaagccaggcattgcccatgagcagagctggaaccagagcttcagtcagtaagagggaggattaccttcaggagaaggcaaggaagaaaactggctgctatctttatagttccactgccctaaccaagtgtccacattctaaatgtgtagtgtccatcccttatgtaatagtggtttcccgcccaaagtgagactttccttttaattggagaagggtatagaggtagtccaggtgggaacgccagaagtgctgattgcccagccattgggaccacctgttcttgccccactaccctctagtgggaggccaaagtaaaggctggctggtgggtgtctgtggattgaggatgtggcagggactggtcctcccacctccctctggccaaagatgggctttgcccgctgtgtgcctgtcaccacccaccagcagtcatgccctgggcttcccaaatggagaggtagcaggcaacgtttttaaaaagaaagaaaacaggaaactgtattgtgtcgggggaggcgggagggagatgaggaaacggtttggattttgtgtgtgggagggtattttttgggggtagttgtctgtaactttcctaagtgctttttttccttttcttttttaaagtaagttgcaggctttggcttggaaaaccccagggggatggggggcagaaacctgaggctgctgcccctttatctgccttcacggtactgtccccttcccccagctcctccctgaccccatgggccaggcctcagaccttccagctaaccgcttcccatgagccactactctgatgtcagcctataaccaaaggagctggggggtccaggcctggtgaccaacctttctcagcccactcaatcagggtgctccccacctgcaggcaggaggcaacaccctatctgctaccatcagccccttccagagcccatctgccccgcccagccctgccctgcccagccataccctgctctgccccatctgggggtgccctgctcagggatgggctggcagggctgtacccagcctccctggtaagcagagactcaagaaacctctggggtcctgttttctggtcgtgtgatcccaggggtgcacatgggccccttgggtgtctgaacagaagggcatgggagggagggctgcacccctgcagtcttactctgctggtgtagcgggcagctgcccactcccaccccaccctgcaccgcgggctcctgagtcggcagattaagcattttataaattgtattttaaatacatgttttaaacttg

SEQ ID NO: 233671 - DNA, 2078 bp, Homo sapiens
tcatttcattcacgagggagctggcgtttgcttataattacatggccgcagttcggcacgtcaattagacagccatcagcacaaggaaaaccaggagagagtctgcctccaggactctgagccttctgcctcgtatgttcagaaggtggataggtcttcccactccagcatggcttgaactcttaggggtctgcagtgctccatctccattggtggccccagctcagtaactatacctggtacatttcctgtgtgcaatcagtaccttgaaggcagaacattctgaataaagttggaaaaagaacagctttgctttgcaaagattgatgacagactggttcctcagaggcctaggctacccgtcacccctttttccagagcgagggcctggaatgaaggcagtttatcctctgtccctggagcctggggtttgctttggctccttgaggtggaagagactaagagggcagctgcccagagcagctgtgtgtacctggctcctctcaggcttcctgatcccttccgttgcactgcgccttatccctcagccagccagacagcctccctgctcctgaccagcagatacgtttcggagtggttggtgtggtttttgtgatgagggcagcacgtggtggccaaggtggcaagctgagtctcacaggctcactccctcgttggttccctgtgggaatggtaggccaggcccagtaagccatgccccaacacgtcctctcctccggaggaagggccagctgccagctgagtcagcagctagtccatagcacagccttataactgtaaagccaggcattgcccatgagcagagctggaaccagagcttcagtcagtaagagggaggattaccttcaggagaaggcaaggaagaaaactggctgctatctttatagttccactgccctaaccaagtgtccacattctaaatgtgtagtgtccatcccttatgtaatagtggtttcccgcccaaagtgagactttccttttaattggagaagggtatagaggtagtccaggtgggaacgccagaagtgctgattgcccagccattgggaccacctgttcttgccccactaccctctagtgggaggccaaagtaaaggctggctggtgggtgtctgtggattgaggatgtggcagggactggtcctcccacctccctctggccaaagatgggctttgcccgctgtgtgcctgtcaccacccaccagcagtcatgccctgggcttcccaaatggagaggtagcaggcaacgtttttaaaaagaaagaaaacaggaaactgtattgtgtcgggggaggcgggagggagatgaggaaacggtttggattttgtgtgtgggagggtattttttgggggtagttgtctgtaactttcctaagtgctttttttccttttcttttttaaagtaagttgcaggctttggcttggaaaaccccagggggatggggggcagaaacctgaggctgctgcccctttatctgccttcacggtactgtccccttcccccagctcctccctgaccccatgggccaggcctcagaccttccagctaaccgcttcccatgagccactactctgatgtcagcctataaccaaaggagctggggggtccaggcctggtgaccaacctttctcagcccactcaatcagggtgctccccacctgcaggcaggaggcaacaccctatctgctaccatcagccccttccagagcccatctgccccgcccagccctgccctgcccagccataccctgctctgccccatctgggggtgccctgctcagggatgggctggcagggctgtacccagcctccctggtaagcagagactcaagaaacctctggggtcctgttttctggtcgtgtgatcccaggggtgcacatgggccccttgggtgtctgaacagaagggcatgggagggagggctgcacccctgcagtcttactctgctggtgtagcgggcagctgcccactcccaccccaccctgcaccgcgggctcctgagtcggcagattaagcattttataaattgtattttaaatacatgttttaaacttg

SEQ ID NO: 233672 - DNA, 1405 bp, Homo sapiens
aaaggctaggtacgaggcctgggtgtgggtggaagatgaggaggtcgctgagagctgggaagaggcggcagacagcgggggaaatccaaatctcctcccaaagtgcccattgtgattcaggacgatagccttcccgcggggccccctccacagatccgcatcctcaagaggcccaccagcaacggtgtggtcagcagccccaactccaccagcaggcccacccttccagtcaagtccctagcacagcgagaggccgagtacgccgaggcccggaagcggatcctgggcagcgccagccccgaggaggagcaggagaaacccatcctcgacaggccaaccaggatctcccaacccgaagacagcaggcagcccaataatgtgatcagacagcctttgggtcctgatgggtctcaaggcttcaaacagcgcagataaatgcaggcaagaaaagatgccgccgttgctgccgtcaccgcctcctgggtcgtccgccacgggttgcactgccgtggcagacagctggacttgagcagagggaacgacctgacttacttgcactgtgatcccccttgctccgcccactgtgaccttgaaccccatgcactgtgacctccccccttctcccccttcccactgtgattggcacatcgacaagggctgtcccaagtcaatggaaagggaaagggtgggggttaggggaaggttggggggacccagcaaggactcagagagtcagacagtgccacttggccacttggggtaaagccagtgccagcaataacagtttatcatgctcattaatttgggatttcaaaacacaaatgaaaactcacacccacccacccccaagtgcatgtctccatcacttaaaaagtaagttccatttgaaaatatcctttcttttttttttcttcctatttttgtttgtttatacaaatatctgatttgcaagaaaaagtgcatgggaggggttttagtggtttaatgaatttttaattaagaaagggtagtttggtagtctacttaaaaatgtttctgggaaattcactagaaacattaaccaataggattttggtgagcttagcttctgtattcctactgccggccccatctgggggtgccctgctcagggatgggctggcagggctgtacccagcctccctggtaagcagagactcaagaaacctctggggtcctgttttctggtcgtgtgatcccaggggtgcacatgggccccttgggtgtctgaacagaagggcatgggagggagggctgcacccctgcagtcttactctgctggtgtagcgggcagctgcccactcccaccccaccctgcaccgcgggctcctgagtcggcagattaagcattttataaattgtattttaaatacatgttttaaacttg

SEQ ID NO: 233673 - DNA, 1157 bp, Homo sapiens
cgagtgggtgaaatctgactaggaaaaggatatttacatagtctcaaactggtttcccgcccaaagtgagactttccttttaattggagaagggtatagaggtagtccaggtgggaacgccagaagtgctgattgcccagccattgggaccacctgttcttgccccactaccctctagtgggaggccaaagtaaaggctggctggtgggtgtctgtggattgaggatgtggcagggactggtcctcccacctccctctggccaaagatgggctttgcccgctgtgtgcctgtcaccacccaccagcagtcatgccctgggcttcccaaatggagaggtagcaggcaacgtttttaaaaagaaagaaaacaggaaactgtattgtgtcgggggaggcgggagggagatgaggaaacggtttggattttgtgtgtgggagggtattttttgggggtagttgtctgtaactttcctaagtgctttttttccttttcttttttaaagtaagttgcaggctttggcttggaaaaccccagggggatggggggcagaaacctgaggctgctgcccctttatctgccttcacggtactgtccccttcccccagctcctccctgaccccatgggccaggcctcagaccttccagctaaccgcttcccatgagccactactctgatgtcagcctataaccaaaggagctggggggtccaggcctggtgaccaacctttctcagcccactcaatcagggtgctccccacctgcaggcaggaggcaacaccctatctgctaccatcagccccttccagagcccatctgccccgcccagccctgccctgcccagccataccctgctctgccccatctgggggtgccctgctcagggatgggctggcagggctgtacccagcctccctggtaagcagagactcaagaaacctctggggtcctgttttctggtcgtgtgatcccaggggtgcacatgggccccttgggtgtctgaacagaagggcatgggagggagggctgcacccctgcagtcttactctgctggtgtagcgggcagctgcccactcccaccccaccctgcaccgcgggctcctgagtcggcagattaagcattttataaattgtattttaaatacatgttttaaacttg

SEQ ID NO: 233674 - DNA, 732 bp, Homo sapiens
tcgtcagaggatcccccaggggtgtgggtagttgtctgtaactttcctaagtgctttttttccttttcttttttaaagtaagttgcaggctttggcttggaaaaccccagggggatggggggcagaaacctgaggctgctgcccctttatctgccttcacggtactgtccccttcccccagctcctccctgaccccatgggccaggcctcagaccttccagctaaccgcttcccatgagccactactctgatgtcagcctataaccaaaggagctggggggtccaggcctggtgaccaacctttctcagcccactcaatcagggtgctccccacctgcaggcaggaggcaacaccctatctgctaccatcagccccttccagagcccatctgccccgcccagccctgccctgcccagccataccctgctctgccccatctgggggtgccctgctcagggatgggctggcagggctgtacccagcctccctggtaagcagagactcaagaaacctctggggtcctgttttctggtcgtgtgatcccaggggtgcacatgggccccttgggtgtctgaacagaagggcatgggagggagggctgcacccctgcagtcttactctgctggtgtagcgggcagctgcccactcccaccccaccctgcaccgcgggctcctgagtcggcagattaagcattttataaattgtattttaaatacatgttttaaacttg

SEQ ID NO: 233675 - DNA, 896 bp, Homo sapiens
  misc_feature (719)..(719): n is a, c, g, or t
  misc_feature (803)..(803): n is a, c, g, or t
  misc_feature (827)..(827): n is a, c, g, or t
cgcagcgcggggagggggtgggggaggagggaaagcggcgagtaagatggaagatgaggaggtcgctgagagctgggaagaggcggcagacagcggggaaatagacagacggttggaaaaaaaactgaagatcacacaaaaagagagggaaatccaaatctcctcccaaagtgcccattgtgattcaggacgatagccttcccgcggggccccctccacagatccgcatcctcaagaggcccaccagcaacggtgtggtcagcagccccaactccaccagcaggcccacccttccagtcaagtccctagcacagcgagaggccgagtacgccgaggcccggaagcggatcctgggcagcgccagccccgaggaggagcaggagaaacccatcctcgacaggccaaccaggatctcccaacccgaagacagcaggcagcccaataatgtgatcagacagcctttgggtcctgatgggtctcaaggcttcaaacagcgcagataaatgcaggcaagaaaagatgccgccgttgctgccgtcaccgcctcctgggtcgtccgccacgggttgcactgccgtggcagacagctggacttgagcagagggaacgacctgacttacttgcactgtgatcccccttgctccgcccactgtgaccttgaaccccatgcactgtgacctccccccttctcccccttcccactgtgattggcaaaaaanaactgaagatcacacaaaaagagagcaggaaatccaaatctcctcccaaggtgcccattgtgattcaggacgatagccttcccngggccccctccacagatccgcatnctcaagaggccaccagcaacggtgtggtcagcagccccaactccaccatacgcctgtgattgccctatt

SEQ ID NO: 233676 - DNA, 501 bp, Homo sapiens
cgcagcgcggggagggggtgggggaggagggaaagcggcgagtaagatggaagatgaggaggtcgctgagagctgggaagaggcggcagacagcgggggaaatccaaatctcctcccaaagtgcccattgtgattcaggacgatagccttcccgcggggccccctccacagatccgcatcctcaagaggcccaccagcaacggtgtggtcagcagccccaactccaccagcaggcccacccttccagtcaagtccccctggtaagcagagactcaagaaacctctggggtcctgttttctggtcgtgtgatcccaggggtgcacatgggccccttgggtgtctgaacagaagggcatgggagggagggctgcacccctgcagtcttactctgctggtgtagcgggcagctgcccactcccaccccaccctgcaccgcgggctcctgagtcggcagattaagcattttataaattgtattttaaatacatgttttaaacttg

SEQ ID NO: 233677 - DNA, 1009 bp, Homo sapiens
aaaggctaggtacgaggcctgggtgtgggtggaagatgaggaggtcgctgagagctgggaagaggcggcagacagcgggggctggtgtgagcagaaaatgaatgtctggggaagaatgttgacagccataatacattatatcgatataaggtattattttaaaagctattagtattatattacatgccaagtatgttaatcatgttctagtttggggacagaggcgcatttactcagacatggcctacgatgtcctcttgaagcgcttttcttccacccaggctccttgtgctggaactgggcagatggtccatcttccttaaaccctagaggaagaaggaagcagtttgctttcctcagaggagacctggatgggacttctcaaattcactctaatgtgtgaggcccatttctctctctgtcttatttggctctcgcagcgatatgaaagtgaaagttcacatagtgaagttggaaaattcagtgcattgccataaaaatactgatttggtttcttctgcgctagatctggccctgtctgccaaagcttgttggccgtcattaggcagggcaagtgctctttggtgccctgcagccccttcacttccccaggtatgctccgtgcgagtggagtttggctgcttgcctggtctatgaaggcatttggtctcaaccctcaaaggcttctaaattctacagctgtcaaggctctgtttatgatggagaaactcgaataggcagtcttgtatttagagtggagcgaaatgatacagtatgaaactttaaaacaagaagttacttgtgagaagcccttaaaaggtaataggcaatagactaatatgagctgtagtacttactcaggtaataacactggtattaatagaattaatacaattccatcaatacagtcattttcaggacagagtacgtagtggacatagattctgtgtgagtgtctgtgtttgtcagttcacagaaaacatccaggtcgttctcttattattggtgt

SEQ ID NO: 233678 - DNA, 505 bp, Homo sapiens
gaggaggcagccgagggcggggggaaattgaatcctctttgggctactcaactctgctaaaatcccccaccatccgtcacggtggacgagtcgggttttttttctctttcacttttactccaagaagagtttgtgggcaggcaggcaggtctcacggggactctgccaaagcaaccgaaagctctgcggggcagctcctctgccactcagcgatccgaggccccgggaaggtctaggagttcgcttgtcggagtccagggtgtgatatgtaaaacagccacattcttgggagaggagtggggagatggaccgttcgacttgtttttggagtttttgtttgcctccagaaactgtaggaaaatagtttatctcaaagaggatctgtcaattctcttagatttgtgaataatttggtcttttcagagtttgtctgtggtgacccttgtgaatatggggagatgctttttttgtctccccgtgttcgcgtctgttcaatgctggctgc

SEQ ID NO: 233679 - DNA, 3455 bp, Homo sapiens
cgcagcgcggggagggggtgggggaggagggaaagcggcgagtaagatggaagatgaggaggtcgctgagagctgggaagaggcggcagacagcgggggaaatccaaatctcctcccaaagtgcccattgtgattcaggacgatagccttcccgcggggccccctccacagatccgcatcctcaagaggcccaccagcaacggtgtggtcagcagccccaactccaccagcaggcccacccttccagtcaagtccctagcacagcgagaggccgagtacgccgaggcccggaagcggatcctgggcagcgccagccccgaggaggagcaggagaaacccatcctcgacaggccaaccaggatctcccaacccgaagacagcaggcagcccaataatgtgatcagacagcctttgggtcctgatgggtctcaaggcttcaaacagcgcagataaatgcaggcaagaaaagatgccgccgttgctgccgtcaccgcctcctgggtcgtccgccacgggttgcactgccgtggcagacagctggacttgagcagagggaacgacctgacttacttgcactgtgatcccccttgctccgcccactgtgaccttgaaccccatgcactgtgacctccccccttctcccccttcccactgtgattggcacatcgacaagggctgtcccaagtcaatggaaagggaaagggtgggggttaggggaaggttggggggacccagcaaggactcagagagtcagacagtgccacttggccacttggggtaaagccagtgccagcaataacagtttatcatgctcattaatttgggatttcaaaacacaaatgaaaactcacacccacccacccccaagtgcatgtctccatcacttaaaaagtaagttccatttgaaaatatcctttcttttttttttcttcctatttttgtttgtttatacaaatatctgatttgcaagaaaaagtgcatgggaggggttttagtggtttaatgaatttttaattaagaaagggtagtttggtagtctacttaaaaatgtttctgggaaattcactagaaacattaaccaataggattttggtgagcttagcttctgtattcctactgccgcccagaaaaggggcagggctctgcagccgccaggacagacgagcaccccatgcctatacctccctccccgagctaagtcccagggcatctgggccttgcctggagactgggctagctctgtaggctcggagagcctggggagggtgccaaccccacctctagtattttgggagatagggaaagtgaaccgacttccccttcccatacccctcagggtggttccctaccagccaggcttactacttctagaagaaagcagagtgccagggagtgagattgcatccctgggcttagaagtgacggagagaagacttgtttagtattttgccatcagcacaaggaaaaccaggagagagtctgcctccaggactctgagccttctgcctcgtatgttcagaaggtggataggtcttcccactccagcatggcttgaactcttaggggtctgcagtgctccatctccattggtggccccagctcagtaactatacctggtacatttcctgtgtgcaatcagtaccttgaaggcagaacattctgaataaagttggaaaaagaacagctttgctttgcaaagattgatgacagactggttcctcagaggcctaggctacccgtcacccctttttccagagcgagggcctggaatgaaggcagtttatcctctgtccctggagcctggggtttgctttggctccttgaggtggaagagactaagagggcagctgcccagagcagctgtgtgtacctggctcctctcaggcttcctgatcccttccgttgcactgcgccttatccctcagccagccagacagcctccctgctcctgaccagcagatacgtttcggagtggttggtgtggtttttgtgatgagggcagcacgtggtggccaaggtggcaagctgagtctcacaggctcactccctcgttggttccctgtgggaatggtaggccaggcccagtaagccatgccccaacacgtcctctcctccggaggaagggccagctgccagctgagtcagcagctagtccatagcacagccttataactgtaaagccaggcattgcccatgagcagagctggaaccagagcttcagtcagtaagagggaggattaccttcaggagaaggcaaggaagaaaactggctgctatctttatagttccactgccctaaccaagtgtccacattctaaatgtgtagtgtccatcccttatgtaatagtggtttcccgcccaaagtgagactttccttttaattggagaagggtatagaggtagtccaggtgggaacgccagaagtgctgattgcccagccattgggaccacctgttcttgccccactaccctctagtgggaggccaaagtaaaggctggctggtgggtgtctgtggattgaggatgtggcagggactggtcctcccacctccctctggccaaagatgggctttgcccgctgtgtgcctgtcaccacccaccagcagtcatgccctgggcttcccaaatggagaggtagcaggcaacgtttttaaaaagaaagaaaacaggaaactgtattgtgtcgggggaggcgggagggagatgaggaaacggtttggattttgtgtgtgggagggtattttttgggggtagttgtctgtaactttcctaagtgctttttttccttttcttttttaaagtaagttgcaggctttggcttggaaaaccccagggggatggggggcagaaacctgaggctgctgcccctttatctgccttcacggtactgtccccttcccccagctcctccctgaccccatgggccaggcctcagaccttccagctaaccgcttcccatgagccactactctgatgtcagcctataaccaaaggagctggggggtccaggcctggtgaccaacctttctcagcccactcaatcagggtgctccccacctgcaggcaggaggcaacaccctatctgctaccatcagccccttccagagcccatctgccccgcccagccctgccctgcccagccataccctgctctgccccatctgggggtgccctgctcagggatgggctggcagggctgtacccagcctccctggtaagcagagactcaagaaacctctggggtcctgttttctggtcgtgtgatcccaggggtgcacatgggccccttgggtgtctgaacagaagggcatgggagggagggctgcacccctgcagtcttactctgctggtgtagcgggcagctgcccactcccaccccaccctgcaccgcgggctcctgagtcggcagattaagcattttataaattgtattttaaatacatgttttaaacttg

SEQ ID NO: 233680 - DNA, 3440 bp, Homo sapiens
aactgactaggtacgaggcctgggtgtgtgagtggaagatgaggaggtcgctgagagctgggaagaggcggcagacagcgggggaaatccaaatctcctcccaaagtgcccattgtgattcaggacgatagccttcccgcggggccccctccacagatccgcatcctcaagaggcccaccagcaacggtgtggtcagcagccccaactccaccagcaggcccacccttccagtcaagtccctagcacagcgagaggccgagtacgccgaggcccggaagcggatcctgggcagcgccagccccgaggaggagcaggagaaacccatcctcgacaggccaaccaggatctcccaacccgaagacagcaggcagcccaataatgtgatcagacagcctttgggtcctgatgggtctcaaggcttcaaacagcgcagataaatgcaggcaagaaaagatgccgccgttgctgccgtcaccgcctcctgggtcgtccgccacgggttgcactgccgtggcagacagctggacttgagcagagggaacgacctgacttacttgcactgtgatcccccttgctccgcccactgtgaccttgaaccccatgcactgtgacctccccccttctcccccttcccactgtgattggcacatcgacaagggctgtcccaagtcaatggaaagggaaagggtgggggttaggggaaggttggggggacccagcaaggactcagagagtcagacagtgccacttggccacttggggtaaagccagtgccagcaataacagtttatcatgctcattaatttgggatttcaaaacacaaatgaaaactcacacccacccacccccaagtgcatgtctccatcacttaaaaagtaagttccatttgaaaatatcctttcttttttttttcttcctatttttgtttgtttatacaaatatctgatttgcaagaaaaagtgcatgggaggggttttagtggtttaatgaatttttaattaagaaagggtagtttggtagtctacttaaaaatgtttctgggaaattcactagaaacattaaccaataggattttggtgagcttagcttctgtattcctactgccgcccagaaaaggggcagggctctgcagccgccaggacagacgagcaccccatgcctatacctccctccccgagctaagtcccagggcatctgggccttgcctggagactgggctagctctgtaggctcggagagcctggggagggtgccaaccccacctctagtattttgggagatagggaaagtgaaccgacttccccttcccatacccctcagggtggttccctaccagccaggcttactacttctagaagaaagcagagtgccagggagtgagattgcatccctgggcttagaagtgacggagagaagacttgtttagtattttgccatcagcacaaggaaaaccaggagagagtctgcctccaggactctgagccttctgcctcgtatgttcagaaggtggataggtcttcccactccagcatggcttgaactcttaggggtctgcagtgctccatctccattggtggccccagctcagtaactatacctggtacatttcctgtgtgcaatcagtaccttgaaggcagaacattctgaataaagttggaaaaagaacagctttgctttgcaaagattgatgacagactggttcctcagaggcctaggctacccgtcacccctttttccagagcgagggcctggaatgaaggcagtttatcctctgtccctggagcctggggtttgctttggctccttgaggtggaagagactaagagggcagctgcccagagcagctgtgtgtacctggctcctctcaggcttcctgatcccttccgttgcactgcgccttatccctcagccagccagacagcctccctgctcctgaccagcagatacgtttcggagtggttggtgtggtttttgtgatgagggcagcacgtggtggccaaggtggcaagctgagtctcacaggctcactccctcgttggttccctgtgggaatggtaggccaggcccagtaagccatgccccaacacgtcctctcctccggaggaagggccagctgccagctgagtcagcagctagtccatagcacagccttataactgtaaagccaggcattgcccatgagcagagctggaaccagagcttcagtcagtaagagggaggattaccttcaggagaaggcaaggaagaaaactggctgctatctttatagttccactgccctaaccaagtgtccacattctaaatgtgtagtgtccatcccttatgtaatagtggtttcccgcccaaagtgagactttccttttaattggagaagggtatagaggtagtccaggtgggaacgccagaagtgctgattgcccagccattgggaccacctgttcttgccccactaccctctagtgggaggccaaagtaaaggctggctggtgggtgtctgtggattgaggatgtggcagggactggtcctcccacctccctctggccaaagatgggctttgcccgctgtgtgcctgtcaccacccaccagcagtcatgccctgggcttcccaaatggagaggtagcaggcaacgtttttaaaaagaaagaaaacaggaaactgtattgtgtcgggggaggcgggagggagatgaggaaacggtttggattttgtgtgtgggagggtattttttgggggtagttgtctgtaactttcctaagtgctttttttccttttcttttttaaagtaagttgcaggctttggcttggaaaaccccagggggatggggggcagaaacctgaggctgctgcccctttatctgccttcacggtactgtccccttcccccagctcctccctgaccccatgggccaggcctcagaccttccagctaaccgcttcccatgagccactactctgatgtcagcctataaccaaaggagctggggggtccaggcctggtgaccaacctttctcagcccactcaatcagggtgctccccacctgcaggcaggaggcaacaccctatctgctaccatcagccccttccagagcccatctgccccgcccagccctgccctgcccagccataccctgctctgccccatctgggggtgccctgctcagggatgggctggcagggctgtacccagcctccctggtaagcagagactcaagaaacctctggggtcctgttttctggtcgtgtgatcccaggggtgcacatgggccccttgggtgtctgaacagaagggcatgggagggagggctgcacccctgcagtcttactctgctggtgtagcgggcagctgcccactcccaccccaccctgcaccgcgggctcctgagtcggcagattaagcattttataaattgtattttaaatacatgttttaaacttg

SEQ ID NO: 233681 - DNA, 2978 bp, Homo sapiens
aaaggctaggtacgaggcctgggtgtgggtggaagatgaggaggtcgctgagagctgggaagaggcggcagacagcgggggaaatccaaatctcctcccaaagtgcccattgtgattcaggacgatagccttcccgcggggccccctccacagatccgcatcctcaagaggcccaccagcaacggtgtggtcagcagccccaactccaccagcaggcccacccttccagtcaagtccctagcacagcgagaggccgagtacgccgaggcccggaagcggatcctgggcagcgccagccccgaggaggagcaggagaaacccatcctcgacaggccaaccaggatctcccaacccgaagacagcaggcagcccaataatgtgatcagacagcctttgggtcctgatgggtctcaaggcttcaaacagcgcagataaatgcaggcaagaaaagatgccgccgttgctgccgtcaccgcctcctgggtcgtccgccacgggttgcactgccgtggcagacagctggacttgagcagagggaacgacctgacttacttgcactgtgatcccccttgctccgcccactgtgaccttgaaccccatgcactgtgacctccccccttctcccccttcccactgtgattggcacatcgacaagggctgtcccaagtcaatggaaagggaaagggtgggggttaggggaaggttggggggacccagcaaggactcagagagtcagacagtgccacttggccacttggggtaaagccagtgccagcaataacagtttatcatgctcattaatttgggatttcaaaacacaaatgaaaactcacacccacccacccccaagtgcatgtctccatcacttaaaaagtaagttccatttgaaaatatcctttcttttttttttcttcctatttttgtttgtttatacaaatatctgatttgcaagaaaaagtgcatgggaggggttttagtggtttaatgaatttttaattaagaaagggtagtttggtagtctacttaaaaatgtttctgggaaattcactagaaacattaaccaataggattttggtgagcttagcttctgtattcctactgccgcccagaaaaggggcagggctctgcagccgccaggacagacgagcaccccatgcctatacctccctccccgagctaagtcccagggcatctgggccttgcctggagactgggctagctctgtaggctcggagagcctggggagggtgccaaccccacctctagtattttgggagatagggaaagtgaaccgacttccccttcccatacccctcagggtggttccctaccagccaggcttactacttctagaagaaagcagagtgccagggagtgagattgcatccctgggcttagaagtgacggagagaagacttgtttagtattttgccatcagcacaaggaaaaccaggagagagtctgcctccaggactctgagccttctgcctcgtatgttcagaaggtggataggtcttcccactccagcatggcttgaactcttaggggtctgcagtgctccatctccattggtggccccagctcagtaactatacctggtacatttcctgtgtgcaatcagtaccttgaaggcagaacattctgaataaagttggaaaaagaacagctttgctttgcaaagattgatgacagactggttcctcagaggcctaggctacccgtcacccctttttccagagcgagggcctggaatgaaggcagtttatcctctgtccctggagcctggggtttgctttggctccttgaggtggaagagactaagagggcagctgcccagagcagctgtgtgtacctggctcctctcaggcttcctgatcccttccgttgcactgcgccttatccctcagccagccagacagcctccctgctcctgaccagcagatacgtttcggagtggttggtgtggtttttgtgatgagggcagcacgtggtggccaaggtggcaagctgagtctcacaggctcactccctcgttggttccctgtgggaatggtaggccaggcccagtaagccatgccccaacacgtcctctcctccggaggaagggccagctgccagctgagtcagcagctagtccatagcacagccttataactgtaaagccaggcattgcccatgagcagagctggaaccagagcttcagtcagtaagagggaggattaccttcaggagaaggcaaggaagaaaactggctgctatctttatagttccactgccctaaccaagtgtccacattctaaatgtgtagtgtccatcccttatgtaatagtggtttcccgcccaaagtgagactttccttttaattggagaagggtatagaggtagtccaggtgggaacgccagaagtgctgattgcccagccattgggaccacctgttcttgccccactaccctctagtgggaggccaaagtaaaggctggctggtgggtgtctgtggattgaggatgtggcagggactggtcctcccacctccctctggccaaagatgggctttgcccgctgtgtgcctgtcaccacccaccagcagtcatgccctgggcttcccaaatggagaggtagcaggcaacgtttttaaaaagaaagaaaacaggaaactgtattgtgtcgggggaggcgggagggagatgaggaaacggtttggattttgtgtgtgggagggtattttttgggggtagttgtctgtaactttcctaagtgctttttttccttttcttttttaaagtaagttgcaggctttggcttggaaaaccccagggggatggggggcagaaacctgaggctgctgcccctttatctgccttcacggtactgtccccttcccccagctcctccctgaccccatgggccaggcctcagaccttccagctaaccgcttcccatgacgatctaccagtgcagggatcctctagatgcgcgt

SEQ ID NO: 233682 - DNA, 3558 bp, Homo sapiens
aaaggctaggtacgaggcctgggtgtgggtggaagatgaggaggtcgctgagagctgggaagaggcggcagacagcgggggctggtgtgagcagaaaatgaatgtctggggaagaatgttgacagccataatacattatatcgatataaggaaatagacagacggttggaaaaaaaactgaagatcacacaaaaagagagggaaatccaaatctcctcccaaagtgcccattgtgattcaggacgatagccttcccgcggggccccctccacagatccgcatcctcaagaggcccaccagcaacggtgtggtcagcagccccaactccaccagcaggcccacccttccagtcaagtccctagcacagcgagaggccgagtacgccgaggcccggaagcggatcctgggcagcgccagccccgaggaggagcaggagaaacccatcctcgacaggccaaccaggatctcccaacccgaagacagcaggcagcccaataatgtgatcagacagcctttgggtcctgatgggtctcaaggcttcaaacagcgcagataaatgcaggcaagaaaagatgccgccgttgctgccgtcaccgcctcctgggtcgtccgccacgggttgcactgccgtggcagacagctggacttgagcagagggaacgacctgacttacttgcactgtgatcccccttgctccgcccactgtgaccttgaaccccatgcactgtgacctccccccttctcccccttcccactgtgattggcacatcgacaagggctgtcccaagtcaatggaaagggaaagggtgggggttaggggaaggttggggggacccagcaaggactcagagagtcagacagtgccacttggccacttggggtaaagccagtgccagcaataacagtttatcatgctcattaatttgggatttcaaaacacaaatgaaaactcacacccacccacccccaagtgcatgtctccatcacttaaaaagtaagttccatttgaaaatatcctttcttttttttttcttcctatttttgtttgtttatacaaatatctgatttgcaagaaaaagtgcatgggaggggttttagtggtttaatgaatttttaattaagaaagggtagtttggtagtctacttaaaaatgtttctgggaaattcactagaaacattaaccaataggattttggtgagcttagcttctgtattcctactgccgcccagaaaaggggcagggctctgcagccgccaggacagacgagcaccccatgcctatacctccctccccgagctaagtcccagggcatctgggccttgcctggagactgggctagctctgtaggctcggagagcctggggagggtgccaaccccacctctagtattttgggagatagggaaagtgaaccgacttccccttcccatacccctcagggtggttccctaccagccaggcttactacttctagaagaaagcagagtgccagggagtgagattgcatccctgggcttagaagtgacggagagaagacttgtttagtattttgccatcagcacaaggaaaaccaggagagagtctgcctccaggactctgagccttctgcctcgtatgttcagaaggtggataggtcttcccactccagcatggcttgaactcttaggggtctgcagtgctccatctccattggtggccccagctcagtaactatacctggtacatttcctgtgtgcaatcagtaccttgaaggcagaacattctgaataaagttggaaaaagaacagctttgctttgcaaagattgatgacagactggttcctcagaggcctaggctacccgtcacccctttttccagagcgagggcctggaatgaaggcagtttatcctctgtccctggagcctggggtttgctttggctccttgaggtggaagagactaagagggcagctgcccagagcagctgtgtgtacctggctcctctcaggcttcctgatcccttccgttgcactgcgccttatccctcagccagccagacagcctccctgctcctgaccagcagatacgtttcggagtggttggtgtggtttttgtgatgagggcagcacgtggtggccaaggtggcaagctgagtctcacaggctcactccctcgttggttccctgtgggaatggtaggccaggcccagtaagccatgccccaacacgtcctctcctccggaggaagggccagctgccagctgagtcagcagctagtccatagcacagccttataactgtaaagccaggcattgcccatgagcagagctggaaccagagcttcagtcagtaagagggaggattaccttcaggagaaggcaaggaagaaaactggctgctatctttatagttccactgccctaaccaagtgtccacattctaaatgtgtagtgtccatcccttatgtaatagtggtttcccgcccaaagtgagactttccttttaattggagaagggtatagaggtagtccaggtgggaacgccagaagtgctgattgcccagccattgggaccacctgttcttgccccactaccctctagtgggaggccaaagtaaaggctggctggtgggtgtctgtggattgaggatgtggcagggactggtcctcccacctccctctggccaaagatgggctttgcccgctgtgtgcctgtcaccacccaccagcagtcatgccctgggcttcccaaatggagaggtagcaggcaacgtttttaaaaagaaagaaaacaggaaactgtattgtgtcgggggaggcgggagggagatgaggaaacggtttggattttgtgtgtgggagggtattttttgggggtagttgtctgtaactttcctaagtgctttttttccttttcttttttaaagtaagttgcaggctttggcttggaaaaccccagggggatggggggcagaaacctgaggctgctgcccctttatctgccttcacggtactgtccccttcccccagctcctccctgaccccatgggccaggcctcagaccttccagctaaccgcttcccatgagccactactctgatgtcagcctataaccaaaggagctggggggtccaggcctggtgaccaacctttctcagcccactcaatcagggtgctccccacctgcaggcaggaggcaacaccctatctgctaccatcagccccttccagagcccatctgccccgcccagccctgccctgcccagccataccctgctctgccccatctgggggtgccctgctcagggatgggctggcagggctgtacccagcctccctggtaagcagagactcaagaaacctctggggtcctgttttctggtcgtgtgatcccaggggtgcacatgggccccttgggtgtctgaacagaagggcatgggagggagggctgcacccctgcagtcttactctgctggtgtagcgggcagctgcccactcccaccccaccctgcaccgcgggctcctgagtcggcagattaagcattttataaattgtattttaaatacatgttttaaacttg

SEQ ID NO: 233683 - DNA, 2685 bp, Homo sapiens
aaaggctaggtacgaggcctgggtgtgggtggaagatgaggaggtcgctgagagctgggaagaggcggcagacagcgggggaaatccaaatctcctcccaaagtgcccattgtgattcaggacgatagccttcccgcggggccccctccacagatccgcatcctcaagaggcccaccagcaacggtgtggtcagcagccccaactccaccagcaggcccacccttccagtcaagtccctagcacagcgagaggccgagtacgccgaggcccggaagcggatcctgggcagcgccagccccgaggaggagcaggagaaacccatcctcgacaggccaaccaggatctcccaacccgaagacagcaggcagcccaataatgtgatcagacagcctttgggtcctgatgggtctcaaggcttcaaacagcgcagataaatgcaggcaagaaaagatgccgccgttgctgccgtcaccgcctcctgggtcgtccgccacgggttgcactgccgtggcagacagctggacttgagcagagggaacgacctgacttacttgcactgtgatcccccttgctccgcccactgtgaccttgaaccccatgcactgtgacctccccccttctcccccttcccactgtgattggcacatcgacaagggctgtcccaagtcaatggaaagggaaagggtgggggttaggggaaggttggggggacccagcaaggactcagagagtcagacagtgccacttggccacttggggtaaagccagtgccagcaataacagtttatcatgctcattaatttgggatttcaaaacacaaatgaaaactcacacccacccacccccaagtgcatgtctccatcacttaaaaagtaagttccatttgaaaatatcctttcttttttttttcttcctatttttgtttgtttatacaaatatctgatttgcaagaaaaagtgcatgggaggggttttagtggtttaatgaatttttaattaagaaagggtagtttggtagtctacttaaaaatgtttctgggaaattcactagaaacattaaccaataggattttggtgagcttagcttctgtattcctactgccgcccagaaaaggggcagggctctgcagccgccaggacagacgagcaccccatgcctatacctccctccccgagctaagtcccagggcatctgggccttgcctggagactgggctagctctgtaggctcggagagcctggggagggtgccaaccccacctctagtattttgggagatagggaaagtgaaccgacttccccttcccatacccctcagggtggttccctaccagccaggcttactacttctagaagaaagcagagtgccagggagtgagattgcatccctgggcttagaagtgacggagagaagacttgtttagtattttgccatcagcacaaggaaaaccaggagagagtctgcctccaggactctgagccttctgcctcgtatgttcagaaggtggataggtcttcccactccagcatggcttgaactcttaggggtctgcagtgctccatctccattggtggccccagctcagtaactatacctggtacatttcctgtgtgcaatcagtaccttgaaggcagaacattctgaataaagttggaaaaagaacagctttgctttgcaaagattgatgacagactggttcctcagaggcctaggctacccgtcacccctttttccagagcgagggcctggaatgaaggcagtttatcctctgtccctggagcctggggtttgctttggctccttgaggtggaagagactaagagggcagctgcccagagcagctgtgtgtacctggctcctctcaggcttcctgatcccttccgttgcactgcgccttatccctcagccagccagacagcctccctgctcctgaccagcagatacgtttcggagtggttggtgtggtttttgtgatgagggcagcacgtggtggccaaggtggcaagctgagtctcacaggctcactccctcgttggttccctgtgggaatggtaggccaggcccagtaagccatgccccaacacgtcctctcctccggaggaagggccagctgccagctgagtcagcagctagtccatagcacagccttataactgtaaagccaggcattgcccatgagcagagctggaaccagagcttcagtcagtaagagggaggattaccttcaggagaaggcaaggaagaaaactggctgctatctttatagttccactgccctaaccaagtgtccacattctaaatgtgtagtgtccatcccttatgtaatagctggccaaagatgggctttgcccgctgtgtgccctgcccagccataccctgctctgccccatctgggggtgccctgctcagggatgggctggcagggctgtacccagcctccctggtaagcagagactcaagaaacctctggggtcctgttttctggtcgtgtgatcccaggggtgcacatgggccccttgggtgtctgaacagaagggcatgggagggagggctgcacccctgcagtcttactctgctggtgtagcgggcagctgcccactcccaccccaccctgcaccgcgggctcctgagtcggcagattaagcattttataaattgtattttaaatacatgttttaaacttg

SEQ ID NO: 233684 - DNA, 3192 bp, Homo sapiens
cgcagcgcggggagggggtgggggaggagggaaagcggcgagtaagatggaagatgaggaggtcgctgagagctgggaagaggcggcagacagcggggaaatagacagacggttggaaaaaaaactgaagatcacacaaaaagagagggaaatccaaatctcctcccaaagtgcccattgtgattcaggacgatagccttcccgcggggccccctccacagatccgcatcctcaagaggcccaccagcaacggtgtggtcagcagccccaactccaccagcaggcccacccttccagtcaagtccctagcacagcgagaggccgagtacgccgaggcccggaagcggatcctgggcagcgccagccccgaggaggagcaggagaaacccatcctcgacagcatcgacaagggctgtcccaagtcaatggaaagggaaagggtgggggttaggggaaggttggggggacccagcaaggactcagagagtcagacagtgccacttggccacttggggtaaagccagtgccagcaataacagtttatcatgctcattaatttgggatttcaaaacacaaatgaaaactcacacccacccacccccaagtgcatgtctccatcacttaaaaagtaagttccatttgaaaatatcctttcttttttttttcttcctatttttgtttgtttatacaaatatctgatttgcaagaaaaagtgcatgggaggggttttagtggtttaatgaatttttaattaagaaagggtagtttggtagtctacttaaaaatgtttctgggaaattcactagaaacattaaccaataggattttggtgagcttagcttctgtattcctactgccgcccagaaaaggggcagggctctgcagccgccaggacagacgagcaccccatgcctatacctccctccccgagctaagtcccagggcatctgggccttgcctggagactgggctagctctgtaggctcggagagcctggggagggtgccaaccccacctctagtattttgggagatagggaaagtgaaccgacttccccttcccatacccctcagggtggttccctaccagccaggcttactacttctagaagaaagcagagtgccagggagtgagattgcatccctgggcttagaagtgacggagagaagacttgtttagtattttgccatcagcacaaggaaaaccaggagagagtctgcctccaggactctgagccttctgcctcgtatgttcagaaggtggataggtcttcccactccagcatggcttgaactcttaggggtctgcagtgctccatctccattggtggccccagctcagtaactatacctggtacatttcctgtgtgcaatcagtaccttgaaggcagaacattctgaataaagttggaaaaagaacagctttgctttgcaaagattgatgacagactggttcctcagaggcctaggctacccgtcacccctttttccagagcgagggcctggaatgaaggcagtttatcctctgtccctggagcctggggtttgctttggctccttgaggtggaagagactaagagggcagctgcccagagcagctgtgtgtacctggctcctctcaggcttcctgatcccttccgttgcactgcgccttatccctcagccagccagacagcctccctgctcctgaccagcagatacgtttcggagtggttggtgtggtttttgtgatgagggcagcacgtggtggccaaggtggcaagctgagtctcacaggctcactccctcgttggttccctgtgggaatggtaggccaggcccagtaagccatgccccaacacgtcctctcctccggaggaagggccagctgccagctgagtcagcagctagtccatagcacagccttataactgtaaagccaggcattgcccatgagcagagctggaaccagagcttcagtcagtaagagggaggattaccttcaggagaaggcaaggaagaaaactggctgctatctttatagttccactgccctaaccaagtgtccacattctaaatgtgtagtgtccatcccttatgtaatagtggtttcccgcccaaagtgagactttccttttaattggagaagggtatagaggtagtccaggtgggaacgccagaagtgctgattgcccagccattgggaccacctgttcttgccccactaccctctagtgggaggccaaagtaaaggctggctggtgggtgtctgtggattgaggatgtggcagggactggtcctcccacctccctctggccaaagatgggctttgcccgctgtgtgcctgtcaccacccaccagcagtcatgccctgggcttcccaaatggagaggtagcaggcaacgtttttaaaaagaaagaaaacaggaaactgtattgtgtcgggggaggcgggagggagatgaggaaacggtttggattttgtgtgtgggagggtattttttgggggtagttgtctgtaactttcctaagtgctttttttccttttcttttttaaagtaagttgcaggctttggcttggaaaaccccagggggatggggggcagaaacctgaggctgctgcccctttatctgccttcacggtactgtccccttcccccagctcctccctgaccccatgggccaggcctcagaccttccagctaaccgcttcccatgagccactactctgatgtcagcctataaccaaaggagctggggggtccaggcctggtgaccaacctttctcagcccactcaatcagggtgctccccacctgcaggcaggaggcaacaccctatctgctaccatcagccccttccagagcccatctgccccgcccagccctgccctgcccagccataccctgctctgccccatctgggggtgccctgctcagggatgggctggcagggctgtacccagcctccctggtaagcagagactcaagaaacctctggggtcctgttttctggtcgtgtgatcccaggggtgcacatgggccccttgggtgtctgaacagaagggcatgggagggagggctgcacccctgcagtcttactctgctggtgtagcgggcagctgcccactcccaccccaccctgcaccgcgggctcctgagtcggcagattaagcattttataaattgtattttaaatacatgttttaaacttg

SEQ ID NO: 233685 - DNA, 2150 bp, Homo sapiens
aaaggctaggtacgaggcctgggtgtgggtggaagatgaggaggtcgctgagagctgggaagaggcggcagacagcgggggaaatccaaatctcctcccaaagtgcccattgtgattcaggacgatagccttcccgcggggccccctccacagatccgcatcctcaagaggcccaccagcaacggtgtggtcagcagccccaactccaccagcaggcccacccttccagtcaagtccctagcacagcgagaggccgagtacgccgaggcccggaagcggatcctgggcagcgccagccccgaggaggagcaggagaaacccatcctcgacaggccaaccaggatctcccaacccgaagacagcaggcagcccaataatgtgatcagacagcctttgggtcctgatgggtctcaaggcttcaaacagcgcagataaatgcaggcaagaaaagatgccgccgttgctgccgtcaccgcctcctgggtcgtccgccacgggttgcactgccgtggcagacagctggacttgagcagagggaacgacctgacttacttgcactgtgatcccccttgctccgcccactgtgaccttgaaccccatgcactgtgacctccccccttctcccccttcccactgtgattggcacatcgacaagggctgtcccaagtcaatggaaagggaaagggtgggggttaggggaaggttggggggacccagcaaggactcagagagtcagacagtgccacttggccacttggggtaaagccagtgccagcaataacagtttatcatgctcattaatttgggatttcaaaacacaaatgaaaactcacacccacccacccccaagtgcatgtctccatcacttaaaaagtaagttccatttgaaaatatcctttcttttttttttcttcctatttttgtttgtttatacaaatatctgatttgcaagaaaaagtgcatgggaggggttttagtggtttaatgaatttttaattaagaaagggtagtttggtagtctacttaaaaatgtttctgggaaattcactagaaacattaaccaataggattttggtgagcttagcttctgtattcctactgccgcccagaaaaggggcagggctctgcagccgccaggacagacgagcaccccatgcctatacctccctccccgagctaagtcccagggcatctgggccttgcctggagactgggctagctctgtaggctcggagagcctggggagggtgccaaccccacctctagtattttgggagatagggaaagtgaaccgacttccccttcccatacccctcagggtggttccctaccagccaggcttactacttctagaagaaagcagagtgccagggagtgagattgcatccctgggcttagaagtgacggagagaagacttgtttagtattttgccatcagcacaaggaaaaccaggagagagtctgcctccaggactctgagccttctgcctcgtatgttcagaaggtggataggtcttcccactccagcatggcttgaactcttaggggtctgcagtgctccatctccattggtggccccagctcagtaactatacctggtacatttcctgtgtgcaatcagtaccttgaaggcagaacattctgaataaagttggaaaaagaacaaaaaaaaaaaaaaaaaaaaaaaaaaaaaaaaaagggggggccccaaaatttcccccggggggccccattgcccccaggtttttttgttgtacaagggggcgcccaataatggggaacggcctcggattatatataaacgcaaaggcgaagcggggccggcttgtattaaaaaccggcttgtaagacgaggaacaaacggcggtacgactgggggcacctttgtggagaaaggcaaccccttaactttggtggagggtgggaccatatatgtgggcaacaaacattaatcacataccagaagattttataagagccctccagggggaacattatttaaaacttttgaacggtgtatatctatgtggtggttaaaacccaaccgcggcaaaatagtgactgtgccaggcttgaaaaggaattgtgcggcagtacggattttgtaatttcgtgaaaaatttttattccaggggagcttgtagtaaata

SEQ ID NO: 233686 - DNA, 637 bp, Homo sapiens
aaaggctaggtacgaggcctgggtgtgggtggaagatgaggaggtcgctgagagctgggaagaggcggcagacagcgggggaaatccaaatctcctcccaaagtgcccattgtgattcaggacgatagccttcccgcggggccccctccacagatccgcatcctcaagaggcccaccagcaacggtgtggtcagcagccccaactccaccagcaggcccacccttccagtcaagtccctagcacagcgagaggccgagtacgccgaggcccggaagcggatcctgggcagcgccagccccgaggaggagcaggagaaacccatcctcgacaggccaaccaggatctcccaacccgaagacagcaggcagcccaataatgtgatcagacagcccctggtaagcagagactcaagaaacctctggggtcctgttttctggtcgtgtgatcccaggggtgcacatgggccccttgggtgtctgaacagaagggcatgggagggagggctgcacccctgcagtcttactctgctggtgtagcgggcagctgcccactcccaccccaccctgcaccgcgggctcctgagtcggcagattaagcattttataaattgtattttaaatacatgttttaaacttg

SEQ ID NO: 233687 - DNA, 5737 bp, Homo sapiens
  misc_feature (573)..(573): n is a, c, g, or t
  misc_feature (600)..(600): n is a, c, g, or t
  misc_feature (2369)..(2369): n is a, c, g, or t
  misc_feature (2495)..(2495): n is a, c, g, or t
tctaaaaatgcttcctgaggtttcctaatttctaaatctggaagccacttctgaccagctacttttaagtatctcagactgctggggacaatagaaacttagccactctaacatggtagatggaggcgtgaactgtaataaccctaagatgggtatacagaatttttctcccctagtagcagtcacattgcaaaaagattatattgctattgaattttaaggtgtagattaaatgtctgtaatatgtgcataatcttccattcctgggatcttagtcttgacattttctttttaagcatagaacacccctcctttacaaagaaggtaatctgtggaaggaaagacatgctaatatgatggttttaattataattccctcagaacggaatatatccattaagtacatggcatatatatggctatagaaactgctacatgtatttaatttattgccttaatttttttttatctctctcaggatagaccatttagaaactatccagcaactcctaactgcagtagtaaagaagattccattaatcactgcaaaaagtaagacaattacactgaatntaggggtgcatttttgaaagctgtgancttaaggtattgagtcaactgaaatcacttgggattgtaaattaatattgatatggcggttaccttataaggtttcagctagagatacagcccatttgcaagggttttagaattcacatccagttagttttttattgttttcactgtgttgatctgtagaaggaatgttttacatttttcatatgtaaatcatagattgttttgtatgcagttaaaactctgtattagcatttggtgtttatgagtgaggaaagcatttagcgtttgcctgcagtgtaccaggtcctgtgcaggttgggtacgttcactgtctcatataatcccagcctcctgtgtgatagctggtgtcatctccacttacagatgaggaaactgaggataagcagggttgaataacttgctcgagatcacagagccacgggtggtgaaacaggatacaaacctggttctgtttgactctaagaccattcatctttcctctgaaactcagtattgcacagtgtagaaatgcagtttttaagacctcccaaagtgacgtgctgcgtcactgcccatcattagctagattgagtaaattgctgcttagccccagttgttttgacagaatcaatagcccttgctgaggggccagcagcctacggacacaggagcatgctcatgggcaagaccaccatgcacactcagaggggagccacaaggcaacctccacgccactcagatttgtagggctctgaacacatacaccaggtacagaccacctacttattttttccaactgtaatagcaaagcagtaatctctttctgtagggtaaagtttgggggatcattttgatgtctctcagagtaaacttttggtgacagtttcccagcctaacataagaaattcaaacaaaaaaatctctcttatatatgtgtgtgtgtgtgtgtgtgtgtatacatgtatatatatatacacgtgtatatacacacacacatatttttctctctccttaaaaatacagaatgtaagagctggaaggtagttcagaaaccatcttcccagctttctcagtttatagatgagaaaaccgagctgggcttggtggctcacgcctgtaatcccagcactttgggaggttgaggcaggcagatcacctgaggtcaggactttgagacctgcctggtcaacatggtgaaaccccatctctactaaaaatacaaaaattagccaggcatggtggtgcctgcctgtagtcccagctcctcgggaggctgaggcaggagaatcgcttgaacctgggaggcagaggttgcagtgagctgagatcacatcaccgcactccagcctgggtgacaaagtgagacaccatctaccacaaccaccttgtgagttaatggcgggtccagggctcctagtggagcaccagttccacagactttaatagtctatggcagtgattaccttctctaccaaagaagcaaagtgcccaggaaggtgtgttgctttgagtacacacggcaagacaccttctcttctgaggagacgccctcctgtgttaggctgcatctgagcttgcccagtaaggaacatacatgcgataaagaggtctgaagaagtgactggcttgcctccagcaaatgacgtgtggttggaatcgtaagagctttattcaggctttgctgggtgtgtgcattctaggtgaagatgccagctgcttttctgcaaagtctgtggagcagtactatggctggaacattggaaaaaggagagccgctgaggtaacccacntctgcctgtccactctggctgcctccagaaaccttgtcttatggaacagggataagattgcagcatatttggttgaaatatttgatggcagaatattttcctcagttaaaaaaaatctcatttttnaaagacctgtatccagctgactttcaggcgtgccttcttttcctgcactggcagaaacatccctcacagtttctaaatttttttctgagtttcagagttttaaatgaactcgagtattgagtccttacagtgggaaggtgctgtggtgagtttagggaaagctggggtaggaggggagtgggagagcgcaggtggagaccaggtgaagatccttacagtgggaaggtgctgtggtgagtttagggaaagctggggtaggaggggagtgggagagcgcaggtggagaccaggtgaagatccttaaaggccaaacctaggagttgctgttttattgtattagcattagggaagttcgacttttttttttaatggggagtaacacaaccaggtttttttctttaaaaaaaaaaattctaacaggttaggttaggatggtgatttatggttgcatgatacgtagttgtgttaagtggaaggatttgattatggttccaaaagaaaattttttttttaagtggcaaagagcaatgacaatgcgaaaagtcttacaagaaatcctggagaagaatccgagatttcaccacctgactcccctcaaaaccaagcacatcgctcactggtgccgctgtcatggctacaccccaccggaccctgagagcctgaggaatgacggggactccatcgaggacgtgctgacccagatcgacagcgagcccgagtgcccatcatcattctcctctgctgacaacctctgccgcaaactggaggacctgcaacagttccagaaaagggaacccgagaatgaggaggaggtggacatcctcagcctctccgagccagtgaagataaacatcaagaaggagcaggaagagaaacaagaggaagtcaagttctacctgccaccaaccccagggtctgaatttattggggatgtcacacagaagattgggatcaccctgcagcccgtggcactccacaggaacgtgtatgcgtccgtggtggaggacatgatcctgaaggctacagaacagctggtgaatgatatcctgagacaggctttggcagttggataccagacagcttctcacaacaggattcccaaagaaattacagtgagtaatattcaccaggccatttgcaacattccttttctggacttcctcacaaacaaacacatgggaatattgaatgaggaccagtgagcggagtgaggtgccctggagaagcaggctttgaaggcacagcgaagctgtaactgaggaccctgctgctcgggaaggaggtggtttccagtgtgactcggcatgtcatggctacccaacctttgccgctgcctgttcccacgtgtcaccagcacgctgcactccagatgaaatcctcctaggacaggagtttgtttcctgagtgtggagtgaggctgtcagtggatccgtgctttgtcggccagcgtttctgcagtctttgtaaaggccccacgagagcgggccaggccgtgtgcctcaggcccttctccctgggtgtgcttaagggggctccttgggcccgcctccccaggaggtagaaaatgagtggcaggctagagatttcacccattttgtgggctggagttaccagtagctccagcagttaccctgaagagagattgggcttcagccttcagcaggtggttctctcccatgcctggccttggtgtggaggggctgtactctgagcccaagtgagtcagctataggaagaggccatacctagagccaagaaccatgaaggcctgagagacggcagactgagcagaattccttttttgagcacgagagcattactagaaccattgtcaaagcagtggcaagggacggagaggtcccaacaggagtcaggaagaggtttgattataaccaagaaaactcactatgctaggaatagactgtgtgcaccagtcccagacacttggcagaagtgtagcagcgttacacatgtgtgcgaagcagatcgcaggttccacgccatctgcatggcctgcaggagcttctgctgctgaccccatgctgagtggccagtggggagcggcgcccggcaggctcttctggggtcgtctgtcctatccgtggattgtatatactcttctctgttaaggagtttttcccaagaagaaaagtatttaaaagaaataccagtgagtgccttaaagttggagaagtaactgcccatgcccagaaataaggatgccagtgcccagaagcagtgagattagtctgtgtccacaagcagaggccccctcgatgggagggagtggcaggcaggagaaggtggcgctgccaggtgcccgggtctattggaggcgccccatctcagacttcctaacacagcctgtgtggaaggcagaacaaagaatgcatgcccagtcagaaatctgttctattctgctccaggaaaatcggaaacctgtgagtcagagtcagagaaacttacccaagcaacgtaattcctgttttcatgggtcctgtagatgtttgagtcaggaaggtaaggcggggagtgactgaataaactctgccttttaaattgagcatctgggccgggcatggtggctcacgcctgtaatcccagcactctgggaggtcgaggtgggtgggtcacctgaggttgggagttcgagaccagcccgaccaacatggtgaaaccccgtctctactaaaaatacagaaaattagctgggcatggtggtgtgtgcctgtaattccagctactcgggaggctgaggcaggaagaatcacttgaacccaggaggcggaggttgcagtgtgccaagatcataccactgcactccagccctggtgacagaggagaccccgtctcaaaaattgattgatcaattcagcatctgagggctgcaagtacagaaggaatctattctcagcagggcatagggcacgcactggcttaacagtttagtatataaggctcaaatagtctatacctgaactgctataagcaaggtcgatagggaagtggatagattgcttcagcaaagtgaactgtgagatctccaggacagagggagaaagatctgatccaaatgagaacagattggttattgcaggtatcacagcctaaagaaattatctttttgcaaaagaaatattaaatgatttagcagtctccacgtgtgttaatgtttcaaacgtgtatcataatgtgtataattgtgtaacaaaattgtctacaataaatcttttggtatttgt

SEQ ID NO: 233688 - DNA, 642 bp, Homo sapiens
ctctagaggacccgtgtgtcgagataagcaaggtaacattcttactgcgttattacacttgctagcttctttttcttttcatttttaaaaaataatttttcaaatggagatggggtctccccgtattaaccaggctgtatcgaactcctggcctcaagagatctgccacctcacctgccagggtactgcggttacaggcatgagctgcaccccgccactttgccggtttctgaacatagtatgttcagcctcagcaagaatgtgtcagttgatgacgcaaatttcataaaatggaatcttcaagctgttaagtatctagactttactacccccagactttactaacttacttggatctactccagactttactaccttacttggatcttttcatagtgtcacagatgcttcacaacacttgtgtgaaatagtcacccagtatcaatttaaaaacttactgtgataagattatttatttacttatttgaaaagtttgttaaaaatacttgcttataaaaatattcatctgacctcttcccttttggacacctctctctctcgcaacagagagctgctgtcctctcccctttcttttgcttattaaactttctgctccttaacccataaaaaaaataaaaattt

SEQ ID NO: 233689 - DNA, 344 bp, Homo sapiens
gacagagtctcactctgtcacccaggctggagtgcagtggcatgatcttggctcactgcaacctccacatcctaggttcaggggattctcctacctcagcctccagagtagctgggactacaggtgtgtgccaccatgcccagctaatttttgtatttttagtagagattggatttcaccatgttggccaggctggtctcgaactcctgaccacaaatgctcctcctgccttggcctcccaaagtgctgggattacaggcatgagccaccacgcccggccaaacttttttctttatacttctgaatttcccaaattttctattaaagtaaattataaaaagtag

SEQ ID NO: 233690 - DNA, 4065 bp, Homo sapiens
ggaggatcacttgagcccaggaagtggaggttgcagtgaactgagatggcaccactgcactccaggctggatgacaaagtgagacactgtttccaaaaaagaagaaggaaggaggaggaagaaggagaagaaagaaagaaggagaatgaggagggggaaggagaaggaggaggaggaggaggaggaggaggaggcggcagtggcagcggtggaggcggcagcacaggaggaggaggaggaacagcaggaggaggaactcaaagtactgctggccctggagggatatctcagcacctgacttacacatcttacatcctcaagcaaactccccagggcacatttttagttggccagccatcaccccagacttctggaaaacaactcaccactgggtcagtggtccaaggaacactgggagtcagcacatcttctgcacaaggacaacaaacgctaaaagtcatctctggacagaaaaccacattgtttacacaggcagcccatggaggacaggcatctctaatgaaaatatccgatagcaccttgaagactgtgccagccacctcacagctctcgaagcctggaaccacaatgctgagagtagcaggaggggttatcacaactgccacttcccctgccgtggccctctcagcaaacggtcctgcacaacagtctgaaggaatggctcccgtgtcttcatctacggtcagttctgtaacgaaaacttctgggcagcagcaagtgtgtgtgagccaggccaccgtgggaacctgcaaggctgccacccccaccgtcgtcagcgccacgtccctcgtgcctacaccaaaccccatctctgggaaagccacagtatccggactgttaaagattcactccagtcagtccagtccgcagcaggccgtcctgacgattcccagccagctcaaaccactcagcgtaaacacatctggaggggtgcagacgatcctgatgcctgtgaataaagtggttcagtcattttctaccagcaagccacctgccattctgcctgtagctgccccaactccagttgtccccagctctgctccagcagctgttgcaaaagtgaagactgaaccagaaacacctggaccgagttgcctctctcaggagggtcagacagcagtgaaaacagaagaaagttctgagctgggaaactatgtcattaagatagaccatttagaaactatccagcaactcctaactgcagtagtaaagaagattccattaatcactgcaaaaagtgaagatgccagctgcttttctgcaaagtctgtggagcagtactatggctggaacattggaaaaaggagagccgctgagtggcaaagagcaatgacaatgcgaaaagtcttacaagaaatcctggagaagaatccgagatttcaccacctgactcccctcaaaaccaagcacatcgctcactggtgccgctgtcatggctacaccccaccggaccctgagagcctgaggaatgacggggactccatcgaggacgtgctgacccagatcgacagcgagcccgagtgcccatcatcattctcctctgctgacaacctctgccgcaaactggaggacctgcaacagttccagaaaagggaacccgagaatgaggaggaggtggacatcctcagcctctccgagccagtgaagataaacatcaagaaggagcaggaagagaaacaagaggaagtcaagttctacctgccaccaaccccagggtctgaatttattggggatgtcacacagaagattgggatcaccctgcagcccgtggcactccacaggaacgtgtatgcgtccgtggtggaggacatgatcctgaaggctacagaacagctggtgaatgatatcctgagacaggctttggcagttggataccagacagcttctcacaacaggattcccaaagaaattacagtgagtaatattcaccaggccatttgcaacattccttttctggacttcctcacaaacaaacacatgggaatattgaatgaggaccagtgagcggagtgaggtgccctggagaagcaggctttgaaggcacagcgaagctgtaactgaggaccctgctgctcgggaaggaggtggtttccagtgtgactcggcatgtcatggctacccaacctttgccgctgcctgttcccacgtgtcaccagcacgctgcactccagatgaaatcctcctaggacaggagtttgtttcctgagtgtggagtgaggctgtcagtggatccgtgctttgtcggccagcgtttctgcagtctttgtaaaggccccacgagagcgggccaggccgtgtgcctcaggcccttctccctgggtgtgcttaagggggctccttgggcccgcctccccaggaggtagaaaatgagtggcaggctagagatttcacccattttgtgggctggagttaccagtagctccagcagttaccctgaagagagattgggcttcagccttcagcaggtggttctctcccatgcctggccttggtgtggaggggctgtactctgagcccaagtgagtcagctataggaagaggccatacctagagccaagaaccatgaaggcctgagagacggcagactgagcagaattccttttttgagcacgagagcattactagaaccattgtcaaagcagtggcaagggacggagaggtcccaacaggagtcaggaagaggtttgattataaccaagaaaactcactatgctaggaatagactgtgtgcaccagtcccagacacttggcagaagtgtagcagcgttacacatgtgtgcgaagcagatcgcaggttccacgccatctgcatggcctgcaggagcttctgctgctgaccccatgctgagtggccagtggggagcggcgcccggcaggctcttctggggtcgtctgtcctatccgtggattgtatatactcttctctgttaaggagtttttcccaagaagaaaagtatttaaaagaaataccagtgagtgccttaaagttggagaagtaactgcccatgcccagaaataaggatgccagtgcccagaagcagtgagattagtctgtgtccacaagcagaggccccctcgatgggagggagtggcaggcaggagaaggtggcgctgccaggtgcccgggtctattggaggcgccccatctcagacttcctaacacagcctgtgtggaaggcagaacaaagaatgcatgcccagtcagaaatctgttctattctgctccaggaaaatcggaaacctgtgagtcagagtcagagaaacttacccaagcaacgtaattcctgttttcatgggtcctgtagatgtttgagtcaggaaggtaaggcggggagtgactgaataaactctgccttttaaattgagcatctgggccgggcatggtggctcacgcctgtaatcccagcactctgggaggtcgaggtgggtgggtcacctgaggttgggagttcgagaccagcccgaccaacatggtgaaaccccgtctctactaaaaatacagaaaattagctgggcatggtggtgtgtgcctgtaattccagctactcgggaggctgaggcaggaagaatcacttgaacccaggaggcggaggttgcagtgtgccaagatcataccactgcactccagccctggtgacagaggagaccccgtctcaaaaattgattgatcaattcagcatctgagggctgcaagtacagaaggaatctattctcagcagggcatagggcacgcactggcttaacagtttagtatataaggctcaaatagtctatacctgaactgctataagcaaggtcgatagggaagtggatagattgcttcagcaaagtgaactgtgagatctccaggacagagggagaaagatctgatccaaatgagaacagattggttattgcaggtatcacagcctaaagaaattatctttttgcaaaagaaatattaaatgatttagcagtctccacgtgtgttaatgtttcaaacgtgtatcataatgtgtataattgtgtaacaaaattgtctacaataaatcttttggtatttgt

SEQ ID NO: 233691 - DNA, 6285 bp, Homo sapiens
gcggggcggaacgcgccgggcgggctccaccgcgccgtgtgcttccgcaggttgcgggggtcgctggggccttgtggcggggcagctccgcggggcttcgcccgctctctcacctcgccgtgctctctcgcggcggccggcggggcccgcgctgcagccggagacccggagaaaggtgaagaactgaatgtcatcatgtctggaatcaagcgaaccatcaaagaaaccgaccctgattacgaggatgtatctgtggcccttccaaataagcggcataaagcaattgagaattcagctcgagatgctgctgtgcagaagattgagactattatcaaagaacagtttgctcttgaaatgaagaataaggaacatgaaattgaagtcattgaccagcgactgattgaagcaagaaggatgatggataaactgcgtgcctgcattgtagcaaactactatgcttctgcaggtcttctaaaagtttctgagggatcaaagacatgtgatacaatggtttttaatcatcctgctatcaagaaatttttggaatcaccatctaggtcatcatctcctgccaatcagagagcagaaacaccatcagccaatcattcagaaagtgattctttatctcagcacaatgacttcttatctgacaaagataataacagcaatatggatatagaggaaagactctcaaacaacatggagcagagaccaagccgaaatactggaagggatacttctagaattactggctcccataaaacagaacagcggaatgctgatctcacagatgagacttcacgactttttgtaaagaaaacaatagtagtgggcaatgtgtccaagtatatacctccggataagagggaagaaaatgaccagtcaactcataagtggatggtatatgtccgagggtcccgtagagaacccagcattaatcattttgtcaagaaggtttggttcttccttcatcctagctataaaccaaatgaccttgtggaagttagagagcctccttttcacctgaccagaagaggctggggtgagtttcccgtcagagttcaagttcattttaaggacagccagaacaagcggatagatatcatacataatctgaagctggatagaacttatactggcttgcagactcttggagcagagacggtagtggatgttgaactccatcgccattctctcggagaagactgtatctatcctcagtcctcggagtctgacatctctgatgcccctccatctttgcctttgaccattccagccccagtgaaagcttcttcaccaataaagcagtcacatgagccagtacccgatacctctgtggagaaaggattcccagctagcactgaagctgaacgacacactccgttttatgctttgccatcttcattggaaagaacacccaccaaaatgactacatcccagaaagttaccttttgttcccatggcaattcagctttccagccaatagcatcaagctgcaaaattgttccacaaagtcaggttcctaatcctgagtcacctggaaaatccttccagcccatcaccatgagctgcaagattgtgtcaggttccccaatatcaactccaagcccatcaccattgcctcgaaccccgacttccactccagtccacgtgaagcaaggcactgccggctctgttattaataatccttatgttatcatggacaagcagccggggcaggtgattggagccaccactcccagtacaggaagtcctacaaacaagatctccacggcttctcaggtctcccaaggaacaggttcccctgttcctaaaattcatggaagtagttttgtaacatctactgtcaagcaggaggattctttgtttgcatctatgccacctctttgcccaattgggagtcaccctaaggttcaaagccccaaacctataacaggaggacttggagctttcacaaaagtgatcatcaaacaggaacctggtgaagcccctcacgtgcccgcaacaggagctgccagccagtcaccactcccgcagtatgtgactgtgaaagggggtcacatgatagctgtgtcccctcaaaaacaggtcataactcctggagaagggattgcccagtcagcaaaggttcagccctccaaggttgtcggggtaccagttgggtctgctttaccttcaacagtgaagcaggctgtggcgatcagtggtggccagatcctggtagccaaggccagctcttctgtctccaaagcagttgggccaaagcaagttgtaacccaaggagttgccaaagcaattgtgagtggaggtggaggaaccattgttgctcagccagtgcagaccttaaccaaggcccaggttactgccgctggtcctcagaagagtggatcccagggttcagtaatggcaacgttgcagctaccagccactaatttggccaacttggcaaatttgcctcctggcactaaactctacctaactacaaacagcaagaacccttcaggaaaaggaaaactgctgctgatccctcaaggagccatcctgcgagctacgaacaatgctaatctccagtctggctcagctgccagtggtgggagtggtgccggaggaggaggaggaggaggaggaggaggcggcagtggcagcggtggaggcggcagcacaggaggaggaggaggaacagcaggaggaggaactcaaagtactgctggccctggagggatatctcagcacctgacttacacatcttacatcctcaagcaaactccccagggcacatttttagttggccagccatcaccccagacttctggaaaacaactcaccactgggtcagtggtccaaggaacactgggagtcagcacatcttctgcacaaggacaacaaacgctaaaagtcatctctggacagaaaaccacattgtttacacaggcagcccatggaggacaggcatctctaatgaaaatatccgatagcaccttgaagactgtgccagccacctcacagctctcgaagcctggaaccacaatgctgagagtagcaggaggggttatcacaactgccacttcccctgccgtggccctctcagcaaacggtcctgcacaacagtctgaaggaatggctcccgtgtcttcatctacggtcagttctgtaacgaaaacttctgggcagcagcaagtgtgtgtgagccaggccaccgtgggaacctgcaaggctgccacccccaccgtcgtcagcgccacgtccctcgtgcctacaccaaaccccatctctgggaaagccacagtatccggactgttaaagattcactccagtcagtccagtccgcagcaggccgtcctgacgattcccagccagctcaaaccactcagcgtaaacacatctggaggggtgcagacgatcctgatgcctgtgaataaagtggttcagtcattttctaccagcaagccacctgccattctgcctgtagctgccccaactccagttgtccccagctctgctccagcagctgttgcaaaagtgaagactgaaccagaaacacctggaccgagttgcctctctcaggagggtcagacagcagtgaaaacagaagaaagttctgagctgggaaactatgtcattaagatagaccatttagaaactatccagcaactcctaactgcagtagtaaagaagattccattaatcactgcaaaaagtgaagatgccagctgcttttctgcaaagtctgtggagcagtactatggctggaacattggaaaaaggagagccgctgagtggcaaagagcaatgacaatgcgaaaagtcttacaagaaatcctggagaagaatccgagatttcaccacctgactcccctcaaaaccaagcacatcgctcactggtgccgctgtcatggctacaccccaccggaccctgagagcctgaggaatgacggggactccatcgaggacgtgctgacccagatcgacagcgagcccgagtgcccatcatcattctcctctgctgacaacctctgccgcaaactggaggacctgcaacagttccagaaaagggaacccgagaatgaggaggaggtggacatcctcagcctctccgagccagtgaagataaacatcaagaaggagcaggaagagaaacaagaggaagtcaagttctacctgccaccaaccccagggtctgaatttattggggatgtcacacagaagattgggatcaccctgcagcccgtggcactccacaggaacgtgtatgcgtccgtggtggaggacatgatcctgaaggcacagcgaagctgtaactgaggaccctgctgctcgggaaggaggtggtttccagtgtgactcggcatgtcatggctacccaacctttgccgctgcctgttcccacgtgtcaccagcacgctgcactccagatgaaatcctcctaggacaggagtttgtttcctgagtgtggagtgaggctgtcagtggatccgtgctttgtcggccagcgtttctgcagtctttgtaaaggccccacgagagcgggccaggccgtgtgcctcaggcccttctccctgggtgtgcttaagggggctccttgggcccgcctccccaggaggtagaaaatgagtggcaggctagagatttcacccattttgtgggctggagttaccagtagctccagcagttaccctgaagagagattgggcttcagccttcagcaggtggttctctcccatgcctggccttggtgtggaggggctgtactctgagcccaagtgagtcagctataggaagaggccatacctagagccaagaaccatgaaggcctgagagacggcagactgagcagaattccttttttgagcacgagagcattactagaaccattgtcaaagcagtggcaagggacggagaggtcccaacaggagtcaggaagaggtttgattataaccaagaaaactcactatgctaggaatagactgtgtgcaccagtcccagacacttggcagaagtgtagcagcgttacacatgtgtgcgaagcagatcgcaggttccacgccatctgcatggcctgcaggagcttctgctgctgaccccatgctgagtggccagtggggagcggcgcccggcaggctcttctggggtcgtctgtcctatccgtggattgtatatactcttctctgttaaggagtttttcccaagaagaaaagtatttaaaagaaataccagtgagtgccttaaagttggagaagtaactgcccatgcccagaaataaggatgccagtgcccagaagcagtgagattagtctgtgtccacaagcagaggccccctcgatgggagggagtggcaggcaggagaaggtggcgctgccaggtgcccgggtctattggaggcgccccatctcagacttcctaacacagcctgtgtggaaggcagaacaaagaatgcatgcccagtcagaaatctgttctattctgctccaggaaaatcggaaacctgtgagtcagagtcagagaaacttacccaagcaacgtaattcctgttttcatgggtcctgtagatgtttgagtcaggaaggtaaggcggggagtgactgaataaactctgccttttaaattgagcatctgggccgggcatggtggctcacgcctgtaatcccagcactctgggaggtcgaggtgggtgggtcacctgaggttgggagttcgagaccagcccgaccaacatggtgaaaccccgtctctactaaaaatacagaaaattagctgggcatggtggtgtgtgcctgtaattccagctactcgggaggctgaggcaggaagaatcacttgaacccaggaggcggaggttgcagtgtgccaagatcataccactgcactccagccctggtgacagaggagaccccgtctcaaaaattgattgatcaattcagcatctgagggctgcaagtacagaaggaatctattctcagcagggcatagggcacgcactggcttaacagtttagtatataaggctcaaatagtctatacctgaactgctataagcaaggtcgatagggaagtggatagattgcttcagcaaagtgaactgtgagatctccaggacagagggagaaagatctgatccaaatgagaacagattggttattgcaggtatcacagcctaaagaaattatctttttgcaaaagaaatattaaatgatttagcagtctccacgtgtgttaatgtttcaaacgtgtatcataatgtgtataattgtgtaacaaaattgtctacaataaatcttttggtatttgt

SEQ ID NO: 233692 - DNA, 6694 bp, Homo sapiens
gcggggcggaacgcgccgggcgggctccaccgcgccgtgtgcttccgcaggttgcgggggtcgctggggccttgtggcggggcagctccgcggggcttcgcccgctctctcacctcgccgtgctctctcgcggcggccggcggggcccgcgctgcagccggagacccggagaaaggtgaagaactgaatgtcatcatgtctggaatcaagcgaaccatcaaagaaaccgaccctgattacgaggatgtatctgtggcccttccaaataagcggcataaagcaattgagaattcagctcgagatgctgctgtgcagaagattgagactattatcaaagaacagtttgctcttgaaatgaagaataaggaacatgaaattgaagtcattgaccagcgactgattgaagcaagaaggatgatggataaactgcgtgcctgcattgtagcaaactactatgcttctgcaggtcttctaaaagtttctgagggatcaaagacatgtgatacaatggtttttaatcatcctgctatcaagaaatttttggaatcaccatctaggtcatcatctcctgccaatcagagagcagaaacaccatcagccaatcattcagaaagtgattctttatctcagcacaatgacttcttatctgacaaagataataacagcaatatggatatagaggaaagactctcaaacaacatggagcagagaccaagccgaaatactggaagggatacttctagaattactggctcccataaaacagaacagcggaatgctgatctcacagatgagacttcacgactttttgtaaagaaaacaatagtagtgggcaatgtgtccaagtatatacctccggataagagggaagaaaatgaccagtcaactcataagtggatggtatatgtccgagggtcccgtagagaacccagcattaatcattttgtcaagaaggtttggttcttccttcatcctagctataaaccaaatgaccttgtggaagttagagagcctccttttcacctgaccagaagaggctggggtgagtttcccgtcagagttcaagttcattttaaggacagccagaacaagcggatagatatcatacataatctgaagctggatagaacttatactggcttgcagactcttggagcagagacggtagtggatgttgaactccatcgccattctctcggagaagactgtatctatcctcagtcctcggagtctgacatctctgatgcccctccatctttgcctttgaccattccagccccagtgaaagcttcttcaccaataaagcagtcacatgagccagtacccgatacctctgtggagaaaggattcccagctagcactgaagctgaacgacacactccgttttatgctttgccatcttcattggaaagaacacccaccaaaatgactacatcccagaaagttaccttttgttcccatggcaattcagctttccagccaatagcatcaagctgcaaaattgttccacaaagtcaggttcctaatcctgagtcacctggaaaatccttccagcccatcaccatgagctgcaagattgtgtcaggttccccaatatcaactccaagcccatcaccattgcctcgaaccccgacttccactccagtccacgtgaagcaaggcactgccggctctgttattaataatccttatgttatcatggacaagcagccggggcaggtgattggagccaccactcccagtacaggaagtcctacaaacaagatctccacggcttctcaggtctcccaaggaacaggttcccctgttcctaaaattcatggaagtagttttgtaacatctactgtcaagcaggaggattctttgtttgcatctatgccacctctttgcccaattgggagtcaccctaaggttcaaagccccaaacctataacaggaggacttggagctttcacaaaagtgatcatcaaacaggaacctggtgaagcccctcacgtgcccgcaacaggagctgccagccagtcaccactcccgcagtatgtgactgtgaaagggggtcacatgatagctgtgtcccctcaaaaacaggtcataactcctggagaagggattgcccagtcagcaaaggttcagccctccaaggttgtcggggtaccagttgggtctgctttaccttcaacagtgaagcaggctgtggcgatcagtggtggccagatcctggtagccaaggccagctcttctgtctccaaagcagttgggccaaagcaagttgtaacccaaggagttgccaaagcaattgtgagtggaggtggaggaaccattgttgctcagccagtgcagaccttaaccaaggcccaggttactgccgctggtcctcagaagagtggatcccagggttcagtaatggcaacgttgcagctaccagccactaatttggccaacttggcaaatttgcctcctggcactaaactctacctaactacaaacagcaagaacccttcaggaaaaggaaaactgctgctgatccctcaaggagccatcctgcgagctacgaacaatgctaatctccagtctggctcagctgccagtggtgggagtggtgccggaggaggaggaggaggaggaggaggaggcggcagtggcagcggtggaggcggcagcacaggaggaggaggaggaacagcaggaggaggaactcaaagtactgctggccctggagggatatctcagcacctgacttacacatcttacatcctcaagcaaactccccagggcacatttttagttggccagccatcaccccagacttctggaaaacaactcaccactgggtcagtggtccaaggaacactgggagtcagcacatcttctgcacaaggacaacaaacgctaaaagtcatctctggacagaaaaccacattgtttacacaggcagcccatggaggacaggcatctctaatgaaaatatccgatagcaccttgaagactgtgccagccacctcacagctctcgaagcctggaaccacaatgctgagagtagcaggaggggttatcacaactgccacttcccctgccgtggccctctcagcaaacggtcctgcacaacagtctgaaggaatggctcccgtgtcttcatctacggtcagttctgtaacgaaaacttctgggcagcagcaagtgtgtgtgagccaggccaccgtgggaacctgcaaggctgccacccccaccgtcgtcagcgccacgtccctcgtgcctacaccaaaccccatctctgggaaagccacagtatccggactgttaaagattcactccagtcagtccagtccgcagcaggccgtcctgacgattcccagccagctcaaaccactcagcgtaaacacatctggaggggtgcagacgatcctgatgcctgtgaataaagtggttcagtcattttctaccagcaagccacctgccattctgcctgtagctgccccaactccagttgtccccagctctgctccagcagctgttgcaaaagtgaagactgaaccagaaacacctggaccgagttgcctctctcaggagggtcagacagcagtgaaaacagaagaaagttctgagctgggaaactatgtcattaagatagaccatttagaaactatccagcaactcctaactgcagtagtaaagaagattccattaatcactgcaaaaagtgaagatgccagctgcttttctgcaaagtctgtggagcagtactatggctggaacattggaaaaaggagagccgctgagtggcaaagagcaatgacaatgcgaaaagtcttacaagaaatcctggagaagaatccgagatttcaccacctgactcccctcaaaaccaagcacatcgctcactggtgccgctgtcatggctacaccccaccggaccctgagagcctgaggaatgacggggactccatcgaggacgtgctgacccagatcgacagcgagcccgagtgcccatcatcattctcctctgctgacaacctctgccgcaaactggaggacctgcaacagttccagaaaagggaacccgagaatgaggaggaggtggacatcctcagcctctccgagccagtgaagataaacatcaagaaggagcaggaagagaaacaagaggaagtcaagttctacctgccaccaaccccagggtctgaatttattggggatgtcacacagaagattgggatcaccctgcagcccgtggcactccacaggaacgtgtatgcgtccgtggtggaggacatgatcctgaaggctacagaacagctggtgaatgatatcctgagacaggctttggcagttggataccagacagcttctcacaacaggattcccaaagaaattacagtgagtaatattcaccaggccatttgcaacattccttttctggacttcctcacaaacaaacacatgggaatattgaatgaggaccagtgagcggagtgaggtgccctggagaagcaggctttgaaggcacagcgaagctgtaactgaggaccctgctgctcgggaaggaggtggtttccagtgtgactcggcatgtcatggctacccaacctttgccgctgcctgttcccacgtgtcaccagcacgctgcactccagatgaaatcctcctaggacaggagtttgtttcctgagtgtggagtgaggctgtcagtggatccgtgctttgtcggccagcgtttctgcagtctttgtaaaggccccacgagagcgggccaggccgtgtgcctcaggcccttctccctgggtgtgcttaagggggctccttgggcccgcctccccaggaggtagaaaatgagtggcaggctagagatttcacccattttgtgggctggagttaccagtagctccagcagttaccctgaagagagattgggcttcagccttcagcaggtggttctctcccatgcctggccttggtgtggaggggctgtactctgagcccaagtgagtcagctataggaagaggccatacctagagccaagaaccatgaaggcctgagagacggcagactgagcagaattccttttttgagcacgagagcattactagaaccattgtcaaagcagtggcaagggacggagaggtcccaacaggagtcaggaagaggtttgattataaccaagaaaactcactatgctaggaatagactgtgtgcaccagtcccagacacttggcagaagtgtagcagcgttacacatgtgtgcgaagcagatcgcaggttccacgccatctgcatggcctgcaggagcttctgctgctgaccccatgctgagtggccagtggggagcggcgcccggcaggctcttctggggtcgtctgtcctatccgtggattgtatatactcttctctgttaaggagtttttcccaagaagaaaagtatttaaaagaaataccagtgagtgccttaaagttggagaagtaactgcccatgcccagaaataaggatgccagtgcccagaagcagtgagattagtctgtgtccacaagcagaggccccctcgatgggagggagtggcaggcaggagaaggtggcgctgccaggtgcccgggtctattggaggcgccccatctcagacttcctaacacagcctgtgtggaaggcagaacaaagaatgcatgcccagtcagaaatctgttctattctgctccaggaaaatcggaaacctgtgagtcagagtcagagaaacttacccaagcaacgtaattcctgttttcatgggtcctgtagatgtttgagtcaggaaggtaaggcggggagtgactgaataaactctgccttttaaattgagcatctgggccgggcatggtggctcacgcctgtaatcccagcactctgggaggtcgaggtgggtgggtcacctgaggttgggagttcgagaccagcccgaccaacatggtgaaaccccgtctctactaaaaatacagaaaattagctgggcatggtggtgtgtgcctgtaattccagctactcgggaggctgaggcaggaagaatcacttgaacccaggaggcggaggttgcagtgtgccaagatcataccactgcactccagccctggtgacagaggagaccccgtctcaaaaattgattgatcaattcagcatctgagggctgcaagtacagaaggaatctattctcagcagggcatagggcacgcactggcttaacagtttagtatataaggctcaaatagtctatacctgaactgctataagcaaggtcgatagggaagtggatagattgcttcagcaaagtgaactgtgagatctccaggacagagggagaaagatctgatccaaatgagaacagattggttattgcaggtatcacagcctaaagaaattatctttttgcaaaagaaatattaaatgatttagcagtctccacgtgtgttaatgtttcaaacgtgtatcataatgtgtataattgtgtaacaaaattgtctacaataaatcttttggtatttgttatttgtggtgggtgtttctgagtttgaagcatggtactcaggcagggttctccctgcactgggatgaggtgatggtgtagagtcttattgatatgtttaaattaattcctctgcttcttgccaaaaaaaaaaaatgttgcaaccgtataagataaaggattacagttacataaaagtctaaaaaaaatt

SEQ ID NO: 233693 - DNA, 6525 bp, Homo sapiens
gcggggcggaacgcgccgggcgggctccaccgcgccgtgtgcttccgcaggttgcgggggtcgctggggccttgtggcggggcagctccgcggggcttcgcccgctctctcacctcgccgtgctctctcgcggcggccggcggggcccgcgctgcagccggagacccggagaaaggtgaagaactgaatgtcatcatgtctggaatcaagcgaaccatcaaagaaaccgaccctgattacgaggatgtatctgtggcccttccaaataagcggcataaagcaattgagaattcagctcgagatgctgctgtgcagaagattgagactattatcaaagaacagtttgctcttgaaatgaagaataaggaacatgaaattgaagtcattgaccagcgactgattgaagcaagaaggatgatggataaactgcgtgcctgcattgtagcaaactactatgcttctgcaggtcttctaaaagtttctgagggatcaaagacatgtgatacaatggtttttaatcatcctgctatcaagaaatttttggaatcaccatctaggtcatcatctcctgccaatcagagagcagaaacaccatcagccaatcattcagaaagtgattctttatctcagcacaatgacttcttatctgacaaagataataacagcaatatggatatagaggaaagactctcaaacaacatggagcagagaccaagccgaaatactggaagggatacttctagaattactggctcccataaaacagaacagcggaatgctgatctcacagatgagacttcacgactttttgtaaagaaaacaatagtagtgggcaatgtgtccaagtatatacctccggataagagggaagaaaatgaccagtcaactcataagtggatggtatatgtccgagggtcccgtagagaacccagcattaatcattttgtcaagaaggtttggttcttccttcatcctagctataaaccaaatgaccttgtggaagttagagagcctccttttcacctgaccagaagaggctggggtgagtttcccgtcagagttcaagttcattttaaggacagccagaacaagcggatagatatcatacataatctgaagctggatagaacttatactggcttgcagactcttggagcagagacggtagtggatgttgaactccatcgccattctctcggagaagactgtatctatcctcagtcctcggagtctgacatctctgatgcccctccatctttgcctttgaccattccagccccagtgaaagcttcttcaccaataaagcagtcacatgagccagtacccgatacctctgtggagaaaggattcccagctagcactgaagctgaacgacacactccgttttatgctttgccatcttcattggaaagaacacccaccaaaatgactacatcccagaaagttaccttttgttcccatggcaattcagctttccagccaatagcatcaagctgcaaaattgttccacaaagtcaggttcctaatcctgagtcacctggaaaatccttccagcccatcaccatgagctgcaagattgtgtcaggttccccaatatcaactccaagcccatcaccattgcctcgaaccccgacttccactccagtccacgtgaagcaaggcactgccggctctgttattaataatccttatgttatcatggacaagcagccggggcaggtgattggagccaccactcccagtacaggaagtcctacaaacaagatctccacggcttctcaggtctcccaaggaacaggttcccctgttcctaaaattcatggaagtagttttgtaacatctactgtcaagcaggaggattctttgtttgcatctatgccacctctttgcccaattgggagtcaccctaaggttcaaagccccaaacctataacaggaggacttggagctttcacaaaagtgatcatcaaacaggaacctggtgaagcccctcacgtgcccgcaacaggagctgccagccagtcaccactcccgcagtatgtgactgtgaaagggggtcacatgatagctgtgtcccctcaaaaacaggtcataactcctggagaagggattgcccagtcagcaaaggttcagccctccaaggttgtcggggtaccagttgggtctgctttaccttcaacagtgaagcaggctgtggcgatcagtggtggccagatcctggtagccaaggccagctcttctgtctccaaagcagttgggccaaagcaagttgtaacccaaggagttgccaaagcaattgtgagtggaggtggaggaaccattgttgctcagccagtgcagaccttaaccaaggcccaggttactgccgctggtcctcagaagagtggatcccagggttcagtaatggcaacgttgcagctaccagccactaatttggccaacttggcaaatttgcctcctggcactaaactctacctaactacaaacagcaagaacccttcaggaaaaggaaaactgctgctgatccctcaaggagccatcctgcgagctacgaacaatgctaatctccagtctggctcagctgccagtggtgggagtggtgccggaggaggaggaggaggaggaggaggaggcggcagtggcagcggtggaggcggcagcacaggaggaggaggaggaacagcaggaggaggaactcaaagtactgctggccctggagggatatctcagcacctgacttacacatcttacatcctcaagcaaactccccagggcacatttttagttggccagccatcaccccagacttctggaaaacaactcaccactgggtcagtggtccaaggaacactgggagtcagcacatcttctgcacaaggacaacaaacgctaaaagtcatctctggacagaaaaccacattgtttacacaggcagcccatggaggacaggcatctctaatgaaaatatccgatagcaccttgaagactgtgccagccacctcacagctctcgaagcctggaaccacaatgctgagagtagcaggaggggttatcacaactgccacttcccctgccgtggccctctcagcaaacggtcctgcacaacagtctgaaggaatggctcccgtgtcttcatctacggtcagttctgtaacgaaaacttctgggcagcagcaagtgtgtgtgagccaggccaccgtgggaacctgcaaggctgccacccccaccgtcgtcagcgccacgtccctcgtgcctacaccaaaccccatctctgggaaagccacagtatccggactgttaaagattcactccagtcagtccagtccgcagcaggccgtcctgacgattcccagccagctcaaaccactcagcgtaaacacatctggaggggtgcagacgatcctgatgcctgtgaataaagtggttcagtcattttctaccagcaagccacctgccattctgcctgtagctgccccaactccagttgtccccagctctgctccagcagctgttgcaaaagtgaagactgaaccagaaacacctggaccgagttgcctctctcaggagggtcagacagcagtgaaaacagaagaaagttctgagctgggaaactatgtcattaagatagaccatttagaaactatccagcaactcctaactgcagtagtaaagaagattccattaatcactgcaaaaagtgaagatgccagctgcttttctgcaaagtctgtggagcagtactatggctggaacattggaaaaaggagagccgctgagtggcaaagagcaatgacaatgcgaaaagtcttacaagaaatcctggagaagaatccgagatttcaccacctgactcccctcaaaaccaagcacatcgctcactggtgccgctgtcatggctacaccccaccggaccctgagagcctgaggaatgacggggactccatcgaggacgtgctgacccagatcgacagcgagcccgagtgcccatcatcattctcctctgctgacaacctctgccgcaaactggaggacctgcaacagttccagaaaagggaacccgagaatgaggaggaggtggacatcctcagcctctccgagccagtgaagataaacatcaagaaggagcaggaagagaaacaagaggaagtcaagttctacctgccaccaaccccagggtctgaatttattggggatgtcacacagaagattgggatcaccctgcagcccgtggcactccacaggaacgtgtatgcgtccgtggtggaggacatgatcctgaaggctacagaacagctggtgaatgatatcctgagacaggctttggcagttggataccagacagcttctcacaacaggattcccaaagaaattacagtgagtaatattcaccaggccatttgcaacattccttttctggacttcctcacaaacaaacacatgggaatattgaatgaggaccagtgagcggagtgaggtgccctggagaagcaggctttgaaggcacagcgaagctgtaactgaggaccctgctgctcgggaaggaggtggtttccagtgtgactcggcatgtcatggctacccaacctttgccgctgcctgttcccacgtgtcaccagcacgctgcactccagatgaaatcctcctaggacaggagtttgtttcctgagtgtggagtgaggctgtcagtggatccgtgctttgtcggccagcgtttctgcagtctttgtaaaggccccacgagagcgggccaggccgtgtgcctcaggcccttctccctgggtgtgcttaagggggctccttgggcccgcctccccaggaggtagaaaatgagtggcaggctagagatttcacccattttgtgggctggagttaccagtagctccagcagttaccctgaagagagattgggcttcagccttcagcaggtggttctctcccatgcctggccttggtgtggaggggctgtactctgagcccaagtgagtcagctataggaagaggccatacctagagccaagaaccatgaaggcctgagagacggcagactgagcagaattccttttttgagcacgagagcattactagaaccattgtcaaagcagtggcaagggacggagaggtcccaacaggagtcaggaagaggtttgattataaccaagaaaactcactatgctaggaatagactgtgtgcaccagtcccagacacttggcagaagtgtagcagcgttacacatgtgtgcgaagcagatcgcaggttccacgccatctgcatggcctgcaggagcttctgctgctgaccccatgctgagtggccagtggggagcggcgcccggcaggctcttctggggtcgtctgtcctatccgtggattgtatatactcttctctgttaaggagtttttcccaagaagaaaagtatttaaaagaaataccagtgagtgccttaaagttggagaagtaactgcccatgcccagaaataaggatgccagtgcccagaagcagtgagattagtctgtgtccacaagcagaggccccctcgatgggagggagtggcaggcaggagaaggtggcgctgccaggtgcccgggtctattggaggcgccccatctcagacttcctaacacagcctgtgtggaaggcagaacaaagaatgcatgcccagtcagaaatctgttctattctgctccaggaaaatcggaaacctgtgagtcagagtcagagaaacttacccaagcaacgtaattcctgttttcatgggtcctgtagatgtttgagtcaggaaggtaaggcggggagtgactgaataaactctgccttttaaattgagcatctgggccgggcatggtggctcacgcctgtaatcccagcactctgggaggtcgaggtgggtgggtcacctgaggttgggagttcgagaccagcccgaccaacatggtgaaaccccgtctctactaaaaatacagaaaattagctgggcatggtggtgtgtgcctgtaattccagctactcgggaggctgaggcaggaagaatcacttgaacccaggaggcggaggttgcagtgtgccaagatcataccactgcactccagccctggtgacagaggagaccccgtctcaaaaattgattgatcaattcagcatctgagggctgcaagtacagaaggaatctattctcagcagggcatagggcacgcactggcttaacagtttagtatataaggctcaaatagtctatacctgaactgctataagcaaggtcgatagggaagtggatagattgcttcagcaaagtgaactgtgagatctccaggacagagggagaaagatctgatccaaatgagaacagattggttattgcaggtatcacagcctaaagaaattatctttttgcaaaagaaatattaaatgatttagcagtctccacgtgtgttaatgtttcaaacgtgtatcataatgtgtataattgtgtaacaaaattgtctacaataaatcttttggtatttgtaaaaaaaaatttgtaaaaaaa

SEQ ID NO: 233694 - DNA, 5964 bp, Homo sapiens
gcggggcggaacgcgccgggcgggctccaccgcgccgtgtgcttccgcaggttgcgggggtcgctggggccttgtggcggggcagctccgcggggcttcgcccgctctctcacctcgccgtgctctctcgcggcggccggcggggcccgcgctgcagccggagacccggagaaaggtgaagaactgaatgtcatcatgtctggaatcaagcgaaccatcaaagaaaccgaccctgattacgaggatgtatctgtggcccttccaaataagcggcataaagcaattgagaattcagctcgagatgctgctgtgcagaagattgagactattatcaaagaacagtttgctcttgaaatgaagaataaggaacatgaaattgaagtcattgaccagcgactgattgaagcaagaaggatgatggataaactgcgtgcctgcattgtagcaaactactatgcttctgcaggtcttctaaaagtttctgagggatcaaagacatgtgatacaatggtttttaatcatcctgctatcaagaaatttttggaatcaccatctaggtcatcatctcctgccaatcagagagcagaaacaccatcagccaatcattcagaaagtgattctttatctcagcacaatgacttcttatctgacaaagataataacagcaatatggatatagaggaaagactctcaaacaacatggagcagagaccaagccgaaatactggaagggatacttctagaattactggctcccataaaacagaacagcggaatgctgatctcacagatgagacttcacgactttttgtaaagaaaacaatagtagtgggcaatgtgtccaagtatatacctccggataagagggaagaaaatgaccagtcaactcataagtggatggtatatgtccgagggtcccgtagagaacccagcattaatcattttgtcaagaaggtttggttcttccttcatcctagctataaaccaaatgaccttgtggaagttagagagcctccttttcacctgaccagaagaggctggggtgagtttcccgtcagagttcaagttcattttaaggacagccagaacaagcggatagatatcatacataatctgaagctggatagaacttatactggcttgcagactcttggagcagagacggtagtggatgttgaactccatcgccattctctcggagaagactgtatctatcctcagtcctcggagtctgacatctctgatgcccctccatctttgcctttgaccattccagccccagtgaaagcttcttcaccaataaagcagtcacatgagccagtacccgatacctctgtggagaaaggattcccagctagcactgaagctgaacgacacactccgttttatgctttgccatcttcattggaaagaacacccaccaaaatgactacatcccagaaagttaccttttgttcccatggcaattcagctttccagccaatagcatcaagctgcaaaattgttccacaaagtcaggttcctaatcctgagtcacctggaaaatccttccagcccatcaccatgagctgcaagattgtgtcaggttccccaatatcaactccaagcccatcaccattgcctcgaaccccgacttccactccagtccacgtgaagcaaggcactgccggctctgttattaataatccttatgttatcatggacaagcagccggggcaggtgattggagccaccactcccagtacaggaagtcctacaaacaagatctccacggcttctcaggtctcccaaggaacaggttcccctgttcctaaaattcatggaagtagttttgtaacatctactgtcaagcaggaggattctttgtttgcatctatgccacctctttgcccaattgggagtcaccctaaggttcaaagccccaaacctataacaggaggacttggagctttcacaaaagtgatcatcaaacaggaacctggtgaagcccctcacgtgcccgcaacaggagctgccagccagtcaccactcccgcagtatgtgactgtgaaagggggtcacatgatagctgtgtcccctcaaaaacaggtcataactcctggagaagggattgcccagtcagcaaaggttcagccctccaaggttgtcggggtaccagttgggtctgctttaccttcaacagtgaagcaggctgtggcgatcagtggtggccagatcctggtagccaaggccagctcttctgtctccaaagcagttgggccaaagcaagttgtaacccaaggagttgccaaagcaattgtgagtggaggtggaggaaccattgttgctcagccagtgcagaccttaaccaaggcccaggttactgccgctggtcctcagaagagtggatcccagggttcagtaatggcaacgttgcagctaccagccactaatttggccaacttggcaaatttgcctcctggcactaaactctacctaactacaaacagcaagaacccttcaggaaaaggaaaactgctgctgatccctcaaggagccatcctgcgagctacgaacaatgctaatctccagtctggctcagctgccagtggtgggagtggtgccggaggaggaggaggaggaggaggaggaggcggcagtggcagcggtggaggcggcagcacaggaggaggaggaggaacagcaggaggaggaactcaaagtactgctggccctggagggatatctcagcacctgacttacacatcttacatcctcaagcaaactccccagggcacatttttagttggccagccatcaccccagacttctggaaaacaactcaccactgggtcagtggtccaaggaacactgggagtcagcacatcttctgcacaaggacaacaaacgctaaaagtcatctctggacagaaaaccacattgtttacacaggcagcccatggaggacaggcatctctaatgaaaatatccgatagcaccttgaagactgtgccagccacctcacagctctcgaagcctggaaccacaatgctgagagtagcaggaggggttatcacaactgccacttcccctgccgtggccctctcagcaaacggtcctgcacaacagtctgaaggaatggctcccgtgtcttcatctacggtcagttctgtaacgaaaacttctgggcagcagcaagtgtgtgtgagccaggccaccgtgggaacctgcaaggctgccacccccaccgtcgtcagcgccacgtccctcgtgcctacaccaaaccccatctctgggaaagccacagtatccggactgttaaagattcactccagtcagtccagtccgcagcaggccgtcctgacgattcccagccagctcaaaccactcagcgtaaacacatctggaggggtgcagacgatcctgatgcctgtgaataaagtggttcagtcattttctaccagcaagccacctgccattctgcctgtagctgccccaactccagttgtccccagctctgctccagcagctgttgcaaaagtgaagactgaaccagaaacacctggaccgagttgcctctctcaggagggtcagacagcagtgaaaacagaagaaagttctgagctgggaaactatgtcattaagatagaccatttagaaactatccagcaactcctaactgcagtagtaaagaagattccattaatcactgcaaaaagtgaagatgccagctgcttttctgcaaagtctgtggagcagtactatggctggaacattggaaaaaggagagccgctgagtggcaaagagcaatgacaatgcgaaaagtcttacaagaaatcctggagaagaatccgagatttcaccacctgactcccctcaaaaccaagcacatcgctcactggtgccgctgtcatggctacaccccaccggaccctgagagcctgaggaatgacggggactccatcgaggacgtgctgacccagatcgacagcgagcccgagtgcccatcatcattctcctctgctgacaacctctgccgcaaactggaggacctgcaacagttccagaaaagggaacccgagaatgaggaggaggtggacatcctcagcctctccgagccagtgaagataaacatcaagaaggagcaggaagagaaacaagaggaagtcaagttctacctgccaccaaccccagggtctgaatttattggggatgtcacacagaagattgggatcaccctgcagcccgtggcactccacaggaacgtgtatgcgtccgtggtggaggacatgatcctgaaggctacagaacagctggtgaatgatatcctgagacaggctttggcagttggataccagacagcttctcacaacaggattcccaaagaaattacagtgagtaatattcaccaggccatttgcaacattccttttctggacttcctcacaaacaaacacatgggaatattgaatgaggaccagtgagcggagtgaggtgccctggagaagcaggctttgaaggcacagcgaagctgtaactgaggaccctgctgctcgggaaggaggtggtttccagtgtgactcggcatgtcatggctacccaacctttgccgctgcctgttcccacgtgtcaccagcacgctgcactccagatgaaatcctcctaggacaggagtttgtttcctgagtgtggagtgaggctgtcagtggatccgtgctttgtcggccagcgtttctgcagtctttgtaaaggccccacgagagcgggccaggccgtgtgcctcaggcccttctccctgggtgtgcttaagggggctccttgggcccgcctccccaggaggtagaaaatgagtggcaggctagagatttcacccattttgtgggctggagttaccagtagctccagcagttaccctgaagagagattgggcttcagccttcagcaggtggttctctcccatgcctggccttggtgtggaggggctgtactctgagcccaagtgagtcagctataggaagaggccatacctagagccaagaaccatgaaggcctgagagacggcagactgagcagaattccttttttgagcacgagagcattactagaaccattgtcaaagcagtggcaagggacggagaggtcccaacaggagtcaggaagaggtttgattataaccaagaaaactcactatgctaggaatagactgtgtgcaccagtcccagacacttggcagaagtgtagcagcgttacacatgtgtgcgaagcagatcgcaggttccacgccatctgcatggcctgcaggagcttctgctgctgaccccatgctgagtggccagtggggagcggcgcccggcaggctcttctggggtcgtctgtcctatccgtggattgtatatactcttctctgttaaggagtttttcccaagaagaaaagtatttaaaagaaataccagtgagtgccttaaagttggagaagtaactgcccatgcccagaaataaggatgccagtgcccagaagcagtgagattagtctgtgtccacaagcagaggccccctcgatgggagggagtggcaggcaggagaaggtggcgctgccaggtgcccgggtctattggaggcgccccatctcagacttcctaacacagcctgtgtggaaggcagaacaaagaatgcatgcccagtcagaaatctgttctattctgctccaggaaaatcggaaacctgtgagtcagagtcagagaaacttacccaagcaacgtaattcctgttttcatgggtcctgtagatgtttgagtcaggaaggtaaggcggggagtgactgaataaactctgccttttaaattgagcatctgggccgggcatggtggctcacgcctgtaatcccagcactctgggaggtcgaggtgggtgggtcacctgaggttgaacgtccgtgactcgagattccagattatcaaggatactcaagaacagctatgccaata

SEQ ID NO: 233695 - DNA, 1218 bp, Homo sapiens
cggcgtggtggtgattcaggcagagggtggggatggctggtgccggttaggctcttctggggtcgtctgtcctatccgtggattgtatatactcttctctgttaaggagtttttcccaagaagaaaagtatttaaaagaaataccagtgagtgccttaaagttggagaagtaactgcccatgcccagaaataaggatgccagtgcccagaagcagtgagattagtctgtgtccacaagcagaggccccctcgatgggagggagtggcaggcaggagaaggtggcgctgccaggtgcccgggtctattggaggcgccccatctcagacttcctaacacagcctgtgtggaaggcagaacaaagaatgcatgcccagtcagaaatctgttctattctgctccaggaaaatcggaaacctgtgagtcagagtcagagaaacttacccaagcaacgtaattcctgttttcatgggtcctgtagatgtttgagtcaggaaggtaaggcggggagtgactgaataaactctgccttttaaattgagcatctgggccgggcatggtggctcacgcctgtaatcccagcactctgggaggtcgaggtgggtgggtcacctgaggttgggagttcgagaccagcccgaccaacatggtgaaaccccgtctctactaaaaatacagaaaattagctgggcatggtggtgtgtgcctgtaattccagctactcgggaggctgaggcaggaagaatcacttgaacccaggaggcggaggttgcagtgtgccaagatcataccactgcactccagccctggtgacagaggagaccccgtctcaaaaattgattgatcaattcagcatctgagggctgcaagtacagaaggaatctattctcagcagggcatagggcacgcactggcttaacagtttagtatataaggctcaaatagtctatacctgaactgctataagcaaggtcgatagggaagtggatagattgcttcagcaaagtgaactgtgagatctccaggacagagggagaaagatctgatccaaatgagaacagattggttattgcaggtatcacagcctaaagaaattatctttttgcaaaagaaatattaaatgatttagcagtctccacgtgtgttaatgtttcaaacgtgtatcataatgtgtataattgtgtaacaaaattgtctacaataaatcttttggtatttgt

SEQ ID NO: 233696 - DNA, 6067 bp, Homo sapiens
gcggggcggaacgcgccgggcgggctccaccgcgccgtgtgcttccgcaggttgcgggggtcgctggggccttgtggcggggcagctccgcggggcttcgcccgctctctcacctcgccgtgctctctcgcggcggccggcggggcccgcgctgcagccggagacccggagaaaggtgaagaactgaatgtcatcatgtctggaatcaagcgaaccatcaaagaaaccgaccctgattacgaggatgtatctgtggcccttccaaataagcggcataaagcaattgagaattcagctcgagatgctgctgtgcagaagattgagactattatcaaagaacagtttgctcttgaaatgaagaataaggaacatgaaattgaagtcattgaccagcgactgattgaagcaagaaggatgatggataaactgcgtgcctgcattgtagcaaactactatgcttctgcaggtcttctaaaagtttctgagggatcaaagacatgtgatacaatggtttttaatcatcctgctatcaagaaatttttggaatcaccatctaggtcatcatctcctgccaatcagagagcagaaacaccatcagccaatcattcagaaagtgattctttatctcagcacaatgacttcttatctgacaaagataataacagcaatatggatatagaggaaagactctcaaacaacatggagcagagaccaagccgaaatactggaagggatacttctagaattactggctcccataaaacagaacagcggaatgctgatctcacagatgagacttcacgactttttgtaaagaaaacaatagtagtgggcaatgtgtccaagtatatacctccggataagagggaagaaaatgaccagtcaactcataagtggatggtatatgtccgagggtcccgtagagaacccagcattaatcattttgtcaagaaggtttggttcttccttcatcctagctataaaccaaatgaccttgtggaagttagagagcctccttttcacctgaccagaagaggctggggtgagtttcccgtcagagttcaagttcattttaaggacagccagaacaagcggatagatatcatacataatctgaagctggatagaacttatactggcttgcagactcttggagcagagacggtagtggatgttgaactccatcgccattctctcggagaagactgtatctatcctcagtcctcggagtctgacatctctgatgcccctccatctttgcctttgaccattccagccccagtgaaagcttcttcaccaataaagcagtcacatgagccagtacccgatacctctgtggagaaaggattcccagctagcactgaagctgaacgacacactccgttttatgctttgccatcttcattggaaagaacacccaccaaaatgactacatcccagaaagttaccttttgttcccatggcaattcagctttccagccaatagcatcaagctgcaaaattgttccacaaagtcaggttcctaatcctgagtcacctggaaaatccttccagcccatcaccatgagctgcaagattgtgtcaggttccccaatatcaactccaagcccatcaccattgcctcgaaccccgacttccactccagtccacgtgaagcaaggcactgccggctctgttattaataatccttatgttatcatggacaagcagccggggcaggtgattggagccaccactcccagtacaggaagtcctacaaacaagatctccacggcttctcaggtctcccaaggaacaggttcccctgttcctaaaattcatggaagtagttttgtaacatctactgtcaagcaggaggattctttgtttgcatctatgccacctctttgcccaattgggagtcaccctaaggttcaaagccccaaacctataacaggaggacttggagctttcacaaaagtgatcatcaaacaggaacctggtgaagcccctcacgtgcccgcaacaggagctgccagccagtcaccactcccgcagtatgtgactgtgaaagggggtcacatgatagctgtgtcccctcaaaaacaggtcataactcctggagaagggattgcccagtcagcaaaggttcagccctccaaggttgtcggggtaccagttgggtctgctttaccttcaacagtgaagcaggctgtggcgatcagtggtggccagatcctggtagccaaggccagctcttctgtctccaaagcagttgggccaaagcaagttgtaacccaaggagttgccaaagcaattgtgagtggaggtggaggaaccattgttgctcagccagtgcagaccttaaccaaggcccaggttactgccgctggtcctcagaagagtggatcccagggttcagtaatggcaacgttgcagctaccagccactaatttggccaacttggcaaatttgcctcctggcactaaactctacctaactacaaacagcaagaacccttcaggaaaaggaaaactgctgctgatccctcaaggagccatcctgcgagctacgaacaatgctaatctccagtctggctcagctgccagtggtgggagtggtgccggaggaggaggaggaggaggaggaggaggcggcagtggcagcggtggaggcggcagcacaggaggaggaggaggaacagcaggaggaggaactcaaagtactgctggccctggagggatatctcagcacctgacttacacatcttacatcctcaagcaaactccccagggcacatttttagttggccagccatcaccccagacttctggaaaacaactcaccactgggtcagtggtccaaggaacactgggagtcagcacatcttctgcacaaggacaacaaacgctaaaagtcatctctggacagaaaaccacattgtttacacaggcagcccatggaggacaggcatctctaatgaaaatatccgatagcaccttgaagactgtgccagccacctcacagctctcgaagcctggaaccacaatgctgagagtagcaggaggggttatcacaactgccacttcccctgccgtggccctctcagcaaacggtcctgcacaacagtctgaaggaatggctcccgtgtcttcatctacggtcagttctgtaacgaaaacttctgggcagcagcaagtgtgtgtgagccaggccaccgtgggaacctgcaaggctgccacccccaccgtcgtcagcgccacgtccctcgtgcctacaccaaaccccatctctgggaaagccacagtatccggactgttaaagattcactccagtcagtccagtccgcagcaggccgtcctgacgattcccagccagctcaaaccactcagcgtaaacacatctggaggggtgcagacgatcctgatgcctgtgaataaagtggttcagtcattttctaccagcaagccacctgccattctgcctgtagctgccccaactccagttgtccccagctctgctccagcagctgttgcaaaagtgaagactgaaccagaaacacctggaccgagttgcctctctcaggagggtcagacagcagtgaaaacagaagaaagttctgagctgggaaactatgtcattaagatagaccatttagaaactatccagcaactcctaactgcagtagtaaagaagattccattaatcactgcaaaaagtgaagatgccagctgcttttctgcaaagtctgtggagcagtactatggctggaacattggaaaaaggagagccgctgagtggcaaagagcaatgacaatgcgaaaagtcttacaagaaatcctggagaagaatccgagatttcaccacctgactcccctcaaaaccaagcacatcgctcactggtgccgctgtcatggctacaccccaccggaccctgagagcctgaggaatgacggggactccatcgaggacgtgctgacccagatcgacagcgagcccgagtgcccatcatcattctcctctgctgacaacctctgccgcaaactggaggacctgcaacagttccagaaaagggaacccgagaatgaggaggaggtggacatcctcagcctctccgagccagtgaagataaacatcaagaaggagcaggaagagaaacaagaggaagtcaagttctacctgccaccaaccccagggtctgaatttattggggatgtcacacagaagattgggatcaccctgcagcccgtggcactccacaggaacgtgtatgcgtccgtggtggaggacatgatcctgaaggctacagaacagctggtgaatgatatcctgagacaggctttggcagttggataccagacagcttctcacaacaggattcccaaagaaattacagtgagtaatattcaccaggccatttgcaacattccttttctggacttcctcacaaacaaacacatgggaatattgaatgaggaccagtgagcggagtgaggtgccctggagaagcaggctttgaaggcacagcgaagctgtaactgaggaccctgctgctcgggaaggaggtggtttccagtgtgactcggcatgtcatggctacccaacctttgccgctgcctgttcccacgtgtcaccagcacgctgcactccagatgaaatcctcctaggacaggagtttgtttcctgagtgtggagtgaggctgtcagtggatccgtgctttgtcggccagcgtttctgcagtctttgtaaaggccccacgagagcgggccaggccgtgtgcctcaggcccttctccctgggtgtgcttaagggggctccttgggcccgcctccccaggaggtagaaaatgagtggcaggctagagatttcacccattttgtgggctggagttaccagtagctccagcagttaccctgaagagagattgggcttcagccttcagcaggtggttctctcccatgcctggccttggtgtggaggggctgtactctgagcccaagtgagtcagctataggaagaggccatacctagagccaagaaccatgaaggcctgagagacggcagactgagcagaattccttttttgagcacgagagcattactagaaccattgtcaaagcagtggcaagggacggagaggtcccaacaggagtcaggaagaggtttgattataaccaagaaaactcactatgctaggaatagactgtgtgcaccagtcccagacacttggcagaagtgtagcagcgttacacatgtgtgcgaagcagatcgcaggttccacgccatctgcatggcctgcaggagcttctgctgctgaccccatgctgagtggccagtggggagcggcgcccggcaggctcttctggggtcgtctgtcctatccgtggattgtatatactcttctctgttaaggagtttttcccaagaagaaaagtatttaaaagaaataccagtgagtgccttaaagttggagaagtccagccctggtgacagaggagaccccgtctcaaaaattgattgatcaattcagcatctgagggctgcaagtacagaaggaatctattctcagcagggcatagggcacgcactggcttaacagtttagtatataaggctcaaatagtctatacctgaactgctataagcaaggtcgatagggaagtggatagattgcttcagcaaagtgaactgtgagatctccaggacagagggagaaagatctgatccaaatgagaacagattggttattgcaggtatcacagcctaaagaaattatctttttgcaaaagaaatattaaatgatttagcagtctccacgtgtgttaatgtttcaaacgtgtatcataatgtgtataattgtgtaacaaaattgtctacaataaatcttttggtatttgttatttgtggtgggtgtttctgagtttgaagcatggtactcaggcagggttctccctgcactgggatgaggtgatggtgtagagtcttattgatatgtttaaattaattcctctgcttcttgccaaaaaaaaaaaatgttgcaaccgtataagataaaggattacagttacataaaagtctaaaaaaaatt

SEQ ID NO: 233697 - DNA, 3930 bp, Homo sapiens
gcggggcggaacgcgccgggcgggctccaccgcgccgtgtgcttccgcaggttgcgggggtcgctggggccttgtggcggggcagctccgcggggcttcgcccgctctctcacctcgccgtgctctctcgcggcggccggcggggcccgcgctgcagccggagacccggagaaaggtgaagaactgaatgtcatcatgtctggaatcaagcgaaccatcaaagaaaccgaccctgattacgaggatgtatctgtggcccttccaaataagcggcataaagcaattgagaattcagctcgagatgctgctgtgcagaagattgagactattatcaaagaacagtttgctcttgaaatgaagaataaggaacatgaaattgaagtcattgaccagcgactgattgaagcaagaaggatgatggataaactgcgtgcctgcattgtagcaaactactatgcttctgcaggtcttctaaaagtttctgagggatcaaagacatgtgatacaatggtttttaatcatcctgctatcaagaaatttttggaatcaccatctaggtcatcatctcctgccaatcagagagcagaaacaccatcagccaatcattcagaaagtgattctttatctcagcacaatgacttcttatctgacaaagataataacagcaatatggatatagaggaaagactctcaaacaacatggagcagagaccaagccgaaatactggaagggatacttctagaattactggctcccataaaacagaacagcggaatgctgatctcacagatgagacttcacgactttttgtaaagaaaacaatagtagtgggcaatgtgtccaagtatatacctccggataagagggaagaaaatgaccagtcaactcataagtggatggtatatgtccgagggtcccgtagagaacccagcattaatcattttgtcaagaaggtttggttcttccttcatcctagctataaaccaaatgaccttgtggaagttagagagcctccttttcacctgaccagaagaggctggggtgagtttcccgtcagagttcaagttcattttaaggacagccagaacaagcggatagatatcatacataatctgaagctggatagaacttatactggcttgcagactcttggagcagagacggtagtggatgttgaactccatcgccattctctcggagaagactgtatctatcctcagtcctcggagtctgacatctctgatgcccctccatctttgcctttgaccattccagccccagtgaaagcttcttcaccaataaagcagtcacatgagccagtacccgatacctctgtggagaaaggattcccagctagcactgaagctgaacgacacactccgttttatgctttgccatcttcattggaaagaacacccaccaaaatgactacatcccagaaagttaccttttgttcccatggcaattcagctttccagccaatagcatcaagctgcaaaattgttccacaaagtcaggttcctaatcctgagtcacctggaaaatccttccagcccatcaccatgagctgcaagattgtgtcaggttccccaatatcaactccaagcccatcaccattgcctcgaaccccgacttccactccagtccacgtgaagcaaggcactgccggctctgttattaataatccttatgttatcatggacaagcagccggggcaggtgattggagccaccactcccagtacaggaagtcctacaaacaagatctccacggcttctcaggtctcccaaggaacaggttcccctgttcctaaaattcatggaagtagttttgtaacatctactgtcaagcaggaggattctttgtttgcatctatgccacctctttgcccaattgggagtcaccctaaggttcaaagccccaaacctataacaggaggacttggagctttcacaaaagtgatcatcaaacaggaacctggtgaagcccctcacgtgcccgcaacaggagctgccagccagtcaccactcccgcagtatgtgactgtgaaagggggtcacatgatagctgtgtcccctcaaaaacaggtcataactcctggagaagggattgcccagtcagcaaaggttcagccctccaaggttgtcggggtaccagttgggtctgctttaccttcaacagtgaagcaggctgtggcgatcagtggtggccagatcctggtagccaaggccagctcttctgtctccaaagcagttgggccaaagcaagttgtaacccaaggagttgccaaagcaattgtgagtggaggtggaggaaccattgttgctcagccagtgcagaccttaaccaaggcccaggttactgccgctggtcctcagaagagtggatcccagggttcagtaatggcaacgttgcagctaccagccactaatttggccaacttggcaaatttgcctcctggcactaaactctacctaactacaaacagcaagaacccttcaggaaaaggaaaactgctgctgatccctcaaggagccatcctgcgagctacgaacaatgctaatctccagtctggctcagctgccagtggtgggagtggtgccggaggaggaggaggaggaggaggaggaggcggcagtggcagcggtggaggcggcagcacaggaggaggaggaggaacagcaggaggaggaactcaaagtactgctggccctggagggatatctcagcacctgacttacacatcttacatcctcaagcaaactccccagggcacatttttagttggccagccatcaccccagacttctggaaaacaactcaccactgggtcagtggtccaaggaacactgggagtcagcacatcttctgcacaaggacaacaaacgctaaaagtcatctctggacagaaaaccacattgtttacacaggcagcccatggaggacaggcatctctaatgaaaatatccgatagcaccttgaagactgtgccagccacctcacagctctcgaagcctggaaccacaatgctgagagtagcaggaggggttatcacaactgccacttcccctgccgtggccctctcagcaaacggtcctgcacaacagtctgaaggaatggctcccgtgtcttcatctacggtcagttctgtaacgaaaacttctgggcagcagcaagtgtgtgtgagccaggccaccgtgggaacctgcaaggctgccacccccaccgtcgtcagcgccacgtccctcgtgcctacaccaaaccccatctctgggaaagccacagtatccggactgttaaagattcactccagtcagtccagtccgcagcaggccgtcctgacgattcccagccagctcaaaccactcagcgtaaacacatctggaggggtgcagacgatcctgatgcctgtgaataaagtggttcagtcattttctaccagcaagccacctgccattctgcctgtagctgccccaactccagttgtccccagctctgctccagcagctgttgcaaaagtgaagactgaaccagaaacacctggaccgagttgcctctctcaggagggtcagacagcagtgaaaacagaagaaagttctgagctgggaaactatgtcattaagatagaccatttagaaactatccagcaactcctaactgcagtagtaaagaagattccattaatcactgcaaaaagtgaagatgccagctgcttttctgcaaagtctgtggagcagtactatggctggaacattggaaaaaggagagccgctgagtggcaaagagcaatgacaatgcgaaaagtcttacaagaaatcctggagaagaatccgagatttcaccacctgactcccctcaaaaccaagcacatcgctcactggtgccgctgtatagctgtttcctgggtaccgagctgattgtatcatgta

SEQ ID NO: 233698 - DNA, 3661 bp, Homo sapiens
gcggggcggaacgcgccgggcgggctccaccgcgccgtgtgcttccgcaggttgcgggggtcgctggggccttgtggcggggcagctccgcggggcttcgcccgctctctcacctcgccgtgctctctcgcggcggccggcggggcccgcgctgcagccggagacccggagaaaggtgaagaactgaatgtcatcatgtctggaatcaagcgaaccatcaaagaaaccgaccctgattacgaggatgtatctgtggcccttccaaataagcggcataaagcaattgagaattcagctcgagatgctgctgtgcagaagattgagactattatcaaagaacagtttgctcttgaaatgaagaataaggaacatgaaattgaagtcattgaccagcgactgattgaagcaagaaggatgatggataaactgcgtgcctgcattgtagcaaactactatgcttctgcaggtcttctaaaagtttctgagggatcaaagacatgtgatacaatggtttttaatcatcctgctatcaagaaatttttggaatcaccatctaggtcatcatctcctgccaatcagagagcagaaacaccatcagccaatcattcagaaagtgattctttatctcagcacaatgacttcttatctgacaaagataataacagcaatatggatatagaggaaagactctcaaacaacatggagcagagaccaagccgaaatactggaagggatacttctagaattactggctcccataaaacagaacagcggaatgctgatctcacagatgagacttcacgactttttgtaaagaaaacaatagtagtgggcaatgtgtccaagtatatacctccggataagagggaagaaaatgaccagtcaactcataagtggatggtatatgtccgagggtcccgtagagaacccagcattaatcattttgtcaagaaggtttggttcttccttcatcctagctataaaccaaatgaccttgtggaagttagagagcctccttttcacctgaccagaagaggctggggtgagtttcccgtcagagttcaagttcattttaaggacagccagaacaagcggatagatatcatacataatctgaagctggatagaacttatactggcttgcagactcttggagcagagacggtagtggatgttgaactccatcgccattctctcggagaagactgtatctatcctcagtcctcggagtctgacatctctgatgcccctccatctttgcctttgaccattccagccccagtgaaagcttcttcaccaataaagcagtcacatgagccagtacccgatacctctgtggagaaaggattcccagctagcactgaagctgaacgacacactccgttttatgctttgccatcttcattggaaagaacacccaccaaaatgactacatcccagaaagttaccttttgttcccatggcaattcagctttccagccaatagcatcaagctgcaaaattgttccacaaagtcaggttcctaatcctgagtcacctggaaaatccttccagcccatcaccatgagctgcaagattgtgtcaggttccccaatatcaactccaagcccatcaccattgcctcgaaccccgacttccactccagtccacgtgaagcaaggcactgccggctctgttattaataatccttatgttatcatggacaagcagccggggcaggtgattggagccaccactcccagtacaggaagtcctacaaacaagatctccacggcttctcaggtctcccaaggaacaggttcccctgttcctaaaattcatggaagtagttttgtaacatctactgtcaagcaggaggattctttgtttgcatctatgccacctctttgcccaattgggagtcaccctaaggttcaaagccccaaacctataacaggaggacttggagctttcacaaaagtgatcatcaaacaggaacctggtgaagcccctcacgtgcccgcaacaggagctgccagccagtcaccactcccgcagtatgtgactgtgaaagggggtcacatgatagctgtgtcccctcaaaaacaggtcataactcctggagaagggattgcccagtcagcaaaggttcagccctccaaggttgtcggggtaccagttgggtctgctttaccttcaacagtgaagcaggctgtggcgatcagtggtggccagatcctggtagccaaggccagctcttctgtctccaaagcagttgggccaaagcaagttgtaacccaaggagttgccaaagcaattgtgagtggaggtggaggaaccattgttgctcagccagtgcagaccttaaccaaggcccaggttactgccgctggtcctcagaagagtggatcccagggttcagtaatggcaacgttgcagctaccagccactaatttggccaacttggcaaatttgcctcctggcactaaactctacctaactacaaacagcaagaacccttcaggaaaaggaaaactgctgctgatccctcaaggagccatcctgcgagctacgaacaatgctaatctccagtctggctcagctgccagtggtgggagtggtgccggaggaggaggaggaggaggaggaggaggcggcagtggcagcggtggaggcggcagcacaggaggaggaggaggaacagcaggaggaggaactcaaagtactgctggccctggagggatatctcagcacctgacttacacatcttacatcctcaagcaaactccccagggcacatttttagttggccagccatcaccccagacttctggaaaacaactcaccactgggtcagtggtccaaggaacactgggagtcagcacatcttctgcacaaggacaacaaacgctaaaagtcatctctggacagaaaaccacattgtttacacaggcagcccatggaggacaggcatctctaatgaaaatatccgatagcaccttgaagactgtgccagccacctcacagctctcgaagcctggaaccacaatgctgagagtagcaggaggggttatcacaactgccacttcccctgccgtggccctctcagcaaacggtcctgcacaacagtctgaaggaatggctcccgtgtcttcatctacggtcagttctgtaacgaaaacttctgggcagcagcaagtgtgtgtgagccaggccaccgtgggaacctgcaaggctgccacccccaccgtcgtcagcgccacgtccctcgtgcctacaccaaaccccatctctgggaaagccacagtatccgattgataccagccagcatacggctggcactggtctaccggaaaaactgaatatcaccgagatacacacacacactcacgcatgcagacaacaccccttactgcctttggataagaggctgtggatgttgttgttgtcattactattattacttcattcatatgtagctccacaccaggccccttgtgtcttgtttggatagagaacaaaaaattaaggctgattatatttttctcttgatttctacctccctgttaaaattgaccaacttctagtatagggagtacttgttctctactaactgttttatttgaggccctgtgttggatactggagtagaaattatagaaataaaaggagatcggccaga

SEQ ID NO: 233699 - DNA, 487 bp, Homo sapiens
tttgagacagagtctctctgttgcccaggctggaggttgcagtgtgccaagatcataccactgcactccagccctggtgacagaggagaccccgtctcaaaaattgattgatcaattcagcatctgagggctgcaagtacagaaggaatctattctcagcagggcatagggcacgcactggcttaacagtttagtatataaggctcaaatagtctatacctgaactgctataagcaaggtcgatagggaagtggatagattgcttcagcaaagtgaactgtgagatctccaggacagagggagaaagatctgatccaaatgagaacagattggttattgcaggtatcacagcctaaagaaattatctttttgcaaaagaaatattaaatgatttagcagtctccacgtgtgttaatgtttcaaacgtgtatcataatgtgtataattgtgtaacaaaattgtctacaataaatcttttggtatttgt

SEQ ID NO: 233700 - DNA, 2461 bp, Homo sapiens
gcggggcggaacgcgccgggcgggctccaccgcgccgtgtgcttccgcaggttgcgggggtcgctggggccttgtggcggggcagctccgcggggcttcgcccgctctctcacctcgccgtgctctctcgcggcggccggcggggcccgcgctgcagccggagacccggagaaaggtgaagaactgaatgtcatcatgtctggaatcaagcgaaccatcaaagaaaccgaccctgattacgaggatgtatctgtggcccttccaaataagcggcataaagcaattgagaattcagctcgagatgctgctgtgcagaagattgagactattatcaaagaacagtttgctcttgaaatgaagaataaggaacatgaaattgaagtcattgaccagcgactgattgaagcaagaaggatgatggataaactgcgtgcctgcattgtagcaaactactatgcttctgcaggtcttctaaaagtttctgagggatcaaagacatgtgatacaatggtttttaatcatcctgctatcaagaaatttttggaatcaccatctaggtcatcatctcctgccaatcagagagcagaaacaccatcagccaatcattcagaaagtgattctttatctcagcacaatgacttcttatctgacaaagataataacagcaatatggatatagaggaaagactctcaaacaacatggagcagagaccaagccgaaatactggaagggatacttctagaattactggctcccataaaacagaacagcggaatgctgatctcacagatgagacttcacgactttttgtaaagaaaacaatagtagtgggcaatgtgtccaagtatatacctccggataagagggaagaaaatgaccagtcaactcataagtggatggtatatgtccgagggtcccgtagagaacccagcattaatcattttgtcaagaaggtttggttcttccttcatcctagctataaaccaaatgaccttgtggaagttagagagcctccttttcacctgaccagaagaggctggggtgagtttcccgtcagagttcaagttcattttaaggacagccagaacaagcggatagatatcatacataatctgaagctggatagaacttatactggcttgcagactcttggagcagagacggtagtggatgttgaactccatcgccattctctcggagaagactgtatctatcctcagtcctcggagtctgacatctctgatgcccctccatctttgcctttgaccattccagccccagtgaaagcttcttcaccaataaagcagtcacatgagccagtacccgatacctctgtggagaaaggattcccagctagcactgaagctgaacgacacactccgttttatgctttgccatcttcattggaaagaacacccaccaaaatgactacatcccagaaagttaccttttgttcccatggcaattcagctttccagccaatagcatcaagctgcaaaattgttccacaaagtcaggttcctaatcctgagtcacctggaaaatccttccagcccatcaccatgagctgcaagattgtgtcaggttccccaatatcaactccaagcccatcaccattgcctcgaaccccgacttccactccagtccacgtgaagcaaggcactgccggctctgttattaataatccttatgttatcatggacaagcagccggggcaggtgattggagccaccactcccagtacaggaagtcctacaaacaagatctccacggcttctcaggtctcccaaggaacaggttcccctgttcctaaaattcatggaagtagttttgtaacatctactgtcaaggtaacattcttactgcgttattacacttgctagcttctttttcttttcatttttaaaaaataatttttcaaatggagatggggtctccccgtattaaccaggctgtatcgaactcctggcctcaagagatctgccacctcacctgccagggtactgcggttacaggcatgagctgcaccccgccactttgccggtttctgaacatagtatgttcagcctcagcaagaatgtgtcagttgatgacgcaaatttcataaaatggaatcttcaagctgttaagtatctagactttactacccccagactttactaacttacttggatctactccagactttactaccttacttggatcttttcatagtgtcacagatgcttcacaacacttgtgtgaaatagtcacccagtatcaatttaaaaacttactgtgataagattatttatttacttatttgaaaagtttgttaaaaatacttgcttataaaaatattcatctgacctcttcccttttggacacctctctctctcgcaacagagagctgctgtcctctcccctttcttttgcttattaaactttctgctccttaacccataaaaaaaataaaaattt

SEQ ID NO: 233701 - DNA, 2734 bp, Homo sapiens
gcggggcggaacgcgccgggcgggctccaccgcgccgtgtgcttccgcaggttgcgggggtcgctggggccttgtggcggggcagctccgcggggcttcgcccgctctctcacctcgccgtgctctctcgcggcggccggcggggcccgcgctgcagccggagacccggagaaaggtgaagaactgaatgtcatcatgtctggaatcaagcgaaccatcaaagaaaccgaccctgattacgaggatgtatctgtggcccttccaaataagcggcataaagcaattgagaattcagctcgagatgctgctgtgcagaagattgagactattatcaaagaacagtttgctcttgaaatgaagaataaggaacatgaaattgaagtcattgaccagcgactgattgaagcaagaaggatgatggataaactgcgtgcctgcattgtagcaaactactatgcttctgcaggtcttctaaaagtttctgagggatcaaagacatgtgatacaatggtttttaatcatcctgctatcaagaaatttttggaatcaccatctaggtcatcatctcctgccaatcagagagcagaaacaccatcagccaatcattcagaaagtgattctttatctcagcacaatgacttcttatctgacaaagataataacagcaatatggatatagaggaaagactctcaaacaacatggagcagagaccaagccgaaatactggaagggatacttctagaattactggctcccataaaacagaacagcggaatgctgatctcacagatgagacttcacgactttttgtaaagaaaacaatagtagtgggcaatgtgtccaagtatatacctccggataagagggaagaaaatgaccagtcaactcataagtggatggtatatgtccgagggtcccgtagagaacccagcattaatcattttgtcaagaaggtttggttcttccttcatcctagctataaaccaaatgaccttgtggaagttagagagcctccttttcacctgaccagaagaggctggggtgagtttcccgtcagagttcaagttcattttaaggacagccagaacaagcggatagatatcatacataatctgaagctggatagaacttatactggcttgcagactcttggagcagagacggtagtggatgttgaactccatcgccattctctcggagaagactgtatctatcctcagtcctcggagtctgacatctctgatgcccctccatctttgcctttgaccattccagccccagtgaaagcttcttcaccaataaagcagtcacatgagccagtacccgatacctctgtggagaaaggattcccagctagcactgaagctgaacgacacactccgttttatgctttgccatcttcattggaaagaacacccaccaaaatgactacatcccagaaagttaccttttgttcccatggcaattcagctttccagccaatagcatcaagctgcaaaattgttccacaaagtcaggttcctaatcctgagtcacctggaaaatccttccagcccatcaccatgagctgcaagattgtgtcaggttccccaatatcaactccaagcccatcaccattgcctcgaaccccgacttccactccagtccacgtgaagcaaggcactgccggctctgttattaataatccttatgttatcatggacaagcagccggggcaggtgattggagccaccactcccagtacaggaagtcctacaaacaagatctccacggcttctcaggtctcccaaggaacaggttcccctgttcctaaaattcatggaagtagttttgtaacatctactgtcaagcaggaggattctttgtttgcatctatgccacctctttgcccaattgggagtcaccctaaggttcaaagccccaaacctataacaggaggacttggagctttcacaaaagtgatcatcaaacaggaacctggtgaagcccctcacgtgcccgcaacaggagctgccagccagtcaccactcccgcagtatgtgactgtgaaagggggtcacatgatagctgtgtcccctcaaaaacaggtcataactcctggagaagggattgcccagtcagcaaaggttcagccctccaaggtttgtgttgggtagagatgggaaatttcacatgtaaatgatgttgtttgcctaaataattgacaagtgctgaaaagattcacggtgacagggttgatgatcccataagaacctgtgggtgaaagcctagttggaaaaacaagtctgttggtgtgaaactcttctactcctgtagtaatcattggcaagagccgcgttatgtattgcaaaggatcccggaatgggccaagaggcaggggaacactgctgtctctggcagtggaggcagagctgactcatgggcacagctttctacttgattcatctctaaaagggatccgctgttgacttgtttatttatggtaggagaatgctgtagtttatacctctgatgttcgggctgttacctgtttaatgattcttagctttctgtagagttcttttttttttttaataatttggaggtacaggagaattaatgtattgagagaattttaaaatagcacatagaggccgggcatggtggctcacgcctgtgatcccagcactttaggaggctgaggcgggcggattacctgaaggcaggagttcgagaccagcctgaccaacatgg

SEQ ID NO: 233702 - DNA, 353 bp, Homo sapiens
cttacatagcagtgtgggtggccctttaagaaatatctaaggagccactttattgcagccgccctgtcatgaggctggagttgtcctgagacccaggctaacagttcttcccttgtctgatgaccctgggatgataggagccatctcagtcccctggctgtgtccccacaacagctggagtggcagtttccttactgagcttcactgtaagagctttgtttgtgcctgcacgtgtccttccaccactgacccctaacagctgcctctttgttgctcttcccttgtagtgaagactgaaccagaaacacctggaccgagttgcctctctcaggagggtcagacagcagtgaaaa

SEQ ID NO: 233703 - DNA, 377 bp, Homo sapiens
ggtaacaccctttgttttttggaccaggattcccaaagaaattacagtgagtaatattcaccaggccatttgcaacattccttttctggacttcctcacaaacaaacacatgggaatattgaatgaggaccagtgagcggagtgaggtgccctggagaagcaggctttgaaggcacagcgaagctgtaactgaggaccctgctgctcgggaaggaggtggtttccagtgtgactcggcatgtcatggctacccaacctttgccgctgcctgttcccacgtgtcaccagcacgctgcactccagatgaaatcctcctaggacaggagtttgtttcctgagtgtggagtgaggctgtcagtggatccgtgctttgtcgg

SEQ ID NO: 233704 - DNA, 661 bp, Homo sapiens
tatacttctgaatttcccaaattttctattaaagtaaattataaaaagtagctgaggcaagacaacaattgttaagcttctattattgtaatacccaagtgtaagaaatacagttgccgttcacacctgtgtaggtagctttcctagatgactgaattaggctgcatgtattatgtgcaggcctttgttttgctctctgccaaaacggtgactgctgttctaagagctctcgaagcaccgttggactctgctctgttttgaacaggttgtcggggtaccagttgggtctgctttaccttcaacagtgaagcaggctgtggcgatcagtggtggccagatcctggtagccaaggccagctcttctgtctccaaagcagttgggccaaagcaagttgtaacccaaggagttgccaaagcaattgtgagtggaggtggaggaaccattgttgctcagccagtgcagaccttaaccaaggcccaggttactgccgctggtcctcagaagagtggatcccagggttcaggtaaaacggatcatcactgggagccctttcagcagaagctctgtccaaaatttcctttgctagtgattttatttgctatttgatctggtctaggaaagcctagttaggttgatgctgtaagaagtgtattgaaatgt

SEQ ID NO: 233705 - DNA, 364 bp, Homo sapiens
aaaactagtaatgttgcaggtgaaatgaattgtttcacgataaaaaaacagaccactgggccgggcgccgtggctcacgcctgtaatcccagcactttgggaggccgaggcgggtggatcacgaggtcaggagttcaagaccatcttggctaacacactgaaaccccatctctactaaaaaaacaaaaaaattagctgggcgtggtggccgcacgcctgtggtcccagctacttgggaggctgaggcaggagaactgcttgaaccagggaggcggagcttgcagtgagccgagattgcaccagtgcactccagcctgggcaacagagcaagactccgtctcaaaaaaaaaaaaccacacacaca

SEQ ID NO: 233706 - DNA, 6504 bp, Homo sapiens
gcggggcggaacgcgccgggcgggctccaccgcgccgtgtgcttccgcaggttgcgggggtcgctggggccttgtggcggggcagctccgcggggcttcgcccgctctctcacctcgccgtgctctctcgcggcggccggcggggcccgcgctgcagccggagacccggagaaaggtgaagaactgaatgtcatcatgtctggaatcaagcgaaccatcaaagaaaccgaccctgattacgaggatgtatctgtggcccttccaaataagcggcataaagcaattgagaattcagctcgagatgctgctgtgcagaagattgagactattatcaaagaacagtttgctcttgaaatgaagaataaggaacatgaaattgaagtcattgaccagcgactgattgaagcaagaaggatgatggataaactgcgtgcctgcattgtagcaaactactatgcttctgcaggtcttctaaaagtttctgagggatcaaagacatgtgatacaatggtttttaatcatcctgctatcaagaaatttttggaatcaccatctaggtcatcatctcctgccaatcagagagcagaaacaccatcagccaatcattcagaaagtgattctttatctcagcacaatgacttcttatctgacaaagataataacagcaatatggatatagaggaaagactctcaaacaacatggagcagagaccaagccgaaatactggaagggatacttctagaattactggctcccataaaacagaacagcggaatgctgatctcacagatgagacttcacgactttttgtaaagaaaacaatagtagtgggcaatgtgtccaagtatatacctccggataagagggaagaaaatgaccagtcaactcataagtggatggtatatgtccgagggtcccgtagagaacccagcattaatcattttgtcaagaaggtttggttcttccttcatcctagctataaaccaaatgaccttgtggaagttagagagcctccttttcacctgaccagaagaggctggggtgagtttcccgtcagagttcaagttcattttaaggacagccagaacaagcggatagatatcatacataatctgaagctggatagaacttatactggcttgcagactcttggagcagagacggtagtggatgttgaactccatcgccattctctcggagaagactgtatctatcctcagtcctcggagtctgacatctctgatgcccctccatctttgcctttgaccattccagccccagtgaaagcttcttcaccaataaagcagtcacatgagccagtacccgatacctctgtggagaaaggattcccagctagcactgaagctgaacgacacactccgttttatgctttgccatcttcattggaaagaacacccaccaaaatgactacatcccagaaagttaccttttgttcccatggcaattcagctttccagccaatagcatcaagctgcaaaattgttccacaaagtcaggttcctaatcctgagtcacctggaaaatccttccagcccatcaccatgagctgcaagattgtgtcaggttccccaatatcaactccaagcccatcaccattgcctcgaaccccgacttccactccagtccacgtgaagcaaggcactgccggctctgttattaataatccttatgttatcatggacaagcagccggggcaggtgattggagccaccactcccagtacaggaagtcctacaaacaagatctccacggcttctcaggtctcccaaggaacaggttcccctgttcctaaaattcatggaagtagttttgtaacatctactgtcaagcaggaggattctttgtttgcatctatgccacctctttgcccaattgggagtcaccctaaggttcaaagccccaaacctataacaggaggacttggagctttcacaaaagtgatcatcaaacaggaacctggtgaagcccctcacgtgcccgcaacaggagctgccagccagtcaccactcccgcagtatgtgactgtgaaagggggtcacatgatagctgtgtcccctcaaaaacaggtcataactcctggagaagggattgcccagtcagcaaaggttcagccctccaaggttgtcggggtaccagttgggtctgctttaccttcaacagtgaagcaggctgtggcgatcagtggtggccagatcctggtagccaaggccagctcttctgtctccaaagcagttgggccaaagcaagttgtaacccaaggagttgccaaagcaattgtgagtggaggtggaggaaccattgttgctcagccagtgcagaccttaaccaaggcccaggttactgccgctggtcctcagaagagtggatcccagggttcagtaatggcaacgttgcagctaccagccactaatttggccaacttggcaaatttgcctcctggcactaaactctacctaactacaaacagcaagaacccttcaggaaaaggaaaactgctgctgatccctcaaggagccatcctgcgagctacgaacaatgctaatctccagtctggctcagctgccagtggtgggagtggtgccggaggaggaggaggaggaggaggaggaggcggcagtggcagcggtggaggcggcagcacaggaggaggaggaggaacagcaggaggaggaactcaaagtactgctggccctggagggatatctcagcacctgacttacacatcttacatcctcaagcaaactccccagggcacatttttagttggccagccatcaccccagacttctggaaaacaactcaccactgggtcagtggtccaaggaacactgggagtcagcacatcttctgcacaaggacaacaaacgctaaaagtcatctctggacagaaaaccacattgtttacacaggcagcccatggaggacaggcatctctaatgaaaatatccgatagcaccttgaagactgtgccagccacctcacagctctcgaagcctggaaccacaatgctgagagtagcaggaggggttatcacaactgccacttcccctgccgtggccctctcagcaaacggtcctgcacaacagtctgaaggaatggctcccgtgtcttcatctacggtcagttctgtaacgaaaacttctgggcagcagcaagtgtgtgtgagccaggccaccgtgggaacctgcaaggctgccacccccaccgtcgtcagcgccacgtccctcgtgcctacaccaaaccccatctctgggaaagccacagtatccggactgttaaagattcactccagtcagtccagtccgcagcaggccgtcctgacgattcccagccagctcaaaccactcagcgtaaacacatctggaggggtgcagacgatcctgatgcctgtgaataaagtggttcagtcattttctaccagcaagccacctgccattctgcctgtagctgccccaactccagttgtccccagctctgctccagcagctgttgcaaaagtgaagactgaaccagaaacacctggaccgagttgcctctctcaggagggtcagacagcagtgaaaacagaagaaagttctgagctgggaaactatgtcattaagatagaccatttagaaactatccagcaactcctaactgcagtagtaaagaagattccattaatcactgcaaaaagtgaagatgccagctgcttttctgcaaagtctgtggagcagtactatggctggaacattggaaaaaggagagccgctgagtggcaaagagcaatgacaatgcgaaaagtcttacaagaaatcctggagaagaatccgagatttcaccacctgactcccctcaaaaccaagcacatcgctcactggtgccgctgtcatggctacaccccaccggaccctgagagcctgaggaatgacggggactccatcgaggacgtgctgacccagatcgacagcgagcccgagtgcccatcatcattctcctctgctgacaacctctgccgcaaactggaggacctgcaacagttccagaaaagggaacccgagaatgaggaggaggtggacatcctcagcctctccgagccagtgaagataaacatcaagaaggagcaggaagagaaacaagaggaagtcaagttctacctgccaccaaccccagggtctgaatttattggggatgtcacacagaagattgggatcaccctgcagcccgtggcactccacaggaacgtgtatgcgtccgtggtggaggacatgatcctgaaggctacagaacagctggtgaatgatatcctgagacaggctttggcagttggataccagacagcttctcacaacaggattcccaaagaaattacagtgagtaatattcaccaggccatttgcaacattccttttctggacttcctcacaaacaaacacatgggaatattgaatgaggaccagtgagcggagtgaggtgccctggagaagcaggctttgaaggcacagcgaagctgtaactgaggaccctgctgctcgggaaggaggtggtttccagtgtgactcggcatgtcatggctacccaacctttgccgctgcctgttcccacgtgtcaccagcacgctgcactccagatgaaatcctcctaggacaggagtttgtttcctgagtgtggagtgaggctgtcagtggatccgtgctttgtcggccagcgtttctgcagtctttgtaaaggccccacgagagcgggccaggccgtgtgcctcaggcccttctccctgggtgtgcttaagggggctccttgggcccgcctccccaggaggtagaaaatgagtggcaggctagagatttcacccattttgtgggctggagttaccagtagctccagcagttaccctgaagagagattgggcttcagccttcagcaggtggttctctcccatgcctggccttggtgtggaggggctgtactctgagcccaagtgagtcagctataggaagaggccatacctagagccaagaaccatgaaggcctgagagacggcagactgagcagaattccttttttgagcacgagagcattactagaaccattgtcaaagcagtggcaagggacggagaggtcccaacaggagtcaggaagaggtttgattataaccaagaaaactcactatgctaggaatagactgtgtgcaccagtcccagacacttggcagaagtgtagcagcgttacacatgtgtgcgaagcagatcgcaggttccacgccatctgcatggcctgcaggagcttctgctgctgaccccatgctgagtggccagtggggagcggcgcccggcaggctcttctggggtcgtctgtcctatccgtggattgtatatactcttctctgttaaggagtttttcccaagaagaaaagtatttaaaagaaataccagtgagtgccttaaagttggagaagtaactgcccatgcccagaaataaggatgccagtgcccagaagcagtgagattagtctgtgtccacaagcagaggccccctcgatgggagggagtggcaggcaggagaaggtggcgctgccaggtgcccgggtctattggaggcgccccatctcagacttcctaacacagcctgtgtggaaggcagaacaaagaatgcatgcccagtcagaaatctgttctattctgctccaggaaaatcggaaacctgtgagtcagagtcagagaaacttacccaagcaacgtaattcctgttttcatgggtcctgtagatgtttgagtcaggaaggtaaggcggggagtgactgaataaactctgccttttaaattgagcatctgggccgggcatggtggctcacgcctgtaatcccagcactctgggaggtcgaggtgggtgggtcacctgaggttgggagttcgagaccagcccgaccaacatggtgaaaccccgtctctactaaaaatacagaaaattagctgggcatggtggtgtgtgcctgtaattccagctactcgggaggctgaggcaggaagaatcacttgaacccaggaggcggaggttgcagtgtgccaagatcataccactgcactccagccctggtgacagaggagaccccgtctcaaaaattgattgatcaattcagcatctgagggctgcaagtacagaaggaatctattctcagcagggcatagggcacgcactggcttaacagtttagtatataaggctcaaatagtctatacctgaactgctataagcaaggtcgatagggaagtggatagattgcttcagcaaagtgaactgtgagatctccaggacagagggagaaagatctgatccaaatgagaacagattggttattgcaggtatcacagcctaaagaaattatctttttgcaaaagaaatattaaatgatttagcagtctccacgtgtgttaatgtttcaaacgtgtatcataatgtgtataattgtgtaacaaaattgtctacaataaatcttttggtatttgt

SEQ ID NO: 233707 - DNA, 1448 bp, Homo sapiens
gtatagtaaccactgaactagagaagtaatcttttttaaatggtatggcatttactaagtagtcattaacacctaatagatgatatttagtgtgtgtgctgtgtggccgtcaccgccgtcagtcatcactctgctttcttcctgaactgtgttgtttcggaccccatgggtgagcagtctgaaggaatggctcccgtgtcttcatctacggtcagttctgtaacgaaaacttctgggcagcagcaagtgtgtgtgagccaggccaccgtgggaacctgcaaggctgccacccccaccgtcgtcagcgccacgtccctcgtgcctacaccaaaccccatctctgggaaagccacagtatccggtgagttgcattgtgatattatttctctctcttttctctcattgggctggaatatttttgtttgtttgtttgagatagcgtctcactctgtcgcccaagctagagtgcaatatcacaatctcgactcactgcaacctctgccttccaggctcaagccatcctcccacctcagcctcttgattatcagggaccacaggcacatgtcaccacacccagctaattttttgtgtttttggtagagatggggtttcaccacgttgcccaggctggtgttgaactcctcaggtcaagcagtccacccacctcagcctcccaaagtgctgggattacaggcgtgagccactgtgcccagctatttttttggagggtcttaagcaatattttgtatggtaaattgttaaaagtaattaacccagcagcattttctgaacagttgctttttagatgaattatttttgtttaaaatctacgtatcagattttgtctgagactttaaattatcatttgaaagttactatttgaatttttgaatgatataataaacccttagccacgcagaaccctactgggtattttagctttttttataacgtaattttggggagagccaagagtttgctttccttaaagtactaatttcttttttcctataatcagtgtcgaatagaattcactataaaatgtatacctttctttgcttttataaagtatataaaatatatcttagccttgttgactccaagtcataatttttaacattagttattatcttggctagtgttagagtgataggctggagatccagtaagagctatggtgtctttgtgcctgcactagagggcctcagaaaagtgtaccttttgtttctgagtaacagagagcacacatcctgagaccacattgccttagttgaagtgatttgcttcagtttctcagctgtaaatgagattgataataatacctacttcataaggttgagaggtttaaatgagtttgtaatatatcagtgcttagaatactgtctggtgtgtagtggccattatataaacaattgccactgccattatcatgtgtgatcatttttgtt

SEQ ID NO: 233708 - DNA, 4783 bp, Homo sapiens
atccccccctacaccttcctgtacaggaagtcctacaaacaagatctccacggcttctcaggtctcccaaggaacaggttcccctgttcctaaaattcatggaagtagttttgtaacatctactgtcaagcaggaggattctttgtttgcatctatgccacctctttgcccaattgggagtcaccctaaggttcaaagccccaaacctataacaggaggacttggagctttcacaaaagtgatcatcaaacaggaacctggtgaagcccctcacgtgcccgcaacaggagctgccagccagtcaccactcccgcagtatgtgactgtgaaagggggtcacatgatagctgtgtcccctcaaaaacaggtcataactcctggagaagggattgcccagtcagcaaaggttcagccctccaaggttgtcggggtaccagttgggtctgctttaccttcaacagtgaagcaggctgtggcgatcagtggtggccagatcctggtagccaaggccagctcttctgtctccaaagcagttgggccaaagcaagttgtaacccaaggagttgccaaagcaattgtgagtggaggtggaggaaccattgttgctcagccagtgcagaccttaaccaaggcccaggttactgccgctggtcctcagaagagtggatcccagggttcagtaatggcaacgttgcagctaccagccactaatttggccaacttggcaaatttgcctcctggcactaaactctacctaactacaaacagcaagaacccttcaggaaaaggaaaactgctgctgatccctcaaggagccatcctgcgagctacgaacaatgctaatctccagtctggctcagctgccagtggtgggagtggtgccggaggaggaggaggaggaggaggaggaggcggcagtggcagcggtggaggcggcagcacaggaggaggaggaggaacagcaggaggaggaactcaaagtactgctggccctggagggatatctcagcacctgacttacacatcttacatcctcaagcaaactccccagggcacatttttagttggccagccatcaccccagacttctggaaaacaactcaccactgggtcagtggtccaaggaacactgggagtcagcacatcttctgcacaaggacaacaaacgctaaaagtcatctctggacagaaaaccacattgtttacacaggcagcccatggaggacaggcatctctaatgaaaatatccgatagcaccttgaagactgtgccagccacctcacagctctcgaagcctggaaccacaatgctgagagtagcaggaggggttatcacaactgccacttcccctgccgtggccctctcagcaaacggtcctgcacaacagtctgaaggaatggctcccgtgtcttcatctacggtcagttctgtaacgaaaacttctgggcagcagcaagtgtgtgtgagccaggccaccgtgggaacctgcaaggctgccacccccaccgtcgtcagcgccacgtccctcgtgcctacaccaaaccccatctctgggaaagccacagtatccggactgttaaagattcactccagtcagtccagtccgcagcaggccgtcctgacgattcccagccagctcaaaccactcagcgtaaacacatctggaggggtgcagacgatcctgatgcctgtgaataaagtggttcagtcattttctaccagcaagccacctgccattctgcctgtagctgccccaactccagttgtccccagctctgctccagcagctgttgcaaaagtgaagactgaaccagaaacacctggaccgagttgcctctctcaggagggtcagacagcagtgaaaacagaagaaagttctgagctgggaaactatgtcattaagatagaccatttagaaactatccagcaactcctaactgcagtagtaaagaagattccattaatcactgcaaaaagtgaagatgccagctgcttttctgcaaagtctgtggagcagtactatggctggaacattggaaaaaggagagccgctgagtggcaaagagcaatgacaatgcgaaaagtcttacaagaaatcctggagaagaatccgagatttcaccacctgactcccctcaaaaccaagcacatcgctcactggtgccgctgtcatggctacaccccaccggaccctgagagcctgaggaatgacggggactccatcgaggacgtgctgacccagatcgacagcgagcccgagtgcccatcatcattctcctctgctgacaacctctgccgcaaactggaggacctgcaacagttccagaaaagggaacccgagaatgaggaggaggtggacatcctcagcctctccgagccagtgaagataaacatcaagaaggagcaggaagagaaacaagaggaagtcaagttctacctgccaccaaccccagggtctgaatttattggggatgtcacacagaagattgggatcaccctgcagcccgtggcactccacaggaacgtgtatgcgtccgtggtggaggacatgatcctgaaggctacagaacagctggtgaatgatatcctgagacaggctttggcagttggataccagacagcttctcacaacaggattcccaaagaaattacagtgagtaatattcaccaggccatttgcaacattccttttctggacttcctcacaaacaaacacatgggaatattgaatgaggaccagtgagcggagtgaggtgccctggagaagcaggctttgaaggcacagcgaagctgtaactgaggaccctgctgctcgggaaggaggtggtttccagtgtgactcggcatgtcatggctacccaacctttgccgctgcctgttcccacgtgtcaccagcacgctgcactccagatgaaatcctcctaggacaggagtttgtttcctgagtgtggagtgaggctgtcagtggatccgtgctttgtcggccagcgtttctgcagtctttgtaaaggccccacgagagcgggccaggccgtgtgcctcaggcccttctccctgggtgtgcttaagggggctccttgggcccgcctccccaggaggtagaaaatgagtggcaggctagagatttcacccattttgtgggctggagttaccagtagctccagcagttaccctgaagagagattgggcttcagccttcagcaggtggttctctcccatgcctggccttggtgtggaggggctgtactctgagcccaagtgagtcagctataggaagaggccatacctagagccaagaaccatgaaggcctgagagacggcagactgagcagaattccttttttgagcacgagagcattactagaaccattgtcaaagcagtggcaagggacggagaggtcccaacaggagtcaggaagaggtttgattataaccaagaaaactcactatgctaggaatagactgtgtgcaccagtcccagacacttggcagaagtgtagcagcgttacacatgtgtgcgaagcagatcgcaggttccacgccatctgcatggcctgcaggagcttctgctgctgaccccatgctgagtggccagtggggagcggcgcccggcaggctcttctggggtcgtctgtcctatccgtggattgtatatactcttctctgttaaggagtttttcccaagaagaaaagtatttaaaagaaataccagtgagtgccttaaagttggagaagtaactgcccatgcccagaaataaggatgccagtgcccagaagcagtgagattagtctgtgtccacaagcagaggccccctcgatgggagggagtggcaggcaggagaaggtggcgctgccaggtgcccgggtctattggaggcgccccatctcagacttcctaacacagcctgtgtggaaggcagaacaaagaatgcatgcccagtcagaaatctgttctattctgctccaggaaaatcggaaacctgtgagtcagagtcagagaaacttacccaagcaacgtaattcctgttttcatgggtcctgtagatgtttgagtcaggaaggtaaggcggggagtgactgaataaactctgccttttaaattgagcatctgggccgggcatggtggctcacgcctgtaatcccagcactctgggaggtcgaggtgggtgggtcacctgaggttgggagttcgagaccagcccgaccaacatggtgaaaccccgtctctactaaaaatacagaaaattagctgggcatggtggtgtgtgcctgtaattccagctactcgggaggctgaggcaggaagaatcacttgaacccaggaggcggaggttgcagtgtgccaagatcataccactgcactccagccctggtgacagaggagaccccgtctcaaaaattgattgatcaattcagcatctgagggctgcaagtacagaaggaatctattctcagcagggcatagggcacgcactggcttaacagtttagtatataaggctcaaatagtctatacctgaactgctataagcaaggtcgatagggaagtggatagattgcttcagcaaagtgaactgtgagatctccaggacagagggagaaagatctgatccaaatgagaacagattggttattgcaggtatcacagcctaaagaaattatctttttgcaaaagaaatattaaatgatttagcagtctccacgtgtgttaatgtttcaaacgtgtatcataatgtgtataattgtgtaacaaaattgtctacaataaatcttttggtatttgt

SEQ ID NO: 233709 - DNA, 1876 bp, Homo sapiens
  misc_feature (44)..(44): n is a, c, g, or t
tcgggcgcgacaggcttctgtctaggtagcgaggcctgggtggnggtgaggctgtcagtggatccgtgctttgtcggccagcgtttctgcagtctttgtaaaggccccacgagagcgggccaggccgtgtgcctcaggcccttctccctgggtgtgcttaagggggctccttgggcccgcctccccaggaggtagaaaatgagtggcaggctagagatttcacccattttgtgggctggagttaccagtagctccagcagttaccctgaagagagattgggcttcagccttcagcaggtggttctctcccatgcctggccttggtgtggaggggctgtactctgagcccaagtgagtcagctataggaagaggccatacctagagccaagaaccatgaaggcctgagagacggcagactgagcagaattccttttttgagcacgagagcattactagaaccattgtcaaagcagtggcaagggacggagaggtcccaacaggagtcaggaagaggtttgattataaccaagaaaactcactatgctaggaatagactgtgtgcaccagtcccagacacttggcagaagtgtagcagcgttacacatgtgtgcgaagcagatcgcaggttccacgccatctgcatggcctgcaggagcttctgctgctgaccccatgctgagtggccagtggggagcggcgcccggcaggctcttctggggtcgtctgtcctatccgtggattgtatatactcttctctgttaaggagtttttcccaagaagaaaagtatttaaaagaaataccagtgagtgccttaaagttggagaagtaactgcccatgcccagaaataaggatgccagtgcccagaagcagtgagattagtctgtgtccacaagcagaggccccctcgatgggagggagtggcaggcaggagaaggtggcgctgccaggtgcccgggtctattggaggcgccccatctcagacttcctaacacagcctgtgtggaaggcagaacaaagaatgcatgcccagtcagaaatctgttctattctgctccaggaaaatcggaaacctgtgagtcagagtcagagaaacttacccaagcaacgtaattcctgttttcatgggtcctgtagatgtttgagtcaggaaggtaaggcggggagtgactgaataaactctgccttttaaattgagcatctgggccgggcatggtggctcacgcctgtaatcccagcactctgggaggtcgaggtgggtgggtcacctgaggttgggagttcgagaccagcccgaccaacatggtgaaaccccgtctctactaaaaatacagaaaattagctgggcatggtggtgtgtgcctgtaattccagctactcgggaggctgaggcaggaagaatcacttgaacccaggaggcggaggttgcagtgtgccaagatcataccactgcactccagccctggtgacagaggagaccccgtctcaaaaattgattgatcaattcagcatctgagggctgcaagtacagaaggaatctattctcagcagggcatagggcacgcactggcttaacagtttagtatataaggctcaaatagtctatacctgaactgctataagcaaggtcgatagggaagtggatagattgcttcagcaaagtgaactgtgagatctccaggacagagggagaaagatctgatccaaatgagaacagattggttattgcaggtatcacagcctaaagaaattatctttttgcaaaagaaatattaaatgatttagcagtctccacgtgtgttaatgtttcaaacgtgtatcataatgtgtataattgtgtaacaaaattgtctacaataaatcttttggtatttgt

SEQ ID NO: 233710 - DNA, 1179 bp, Homo sapiens
ttctcaccctaacaggtcaacctcgcttccccacccttactaacattaacgaaaataaccccaccctactaaaccccattaaacgcctggcagaagcaggaagcagggtttggtgagggcagaagcaggagtaactgcccatgcccagaaataaggatgccagtgcccagaagcagtgagattagtctgtgtccacaagcagaggccccctcgatgggagggagtggcaggcaggagaaggtggcgctgccaggtgcccgggtctattggaggcgccccatctcagacttcctaacacagcctgtgtggaaggcagaacaaagaatgcatgcccagtcagaaatctgttctattctgctccaggaaaatcggaaacctgtgagtcagagtcagagaaacttacccaagcaacgtaattcctgttttcatgggtcctgtagatgtttgagtcaggaaggtaaggcggggagtgactgaataaactctgccttttaaattgagcatctgggccgggcatggtggctcacgcctgtaatcccagcactctgggaggtcgaggtgggtgggtcacctgaggttgggagttcgagaccagcccgaccaacatggtgaaaccccgtctctactaaaaatacagaaaattagctgggcatggtggtgtgtgcctgtaattccagctactcgggaggctgaggcaggaagaatcacttgaacccaggaggcggaggttgcagtgtgccaagatcataccactgcactccagccctggtgacagaggagaccccgtctcaaaaattgattgatcaattcagcatctgagggctgcaagtacagaaggaatctattctcagcagggcatagggcacgcactggcttaacagtttagtatataaggctcaaatagtctatacctgaactgctataagcaaggtcgatagggaagtggatagattgcttcagcaaagtgaactgtgagatctccaggacagagggagaaagatctgatccaaatgagaacagattggttattgcaggtatcacagcctaaagaaattatctttttgcaaaagaaatattaaatgatttagcagtctccacgtgtgttaatgtttcaaacgtgtatcataatgtgtataattgtgtaacaaaattgtctacaataaatcttttggtatttgt

SEQ ID NO: 233711 - DNA, 2196 bp, Homo sapiens
gcggggcggaacgcgccgggcgggctccaccgcgccgtgtgcttccgcaggttgcgggggtcgctggggccttgtggcggggcagctccgcggggcttcgcccgctctctcacctcgccgtgctctctcgcggcggccggcggggcccgcgctgcagccggagacccggagaaaggtgaagaactgaatgtcatcatgtctggaatcaagcgaaccatcaaagaaaccgaccctgattacgaggatgtatctgtggcccttccaaataagcggcataaagcaattgagaattcagctcgagatgctgctgtgcagaagattgagactattatcaaagaacagtttgctcttgaaatgaagaataaggaacatgaaattgaagtcattgaccagcgactgattgaagcaagaaggatgatggataaactgcgtgcctgcattgtagcaaactactatgcttctgcaggtcttctaaaagtttctgagggatcaaagacatgtgatacaatggtttttaatcatcctgctatcaagaaatttttggaatcaccatctaggtcatcatctcctgccaatcagagagcagaaacaccatcagccaatcattcagaaagtgattctttatctcagcacaatgacttcttatctgacaaagataataacagcaatatggatatagaggaaagactctcaaacaacatggagcagagaccaagccgaaatactggaagggatacttctagaattactggctcccataaaacagaacagcggaatgctgatctcacagatgagacttcacgactttttgtaaagaaaacaatagtagtgggcaatgtgtccaagtatatacctccggataagagggaagaaaatgaccagtcaactcataagtggatggtatatgtccgagggtcccgtagagaacccagcattaatcattttgtcaagaaggtttggttcttccttcatcctagctataaaccaaatgaccttgtggaagttagagagcctccttttcacctgaccagaagaggctggggtgagtttcccgtcagagttcaagttcattttaaggacaccagctcaaaccactcagcgtaaacacatctggaggggtgcagacgatcctgatgcctgtgaataaagtggttcagtcattttctaccagcaagccacctgccattctgcctgtagctgccccaactccagttgtccccagctctgctccagcagctgttgcaaaagtgaagactgaaccagaaacacctggaccgagttgcctctctcaggagggtcagacagcagtgaaaacagaagaaagttctgagctgggaaactatgtcattaagatagaccatttagaaactatccagcaactcctaactgcagtagtaaagaagattccattaatcactgcaaaaagtgaagatgccagctgcttttctgcaaagtctgtggagcagtactatggctggaacattggaaaaaggagagccgctgagtggcaaagagcaatgacaatgcgaaaagtcttacaagaaatcctggagaagaatccgagatttcaccacctgactcccctcaaaaccaagcacatcgctcactggtgccgctgtcatggctacaccccaccggaccctgagagcctgaggaatgacggggactccatcgaggacgtgctgacccagatcgacagcgagcccgagtgcccatcatcattctcctctgctgacaacctctgccgcaaactggaggacctgcaacagttccagtccagccctggtgacagaggagaccccgtctcaaaaattgattgatcaattcagcatctgagggctgcaagtacagaaggaatctattctcagcagggcatagggcacgcactggcttaacagtttagtatataaggctcaaatagtctatacctgaactgctataagcaaggtcgatagggaagtggatagattgcttcagcaaagtgaactgtgagatctccaggacagagggagaaagatctgatccaaatgagaacagattggttattgcaggtatcacagcctaaagaaattatctttttgcaaaagaaatattaaatgatttagcagtctccacgtgtgttaatgtttcaaacgtgtatcataatgtgtataattgtgtaacaaaattgtctacaataaatcttttggtatttgt

SEQ ID NO: 233712 - DNA, 5613 bp, Homo sapiens
  misc_feature (3718)..(3718): n is a, c, g, or t
  misc_feature (3745)..(3745): n is a, c, g, or t
gcggggcggaacgcgccgggcgggctccaccgcgccgtgtgcttccgcaggttgcgggggtcgctggggccttgtggcggggcagctccgcggggcttcgcccgctctctcacctcgccgtgctctctcgcggcggccggcggggcccgcgctgcagccggagacccggagaaaggtgaagaactgaatgtcatcatgtctggaatcaagcgaaccatcaaagaaaccgaccctgattacgaggatgtatctgtggcccttccaaataagcggcataaagcaattgagaattcagctcgagatgctgctgtgcagaagattgagactattatcaaagaacagtttgctcttgaaatgaagaataaggaacatgaaattgaagtcattgaccagcgactgattgaagcaagaaggatgatggataaactgcgtgcctgcattgtagcaaactactatgcttctgcaggtcttctaaaagtttctgagggatcaaagacatgtgatacaatggtttttaatcatcctgctatcaagaaatttttggaatcaccatctaggtcatcatctcctgccaatcagagagcagaaacaccatcagccaatcattcagaaagtgattctttatctcagcacaatgacttcttatctgacaaagataataacagcaatatggatatagaggaaagactctcaaacaacatggagcagagaccaagccgaaatactggaagggatacttctagaattactggctcccataaaacagaacagcggaatgctgatctcacagatgagacttcacgactttttgtaaagaaaacaatagtagtgggcaatgtgtccaagtatatacctccggataagagggaagaaaatgaccagtcaactcataagtggatggtatatgtccgagggtcccgtagagaacccagcattaatcattttgtcaagaaggtttggttcttccttcatcctagctataaaccaaatgaccttgtggaagttagagagcctccttttcacctgaccagaagaggctggggtgagtttcccgtcagagttcaagttcattttaaggacagccagaacaagcggatagatatcatacataatctgaagctggatagaacttatactggcttgcagactcttggagcagagacggtagtggatgttgaactccatcgccattctctcggagaagactgtatctatcctcagtcctcggagtctgacatctctgatgcccctccatctttgcctttgaccattccagccccagtgaaagcttcttcaccaataaagcagtcacatgagccagtacccgatacctctgtggagaaaggattcccagctagcactgaagctgaacgacacactccgttttatgctttgccatcttcattggaaagaacacccaccaaaatgactacatcccagaaagttaccttttgttcccatggcaattcagctttccagccaatagcatcaagctgcaaaattgttccacaaagtcaggttcctaatcctgagtcacctggaaaatccttccagcccatcaccatgagctgcaagattgtgtcaggttccccaatatcaactccaagcccatcaccattgcctcgaaccccgacttccactccagtccacgtgaagcaaggcactgccggctctgttattaataatccttatgttatcatggacaagcagccggggcaggtgattggagccaccactcccagtacaggaagtcctacaaacaagatctccacggcttctcaggtctcccaaggaacaggttcccctgttcctaaaattcatggaagtagttttgtaacatctactgtcaagcaggaggattctttgtttgcatctatgccacctctttgcccaattgggagtcaccctaaggttcaaagccccaaacctataacaggaggacttggagctttcacaaaagtgatcatcaaacaggaacctggtgaagcccctcacgtgcccgcaacaggagctgccagccagtcaccactcccgcagtatgtgactgtgaaagggggtcacatgatagctgtgtcccctcaaaaacaggtcataactcctggagaagggattgcccagtcagcaaaggttcagccctccaaggttgtcggggtaccagttgggtctgctttaccttcaacagtgaagcaggctgtggcgatcagtggtggccagatcctggtagccaaggccagctcttctgtctccaaagcagttgggccaaagcaagttgtaacccaaggagttgccaaagcaattgtgagtggaggtggaggaaccattgttgctcagccagtgcagaccttaaccaaggcccaggttactgccgctggtcctcagaagagtggatcccagggttcagtaatggcaacgttgcagctaccagccactaatttggccaacttggcaaatttgcctcctggcactaaactctacctaactacaaacagcaagaacccttcaggaaaaggaaaactgctgctgatccctcaaggagccatcctgcgagctacgaacaatgctaatctccagtctggctcagctgccagtggtgggagtggtgccggaggaggaggaggaggaggaggaggaggcggcagtggcagcggtggaggcggcagcacaggaggaggaggaggaacagcaggaggaggaactcaaagtactgctggccctggagggatatctcagcacctgacttacacatcttacatcctcaagcaaactccccagggcacatttttagttggccagccatcaccccagacttctggaaaacaactcaccactgggtcagtggtccaaggaacactgggagtcagcacatcttctgcacaaggacaacaaacgctaaaagtcatctctggacagaaaaccacattgtttacacaggcagcccatggaggacaggcatctctaatgaaaatatccgatagcaccttgaagactgtgccagccacctcacagctctcgaagcctggaaccacaatgctgagagtagcaggaggggttatcacaactgccacttcccctgccgtggccctctcagcaaacggtcctgcacaacagtctgaaggaatggctcccgtgtcttcatctacggtcagttctgtaacgaaaacttctgggcagcagcaagtgtgtgtgagccaggccaccgtgggaacctgcaaggctgccacccccaccgtcgtcagcgccacgtccctcgtgcctacaccaaaccccatctctgggaaagccacagtatccggactgttaaagattcactccagtcagtccagtccgcagcaggccgtcctgacgattcccagccagctcaaaccactcagcgtaaacacatctggaggggtgcagacgatcctgatgcctgtgaataaagtggttcagtcattttctaccagcaagccacctgccattctgcctgtagctgccccaactccagttgtccccagctctgctccagcagctgttgcaaaagtgaagactgaaccagaaacacctggaccgagttgcctctctcaggagggtcagacagcagtgaaaacagaagaaagttctgagctgggaaactatgtcattaagatagaccatttagaaactatccagcaactcctaactgcagtagtaaagaagattccattaatcactgcaaaaagtaagacaattacactgaatntaggggtgcatttttgaaagctgtgancttaaggtattgagtcaactgaaatcacttgggattgtaaattaatattgatatggcggttaccttataaggtttcagctagagatacagcccatttgcaagggttttagaattcacatccagttagttttttattgttttcactgtgttgatctgtagaaggaatgttttacatttttcatatgtaaatcatagattgttttgtatgcagttaaaactctgtattagcatttggtgtttatgagtgaggaaagcatttagcgtttgcctgcagtgtaccaggtcctgtgcaggttgggtacgttcactgtctcatataatcccagcctcctgtgtgatagctggtgtcatctccacttacagatgaggaaactgaggataagcagggttgaataacttgctcgagatcacagagccacgggtggtgaaacaggatacaaacctggttctgtttgactctaagaccattcatctttcctctgaaactcagtattgcacagtgtagaaatgcagtttttaagacctcccaaagtgacgtgctgcgtcactgcccatcattagctagattgagtaaattgctgcttagccccagttgttttgacagaatcaatagcccttgctgaggggccagcagcctacggacacaggagcatgctcatgggcaagaccaccatgcacactcagaggggagccacaaggcaacctccacgccactcagatttgtagggctctgaacacatacaccaggtacagaccacctacttattttttccaactgtaatagcaaagcagtaatctctttctgtagggtaaagtttgggggatcattttgatgtctctcagagtaaacttttggtgacagtttcccagcctaacataagaaattcaaacaaaaaaatctctcttatatatgtgtgtgtgtgtgtgtgtgtgtatacatgtatatatatatacacgtgtatatacacacacacatatttttctctctccttaaaaatacagaatgtaagagctggaaggtagttcagaaaccatcttcccagctttctcagtttatagatgagaaaaccgagctgggcttggtggctcacgcctgtaatcccagcactttgggaggttgaggcaggcagatcacctgaggtcaggactttgagacctgcctggtcaacatggtgaaaccccatctctactaaaaatacaaaaattagccaggcatggtggtgcctgcctgtagtcccagctcctcgggaggctgaggcaggagaatcgcttgaacctgggaggcagaggttgcagtgagctgagatcacatcaccgcactccagcctgggtgacaaagtgagacaccatctaccacaaccaccttgtgagttaatggcgggtccagggctcctagtggagcaccagttccacagactttaatagtctatggcagtgattaccttctctaccaaagaagcaaagtgcccaggaaggtgtgttgctttgagtacacacggcaagacaccttctcttgctgaggcaggagaactgcttgaaccagggaggcggagcttgcagtgagccgagattgcaccagtgcactccagcctgggcaacagagcaagactccgtctcaaaaaaaaaaaaccacacacacaaaaaaaacagaccactgctgcagggccatggggtgtaggagcaagggattaaaggtatataggcagaagaagcattttgagtttcacctcaaagaataagaagggttgggccgggcgtagtggctcatgcctgtaatcccagcactttgggagtcaaggcaggaggatcacttgagcccctaggagtttgagaccagccagggcaacatagcaggaccttgtcactac

SEQ ID NO: 233713 - DNA, 4379 bp, Homo sapiens
gcggggcggaacgcgccgggcgggctccaccgcgccgtgtgcttccgcaggttgcgggggtcgctggggccttgtggcggggcagctccgcggggcttcgcccgctctctcacctcgccgtgctctctcgcggcggccggcggggcccgcgctgcagccggagacccggagaaaggtgaagaactgaatgtcatcatgtctggaatcaagcgaaccatcaaagaaaccgaccctgattacgaggatgtatctgtggcccttccaaataagcggcataaagcaattgagaattcagctcgagatgctgctgtgcagaagattgagactattatcaaagaacagtttgctcttgaaatgaagaataaggaacatgaaattgaagtcattgaccagcgactgattgaagcaagaaggatgatggataaactgcgtgcctgcattgtagcaaactactatgcttctgcaggtcttctaaaagtttctgagggatcaaagacatgtgatacaatggtttttaatcatcctgctatcaagaaatttttggaatcaccatctaggtcatcatctcctgccaatcagagagcagaaacaccatcagccaatcattcagaaagtgattctttatctcagcacaatgacttcttatctgacaaagataataacagcaatatggatatagaggaaagactctcaaacaacatggagcagagaccaagccgaaatactggaagggatacttctagaattactggctcccataaaacagaacagcggaatgctgatctcacagatgagacttcacgactttttgtaaagaaaacaatagtagtgggcaatgtgtccaagtatatacctccggataagagggaagaaaatgaccagtcaactcataagtggatggtatatgtccgagggtcccgtagagaacccagcattaatcattttgtcaagaaggtttggttcttccttcatcctagctataaaccaaatgaccttgtggaagttagagagcctccttttcacctgaccagaagaggctggggtgagtttcccgtcagagttcaagttcattttaaggacagccagaacaagcggatagatatcatacataatctgaagctggatagaacttatactggcttgcagactcttggagcagagacggtagtggatgttgaactccatcgccattctctcggagaagactgtatctatcctcagtcctcggagtctgacatctctgatgcccctccatctttgcctttgaccattccagccccagtgaaagcttcttcaccaataaagcagtcacatgagccagtacccgatacctctgtggagaaaggattcccagctagcactgaagctgaacgacacactccgttttatgctttgccatcttcattggaaagaacacccaccaaaatgactacatcccagaaagttaccttttgttcccatggcaattcagctttccagccaatagcatcaagctgcaaaattgttccacaaagtcaggttcctaatcctgagtcacctggaaaatccttccagcccatcaccatgagctgcaagattgtgtcaggttccccaatatcaactccaagcccatcaccattgcctcgaaccccgacttccactccagtccacgtgaagcaaggcactgccggctctgttattaataatccttatgttatcatggacaagcagccggggcaggtgattggagccaccactcccagtacaggaagtcctacaaacaagatctccacggcttctcaggtctcccaaggaacaggttcccctgttcctaaaattcatggaagtagttttgtaacatctactgtcaagcaggaggattctttgtttgcatctatgccacctctttgcccaattgggagtcaccctaaggttcaaagccccaaacctataacaggaggacttggagctttcacaaaagtgatcatcaaacaggaacctggtgaagcccctcacgtgcccgcaacaggagctgccagccagtcaccactcccgcagtatgtgactgtgaaagggggtcacatgatagctgtgtcccctcaaaaacaggtcataactcctggagaagggattgcccagtcagcaaaggttcagccctccaaggttgtcggggtaccagttgggtctgctttaccttcaacagtgaagcaggctgtggcgatcagtggtggccagatcctggtagccaaggccagctcttctgtctccaaagcagttgggccaaagcaagttgtaacccaaggagttgccaaagcaattgtgagtggaggtggaggaaccattgttgctcagccagtgcagaccttaaccaaggcccaggttactgccgctggtcctcagaagagtggatcccagggttcagtaatggcaacgttgcagctaccagccactaatttggccaacttggcaaatttgcctcctggcactaaactctacctaactacaaacagcaagaacccttcaggaaaaggaaaactgctgctgatccctcaaggagccatcctgcgagctacgaacaatgctaatctccagtctggctcagctgccagtggtgggagtggtgccggaggaggaggaggaggaggaggaggaggcggcagtggcagcggtggaggcggcagcacaggaggaggaggaggaacagcaggaggaggaactcaaagtactgctggccctggagggatatctcagcacctgacttacacatcttacatcctcaagcaaactccccagggcacatttttagttggccagccatcaccccagacttctggaaaacaactcaccactgggtcagtggtccaaggaacactgggagtcagcacatcttctgcacaaggacaacaaacgctaaaagtcatctctggacagaaaaccacattgtttacacaggcagcccatggaggacaggcatctctaatgaaaatatccgatagcaccttgaagactgtgccagccacctcacagctctcgaagcctggaaccacaatgctgagagtagcaggaggggttatcacaactgccacttcccctgccgtggccctctcagcaaacggtcctgcacaacagtctgaaggaatggctcccgtgtcttcatctacggtcagttctgtaacgaaaacttctgggcagcagcaagtgtgtgtgagccaggccaccgtgggaacctgcaaggctgccacccccaccgtcgtcagcgccacgtccctcgtgcctacaccaaaccccatctctgggaaagccacagtatccggtgagttgcattgtgatattatttctctctcttttctctcattgggctggaatatttttgtttgtttgtttgagatagcgtctcactctgtcgcccaagctagagtgcaatatcacaatctcgactcactgcaacctctgccttccaggctcaagccatcctcccacctcagcctcttgattatcagggaccacaggcacatgtcaccacacccagctaattttttgtgtttttggtagagatggggtttcaccacgttgcccaggctggtgttgaactcctcaggtcaagcagtccacccacctcagcctcccaaagtgctgggattacaggcgtgagccactgtgcccagctatttttttggagggtcttaagcaatattttgtatggtaaattgttaaaagtaattaacccagcagcattttctgaacagttgctttttagatgaattatttttgtttaaaatctacgtatcagattttgtctgagactttaaattatcatttgaaagttactatttgaatttttgaatgatataataaacccttagccacgcagaaccctactgggtattttagctttttttataacgtaattttggggagagccaagagtttgctttccttaaagtactaatttcttttttcctataatcagtgtcgaatagaattcactataaaatgtatacctttctttgcttttataaagtatataaaatatatcttagccttgttgactccaagtcataatttttaacattagttattatcttggctagtgttagagtgataggctggagatccagtaagagctatggtgtctttgtgcctgcactagagggcctcagaaaagtgtaccttttgtttctgagtaacagagagcacacatcctgagaccacattgccttagttgaagtgatttgcttcagtttctcagctgtaaatgagattgataataatacctacttcataaggttgagaggtttaaatgagtttgtaatatatcagtgcttagaatactgtctggtgtgtagtggccattatataaacaattgccactgccattatcatgtgtgatcatttttgtt

SEQ ID NO: 233714 - DNA, 502 bp, Homo sapiens
cttctaagggcagttttcagtatataaaatgttttgttttagatactgactttaaaactgagccatgtgtagatgtatcagaaggcaaggaaaacttgtatacaaatgtccatagaagcattattcataatagccacagtgaaatcaacccaaatgcccatcagctgatgaatggataaaccaaatgtggtgtatccatacaatggactattattcagtcattaaaagaaatgaagtactgatacatgctattgatatgtggatgaaccttgaaaatatgatgctaagtgaaagaagccagacacaaaaggccacatactatatgattccatttctatgaaattcccagaataggaaaatttatagaaacagaaagtagattcgtagctgccaggggattcaaggaggcaagaattaggactgactcctaataagtacagggcttcttttggggataatggaaatattctggaattagatagtagtcatggttgcaccaaaa

SEQ ID NO: 233715 - DNA, 293 bp, Homo sapiens
acacacagacctcaacagagccaagcgggcgatgccatccccacaccccaccttggagtggctcctgctcccatccccacggaccttctgggatttgccagcagcagggagccccaggtgagcagcgccacacacagatttgctgaacgctctggccaccagggcctttctcgtgcaactcatctggcttgccaggacgtgcagagcttccaaaacgattccgtagactgttggggcctcttcagtgcccaggatcaagtcaggcccagtttggaagtggcagccaggcaggc

SEQ ID NO: 233716 - DNA, 355 bp, Homo sapiens
tataaatggggttttgctatgttgcccaggctggtttcaaactcctgggctcaagcaatccacccatttcagcttccgaaagtgctgggattacagacatgagccaccacgctcagcctggtaaaatattttaccaggactgtatcattgaatatgttgctgctcttattcttagttgctgctcttagtcaacccaaatagatagctagagaagttttctgccatagtatgatttccccccacacttaaggtctgttatcaccatcactctacctttttccctcttcccctaaacttgctcatgtaaaactattttggagggtgataatgtttgtcatttcactagtagaattgg

SEQ ID NO: 233717 - DNA, 382 bp, Homo sapiens
tctcccacccaatctgcacctcacaggcagaatgcaggaagtcctcactgtcaaatgcactttggtccgcctcatcccaagtccctccagccttcctgcttctgttttcttcctggatgttcaggtgtgtccctcagatcctccagagggcttgatggcttctgtccatgtgacccttcctacctctgcctacccagttcactcaagatctgaagaccaacgaggcctcagaaggggccacagccacattgcagtgtgaactaagcaaggtgtcgctgtggagtggaagaagggacctgagaccctcagagatggggactgtgttctctgttcctgggccgtgtgctttctcaccatctgtatattcatttgcttattctgc

SEQ ID NO: 233718 - DNA, 325 bp, Homo sapiens
cagtaaatttatgactgagctaaagtgactaggaacccatcatttttaattacccatgatttttccaatggacaagcactattaacatgggactgtatttccttttcatatttcttccttcagtaattattttaataagagtttcagatttcactttctcctcttagcaataaaatattttgtcatcccataattttcaaaaatttcactaataattgtataatatcctatcatacagaggttccactacttattttctaaaatgctcatatcctatactatcaatttctatctttataaaacaataaaagtactctgcaatgga

SEQ ID NO: 233719 - DNA, 372 bp, Homo sapiens
tagtctccatcactctatcttcttcctctctctgacctgcacttgctggcccgttggtcatcttctctccctgtccccactacctaggtgaccttatatcagatttaaaaaccacctcaaatttcaatctccatgcctgtcccctcctccatgctccagattctcacacccaactgtctgctcggctcccacactgagctgtacaatgtgcaccgcaaacttcctctgtctgaaacagaacacaatgtcccgtgctcttcccccgttgtcatctttcccatgtcgggagatggcaccactattcactctggggctcaagtcaaaatcctcaattcttctctcacacacccacctccaattcagtggcggccg

SEQ ID NO: 233720 - DNA, 459 bp, Homo sapiens
  misc_feature (92)..(92): n is a, c, g, or t
gcggaggcccggacgcccccctggggaccctgtgcggcccgcgaggtccgggcccggccacccccgcggcccccggcggtccccgcctgccncaggacgcgctcgctgcggggccccgccgctgccgcctcctgcgcgtccccgacgggctgctgagtcgcgcgctgcgggctggaaggagtcgccgcctggcccgcgtccgctccgtctccagcgggaacgaggacgaggagcgccgcgcgggatccgagtccccggcccgggccccctcctcgagcccgctgtcatccagggccccgcttcctgagcgcctggaggcaagggccgtggctctgggccgcgcgggacgcctggcctggctgctgagtactgtccgggaacccgcgtctccgcctccggctgctccgcgcggagagcctgttcggaggcgcccccgggcccgcgccgtccgctgccgcc

SEQ ID NO: 233721 - DNA, 451 bp, Homo sapiens
cggttcaagacaaatttctactttgagctctctctctgatttcttgctccattacttattccatttctctcttatatttccagtctgtttattcctcgctccttacctttttttcctgtattttttggatctcctaaaaatctctcctgtcttataagagaaattaaagccttttcttggcactgaatactcctctagctactgtcttctcttgcacatgcagcccggcttcttgaagaaatggttcggttgctctcctaggcacgcagctcttcctctctccagctcttcctggtgggttttgtccctactctactataactgttgtcacctgggtcaacaatgaatttccaaagcttttctttccttatataacttcaactttctgttcatatttaatacttacttttgaattacaccagtaatacataaaagcaagttccctaaaaaa

SEQ ID NO: 233722 - DNA, 2069 bp, Homo sapiens
  misc_feature (16)..(16): n is a, c, g, or t
  misc_feature (81)..(81): n is a, c, g, or t
  misc_feature (83)..(83): n is a, c, g, or t
  misc_feature (86)..(86): n is a, c, g, or t
  misc_feature (138)..(138): n is a, c, g, or t
  misc_feature (174)..(174): n is a, c, g, or t
  misc_feature (189)..(189): n is a, c, g, or t
  misc_feature (235)..(236): n is a, c, g, or t
  misc_feature (239)..(239): n is a, c, g, or t
  misc_feature (293)..(293): n is a, c, g, or t
  misc_feature (328)..(328): n is a, c, g, or t
  misc_feature (367)..(367): n is a, c, g, or t
  misc_feature (375)..(375): n is a, c, g, or t
  misc_feature (409)..(409): n is a, c, g, or t
  misc_feature (513)..(513): n is a, c, g, or t
  misc_feature (531)..(531): n is a, c, g, or t
  misc_feature (546)..(546): n is a, c, g, or t
  misc_feature (549)..(549): n is a, c, g, or t
  misc_feature (559)..(559): n is a, c, g, or t
  misc_feature (623)..(623): n is a, c, g, or t
  misc_feature (635)..(635): n is a, c, g, or t
  misc_feature (656)..(656): n is a, c, g, or t
  misc_feature (686)..(686): n is a, c, g, or t
  misc_feature (739)..(739): n is a, c, g, or t
  misc_feature (824)..(824): n is a, c, g, or t
  misc_feature (830)..(830): n is a, c, g, or t
  misc_feature (879)..(880): n is a, c, g, or t
  misc_feature (887)..(887): n is a, c, g, or t
  misc_feature (911)..(911): n is a, c, g, or t
  misc_feature (967)..(967): n is a, c, g, or t
  misc_feature (974)..(974): n is a, c, g, or t
  misc_feature (1046)..(1047): n is a, c, g, or t
  misc_feature (1129)..(1129): n is a, c, g, or t
  misc_feature (1145)..(1145): n is a, c, g, or t
  misc_feature (1185)..(1185): n is a, c, g, or t
  misc_feature (1189)..(1189): n is a, c, g, or t
  misc_feature (1194)..(1194): n is a, c, g, or t
  misc_feature (1202)..(1202): n is a, c, g, or t
  misc_feature (1247)..(1247): n is a, c, g, or t
  misc_feature (1388)..(1388): n is a, c, g, or t
  misc_feature (1402)..(1402): n is a, c, g, or t
  misc_feature (1405)..(1405): n is a, c, g, or t
  misc_feature (1440)..(1440): n is a, c, g, or t
  misc_feature (1446)..(1446): n is a, c, g, or t
  misc_feature (1457)..(1457): n is a, c, g, or t
  misc_feature (1473)..(1473): n is a, c, g, or t
  misc_feature (1490)..(1490): n is a, c, g, or t
  misc_feature (1492)..(1492): n is a, c, g, or t
  misc_feature (1496)..(1496): n is a, c, g, or t
  misc_feature (1549)..(1549): n is a, c, g, or t
  misc_feature (1594)..(1594): n is a, c, g, or t
  misc_feature (1634)..(1634): n is a, c, g, or t
  misc_feature (1753)..(1753): n is a, c, g, or t
  misc_feature (1792)..(1792): n is a, c, g, or t
  misc_feature (1824)..(1824): n is a, c, g, or t
  misc_feature (1856)..(1856): n is a, c, g, or t
  misc_feature (1870)..(1871): n is a, c, g, or t
  misc_feature (1888)..(1888): n is a, c, g, or t
  misc_feature (1890)..(1890): n is a, c, g, or t
  misc_feature (2009)..(2009): n is a, c, g, or t
  misc_feature (2033)..(2033): n is a, c, g, or t
  misc_feature (2037)..(2037): n is a, c, g, or t
  misc_feature (2067)..(2067): n is a, c, g, or t
actctgcctttggacntgtgagagagcgcacctttcacttgagcttcaacatgggaaagggaaatgaagaccccgatctcnantgntcctccatccagtgctccactgaccagccccctttccaacagatctcctttncagaaaagggctcagatgagaagaaaccattcaaangaaaaggcaagaccnccttctcccattccagtgagaagcacacacaaaggcaagcaggatnngancccaatccaaacaaggagaattctgaggaaaccaagctcaaggccgggaacagnactgctggatcagaaccagagtccagctcatatcnggaaaactgcaggaaaagaaaaatcagttccaaggatanctgccaanacagagcagggaactgtccagaagaggagtgcancttgacgttgaataaaaaatcaagatcctccactgctgtgcacaacagtgaaatccaggagacctgtgatgcccaccataggggaagttccagggcttgcactngcgcagcaagcggcatangtctcgggccctagnagnccaaacaccntcacttcgaaaaagcttggtgacctctgtgcgagctatgtcggaggctgtttatcaagacctancccaggtgtggncacagcagatccattctccantgacctgtgagcagctgacactgctcactnggctccgggggcctctgtgtgcccaggtgcagaccttgtattccatggccacncaggcagcttatgtcttccctgctgagagctggcttgtcccagccacactgcctggtcctggggattcagccctggatagagaancccatnccttccctgggcaggagataactgagcctgtcagtggatcagatgaggnnaagctgngagcaccctgaccctattcagcanagatgcagctctgggaatgagaacaaggacctgcttcttctcagattcttccagangaccagnagtgacaattttagatgcactgtgttaataaatgacagaacctgaagaagtcataggaaagaaacttgagcnntatactcagaatggtgagccctgaattttgcagaccgctaaggctatagacaaattttatatttcatgttagacatttgatnccttttggatgtctgntgacagtcgtgcatttctatataatcagaaaaatattagnttgnaatcntgaatttncatattttagattgtagaaaagtaaatataaaattatatgctctntttttttttgagacagtcttgctatgtcactcaggctggagtgcagtggcacaatcttagctcactgcaacctctgcttcctgggttcaaacaattctcatgcctcagcctcccaagtagctgggactacaggcatgtacngccatgcctggctnatntttttttcttgtattgttagtagagttttgtcacnttggcnaggttggcctnggactcaagtgatccnccagcctccacctcccnangtgntggggttacaggcatgagccgctttaccaagaaattgcttctcttttaattcngaaaaggttgtaggctcttccagcctgaacccatggagtactaanatccacaaaccattaatagcactccctgtgggaaaatgtntatacatttttacagtttgcatagtaaaattactatgcaagctgtttacttttaatatttctacataaaatttaagtcaagatatattaaatggtaaatgattgtacttattcatctgnctcatgttttatttcattttaaacatcctgaatttatantttattgtatttcatacatttcaattgattgnactgtattgcaggatatggagatttcatcacntactacaatacagnntattttgttatatttgncntatattctacttgtattttgtactgagatcatacaatctttcattatctaagtgtattaatgacttgtttggttgctttataattttcattttatgtaataatgaaataaacattaatnttgtttggaattttaaatttcttncatntggaatttgtatttaataaagatgtgaaanag

SEQ ID NO: 233723 - DNA, 504 bp, Homo sapiens
gctctcagcttgaacattattggtgtttgcattgttgatttggttctcagcttgaacattcttggtgtgtaaaaatgctactgatttttatatgttgattttgtatcctaaaacttcactgaagtggtttatcagttctagggtccctttgctggagactttaaggttttcaaaatatagaataatatcatctgcaaagagagatgatttgactgccttttctattttgatggcttttatttctttcttttgtctgattgctctggctaggacttccagtactatgtggaactggagtgatgagagtgagcaaccttatcttgttccagttcttaatggaaatgcttccagcttttgcctagtcagtatgatttttgctgtgggcctgtcatagatggctgttaatattttgaggtattttatatatttagaagctttcaaaaattttgtaatttgtggttattctcctcatcttaaataaatagtaactttttaatctaatgt

SEQ ID NO: 233724 - DNA, 437 bp, Homo sapiens
ccccccctcctctcttctcccgccggtttcccccatttcagagaacgctgaatggttccagtctttcagtcctgctcctggccaacactggacctctcaaagtctagccaactcctcttccagcgccttgataaacaaccccctcatgctgggaaccacagcagtgggctgtttttctccctcatgcaccccaggaagcctctcctctttgcctgggctttcttcccaaggccttagctgccaacccattttacacccatgcgaagcccagtcagtcacctgaagaaaaggagactcacagaaggcccaagatgaaagactctttaatcctgtggctttttgagttttgtttttagcaggaagaccttattttcaaaacaaattgttacacagaatttgccagtttacagaacagatgaataaagacatttatggca

SEQ ID NO: 233725 - DNA, 357 bp, Homo sapiens
tctttttacttctaatttgtgccaaggacaaaagccattcagattcttaatgttttgtatatgacctttttttttccccagtctggatgcttctaatatcttccttccatccccagtgttgtgaaattttgcagtgtctatttttgatccactacactgtcattccatagactatacatacttggaaactcatatccttcagtgctgaaaggtctcgtaagtcaatcctactgtgagtctttatgtttctatactgccttgccaggcatggtagtacatgcctgaaattccagctactaaagccaaggagttcaaattcagcctggtcaacaatgtgagaccccgtctctatttttt

SEQ ID NO: 233726 - DNA, 461 bp, Homo sapiens
aatcctagcaaattgaaaattaatactaaaagtcatacccactaaaaaataagattacacctgtaccagtggacttggagaaatttcctcaaggctctggctagtgtgaaatgtagatgcagagaaatgagccctgtaggatcctattttagtagcaagcaataaaaatatcttttacacatatgttgagtgtgtgcctggggtacgtaggacagtggctgggtggagtggggaaggtgtgtaggaatcaacaaaaagaaaatgacagtgaaaagtgagtccagtatgtgtgatcctacttgtggaaaaactccacatatatgaatacgcatgcgcgtaaagaaacatagacttacacccagatctacttcctaggagaggcaaccatgatacaagttctagtgaaaagaattaagttgcaaagaaatgtggataataaaatccgaattggtagcaatacc

SEQ ID NO: 233727 - DNA, 441 bp, Homo sapiens
actattattattattattttgtcttggttttcattaaactatcttagtagtttcaggagctctgggtttcaacacacacttctgccagctgactttagtgcgtccattagcataacaaagtcaattaggcaaacctgaattttcacttttatcccgttcacagaacatcagtgtaaatggagacaggaagaagaaattggattgattctccacttgagaattatgttaacttggaagaaaatgttaagtctactatgtgagggcatctagtgagagggaaggaatcacctcccttcccccattatgtccctttatgcacctctgacccttgtgctctccttttcttgttgcttctgtggtctggttgttagctttcccgatcctccacacattagaaacctaagcataatgatttctgatcgaaggctatgagatatttga

SEQ ID NO: 233728 - DNA, 560 bp, Homo sapiens
gaggtctggtaccatcgtccgtattcttaaccactgtacggttttccagcctccccttcttatcagtctcctcttgccggtttgaaaattagggcaaagttaatatttacaaaccttaaaattctaattagcagaaactgaaaatgtatatgtggggcatatttaatatttctaactagagtaaaggaggagactttatacatactccgtcacttagggatatgcaattgatgtgagaaagagaggagcctcggtaatttttcatgccacccaggcatctttttttccctcaggctgatcccagaattgctaccacccttttttctgccctctgcctaaagctggccctaaacccatgactctcttcctgtgtggactgtgctgtagcttgctgaggaagggctgtactgaggtgtcagaagcctccttgcagtgctggtccttgggtattgtgtctgttggtagaagtaaccaatgaataagccactgccagaactgttccgcctgcccagttttcgtgtgaattttctaatgtagcttgcgtgccaacgccttaattt

SEQ ID NO: 233729 - DNA, 537 bp, Homo sapiens
aaatatgaaggaaaacatcagaagaaacaggttaaagaattagatgtggtcctcacagggaatatttgcccctggccgcagatacaaaggatgcatttcaagctctcccaagaactcttgcagtgctccatccctgtgtcctcagaaatggccctgagtctcagcagctcaaaaagactccagttggatagtgagaagccactgcttccttgcaagaaccttcccaaatttctctaaccatgtgaagacatgcttgattcccctcaccttcaccatgatttttctgggagaataacaaaaagaaggaagattcagtaggaaaggaaagcaatgaagaagccaagaaagagacaaggaaccctggaaagagagtcagcaaagagagaaatagaaacattaatttcaggtgaagaaactgaagactttagccagagccaagtggctaattcagagtttaatacacctttgacctcaaaccctttgtggtcacctttgaacagtgcctccctctctgaaataaaatactggttctgtcat

SEQ ID NO: 233730 - DNA, 689 bp, Homo sapiens
aaatatgaaggaaaacatcagaagaaacaggttaaagaattagatgtggtcctcacagggaatatttgcccctggccgcagatacaaaggatgcatttcaagctctcccaagaactcttgcagtgctccatccctgtgtcctcagaaatggccctgagtctcagcagctcaaaaagactccagttggatagtgagaagccactgcttccttgcaagaaccttcccaaatttctctaaccatgtgaagacatgcttgattcccctcaccttcaccatgatttttctgggagaataacaaaaagaaggaagattcagtaggaaaggaaagcaatgaagaagccaagaaagagacaaggaaccctggaaagagagtcagcaaagagagaaatagaaacattaatttcagaggagttggaagtgttgtgaactattaatcctttagctttgctttggacttgatagcaaaagtagctgcatgcagaagtaaaattgttaagaatgtcacataaaatgtgagggtgagctcagcatgaaggaacagcctcttccattggtgaggtgaagaaactgaagactttagccagagccaagtggctaattcagagtttaatacacctttgacctcaaaccctttgtggtcacctttgaacagtgcctccctctctgaaataaaatactggttctgtcat

SEQ ID NO: 233731 - DNA, 1017 bp, Homo sapiens
tcctggggagcacatcaaagagaatcaggtcagagagagaaatttcacaagaacacaaattctatgttatggtccgcccaaaagaggaaaatattttaaaatgatatccataataaagctatattaacaataagctgtatggtcctgccattggagtggaggggtgtcttgacccttgacctctgctcacataaaagcctgagaaatgaaaatcatgtttatcatggttgtttgttttatacaaatttactgtctttctttaactgatataagaaaaaaaaaaaatcttttctgaaatagcccaagtctggttcttaacagtcatgtgactgttttttctgccagccatgtgctccgtatcattttactctgaaataactatgcggatttcagctcaacctgcctttgcttataatgcatgacataccctgtgagggagcctgagaacagactcctttgaaaagcaaggttctcatagttggcctgtaaccatggaagcagatgccgttttcttctcaccctgcttacctctttgcagcctcgagctgctccctattgttaaaaggggtacgccttgatttttcttcatcatgaccgaacttgcctcttcttcaaaggacatgatgctgcaggtcattggtctagactgtttgcacggtccagagaatagccttgatgtaacccttgctccgtctgagccacaccaccagccgtgcatctgcagactggagggggacattggagatctgtatttgaaaagaagtctgtctgattttgccattgtgccttttcactcatcgatcgaatgaatatcgaaccttctgtcgttgcatgtgtgaaatagatagcttagcaagcacttttgtgcccaacctgtgcagtgggccaaaaggttttccttttagcctcaagaattttttcttcagactttatgaatttcgtgttagcttaaattatttatatgtctttatccaactgttacgatgaccgtttcagttacttcgtcagcagtgactt

SEQ ID NO: 233732 - DNA, 480 bp, Homo sapiens
gggaaaaggttgcagacaaaagacacaaaagtgagaaatcagaagagccaagaatcctatcaaactgcactggcatttctccgaatgagaacaaaacttctttttgtcctttttgcaaagttcttaccatgctcatgacagaggagactgcttctcagcaggagaaaagattcactgaactcaatgggatcacatttatttaagctgtttctttccccttcaacatagagacgcaacctgaaagtcctggagcttccagggctgcagggaatccaggaacctctagaaattatacataatattgtatgggcatgtttatatgcatctttttaggtaaggatgaatgttttcatcagatgatagaagtgatcttggtccacaaaaggttaagaaccacgcctttaagatccgcattcttggccaggcacagtggctcacacccgtaatcccagcactttgggaggccgcagcaggcggatc

SEQ ID NO: 233733 - DNA, 434 bp, Homo sapiens
ggcagtcagattctgtctttattcaaaattttgatgtttgttcatcatggtttctttgcattcattaaaaaaagatgttaaacaccacctcgcccagccgacgctcccatcttctaagtgtgtaccacatagtagcaggtgcactattgccatttataaaaaatgtgcatctgtggcgtctccctcttttcagaagaggaaattgaggcccagagaggcaaaaccagttgccgaggtcttagaacacgtaagaggcagggtcaggatttgaatcgtgctctcctgcgttagcgctccttccgcccttctgcgccgagatgtggtcaatggggtggggaccagggtgagaccagggaggctctctcgtgggtgcaagatttaaggggacgctgaaaatctcagtcattaaggtccatcatgttttaatgcaacat

SEQ ID NO: 233734 - DNA, 596 bp, Homo sapiens
cactattaatgctaatgattgccaacgtgtgctagagctgtctggtgtttcattgttgatgccatacatatatacagacttattttacacctatcatcaggtttttttctgacagaattagaattactctgtaatctagattcataagctaagttttaagggaggtattttattttttgctccttgcagacccttcttgatagagttcgataatggtggtaccgtggtgccctctcgtgacagaaggctgaactacagctagaacatcgcgagcaggaaggtgggagggagaggctgtggcccaagcccaccttacagagctttctggaactctgggtggcaaagcggacattctcagtattcccagggacattgatgggctcaagacagaaatcgttatctcttactgtgctgaaaagagagttctatatcagaagaaaaaggtcattttaatttttattctttgaccactggaaaatcagagacctaaatgagggaaaaatggatccagactacttgttcaagtctttgtacccctctttaaatctttattagcattttttcatggaaataaatttctataacattcgaaatta

SEQ ID NO: 233735 - DNA, 414 bp, Homo sapiens
agtcttattccctaagggattcttttttcatttataatctaatttggtcttttaaattgtggaaaacagttatgtagtttcgatatataactagataccttcagaaacatatgtccattctagtccccatccttcatcttccctctgtggcttctgttaaacatggtagacaattgccctatgcagctatacaaacttgtattaattaaaattaaaaattcagttccttaattatattagtcataagtgctcaatagcacatgtagctagtggttaccatattgtaaaattcaggttatataatatttctatcattacagaaagttctattggacagtacttccttaggaaagcactaaaaattagtgcaaagaggtatagctcatacataaattttacaattaaaaaaaaaaa

SEQ ID NO: 233736 - DNA, 528 bp, Homo sapiens
tcagaatgtcattgtgccctctttagtgacaatcttggagcctgagaccacatgaaagagactgtgagttactttcatttccagtgcctggcacataaggaattcttaatgaatggtgaatagtgaaatgaataaatagatgataatgagagaccacacagtaggacaggtgataaaaaggatggagtaatgaacaaatgaagaccaatggtgaaataatagatttcagtataacaattaccaaacatgacttagaattaacgttttgccttgatgacatggaaatcttaaataaatttctctctggtcattctatgtcatttacttaaaatgggaaaagacatgggggactgctggtttgaggtatgtgtgcagaggtcccatgtgcacccagcacacacacacgtgcttacacacacagccatccagggacgcagctgccacactaaatattgattagcaacaggagttcaagaccagcctgcacaatatagcaagaccctgtttctattttaaaaattaaacaaa

SEQ ID NO: 233737 - DNA, 313 bp, Homo sapiens
aggtgactggcccagggccaggagacagagggaccagaggagtagggaccagaggcccaggccccactgtgcccctctagccgtgtgacctgaccactgctgagtggcccccttgctcagcctctgctggggagatgcagccaggcttgcggaatgctgctctggcatggacacccgtgggggcagggggctggctctgttggcaggaggctgtaaaggaaggctgccaggctgagcaggcagcagggtggggaccacggggcactagacctggcaaggtctggatggtgactgggccaccattgtagaggag

SEQ ID NO: 233738 - DNA, 254 bp, Homo sapiens
cccagaaaaacatatagtactacatataaattatttggtgtatgctagtaccacatataaattgcttggagtattactgctttctgagttattgatgttctcttatggttatggatgattgggtgttaggaagtgaaatacacacggtgcagattacacttatggttaaaagcaaggaaagcatcctggagctgtagaaagagcattacatagttaaaggatcttgtcaggcttcgtgtcatttgaaaactgag

SEQ ID NO: 233739 - DNA, 498 bp, Homo sapiens
ataatatggtagcattatttgcaatagcttcaaactggaaagaacccaaatatccattaacagagaaatgaatacattttggtttattaacatggtggaacagtatacaataatgagaatgaatgaactatgcagctacacacaacatggttgaatcttacaaatataattttgaatgagtgaatccaggtacaaaattaaaaaaaatactgcattcttccatttgtatgttgtttaaaaacagattaaagtaaatcatagtttgatatgtgtatagaaagagttatgttgataatctcaaaaatcaggtcagtagctgattcttatcttggaggcttgcaagtgaagactgagtataatcatttctctatttcaattaattatatggtgactacatggacgttccctttacagtagttctataatctagaaattttatgcacttttctatatgccgtgtagaaaaatataagctcattaaagtactttgagggaaaa

SEQ ID NO: 233740 - DNA, 256 bp, Homo sapiens
aaatatcagctgttgggtcccgcatcattgcttgattgaagccctgctccttctctgaggcaaccgtagaaaaatatttcaaaagcaagtgatcaccagacaagaagtctaacacatgtcgtcttcaagagccctagcacaatcagtatcagacaattttcctgtcctaagaaaaatgtctgggggccctgtccatcttttcctgttcctatccagccttccctctcctttttgccgcttggtacccgaatgtaca

SEQ ID NO: 233741 - DNA, 124 bp, Homo sapiens
gcctcggctgatgctttctgagcctgtttgcccatctgtgaaatggactgctgacgcggggcaaaatcatctcagggactgccttggaccttggaattatggattgaaatttttttaaaaattt

SEQ ID NO: 233742 - DNA, 553 bp, Homo sapiens
ctttggggtggttacctttagctgcctccctagattcaggattagggaaatccagtaatattatcaggctatgtgaaatctatggagaggagatctctagcagccttcagaacattgatgtacccaagaataggggcctgtgtcagaaacatacagcagggattactaaggacaaatgtgggaatatataatagatggatgggtaacaataatagtaacatcaatactatcagctaacatttagcaagagtttattaagtaccagccaggcgccgtggctcatgcctgtaaacccagcactttgggatgcctaggcaggcagatcacctgaggtcaggagttcaagaccagcctgcccaacatggcgaaaccccatctctactaaaaatgcaaaaaactggccaggtgtggtggcagatgcctgcggtcccagctccttgggaggctgaggcaggagaatcgcttgaacccaggaggcagaggctgcagcgagccgagatcacgccactgcactctagcctgggcgacaagagcaaaactctgtctcaaatta

SEQ ID NO: 233743 - DNA, 406 bp, Homo sapiens
gccacatgtgcaacttaaaggaagcacagagctctgtttcagacaggtgctcagtgcgagggaaaaaatcctaagagcagggggcaagacttgaggaaaatattgaggtggagtcaatgagagctacagagtcagaaagagaaactaaaattcttcagtgatgagaatgttatccctgcaaggatgattaccaagaaatatcagaaatagagaacctcagtgaaaaccttctggtgtcctctgtaatagatttacttgttttagggatttatacatcagaaatctctagttattgagttactgatggaaaaataacgaggcactagtttgtctgtgattgaggttcagctgcggaacatcatagcagccaaataaaattagaccattttgagtaattcccacccat

SEQ ID NO: 233744 - DNA, 413 bp, Homo sapiens
tccaccttcatatacatattccaaacagctttttagtgtttcactcttaaatgtgaatgggcagcaacttactagatacctgatgaaagcctccagcaagaaaagcagaggagagaaaagggtgggggatgggggaggggagagaaagagagagagagagagaaccaaaagaacttagaggaaaatatagataaggcagaaaacagaagaaatgcactcttctacctcaaagccattgataaaatccttagagagctgagcgaatataccttatatgtgaattaagaaccattaaaaagatactcaaaaaacaacaaaaaagagctcttggaaattaaacatcagatagccaaattaaaaattaaaagcaatagaaaattcagaacttaagaccaattttcagaaagtggagg

SEQ ID NO: 233745 - DNA, 273 bp, Homo sapiens
tgctaaatgtatttatgaataaaattgagacatatagtactgttaaaatatatgtgataatatgaatatgtaaaattatggaaccaatttttaaatgataatgtaaattaaatgactgttagtaaataatgactactggccgggcgcggtggctcacgcctgtaatcccagcactttgggaggccgaggcgggcggatcacgaggtcaggagatcgagaccatcctggctaacacggcgaaaccccgtctctactaaaaatacaaaaaattag

SEQ ID NO: 233746 - DNA, 198 bp, Homo sapiens
cttcttattcattctgattccttgtaatctatttgacttttctttttgaaagacattgacttttgttctaatatttgaaatatttcatatgcctacaacagaggtctaccaggatttctttttcttagatgcctaagtaagttcttgccctttcttatgtctattatcatcttcctttctttcacccttgttttgctg

SEQ ID NO: 233747 - DNA, 355 bp, Homo sapiens
caggctggcattctttgcccagtaccacttaactttattcatgatccattttaggtaaacagtccctgtgccatgccggtatgcttagctattccaaagacagatactctccaggatgggcagctcctatctcagtgtgttacctggaatgcttactgcccagagcagtgattctcaaactcaagagcctcgggttctggcaaggtgccttagggacacaggtgggagcaaggaggggcccagggagacagcaggtggtggcacattgagcctttacctctgcagctttgaattgacctatttttatatttgggtctctgtttaagatttcattgccgtggtagggagagttcca

SEQ ID NO: 233748 - DNA, 1027 bp, Homo sapiens
tagagattttttttctattacctagcatggttcttatgtaaaacatcttgtattctaatttaagctgatagtacgttaattactatatgaagactctaccttttcatttcccaccttttatgttattaatattatactatgcaactatttgtattgggtatccactaaggagttctgtatagtatagttgttattaatacatctcttatttatatttgtatactaattttaatagtaatttaaacattacttttagagtaggagagaatactgtattgactgttcatttaactttactggagagccatatgttttgttattattatttatcatgctcttgtttcacatggaaaaactctttagacatttcttgttaagtcttgtctgatggtgacaaattctcaaattttgtttgtgttaaaatgtacttacctgtttttttattgctgaaatacagctttgcagtttagagtatttttaataagcttttttaaattttattttagcactttcaacatgtcatcccactttctactcacttgcaagtattttgttaagaagtttcctgatagccttacctagaagacccctttgagtttatcctcttgctgctttcaagattcttttcatctttgatatttacaatttgattaatgtgtcttggagtattctcttttaaattgatcctaattgtggcattttgaatttcttgagttcatatcccgcctagaattcgggaagtgtttgtacagtacatatttaaataagcttcctggtcttctttctctcctcttttgggtacactcataattgttatatttatgcatggatgtggtgccacagatcacttttaaccttttcctctttttttttttcccaatcatttgttgttgttgttcctctaattggctaattttcatctgactgctatttgagcttgtcagttctttcttctgcatgatcagctatgctgttgtaactattgaaattttaaatctaatattaaattgtaaatatttaaaattat

SEQ ID NO: 233749 - DNA, 475 bp, Homo sapiens
tatttcctgtctctcccattaaatgataaaatgtttcaggacactgactgtgtctagtctacttctgtattcccagtggcagctacctagaataggacttatcacacagaatgtccatgcatatacacacacacaaatactgaggcatattcttttttggacatatctgtgggggcttgtggaaaggagcggtggtggtggtagtgactttttcccaaatgatttctttacaatttctgaaatttacaattcacaggcttgaaaacataggcctcctgtaactgtgcttcctttaagacatatttcaattgagaccataaccaaacacctggaagatggtaactcttggttaaagcaagatatgaatgaatgacaagggtttattattaaacataagaaacctcatttctttggaggagaagagcaatgcaagggatgaggatgggaggatggcaacttgagaaaacaatattct

SEQ ID NO: 233750 - DNA, 312 bp, Homo sapiens
tgaagaggttagatggatttggggggttgggagttaggtagctgttatggacatagctgctgaggaaacaggtaaattaggacggcactgcgggtactctgtgttccgcctgctcaagttctagacttctggtgtccatagcaacccagcagaaaacatctgcctatgctcagagccactgctatttctacaaatctacaaggcccagactgaggtgatgaccgggccaatctctggaatagtgtcagacaattagatactctttcctgtcttcaggagcccatctggaataaagctacttatcaagtttca

SEQ ID NO: 233751 - DNA, 252 bp, Homo sapiens
caattttgtttcccctccaaatccccatcattttaacttgttctgaaatgtgccacgtgaggtatcctgtattatgtgcccgcatctgctgctccatacaaaccgatgctgctgtcttagaaataataggcccccttttattccctaatagacactgccattatgtgagatcatgttcaagctttaaatttttccactctgtatttctgttttcagtttatcttatggaataaatggtccattatttcagta

SEQ ID NO: 233752 - DNA, 572 bp, Homo sapiens
tgattccactacttgaaaactgattgcatcagaatggaagtatagtaaatagagggcacctgttacttaggatgtgcttcattgagagagtggagccttgtgcttaagtgattcagatactaaatttctattgggatggttggctgaaattgtccttttaagaaacaggttataaagatagctggcttaggtggacagtttattattttttggtgggttatgtattctgtatacaggaaggggttagtagtttgggagtcatgaaattaagtaatgttcaaccgtgttaacttgggagcagtggttagcaaacctgattatttgacagataaaaaatcttgggtcctattccagacttactaaattagaatcttttaggcatcaatcctaggaatttgtatttttaagttcttctgaatactttggatgtctggtgggcaactttttgggagttactgccttagaagactatccagatagttgtgaccaaagacctatttgaaatgggtgtgagaaaggaatagcttaaacttgagaaggaaatgaggactactgtgcttttttttttcaaa

SEQ ID NO: 233753 - DNA, 379 bp, Homo sapiens
cttttgtaaattttggaagcgtttatgaaagattgttgctacgtctattctaaacatttttaaaatttaccagtgaagccatctgaaattgggcttttctttttttggaaagtattttttgctgataactcaccatctttacttgttctagatctatttagatttcctatttcttcttgagatagaagcccattgttccctctccagtgactactggtcttctggttttcatgaatatcttgattgaccatttgttggtttttatggatagagggctggggagagggttctgagaattgagcaagttacaccaccccaaaggttgttgtttttactaagatgtaactgtttttctcgaataaattctcctcagattttt

SEQ ID NO: 233754 - DNA, 252 bp, Homo sapiens
gagtggggctggtcttctccgaatcatcatgaaggacagggaattattttgcctggagacaggtgactgggtgaggctagggtgatgatttctttttcagctctctcaaggccttctggccccttattgtatgtttcaggccccatagatagtgctgcaagcctctgttagtaattcataggcagaaacaaggcaaagtcaaacaataatagggaagtaaattattgtctcactagaggcaaaacatctgct

SEQ ID NO: 233755 - DNA, 338 bp, Homo sapiens
agatttcccttaaggagttaaggctgcagttacaatatttaaagtttggttttaaagataagtaaaaacaaaacaaaaaattttttaaagactgaaatgtatggggcaataaggaactaaaaaacctctcatgttgacaaatggctatataaataatctgcttctcaacagtaaaccagtcagtaaaccagtaactgtgaaaaaaagtccactgaaagaagcattgctgctatatgttatgttgtctacatgtctgacataagccttggagccctacatgtatggctgaggtttttgttgtttgctgttgatttaaggaaagaaagccaactataaaa

SEQ ID NO: 233756 - DNA, 197 bp, Homo sapiens
tgtatattcacttcccagagctttttaggatattaaccagtctctaacacacagtaggctttggtccaactagtgtaaaacatggtgcataaattcaccagagataaagaaaatattaatacacgagtagctaaccattggtggcaagtgacaggagagggaaggtttacagatttaggtaaagtgttttatttatc

SEQ ID NO: 233757 - DNA, 485 bp, Homo sapiens
cagcacagatagagcaagtttccatctttgcggaaagctccattataccgaattagatgaatctgtctagactgataactgacaaatggggctacaaggatgtgggaagggactttatactttataaatcacattgttgttgttgttgtttttaacaattgcttttgttattttattttattatttttgtaattttacaagagaagaagacggcttgtacttgtgtcaggtgtttattccttattaaatcacatcctgcattgtttctcaaactggggaaatgacaaagatgaagagaaggctggaagaaaaagagatgggatggagtagaagcgtgaccaggaggcgggtgagaaggaacattacaaagtttttcacctcaaataaaacttggatttgaaacgttaaacatccttctagttatcatccacaggactgagtgaaatgaaatttcccaaaattataaataaatggaacaaagtttg

SEQ ID NO: 233758 - DNA, 146 bp, Homo sapiens
aaaaaaagaacaagggagggaggcatcagctatgtcaaacacaaacagctactggagtaaaatgaggacgagaactgactgggggatttgcagatgctgaggccatgggtgacacagacaaatgaagaaatgaagttggttactcc

SEQ ID NO: 233759 - DNA, 417 bp, Homo sapiens
tgtttatttctgttcagagcattcttattttctttaaggaatatatcagttacaaatctttgtagaaagttcagctgtattggtttggagaagtttatgtgtcagttttttttttgagtcaagaagaaaggaaaaactcaactactgttatgtttatatgaggacaaaaaaaaaaaaaggaagttgataagaaaatacttagcatgacagtctttaaaatccagcatctgaatttttaattcctcactcccctccttttttaagaaacagtacaggaaagatggtcttattatccttgttcgcatttcactgttttcaccccactcaaccaggacgaagtcattcctcaaagcaagtaggaacaaaacataatctcttaagatatttttaagaggacatgctgacttggtctttgta

SEQ ID NO: 233760 - DNA, 968 bp, Homo sapiens
gatagtatcattattaggctaatgggcatttttgactccttaagagttacttggctcagtcagtctgctggttgaggctttggatttgctgattgcagcccatgggtatttgcatacgccttcccttctcccaaggcctttctcccccatcagtgcttgtcattgctgaattcattgcacccctgtccctcacacccactcacatgaccttctcatactaatgccttttcacacttgagcaaggtttctccttaatgaagacaagatgcattaaacttcccaattcagaaaattggagggtaatgatatgtatgaaataaagtagtttctttttaagagaactcagagctgtcatccattgattcagggaatgaatgtggtttttggtgtgctgtattctcccctcttccccagggtggtagttagtttcttttttctttcctttttttttttttttaagttctgggatacgtgcaaggtggtagtttctacagtgagatagtgacttgataatctgagaaatatgcatcttacccacacacatacccacaccctaaatggaggtactacagtatattttgcacttcagtaaatgctcagcacctactgtgtgcagagtgatatatattgaattttgtgtgcggtgctgtcaatccttcctcttctctgatttctgagacacaatctggctcctgtgccttgtgattctgatgaggccctctcaatttctcaccaaacttccttttgtcttgcttgataaaagttggcattcctcaaatctctatctctgacttgctttctttttatactatggattttctctgtataatctttcatagtgacttcaccatcccccagtgggtgattccaacatctgcattttcaagccaggaaagcactgtagctcccccaaaagcagaaatattgtgtatattttgaagatatttgctccaagatggctcacagga

SEQ ID NO: 233761 - DNA, 370 bp, Homo sapiens
tagttaagacggggtttcaccatcttggccaggctggtctcaaactcctgacctaaggtgatccacccgcctcagcctcccaaagtgctgggattacaggcgtgagccaccgcgcccggccaggttcagtactgttctagtttctaagtgcatacatctctgcaataaattccttcatgcttaaaatacttccagtggtttctgtttcttgcaccaaactctgactggtacagtcagtaggatttcagagaaaaattatatatatatagtgaaacattctacctaggcctcatgttctaattgaggttattctaatcgccctccagtgaccctggcctgcccttcgctctgatcccaaccttggccccag

SEQ ID NO: 233762 - DNA, 510 bp, Homo sapiens
acgattaaagtgaaaattcgattgtgtcatttcttggctcaaaacttctccagttccttgtcattccttgacttaaaacctctcccatttcactaaaagcccaagttattacagaggtctaaaatatctacttgttacgtccctattcttctcctaactcctgttgcttcagcctcctgcccttattgttcactctctttggaatttcttcccccagatgtctgtatgttattgctcccttattggcttaatttctgctcattctcttaagtgtcagttgtctcagtgaagtttccctgattactctatttaaaaacataatccaatttaaaacattaaaatcataatcctaatggccaggtgcagagtggcttatgcttgtagttctagcactttgggaggctgaggcaggaggatcatttgagcccaggagtttgaagatacagtgagctatgatcgcaccactgcactccagcctatgtgatagagtgagaccctgtctcaaaaaaa

SEQ ID NO: 233763 - DNA, 247 bp, Homo sapiens
gttctggttacatgcatgtcacaaagttatatctgtggcagctagctgtgtagcctggggctgaattaataaggagtacattgtagaatcaagttaatgactgcaactctaagacaggtggcttgggagtcagacagaaccaagttcaaatcctgacttattcgctctgtgtctttaggcagtgactcctcagaccctccgtgccctctgctcacccttcctcctgtctcacccctctgcggttcac

SEQ ID NO: 233764 - DNA, 359 bp, Homo sapiens
ctcctccttgtgttaaatccaggtagacttcctagcggcagcctgtgtccagcaggaaaagctctgcccttttgctaaggaggttgggaagggcagaggaagcccttgtttaggtggccttgacatggctgctgtggggttttgtcatttgccagacgacatcagatttccagagctcatctctgggctctgagttttgaggctgctgtgtggtcctgggaggcagaacttcggcatcaaagttttcacagcctctgatggtcttgccactctgcgggctgagccatgtgtgaccaggtcatgcccttgtgagaatcccagccttgaacaagtgtgaagatgcacagatatggagaaaa

SEQ ID NO: 233765 - DNA, 868 bp, Homo sapiens
agcagctccaggagttctcacggtgacagcccccctcactcacagacaccatgtgatattaatagggcttagacacaaagcactgaattcccaaagcattgaagagaaagacagctctcagtctgagtaaaaccgtattgagagaagaaaagaggttgaaagaatcttaaagacaaattcagattacatgtaacattggtcaaattgaccagaaaatattcttccaaagaagttcttctctaaacaccaaaagtgcacagctactctcagcatgagaaatacaagtattatgagaaagagggcttattctgagcagaatttccatctctgctgctctcccatctgccggccgttggattgggaatctatactggaacacacctgacaacctccaccagcactttttgatgaagaattggaattcactctattcacatagtagaattatatcagagattgcaagatagctaactgaagagctactatgattcttgggtggccacatcacctgcatttatttgtccgggaatagtggcattcctaatttagtaaaataaaagaatagactgtaaaattatgctgacctataattatacctataggatcaattaataaacatgtcaggttaatatctactgtagcaatgtggtagtaaattttctttgggtattaaatataaatgtgtacatataaataattttggtatattagtcataatgtatatattttaaaaattatctgtaagcttaattacaatattttataatactttatatttcaaacaaattaatgcttatattaaagttatataaacttaattcaaacaaattaatacttataataaagttatataaacttaaagttataa

SEQ ID NO: 233766 - DNA, 216 bp, Homo sapiens
aggtaggcaatcattgtagctaaagcatgtgggtagatgtaatacccaatggtagacagaggtcccagccttgatgaaggtagctggaggagctctcagttagggcatcatctaatttaattcttaataaatgttagcttttaagatgtgaagaagtctggatcatcaggacttaaagaggaaatacatggtagaaatgggaggtaccaactgtaa

SEQ ID NO: 233767 - DNA, 237 bp, Homo sapiens
caccccatgacccatacctcctcttccccacctccctgggccagcctgccttccttctccctcctcctccttcctgggggaaggaagccccaccttctgtgcgcagtcagctcctaagcacgctcccgcttcccctggcctccccatttaaaaagggaggcaaaggatgtcaccactgtcactacactcatggctttgctctgggaagtcctgcaaataaaatgaaagttctccaac

SEQ ID NO: 233768 - DNA, 774 bp, Homo sapiens
caggcacgagcttgaactcctgacctcaggtcatctgcctgtcttggccttccacagtgctaggattacaggcctgagccactgcccctagccctcttctttttttttaattaaaaaaaaaattttttttttgtttgagacagagtctcactgtcacacaggctggagtgcagtggcacaatctcggttcactgcaacctctgccttccaggttcaagtgattcttgtgcctcagcctcccaagttgctgggattataggcacccaccatcacgcctggctaacttttgtatttttaacagagatgaggtttcaccatgttgaccaagctggtctcaaacttctgacctcaggtgatctgcctgcctcagcgtccccaagtgctgggattataggctgagccaccatgcccagccaaccctcttctatttaaaaactcttttaaacaaaaacaaaaatacatagaaaacaaagccaaaccaataaaccaaaaaaactgtcttaaaatttccactgctctcaggataaaattgaatgcccctgccagcctggccctcctgccttcccagttgcctttcctgctactctccccacagccttgagcttcatgccccttaggcaagtggtgtgcaaaaccagggggaaacacagtggtcttatctggagcaactggagaaagaatacattgtatttagtggggaacaaacatggacacattataaggcagcatgcaaactcccaatcataaaaaaaattcaacagagaattcaaattg

SEQ ID NO: 233769 - DNA, 458 bp, Homo sapiens
gctttgcattctcagtgccacgtacagtgcctggaatacaggagggtggcctaaatgttggctgaatgcatgaatggtcatttcttgcagcctcttttcattaccctgtctcatcagctttcttatcagaataagtgcccaagagtgccaaactgtttcagacccttaatcaatttagttctgattctgaccgtgacaacatgatgttcagcacggtaggaatgactgccatctctgaaggagtcttaagattctgtagaatcaatgaaagattctatgttctaaagcctttatctttcaggaaagaaattacaaaatagtttcattgtccagtcatattcactatgagttataagaggaaacattctatctagaattagaaataccatttgacccagccatcccattactgggtatgtacccaaaggactataaatcatgctgctataaagacacat

SEQ ID NO: 233770 - DNA, 243 bp, Homo sapiens
taggaaaaaaaaaaaactagctaagcaactagatttggttcaagataagaactatctaccccatcccagattgtgaacaagaaacaggatgctatagcagtctaccgtaaacagggaaatttcttggtatgctcttgtatattctctgaactccaaaaaaactagctaagagactagatttggttcaagataagaacaactagatttggtagcgaggtaagaatcactggacactttagaaat

SEQ ID NO: 233771 - DNA, 412 bp, Homo sapiens
ttggttgttaataaatcacatcctagtctttcagcacttccacaagcagatgacattttcagttttctagctcttgtagttttaacactgcaacatcaatgatggatatgtccagaatcagttaaaaagaccgtcaaattattttattccatctatttgttcactctcttggtcccaagtgtattggaatgattaccttttggcattctctgctattgtgcgttggggtgctctcgattgtctccgtgttttgtgggctggttgggagagggagcttgggaaggatgtaccactgtcgggagattgtgaatcactgggatgcctccaaggatgatcccttccgtggctgcagggagtgctcctggagccacacccacgatgcctggcagatacctgtatgtggcaccactga

SEQ ID NO: 233772 - DNA, 452 bp, Homo sapiens
aatggagacattaaggtatactttgtataggtggaatgcaggattgtaagtctacagtttgttaaattctgataaatgtatacccttacataacttacaccatcatcaagatacagaatatttccatgacctcagaaagttctgtgtttctttccagtcaatcttgcctcacctatttgaattttcatcactataggttaattgtgcctgctctagaatgttatgtaaatggaatcatataagatgaacctttgtgccaggcttctttcactcagcatcatgtttttgaaaatcatccatgctgtcgcatgtattggtagttcattattgcaaaattgtattcaattgtatgaatgaagcaattgttcatcctttctcctgatgttggacacatgggtgtttcgagtttggggccataataaattaagctgcaattaacattcttgtacaaa

SEQ ID NO: 233773 - DNA, 375 bp, Homo sapiens
atagaatacagcagtcagctcagattcctaaacaagcccactaaaatagactgatcacaaacaaacctagactacaaagactagaataaatatctaatttgttaatgagtagacagagatgcatgtccacaaataataggaatatactaggaaaaatggcctcaccaaaaggacaaagcaaggtcctaacaactgatcctaaaccatgtagatgaatgatctggtggacaaagaattcaaaatagttctttgagtaaaactcagtgaacttctagaaaacagaaacaattcagaaatttatcagagaaatccaacagagaaattgggaatcatataaaaaatcaaatagaaatcctggagttgaaggatataata

SEQ ID NO: 233774 - DNA, 384 bp, Homo sapiens
ggactgaatttcattcccccaaaatttatattttgaaggcttaacccttaatgtgactatatttggaaatagtgcctgtgaagaggtgataaaggttaaatgaggtcacaggctggggtcctacttcactaggactggtgtcctttaaagaagaggacaagatgccagatgctctcgttcatgtgccccctttctctctctctctctctcgctggttcactctctctctctctcctcctgccccccatgtgaggatataaggagaaggcagccatctgccagccaggaagagagcccacaccagaacttgaccatgctgacaccctaatcttggatttctagcctccagagttatgagaaaataaatttctgttatttaaacca

SEQ ID NO: 233775 - DNA, 448 bp, Homo sapiens
ccagtgatcctcttgcctctgcctcccaaaactactgagattacaggcatgagccaacacacctggcctaagctacattttaatcaagtcagcatagttatccatcactccaaatgagcatgtccttgtattagtgtccatgcattgtctatgatgtagatggagaggtatagcatattatcaaaacccacctcaaatcctgtgagggatgtgaatcaataaattaatgagtttgttctattgataccaaatggagagagatgagtggagattgatcactatcagttatgtcaaagaggtaagttttaaaccagtgtttgaagttatgtgagagaaaccaaaccaaacaaggtaattaaacttcaaattaactgcttttaattggtcacgtgtgtacatatacatgtttatgagtattttacatttctttgtataataaatcccctga

SEQ ID NO: 233776 - DNA, 470 bp, Homo sapiens
gagatggagttttgctcttgttgcccaggctagagtgcaatggtgcgatcttggcttaccgcagcctctgcctcctgggttcaagggattctcctgcctcagccttcctgagtagctgggattacaggcatgcaccaccacacccggctaattttgtatttttagtagagacgggatttctccatgttggtcaggctgatctcgaactcccaacctcagatgatcggcccgcctcggcctcccaaagtgctgggattacaggcgtgagccaccgctcccggccccctgttaattgttattatgaagttgatggagattacattctattgttgagttagagatctatcagggagataaagcagtatcaccctgtactgttttggtgaccatgtgtggaatctgagattttctttttcttttcttttttttttttttttttttttacatttttaaagagttgggggaataaa

SEQ ID NO: 233777 - DNA, 478 bp, Homo sapiens
gagtctcactgtcgctcaggctggagtgcagtggcacgattccagctcactgcaacctctgcctactgggttcaagtgattctcctgcctcagcctccagagtagctgggaatacaggaatacagggcccgccaccacacccggctaatttttgttgtatttttagtagagacagggtttcaccatgtttcccaggctgatttcgaactcctgacctcaagtgatcaacctgcctcagcctcccaaagggctgggattacagacatgagccaccatgcccagcctctatcactttatttcttatcttggctaacataggagcacctcagtcatttaaaagactaaaatttcccttgtgtaacattttatccctttcctggtttccttccattctattattcagaatggaattcagccttacttaagcacttccaataaaagatcaccgttatacattaggctgccatttattttctac

SEQ ID NO: 233778 - DNA, 368 bp, Homo sapiens
cgttcagctgaaatttatacttccttaaattatgaatgtagtaaaccaaccacagcagtattaccagtatataagattttgtcattaatagaaacatacatttactattattattattattattatactttaagttctgggatacatgcgcagaacgtgcagttttgttacataggtatacacgtggtatggtggtttgctgcacccatcaacccgtcatctacattaggtatttctcctaatgctatccctcccctagccccaccccgacaggtcccagtgtgtgatgttcctttccctgtgtccatgtgttctcattgtttagctcccacttatgagtgagaacatgtggtgtttggttttctgtt

SEQ ID NO: 233779 - DNA, 441 bp, Homo sapiens
acagtcaatcttggcttcttgctaagtaaatattttttagtaaaaattgtcactcttagttcattgaaattgattcagtattctattaatttctgtgttgaatcttggaatggaaagaaacttccaggtgattctaatgtgcagccaaggttgagaaccactggtctagtgaaaagtcatgcatccaaagcacctaaatgtagggactacgtgtaaaaggcattcacaaatgaaaaacatcaaataattgtgattttacattttaaaaaaagaattattcttcgtctgaatatatttatcaccacatgaatgatatacattactaagtattgcaggcgtgtccaaccttttggctgcactgggccacattggaagaagaattgtcttgggccacacataaaatacactaacactaacaatagctgatgacctaaaaaaaaa

SEQ ID NO: 233780 - DNA, 422 bp, Homo sapiens
tcagaggctggcaccatgctcttggacctcctagcctccagaactatgagccaaataaatctcttttctttctgaattactcagtttgtggtattctgttatagcagcagaaagcagatgaagacaaatacttttattataaaatttcacactaactgtacatggcaagaattagaaaactatatgaatctgtaaaaatacttccttggaaatcaatgaatatttggatggaggaatatgtattcatatttttggctttgttcaaaaccaaatgatttgttaaaacatatcattgaaatgtctgtataccaattttgggaagcatgaaacctttctctgtgattggccaactttccatgtacccttaaaacccaaaaatactatcaattatgtcaataataaatatttatatttctgaagta

SEQ ID NO: 233781 - DNA, 339 bp, Homo sapiens
caaactgttcaatggattttttaaattaacaagtaaaagttatgtctatttatggtgtacaacacaatgtttttatatatgtatacaactgtggaatggataaattcaagctattaaacacatgcattgtttcacattttcttgtggtgagaacacaaaatcttttagcaattttcaatatgcaatatattattactaactctagtcactgtaatgtacaatagatgtctttaagttattcctcctaactgaaattttgtgtcctttcactaacatcttcccaatcccccaacctccagcctcttgtaaccatcattgtactctctttctataagttca

SEQ ID NO: 233782 - DNA, 751 bp, Homo sapiens
gaagggagagaaattgtacctggcctcctgaaagacgcagcctctgaaatgaatattgaagactggggaggatttaaacaggtagagacggatggaatggacacagggctcgggagcagcgccagcccgacatcggcggaggagcaccggaagttctgcagcactggctttctttgctcttccacctatgcaagctccttctctcttgtggcttgccgagcctggttagctctgagaccggaagttctgaagtcagctggcatcctacatctgtgcaacctacttctctccccatcccaccacagaaaccagagcctcgaggcttttggcttgggtgctgccttcacagtttaggttttggtaagaagaaagcttatcttcatgtcatgagaaagaaaaaaaaatgtatctttacgtaacgagctgaaagaacaaaacaagtatacctaagccaagtacatgctatctttatttctttatttccacactgaaatttagtcagggataaaacttacttttttaatcacacgaagtttgaaaaataggaagtactatgggaaacacctaatgcatcaaaacccctgtgcattttatctttgtcttatgtttgctggattttaatcttagtaggtttcctgttgcaacaatacaaaaacagataaagaaaaaacttaataacctttcctaccacaaatgtgaacagcccgtgttcttgttggtaggtacagatacagatatatgagattatcgt

SEQ ID NO: 233783 - DNA, 2596 bp, Homo sapiens
agcaggaggagagctggcgggaagacatgcaccccttgaagacccagagagaggccgtctgtctaccgcgtagcagttacatcagactgagacacttcctgtttacaggagactataaaattcctgccccgtgctcatttggggctgacgccattttaggcctcagcccatctgcacccaggcgctcactgaaacagtgtgttgctccacaccgccttgttttgcttgttggcgcgctctcagggttccgaccaatccaagagccttgcagaaagcattaacgtgcttttctctttggcagagtttttctttgctctgatcttggagacatccctctgcctagtggaaacataaggaatacagaaagaatgcaaggagatagaccaacgtgagattctccttcatgcactcaagagaaagatgttgcaggaagagctagtctttcaggctgggctggtgacctgagaaagaatgtccagcttttcttctccacttggcatatcaagagccaggcgtggaagactaaaacaggaaatgtttataaaaactgttcagcggttcgccaacaagaagtggtaaagtagcaaaaatggggatggagatgccaggaggaaagatgccaggggtaaagtgggaaaatgggaacctgaagccaggaggtcaagccaagccaacaggtgttctgtttttcaatgaggaggtggggcacaggatggatggaaactttccacagtcacagaactaataagtggtgctgaggactcaaacccggggaagcccactctagaacccatgctggtcatccatatccccaaggccctggtcagaacacagctaagcagatggcttgggtcatcaggacgtccattacatccaaaggaagacagcctgtgacgtttcaaaagcaaaagtcccctaccagccagtgaagctacctgatttctcagtatcttacgcccagtgacacgatctaccctcaaaacttaaaaaaaaaagggaaacataaacacataacagcagcagcaataattaaagatgagatgagaacaattaagaaaaaaggaaaggtctcctgtgactgttttatttttagggaaacagagaggaagaagaatgatttttcttttgatgactctatatccaactctgaggtttgattaaagaaatgaccttgaaccacagcaaagaaaaataaaagacaatttccagtaagtatgccagttcgaattaatgatttactttttatttttaaactgaattcagcagagatttacatgcattacgatgattaacatctgaaatttgaccttgaaataatctttacattgtaaattcttaatgatcaaaacaaggttctcagtgattaaaacatattagtaattaattattaaaggagaataattgcaaatacaacattcctaaaatctcaaggcttttaaagcatttgtacaaatgactggacattttttaaatttgaaaaaaaaaaaaagccctccatctgattctcattttcattgtcagtgcaacaacaaaaaaggtatgcacttctcttctcattttccactgtctcgcaagctagaaattctcacgactacctttgatcccatcaaagccaaagaaagaaaagaaaattgttctgtacagatatatgacattaaaaaataatcccaaaaacttcttctctaaggttaataaaaggtcggcagttttgatcacttttaaaaatcaatttataaataatttagtcacttgtagatgggacatgatcttcctgctatccctaactactctgatgccaaactggtcatagcacaagtggggctgcatagcaaactgatccgcccaaataatttctactgggttataagattttaagaaataaccatgtctcacaccatagagaaaaacaattcaaccagatatctgtcccatgtattgtaggtactctctgtcaaagctgtaactctttttaacttggatggtctcacctagagtagatttcttgttgacagaaggaaccccagaatgtgtacaggccagggccgattgtgacttccattggccaaggttgtcccagggccaggacaagggccacacaggtgcactagcctcccaagggctgagcatgtgtgctcaaccatctggaggaagataaaagtgcatcccctaaattctgcccaatccagtctcttgtccatggagtttcattagaagtgacaaagttgaatgaagaaaaacaaaaggcaactcgccagaacatttcatctctgtcatgttctgcattgtcaaacattactttttgcaatttgctctttgttgatctttatctttttttccaatataaaggtgcaatatttgaaatggtgcctgtattaattttctatcactgcataacaaatgaccataaacctagttatcttagagcagtacaaatttataatctcacagtttctgtaggccaggagcccagcacatgttaagtggattctctgctcagggtctcacaaggctgaaatcaatttgctagccagattcatcttcatgtggaggttcaactgggaaaagtgccatcttcaagttccatcaggtcaatggc

SEQ ID NO: 233784 - DNA, 838 bp, Homo sapiens
agcaggaggagagctggcgggaagacatgcaccccttgaagacccagagagaggccgtctgtctaccgcgtagcagttacatcagactgagacacttcctgtttacaggagactataaaattcctgccccgtgctcatttggggctgacgccattttaggcctcagcccatctgcacccaggcgctcactgaaacagtgtgttgctccacaccgccttgttttgcttgttggcgcgctctcagggttccgaccaatccaagagccttgcagaaagcattaacgtgcttttctctttggcagagtttttctttgctctgatcttggagacatccctctgcctagtggaaacataaggaatacagaaagaatgcaaggagatagaccaacgtgagattctccttcatgcactcaagagaaagatgttgcaggaagagctagtctttcaggctgggctggtgacctgagaaagaatgtccagcttttcttctccacttggcatatcaagagccaggcgtggaagactaaaacaggaaatgtttataaaaactgttcagcggttcgccaacaagaagtggtaaagtagcaaaaatggggatggagatgccaggaggaaagatgccaggggtaaagtgggaaaatgggaacctgaagccaggaggtcaagccaagccaacaggtgttctgtttttcagtgagtatatcctgtctttccccatgtgtcagtttatagaaagagcaacctaacaggctgccccatataccaatccagagcttggacatgtcctagcaaattcgacagcccacaaagcagtctgggctgggggcggtggcacgcct

SEQ ID NO: 233785 - DNA, 408 bp, Homo sapiens
tagtattataattatttcactcgtcttgctccaaaaagagattggagtctacttgtaaaatagaacagcattttaaaaaatcagtcagaaaattgattgcaaggctttctgagttctggatagaatttcttgtggcagtttaagtggcttctgattagcctccggtttctgtcaaggtttggttacaggaagagaacgtactgatcacatgacctaagtgacctcgcctttgttacagttgttattgatcatttcttaaattaatatattggcgttttggtttcaaaaaatgtaaacggggaaatacatgggcaggaaaatatgagcaagctgagggaaaaggtgccattgtagtgcagtgctcccaatgccagtgcccaggccagaagcatctgaaagcttctaaag

SEQ ID NO: 233786 - DNA, 398 bp, Homo sapiens
ctatcttcacaacaacaatcatctacattggttttgacaatgtacaaagtacttccatgtgtattatttcgtttatctttaccacaacctttgaagtaggaagacatgatgatccccattttactgcctaggacagagagacatcaggaggttaactgacttgttcactgagaaagcggaggagcacagactataactccaacagttcgaccccatactgcatacgcatcagggccttaatcatgagactgtatgacccttctgagcctgggattcacttgcaactgggtattccctcttctacctcaggccccctataccttttcaaaaagtgtccttcactgtaaataatcttcctggtggtgaccctaaaggatctgacaacctggatctatgta

SEQ ID NO: 233787 - DNA, 473 bp, Homo sapiens
cagtgatttttttttttcgtaatttctagaactgttaaaagaaggctttaacacaatatcttcttacacaattgaataaggaaagtgggcctgctcctgagcattgtaggaggtaaaactctatgttttgctcctgattactttggagctttttctcactcagctctgtctgcctttctattgcctttatttgtttacatgcctaactttatctttccagacttgaactcttcaattgtgtagctattacccatatgaggccattgagcatccaaactacagctagtccaaattgagctgtgaataccaaatttcaaagacttagcacaaaactagaatgcaaagtagctcagtgactcatattaattatgtgttgagaggctaatatgctgggttattttttcattcattgtgtgatattgggttacttaaacatttggggtataataaataggttaatttaaatatattgt

SEQ ID NO: 233788 - DNA, 2476 bp, Homo sapiens
  misc_feature (2251)..(2251): n is a, c, g, or t
ctgacctccgaggttttccctgcatttttgtcttcctcttagcgggcgcttggcttccgtcactgtctggtgcagccgtgcccattcttcaattcgaggcttggccacctcctctgagaagccctcttacatgatcccactcaaattacattttctcctctctgctcccatcatgggcatcgcccgcttaccttcagcctttggaaatgccaagacaatccgcaacgacaactcaagccgctttgggaagtacattgacatctactttaaccccagcggggtgatcgagggcgcgcgcatcgagcaatttctcctggagaagtcccgggtctgccggcaggtgaggcctcccccttcccaggtcgggagttgagggaatgggggaggtttccaagaggggcccctttcccactctcacctctcctcccctcttccccaagggcctcccagaacccacaggcctcactggataatgagggcccttccccagtattccaggacagcaaatgatagaaatttttccattttgagcagggcttggtggcgcacgcctctaatcccagcacttatgggaggccaaagcgggtgggttacttgaggccaggagtttgagatcagcctggccaacatgacaaaaccctgcctctacaaaaaatatgaaaaaaaaattagctaggcagtggcacacgcctgtaatcccagctacttgggaagctgaggcatgagaattgcttgagcctaggaggcagaggttgcagtgagctgagattgcaccactgcactccagcctgggcaacagagtgaaactctgtctcaaaaaagacttttctccattttgaattttccattcacatacatttcttctttctttggtgcctaccattcctcatccctactagaattaattctgagactaggctagttgggtgggccgtatcttcaggtatgttaggggacatggcagaaagacacagatgacagtatcccaaataccacatggccaggaagtacagtggcatgtggcctgtgttgtcacaccaggccctgtgctcagggggccccatgcttggtttcatgctctgctattgccaccttgaaattcttactagctttttagcaagagggcccatggtttccttttgcactgggcgatcatgtagccagtcccaaatggtaggaatcccaacacatggcacccacaacagcagaattaatgcacctgtgtgtgtgtgtgagtgtaagggggtgctctcgtatgatggcataacacctaacacatgcatgtgtgcaaatgagtgcacacacacagaaggggtccagaggggagaatgccaccaacagaggggctgtggctgtgtgagagggacagatgcctccgcactgtgacaagctgagaaggaaggtcacatttagtgaccctccgacctggtgctatacttttcctgttttatctcatttgaccttcacaaccatgagaggtaggtctctttatccctattgtacagatgagaaaactgagtccagttaagttcggccccttgtccagggtcacagagccagcagatggcagagtctctctgccctgtctggaagctcctatttcttgatatagtggttgctgagttcatagaacttgtcacccaaaatgataccctgaaatgggcaggaaatttctaaagcaggtgagaaacaaggcctgcccaagaaaagagaaagaatttaaaattacggcatatctatactacagaggaggcggtctgtccatgtcaatgtaaaggatcaccaagagatatgtttaggtgaaaaaaaaggaagtagcagaaccacaaatatgttttgtgtaaaaaaaaagaaacaaagaaaagaaaagagataactatttatagatatactataagtaaatgtttttttaaaaacatgtctaggttctggggcggggaggaggggatttaagaaaggggaaggcaggatggaaaggagctctcatttttttgtttttgatcctcccacctcagccttttgagtagctgagactagaggtgtttaccaccacatccagctaattttcttattttttgtagaggtgaggtctcactatattgcccaggctgctctcaaactcctgagctcaagtaatcttcccgcctcagcctcccaaaactgctgggattacagcccaactgagactcccatcttttaacactactgcatatgcttcagattgtttgatttgtatgagaatgcatttatnaatagtgttttaaaaaatacagaaggcaccctaggcaacatggcaaaaccccatctctacaaaaaatacaaaacttagccggacgtggtggtgtgtgcctgtgatcttagctacttggtaggctgaggtgggaggatggcttgaatccaggacttcgaggctacagtgggctgagattgcaccactgcactctagcttgggtgacagagcaagaccttctctcgg

SEQ ID NO: 233789 - DNA, 451 bp, Homo sapiens
cagatggtagtaaaatatgtacaatgatagctttgcttcacacatacactcccctcttgacccacccacacaactgttaaaatttttgcattaagaaccaaactggttacaagcgtctatgattattggtgtggaaaatgcacataaatacaggcacataaactatccagatgactaaaggagttatgtttgcattatttctcaaaacaatttctgaaagcagttgtggttgcagtgagttttgtccagctttatgactatggaacaagtaagattcttcctttatgtgtgtacaccatttacctttaagataaaatcatgtccatgaggccaggtgtggtggctcactcctgtaatcctagcactttgggaggctgaggtgggaggatcacttgagctcaggagttcaagactatcctgggcaacacagtaggaccctgtctccacaaaa

SEQ ID NO: 233790 - DNA, 480 bp, Homo sapiens
taagttgtgatgtccctagacttgaaggatattccttcctttaggcaatggtatactttaactagctcccatgggatatttagtatttgtcaatttccctgtggggcaatttaaacttttgctttttactcctatgctggaactgtggctaaattactatatcttgcagaaattagttctacctctttatgaagatagtctcatccggaattgtgcaataccaatttgaaaactaatgacattcatgatgtggttaagagagcagttttcaagatcagactgattgtgtttaaatcctaactctattattaaatagttggttaatcttagttaatttttaacttctcacagcttctgtttttctcctctgtaaatggaaaataataattagattaaataaaataacacatgaaaacacttagcatggagggtggcacagagaaattatcaataaatgttagctattatggttattatatt

SEQ ID NO: 233791 - DNA, 324 bp, Homo sapiens
ccatagcacagtcgatttcgtttcgcagctgtctcccctccgcagcagatacctcggtccagatctccggattgtcgggggacgcaggactcttcgaggaaaaccagccgaatgagatcaaaagttgggggtggggggaggctgaacaaactcaggacctggtggcccaccggaggtgttaccgggtttcctttctgtttcgtattctgtattcagcacatgttatctatctatctatctatataactataaccacacgccgtgtagacacccgctgccacacactacaggagtcaataaacaaggtgcaatattttcaaatcg

SEQ ID NO: 233792 - DNA, 196 bp, Homo sapiens
ccaaatcctacacgtagctgcttcccctttcaggttgataaaatgatcaacctgagctagtctatcttgcactgcttctcctgcttagaggtaattgcgagtgttagatgttgataaacagcaatgtagtaatgatgtgaaccagtcaaaaccttaatcctctccacctaaaatacgatcacatcacttccttttt

SEQ ID NO: 233793 - DNA, 658 bp, Homo sapiens
ctagaaagagaatgtggaatgtacaggtgccattgctctgtctgcgctcagatgtgtctgtgtctaggatctcttcagcctggtaggattcaccctaacagtaattgtgacatctcataggcagatagcattagcatggtctctggtcataagagtgaatttggtgacacacaggaatgcctgctctccacttttgcctcaggaaaggtctgagtgctgatcttggcaccctaggatccctctgttgtaagatcaagtctactaatctgccctttgcactctgggcatcctacatcgggcccccatgcagcaacccgggttcccagggtaagactgtggtggctgcagggctccacaggtgtcatttgccctacagctggctggggttctgttgaaaggttcagaggcttcatgcagctgcctgctgaagtcatccattcttgtgttttgttgaggctgtgcagaggggcttcatgtagtcttctctgcacccacagccactccatgtgagctgcagcacttgttctcaaaatggtctttccaaagtctctgatgtgagttgcctgtaagaaattgatagtaatgtcaattaatccctagtatatagtatctgtctttgatatgcttgttgttgcatcacttaggtcttaaaaaaaga

SEQ ID NO: 233794 - DNA, 481 bp, Homo sapiens
caacaaatgtatgagggtagccattgcagagaacaggttcattatcacattgctaaacagaaaaagtagtttccagaaaaacaaaaaaacgtattttttcaatgaaataaagtatatgtaaactgttacaaagaagaaagaatcttgaaaaatacatgtaattacaaggatgagaatttaaatttttattctatataattctgcaatgtttaacttttcacaaaagttttcatgtattaattatgagatttaaagtttaatttgtgaaatgaacacagcaattcaagacaggaagttccaaaatgtaacatcacaaattaatttattagtgtcattcaaaaaacttgataatgtttcttgtatgttatctattttatccacttgcagcttgtttttagaacatttgttctgtttttgaaaatatgtttgaataaataaaatacaatgtttaaaaattgcagtaattgtagaaatctaaatt

SEQ ID NO: 233795 - DNA, 145 bp, Homo sapiens
tctctgaaagatgtgacacagatggcaatgctctccatctttgtcccctctctcaccttggcttctgggccaccactgccggtggtccagtggtttctaactgccttttaactttctattaaatgctaaaatgtttgcaatgttc

SEQ ID NO: 233796 - DNA, 431 bp, Homo sapiens
tggagagaggttcatgcagtaaggtctcttgtgctcagctatgcaagtgagtcatcttggaaacacattatccagcctgaatccagacagtttcattgtaaccttatgagacactgtgagccagaatcatccaaccaatcttctcccagattactgacccatggaaattgtgtgagagaataaatgcttattaatctttttagtatctaacttttgctttgcagcaatggtttactagcatacaaaccttttgtttgactctgacacatgctaaattttgaaaaacattgagctaaaacattcattcattcaccaagtaattattatttgtatctgctatgtaccaggctaacagcagaaatacaatgatgagcagaacagacactgaccattccttgatgcatccttttcttttccttcgttggacttat

SEQ ID NO: 233797 - DNA, 518 bp, Homo sapiens
cagatttaaaatagtcttaactttttccattatttcaactgttttggaaagcaacatagtatttcctctgaatagagcagtgagttcagaagatactcttaacctttggtccaaattcctacctcttggatttgtgaggaggaaataattttagatgagcataattatatgcccaaatatttatattgtattgtaatctatactactagtacgaaatgagagaaatggtttagtaaagtataagacatcaacatagtaaagtattctataggtttatgtgttggaattacaaagatgaagaaaagatacaggcaagtatttgatatagtaaattaaaaatagcaagatgtagagtagtcatgtatacagtgatagcaagaacatggatccttaaggacaaaactgaaacataatgcaaaaaaagaaaaatatgcaaattatttttcgtatgatgtaagttgtaaatatttaaatggttatcaattaagagtcttggtgtggcagatgaacatttgcta

SEQ ID NO: 233798 - DNA, 616 bp, Homo sapiens
tacactattttttgctctcgtccccgctactctcgaacaggagagagagagagcggcctcgttcctgtctcaccactaatagagaagtaggtactctgcgcaacctgcgtattgagataagagtcatcgatcatgtttttgttgtctcctctcgtctagctccttcactgccggcgtgtggctttcggtgaccagatctaattccatcacttcgaggcgcaccaccgcgcctgtctattactttccttcatatatataaattcacgatcactgtttctttcatatatagagtgggtcctcactctgccttgttttcacatcacacaaataaaacagctgtttggatgatgcgtgcgatataatatttgtggcgcgcgccttcgtagagggagaattgtgtagtagcgggcgccgccgcccttttttttttttttttttgtgtttgtttttttttgtttttttttttgtttttttttttataatgtgttgtcgtgcacggtaagaggcaatctgtctttaagtagggataaattactctaaaacaaaaaagaatcctagatagttttcccttcaagtcaagcgtcttgttgtttaaataaacttcttgtttaaaaaa

SEQ ID NO: 233799 - DNA, 478 bp, Homo sapiens
agcaataaaaaatagtatatccaatagctagtagaaaaaaatccaacccatagtttaaaaccttcctaacaaagaaaactcaagaacagatgtctacctgtaaattcttccaaacattagaaaaaaataccaatctgatagaaattcttcctgagaatagaaaaaatgagaacagcacccaaactattgtatgaggtcatcataactttgatatcaaagccagtccaggacattaagaggaaagaaaaatacagggcaatctcactcaaacacagatgcaaaaatcctaaactaaatattagcaaaacaaatgcaacaatttatataaaggataacacattacaactaagttgggtttattccagaaatgtaaagttactttaatatgtgaataaggagaaaaatcaatagatacagaaaaaaaatttgatacaatttaatatctgctcatgattttaaaaaaccagaactcagcaaa

SEQ ID NO: 233800 - DNA, 427 bp, Homo sapiens
aaagaattgcactgagaatttatctcagcagagtgtggtgaatttggatgaatcatttagccttgggccatgaggttatcccaactataaaataagatccctcttagttttaaaattctgtaaatatgcctctctcaaacattgtaaatattgttttaaagtgaggtacaaattccaagggaaaaaataaaactttgactaggcaattgattccacaaacatttattaagtgataatcactgtgctaagtacaacaggagctgtagcccttgctctccagaggtctggcgaaagagatatgtaaacaagctgttacagccatgtataagtgctctaaaaaaagtattaacaaggtgtgctgtggtacacaggaagaagttgcttcattcttctggagatgttacagaagctttggacataaaaaaaa

SEQ ID NO: 233801 - DNA, 251 bp, Homo sapiens
tcctgctggtgagagactagaaactggttcctgcaagagaggaatgcaaaacggagaatattgagatagcaaggtagaattgctgggctgtacagacaacggtggggcttgtgcaattgctggaattcttatcagaaggctgctacttagttaaaatatgtgttcttcctttgtccaagatgcatttattatccacaaggataaaattaaccctcagtccctccggagtgctgcccacttacagtgcacaa

SEQ ID NO: 233802 - DNA, 337 bp, Homo sapiens
agactcagtgtgttgtgaaagaatatagcagcatgcagcgcaggtgccagaaacagccttggccccatccatgctgtatctctacacttaccactcatagacacatttgcttgcaaatcccagggaagtataaggaatatgtgctagaggtcgactaaatactggaatttatacaattattagaatttccagatctagagtaggaattcaagctacagctacagggctaagaatgtgattaataaaattcactgcccttgtaagagacagatgtcttttagacccaaatctcgaatgtgaattaattacagcatagtaagtggtgttcacatatcta

SEQ ID NO: 233803 - DNA, 580 bp, Homo sapiens
atgaatgctttcattgaatcaagtcatatactataggttgatttatagatgtttattaggggaaaatagtataaacggaatagaacataagaaatagacctgggaatttctgaataggagctgcttggtctgtaacatttgtatgctgcatacccttgggcatattctaagtattagagataatctatgtaaaatatttaggacagttccttctacataatgagcttttgataaatagtggagtttatgatttcttttattgctgctgttgttattattaaagattaccaatatgtttaaaattattgccaggcttacactctttaatttaattctcctagatgtttttaaagaaaaaatgatacaacagaattaaacatctttggctgtcaaactgaaaccaacatttatctctgtttagtttccgctgttttgaaaacgtgtgaggttacaggttagggggagtgaagagttttccaaaaaagtatgaagatagggtgacaagagtttgaggttgcagtgagctatgaccatgccactacactccagccttggtgacagagtgagaccctgtatctgg

SEQ ID NO: 233804 - DNA, 616 bp, Homo sapiens
acgagggcggagacccggaggaccgaagcttacggacgacgaggaaccgcccaacatggcctcggagagtgggaagctttggggtggccggtttgtgggtgcagtggaccccatcatggagaagttcaacgcgtccattgcctacgaccggcacctttgggaggtggatgttcaaggcagcaaagcctacagcaggggcctggagaaggcagggctcctcaccaaggccgagatggaccagatactccatggcctagacaaggtggctgaggagtgggcccaggcaccttcaaactgaactccaatgatgaggacatccacacagccaatgagcgccgcctgaaggagctcattggtgcaacggcagggaagctgcacacgggacggagccggaatgaccaggtggtcacagacctcaggctgtggatgcggcagacctgctccacgctctcgggcctcctctgggagctcattaggaccatggtggatcgggcagagccgaacgtgatgtctctttccggtgacacccattggagagggccagccattccgtggagccactgattttgagccacgccgtggactgacccgtggggcattgaaggctccttgtggg

SEQ ID NO: 233805 - DNA, 1172 bp, Homo sapiens
  misc_feature (829)..(829): n is a, c, g, or t
  misc_feature (884)..(884): n is a, c, g, or t
  misc_feature (968)..(968): n is a, c, g, or t
acgagggcggagacccggaggaccgaagcttacggacgacgaggaaccgcccaacatggcctcggagagtgggaagctttggggtggccggtttgtgggtgcagtggaccccatcatggagaagttcaacgcgtccattgcctacgaccggcacctttgggaggtggatgttcaaggcagcaaagcctacagcaggggcctggagaaggcagggctcctcaccaaggccgagatggaccagatactccatggcctagacaaggtggctgaggagtgggcccaggcaccttcaaactgaactccaatgatgaggacatccacacagccaatgagcgccgcctgaaggagctcattggtgcaacggcagggaagctgcacacgggacggagccggaatgaccaggtggtcacagacctcaggctgtggatgcggcagacctgctccacgctctcgggcctcctctgggagctcattaggaccatggtggatcgggcagaggcggaacgtgatgttctcttcccggggtacacccatttgcagagggcccagcccatccgctggagccactggattctgagccacgccgtggcactgacccgagactctgagcggctgctggaggtgcggaagcggatcaatgtcctgcccctggggagtggggccattgcaggcaatcccctgggtgtggaccgagagctgctccgagcagaactcaactttggggccatcactctcaacagcatggatgccactagtgagcgggactttgtgggcgagttcctgttctgggcttcgctgtgcatgaccatctcagcaggatggcgagganctcatcctctactgaccaaggaattcagttcgtgcagtctcagatgcctacaganggaagcagctgatgcccagaagaaaaacccgacagttggagctgatcggagcagggtggcgtgtgtgggcgggggtgcgggtcngatagccccagggactcccgacctcacgcaagacttcggaggcagaccggtgagggcacatgggcggccagggcacggggcctagcgaatccaaaacgggagccaccaaggtggcggactgaggcgaggcccagcagccgaggttgccggggccccggggggcacccggagggggagagtggccgagggcacacagagagaagg

SEQ ID NO: 233806 - DNA, 153 bp, Homo sapiens
caggcttctcagggtgggatgaggagcctggtaagatagtcacatagtcagcctcatgaaatatgactccccattcacctgccccctaaactgtgcttcctcaggtaagatctagtaaggcagcccaccagagcctcgctgcatgttgaactc

SEQ ID NO: 233807 - DNA, 472 bp, Homo sapiens
ctcatgccacaagtgaaacattccacacctgacctcatgtattaatctgtttccatgctgctgataaaaacatacccaaaactgggaagaaacagaggtttagttggacttacagttccacatggccggggaggcctcagaatcatggcgggaggcaaaaggcacttcttacatggtggcagcaagaggaaaatgaggaagaagcaaaagcagaaacccctgataaagccatcaaatctcatgagacttattcactattaggagaacagcacaggaaagaccggcccccgtgattcaatcacctcccccttggtccctcccacaacacgtgggaattctgggagatacaattcaagttgagatttgggtggggacacagccaaaccatatcacctcatgtgacaggttgcagtcacaatgtaaccaaaatttcattacatttacaaactattaaaaatattgtataaaatta

SEQ ID NO: 233808 - DNA, 170 bp, Homo sapiens
ttatgctaggcctgcagagacatggcccatggataagatgctacaaccctgtgtatatttgtgagattattcggctaatatgttgtctccctgatctgtctgctttgttcaccatttttcttaccagctcctagtagaagggaaaaaaatatttcctcttgttcgtgtga

SEQ ID NO: 233809 - DNA, 436 bp, Homo sapiens
attagcattggagagtcattaaagttctcatatatagaatgcaactaagaatactcatttgcagctcaactctgcatttctaaaaaaagtcattatttagaagacaggtgacagaatataatttctatcatcatttaaaaaaggagagaggagaggaaggagagttagaggaagagatggaaggaagggagggagggaggaagaaaagagcattcgtggtattgtggaaaatcaactaaatgggacctgttgttctttttgtaaaatgccaaaacttgccacaaatatgtctgataaaatctctttcaaagaggtaaggcattactgtgaatttcttcaaaccgttttgctggtctatatattgatatatataatcctatgcccccaaaatactttccagtatgaactggttagaaaagaatgtttgtttgcttaa

SEQ ID NO: 233810 - DNA, 608 bp, Homo sapiens
tctgacccagcactaagaaaaggactctgttttatcttttgcatatcccttgtgtctaacacagtgatgatgatgatgatttttttaaataacctttactgagcatccagggtatgccaggcactgccctgtgcactttacgtgtttaactcattgacgctatgggattgctaccattattatctccatatggcaggtgaggaaactggagcaggagaggttaattaacttgccaaaaggttagctcctaagcagaggagccaggacttaaggccaggcagcctgactccagagcccaagttctcaactccttgcttcaatgacaagagtaagactcactaaagatgcaaatgtctgtgtttttaacaggtgggaaacaggtccagggtcacaaaccagtcagcggtaggtttggagactcagtgagtatctccagctctagttcaagtttctctgtaccacacagaagtcaccatgaacccagcactagaaatttgcctttacacaagaaataataggatgctgaaaaaaaattgcaatgtaaagtgataacagagagaatatctgaaatctgaaatctgaaataaattttcatcatttttctttca

SEQ ID NO: 233811 - DNA, 638 bp, Homo sapiens
caacagcagaggctccagtggtggtgagcagtgtcagtgatgtcggcgtaacacactcacatgcctgtgccacgcagcactgtcatcactaaagcaatatagaagtgtgattgattcgaggcattattcttgtctatataacttcggagcccagttctctagtcctcccagaggagatataataatgagaaataacatatttggtcccttttatcatggaagctttaataggaaaaatagagtttaatcaaataatcatctatgcaattcatcagggtcactgacgacctccacattgctagcacccatgatgcatccttagtcactgtacctgaccagcagcattttacccaactgctcaatccctcttccttattctactctctttccttggctttcaaggtatggcaccctaagcttttcctcctatcttaccctaagcttttcttcccaactcctcaggagtgtcccaagcatcagtcctttgtaggcttctcttttccacctatactcattcccttggtatttaccgttcagtatcatgcacatactgataactcccaaatgtttacctcctactgaaatccatactcgtatgtacctttactttcctggagtatcaaatatctgccccactg

SEQ ID NO: 233812 - DNA, 268 bp, Homo sapiens
acattgaaaactttcctccactccgcaagtattcactgagcacctactgtgtgccggagacactgcagtgaccaaagcaaaggcattgcccccgtgcagcttgcatcacagtgagtccataagatgctgtgcttggagggactagcacatagtaggagctgtaaaaataggacttgctgttttgctagtggagccagtcacttgtgtgaattcatcttttgatatttgagagtgatgatgatttaaagaaagcaggtgagcctccgtt

SEQ ID NO: 233813 - DNA, 603 bp, Homo sapiens
gaaacattttggttggcctagaagcaagggtcttcttttcacaggcaagatttcctattcaaaatgaaatccagtgaggagatgggagatggctgaatatggggaggaagtcagccacttattcaaaacaaagaatgactcccaatggcagacaatgtattgtcaggaattgctgaagatggtgaaaattgtcttactcattgtgatgtttgtaaaggcagcaatgaattcacgggatttttgtttgtttagtaaacaggcaatgagagtaaccatgagacacatatatatgctatactagtttaactatttctcttccctcctgtcataacacttacccagctattttgaagcatgagctcttgggccacagcttatcactgatgttctgacttcagtagatagatgctcctctaacatgttcctccacttccaacccaataaacttcccactagatttagaacttgctgaatttccacatcttaacatattttagtagaataaagtagctcatgtttaaaatatatttagaaaagttggggactcaaatgctattctttacctacacttctcttctggtgtgtgtacaaaatagtgtactc

SEQ ID NO: 233814 - DNA, 456 bp, Homo sapiens
cattctgtcctcattgatgagagaaaatttggaccacgaaacaactgtacataatgagaggcagtacaaaggaaacactagctctgtggcatagaaacagcacaggtgttgagagagtagccacatcaagctcataagaagaggtgggtcttgaacggagacgtaggaaatgaagaaggcgcatagttgcggcaaggaaaattcaaatttgtagtagagcttggaaaaagaaaatcatttttaaaaggaaatatcaagggcccactaccatgatatgcccaagatccatgactacgggccttctgttaacttcctagtgggtaacagagcagtggctggtaccagaggtgtataacggtgagatgcatggtcttggagtcaaatacaaacccagtcatttactggttgtataaacttgaccaattaatctctcaagcctcagttttcttgtttaaa

SEQ ID NO: 233815 - DNA, 336 bp, Homo sapiens
caggctagtgtgagaaaggacttgagcctttggaaacggcctgtagaagtagggacaccaggctgccgagagcctggagctgtgacccaaacgtattaagaaccaagggcaaataggcaaacagtctttatcctctattctgggtggaaaccagagtttattaaacagcagttaatacaagtttaaagttagtggcaaatatgcataattgtacttagggtttgttttcttttcattcttgcttcaattgtatcatgtcaactatatggattcgtttttatatttgattattttcataaacaatttagtaactttcagtcctctgtcaatgtagac

SEQ ID NO: 233816 - DNA, 423 bp, Homo sapiens
tgatttttcccagtgttttgcatgttttgagtttttaatatcaaaggtactgctctttgtaaacaagtgtaagtttacccaggcagcttcacttacacccttcccttgtaatcagatgtgaaaattacaccctcccttttggatacatgataattacacatttcaacatgcaaagaattgtctctgtttcagttgttggaatgaaaaagctgagacatttcagtaaaatatattattatattaaagatcatttccataattgttttcgggatttgtaatcaaaaccatgatcaaggtagtcttagttttaaaaagaatacacatggaaataaggagaggataaaattaattgccgagttccacttgaatgaccattcttttattttatgaaaatacagttaagtacattatattctttcttta

SEQ ID NO: 233817 - DNA, 134 bp, Homo sapiens
tccctgcccggctctgagagttaatgagacgataccagtgtgagcccccagcacagggcttgacacacagcagatcaaaaaatactttcactgattttcaaaataaaaggacaacagtatcacctgggggcaac

SEQ ID NO: 233818 - DNA, 257 bp, Homo sapiens
agtggccgcacatttcacattttcaccagcaatatgtgagggttctagttcctccacttcctcaccaacacttacctgtcttggtttttgtaactatttaatagtgaatgtgaaatggtgtcgctgtggttttgacaattgttgatcttgcccagaacatttattactgcagtatttcccaattttctacttcagttattccccctgtatttattaattggagttatacagtaaaggagaagagtgtccgtccccca

SEQ ID NO: 233819 - DNA, 169 bp, Homo sapiens
acatagtaattacttcagtgtccaaaatgaagtttaaagtaagttcacgtaatccttccaaggctttaatctcatagcatgttttgttcctgagttagagctgtaaaagcaattcacagtacattgcccaagagccatgtgttcaaaaatcaccagaggttattccggg

SEQ ID NO: 233820 - DNA, 353 bp, Homo sapiens
ttatctggacagttatacaagctataaaacataaagaaaggaggaaaattatgtgcttttactcagactcagaaatactcctcaacatctgttggaaattgaggaacggttctttccagttagtgacaggaatggggaaacaagttgacttcctgtctctgcagtggcatatttttacaacacaattaatatttttttcaacaatttctagtcaaatttgaagcataacttactttgatgaaatactataagttcccagatgatgcacattgacatctatttttcctttcccccgtcattcttgtgcagcaatttatcttattgcattaaaacattagaaaatgcaaataaga

SEQ ID NO: 233821 - DNA, 178 bp, Homo sapiens
tataattaattttattcctgtgcaaacacactatctgtgtattctctattttaccaggattttttgtttttgctaaattagacatacaattttgcagttattttttactaagttgacaaatgtttgtacaatttcagtgtaaagctagtcttcaaaataaaccactgtgaagattgga

SEQ ID NO: 233822 - DNA, 296 bp, Homo sapiens
gctgggctccaagctccttctggaacttcccttcctaccattcgccccaacaatgcctgcttcttaaacataccctcacacttttcattagctaacacacaacgtatatgtttgtttattttgctattgtctctctttctccacttgaacgtaaactctctggtggtgaaggctttgagtgattaactgcagcatccccacctctagaacaatgctggcccttaacaaacagccaacagatattgttggatggacttcgatgagtgtgatccaggatacttctaagaccagaaata

SEQ ID NO: 233823 - DNA, 447 bp, Homo sapiens
caattatagaatttcttgtatatttactaataaatgaatgctaattatcttttatgtaaatggcattttatgccagcaagatgttttatatgtacatatgcacacacacacacgcgcgatagagcgatggctaaataaattgtgatttattcctatgataggatttatgtaactattaaagaagttgtttataaaagtctttcttattgttaagtgcaaaactaggattaggatagacgttaaagaaaaggatcatatagtgtaaaaataaacatgtatattagtagaaagagaccacaaagtgttatgaaaaaatactaactatattaatctctggcaaataaaagtatttgtgttttagtttttcttttttttatttttattttcttgtgtcgtattcatatttcaattattaaaaaatgttgttctagaaattgtgaaccaaaa

SEQ ID NO: 233824 - DNA, 386 bp, Homo sapiens
gtcgccaggctggagtgcagtggtgcgatattggctcactgcaacctccgcctctcgggttcaagcgattatcctgcctcagccttttgagtagctgggactacaggcacatggtaccatgccagactaatttttgtatttttagtagagatgggattatcactatgttggccaagatggttttgatctcttgacttcgtgatccgccctcctcggcctcccaaagtgctgggatttcaggcgttagccaccgcacccagcctggacttgtctatttcatttggagaacttcaattgatctaaatctactttgcagcttttcattgttaattttgaatttatttaaacaagtaaaatatttaagacatttgtgtggaaaacctgta

SEQ ID NO: 233825 - DNA, 549 bp, Homo sapiens
tttgttatgtctctgctaggttttgatatcaggatgatgctggcctcataaaatgagttagggaggattctctctgtttctattgattggaatagtttcagaaggaatggtaccagtaaaaatatggaacgcttcatgaatttgcgtgtcatccttgcacaggggccatgctaatcttctctgtattgttccaattttagtatatgtgctgctgaaataagcacaccacatttgtctcttattgtttctacacacattacttaagctcaacccacctaaaaacattatttctattttattaataccccagtgtttttactaatgttgttgcctctaccaaaactattcttaacaactatccccatttgtcaaaatttttacccatcttggttaacatctacctatctgcaatattatttcatctagactccccttctacttcccatttctagattattctgaagcaaactcaagatgtcacatcactttatcttaaatatttcagtatctctaaaagatactgaaaagataaaagtactatttaaaaag

SEQ ID NO: 233826 - DNA, 1180 bp, Homo sapiens
tttgttatgtctctgctaggttttgatatcaggatgatgctggcctcataaaatgagttagggaggattctctctgtttctattgattggaatagtttcagaaggaatggtaccagtaaaaatatggaacgcttcatgaatttgcgtgtcatccttgcacaggggccatgctaatcttctctgtattgttccaattttagtatatgtgctgctgaaataagcacaccacatttgtctcttattgtttctacacacattactttagaaagagaaatttcccttcatcaacaatttggttactcagagatacagtacatatagagaaagcagaagaaatgtttggttctatttaccaattttcaaagtaacaagttggtttgctggcatactgtaagttgaccaattattttaatatattatgaactcatgtatttaaacatatttgatgttttaaaccattgcagttctctttattgatgcttaaattgtgtcatctttaacagtgagaaccaattcaaatgttggctcttggatccttttgagttgtttttcatagctgccttgttttccagtatgacaaaatgttccatgctcatattgtacatttcctgccccataggtgaaatctcccatttcttcaaggatttttagttccttttagtaggaaatgggagtgtagagatcacattctgggcattactggattggtcattgtttctgggccttttcggtaaacaaagctagattttgttgctgttttgtagctttatttaagataaagtactttaggagttcatactgatacttccaattcaagcccagaatttacttaacttcactaatcttacatgtatactgccttcttggatttttttctgatcacctcagccagaagtgatcactcttcctttgaaccacatcacccacttcaacacttttatagtaatcaacacattaacttttgatttattgttatttctatatatgtctgatattctctaccaaatggtaaggaatttgaggatagaatccatcctttgttaccctttgttaaataaagataaaattcctaaagtgctgatatatttcctgacatataaataccactttctctttgtattcctttaaaaatggaaccatattatacatgtactaaaaattaataaatgagtgttaaatg

SEQ ID NO: 233827 - DNA, 488 bp, Homo sapiens
gattacaggtgtgcaccacaacgcctggctaatttttgtatttttagtagagacagggtttcgccgtgctggccaggctggtctcaaactcctaacctcaagtgatccgtccacctcggcctccctaagtgctgggattacaggcatgagccatggtgcccagccagaatcttctttgaatagatgtaggtatagagagaggattattgattttaaaagcacaaatcttacgtaattagattaagtacatttttaccatattctggaattctaagaattggaaggcagtttaaaacctgaaagtggcaaatttaagattaataaaaggaagcacagagtggtagtgaatgaggaaagcttaccactcttattcttaaagtattgtaagttgggaaacttatggagttcttttttgttttgttttctttttaaaacacttgtccagagataactttgcttcattcaactgagaaaattccatcctcatg

SEQ ID NO: 233828 - DNA, 367 bp, Homo sapiens
ttcgaatttttctttgtactcatggtttatttagtagtgttttattttcagttttaaaaaaatttggaaatttttgaaataactgttattgctttcccatttaattccattatgatcagagaaaatattttgtatgacttaaattattttatatttattgagacttgtttcagaatccagaatatgctctatcttgataaatatttcatgttacgtcaaaagattatatattctggtgttgctgggttgtggtcaataaacgtcagtcaggtgaaattggttattattgtttgagtcttctttatcttcgttgattttatgtcttttagtttatcaattattaaaagagacatattggaatccgtga

SEQ ID NO: 233829 - DNA, 539 bp, Homo sapiens
acaactacacccaacatgagtaaataatacagacataatcttcactgaaagaaaacagatacaaaaaagtatacgtatataacattcaagaacaggcaaatttatggagaaggcagtcagtaaggggtttatctttgggggttgtaatactgaatgcgagtgagcacatggaagaaactagggttctggaaatgaactgtatattaatttggacagtggttagttttacctttcatatctaaattcataaatacttaagtgaaggtattcataatagatacccaaattaagaaagttcaaagttcattttcttgcttaggtttaaaatttccaatatttatcacaaaataaataagcatgtaggatcaagtttttagagtagaattttgcaggtaatttgaaatctcaagccctatgaaggttactaaaaaaaaaaaaaaaaaaaaaaaaattcctaaaatagaaacattaaaaaggagaaataagatttacttcacaaaattactcctttggggtcttgcagtatgatatatatgagt

SEQ ID NO: 233830 - DNA, 635 bp, Homo sapiens
aacctctataaactgaacttcacaagcacttatttaaaaacaagaggcagagatggaagaagcgcatatggactttctcttaacatcccacaggggagcttgccctaattctttttctcctgaaaattaactctcttgggctccaaagatcaactcagcttcacctaagaggttatgtactgaccttcctaacgatcaaaggcttcagagacactgaattgatgcgtctaaaaaaaatagatacaacgggccaggcgtgatggctcacacctgtaatcccagcactttgggaggccatggtaagaggatcgcttgagctcaggagttctagaccagcctgcgcaacatagggaaaccctgtctctactaaaaaaaataagaaaatttgccaggcgtggtggcatacccctgtagtcccagctgctcaggggactgaagcaggaggatcacttgagcccagcaggttgaggctgcagtgagctgtaatcgtgccactgcactccaggctgggcaacagaacgagacctcatctcaagaaaaaaatacaaatttagttaagtagagtataaataatctaaaatatggctccttttagaccttctttgtgaatattgaacacatgtacctaagacggt

SEQ ID NO: 233831 - DNA, 521 bp, Homo sapiens
catggtggcgtgcgcctgtagtcccagctactcgggaggcagaggttgcggtaagccaagagcacaccattgcactccagtgtgctgacagagtgagactctgtctcaaaaaaacaaaaaaaaagaaagaaagggcacgtgttatagcttagtgcttaaaacaggtatctggagccagattattaaccaggtactttaagcaaacataacctttctgagctttttcttatcacctcataacattttattaaggtttaacaaggtattaggcaacaccatataaagttttgctagtatttgacagttttcatgttataagaatgacagctacatgtggctcaacctaatgaatataaagtgctttaaaaagggtccctgaggccaggcgtgatggctcacacctgtaatcccagcactttgggaggccatggtaagaggatcgcttgagctcaggagttctagaccagcctgcgcaacatagggaaaccctgtctctatcattttcgggatcctctagacag

SEQ ID NO: 233832 - DNA, 319 bp, Homo sapiens
aacctctataaactgaacttcacaagcacttatttaaaaacaagaggcagagatggaagaagcgcatatggactttctcttaacatcccacaggggagcttgccctaattctttttctcctgaaaattaactctcttgggctccaaagatcaactcagcttcacctaagaggttatgtactgaccttcctaacgatcaaaggcttcagagacactgaattgatgcgtctaaaaaaaatagatacaacggccgggctccctggctcacgcctgtaatccctgccctatcgtacaccccgcccgtcgctacttacctgcat

SEQ ID NO: 233833 - DNA, 249 bp, Homo sapiens
cggcttgtggatactgacatagttgcaaaacacaatacttaatactttttctggaggagggggcccatgaaagtcacactgggtccctttgagccctgtgtccctcctgggcacgagtctgaagtgttgtgatgatcggctcacatgactgccttctccaccagacagtgggccccgggagggcaggggcatgtcttacattgtcagaacaggcaagcggtaagtatttgctaaataaataaatgctta

SEQ ID NO: 233834 - DNA, 2143 bp, Homo sapiens
  misc_feature (1525)..(1525): n is a, c, g, or t
attacacccctaaaatctcttcacagcaattcttagattagtgtttgaataagtaggagaatacatcagaggctgggaatcttggagggccatcttagaattctgcccaaaacagccagatatttaactatgtgtcctgttacttagcacccattagtgaaaaaacagataaaaattctagtccacgtggagcatacattctaagagagtttaaggggaaaagtgtctatactgtttatttgtattgtcttatcacttccggagttttaggagatagccagatataaatagtcatcagaataagcaaatatacctgttttacattttttatcctcagctagtattcagttaactatttttaacagatggcattttttctctgtatgtgcttataaatgtgtatataatgaaaatgtccgagttgtgttgagcacttcttttttttattttagtcccatggaatttccaaatgcgggaagggacctcaaagatcatgctatattttgttagcatttaagagtaaggcagtcaaaaagagacttttcttgtttatatttaatgaaatgccaaggtgctattagatgttttttgaatatgtatacttcttttcaaatgatcacagatgtgaccatccctaatgagtgcatttcttgaaatagagcagaaactcaagtaacaagaatgggcaggataccaaggaaacagactaatcaggcagatggtgactattttgtagggaaagtctgagtaaaccaatagctctacaacagggatctgaaaataaaggaacattagtgagcatgaaaaaaatgtttttttcatattttttcattaccttataaaaattagatttacatacacatttttacctattaccacagactatatgatgaaacttagtttttctttcattataatgttttcatattagcaaaattttgtcaaaaaacaactttttcataattaagatgcagtaatggatttccttttttttgctctaccttctgagttcttgcaatactttttgaaacctattggtcttttaaaatttcttaatcattttgaaatgaattgatttttaaattgaataaaatagatttatattttgtgtaaaatataaacatcacaataaactgaaatacatttgccaaagaacaacatttttttgtaaaaaaacagaagtaaaaaaacatcctagcaggaaaccaggaacggaataaaaacacaaaaaggtatctcgggcacaatgccctgaaggtcaacaaccatggccaagagcatgaggtaatgtcaggaataagaaaacaccctgggttggatccttgacactctgatcctaagatcattagtgattgtgcaaaaatgtaatgtgtaaagtgacttataaagttgtcaggtgaatgttgcttctcatttctacttgacaaaaccctggtgaggcaaagcagttcttattcccattttacagatgaagatatacatatagaaaaattagtttgccaaaattcgtagttgccagagtggnagagcaagaactaaaactgagtcttctaattctgaattcagtgcaccttgggatttaagaatggaatgatcaggagacagagaggttatcagttgaagaaacaaacttttttccacttagcatcttaatatatacatagcctgtatttgactttattcttactatagcatactgcatttagtgtataaagataatgctttggggttagtgttacataaaaaaaatccctgtccttagtttctttctaaaatttgtgaagggtttaaattgtttcatggacatttcattgcacaaatttgtttctcttcatatgaactgtaagaaatcaaaaagagtggctggatgcagtgctcaagcctgtaatcctagcacttttggaggccgaggagagtgtatcacttgaggtcaggagttcaagaccagcctggccagcatggtgagaccccatctctactgaaactacaaaaaaattagctgggtatggtgtcatatgcctgtaatcccagctactcgggtggccaaggtgagaggatcgcttgaacctgggaggcagaggttgcagtgagccaagattgcaacactgcactccagcctgggtgacagaatgaaactgtctca

SEQ ID NO: 233835 - DNA, 145 bp, Homo sapiens
gaacaaagtattatagtatcatttcccaaatttcatttaactgaacactttatcttcagctgatgttaatgttttcgtttatctcagggaacaataaagaatgttgcattttaaaaagcttactttctgaattactaccaaaccc

SEQ ID NO: 233836 - DNA, 237 bp, Homo sapiens
gccataatgtgaactgtcatagcatctactgggtgccaggtggtttatgttttatttgattctttttccaacttaattcgaaacctttcaaacctttagagcaattgcaaaaatagtacagtgaagccaggcactgtggtgcacactggtagtcccagctactcaggaacaggaagaatgcttgagcccaggaattcaagagcagcctgggcaacgttgtaagaccccatctttaaa

SEQ ID NO: 233837 - DNA, 526 bp, Homo sapiens
  misc_feature (163)..(163): n is a, c, g, or t
agatactatcactctcagtatttctaatattgtgacatatttatggtattttaattttggatgcattttggctttctactcaacaatgcttagccttttaaaatgttttgaagttattagagttggcaaatgtgcttgaaagtaataaaacaatttccataanacaaaacaaaaatgaacaaaaaacaaaacaaaactaaaaaaaaaaaaaaaaaagaacaaaaaaaaaaaagcatcaaccccctcgggtttttttttttttttttaataattttaaaggaccaaaacaaagcttttaaacccgcattttttggaaaaacccctggttctggccgggctggaatctcttttaaaactggaccttggcctcccgggggcctttgggttaaaaagcgggatctttgaaaacatctttattgcccacagttttgcccaaggggatttccccaaagacccttggggccattaggggatggcggttttcccctttcccggccgatttcgaattaaagcttattgataccgc

SEQ ID NO: 233838 - DNA, 316 bp, Homo sapiens
tctcaggccagcgtgaagccacgagatggtcgcaccctcagaggctgtggtcaggggctgaggcgggcctgaggatccggggcttccttgctgctggcctcctgtaggcctgggtttgactgtagcctgggtgtggcctgtccctctcttgggaggcttagtcgctgctctgtgcaggacatccgctgccctctctgtgaaaaagacgagagtgaaggccagcgaaaaggatctgtcttctcatttgggagctgattattatgaaaagctctagaaagcaatgagaatttgatcttgctcagttatacatttattg

SEQ ID NO: 233839 - DNA, 241 bp, Homo sapiens
tctctatgtcatatgttatgtagaaaaagaagtttattatttctccagtttatctacagacaatgagcctattgtatttatatcttcacttctgttttactttcagagtttgcacctgaatattcaggactattcagtcaacacaggctggtgggtggtaaatgtaatgtcatttcatgatacatttgagagtagtattttctccctgaaaaattgaataaaaggcatacaaggacatccg

SEQ ID NO: 233840 - DNA, 344 bp, Homo sapiens
aaattaatttgccaatccttctcttaatgagaagcattgcaaggaatggaaattctccatttatttatttatttatttgtttgtttgtttgtttttattacttacccagagtaaagcgtcatttttcttgagcaagtggcaaaatgagcttattttcttggctggttttgttcattgtttgttgtgtcagagactagcatagaacattgtgactttcttttcactaacacaaaacaaaacatgattgggattcaggcctagataatcttgaaatatccccaggatattaatggtgtaactccagggaggaagaagtgataagtatcttgttaagataagtcttt

SEQ ID NO: 233841 - DNA, 453 bp, Homo sapiens
gatacgtccaatcaccaatctaacacaaggtgttttctcacctccccccattctgtaatttgtatcgtttatctcccacagtaaaatacttggttcccaacataagcgtggttatagttcaaacaaaagcatttatacacaattgccctacagtccaataggtataaaattgcaatgccattaccaacatctaacctactaagtaaacttagtaaacttaatttttttctctttatggttatatcattaatctgatttacattaggcttttttctgtctacagtcaagtttatgtttactttttataacattttttatttaaaatttttagtgtgtaaaatatttacatggttcagaaatcaaaactataaagaaatagagaaatttacttctctctctcttaatttctgatgtatctttcctatatttctttttaaataaacatatttatat

SEQ ID NO: 233842 - DNA, 436 bp, Homo sapiens
atttcctgtacagagggtgctggaaaataagagtatgacacaggaaaccacatgagatgtttctcagcatttgccctgactccaatcacttatcttggtttctcccctaccctctccggccccactccctgcaaggaatcaccgtcctgaagtctttcattgcccacaatgagcatccaggaagcagaccaatcaagcgacgtgagctttcatagctaaagaatagtctgccctcttctgcttggcattcaaggccctggcttacttgacctttcaaaatcaggtttatttcaaatgacactaaggtgtataaaatgaaatgcaaagtctctcgaagtctcattccccaaaagcaaccactgcatacagtttccattcttttttttaaaaaagctttgcgtaataaaacaacatttctatttttgatttatcgatg

SEQ ID NO: 233843 - DNA, 504 bp, Homo sapiens
cactttgggtagcaaagctgtaggaaggttccatcttcctgtgactggggtctaggctgatgtgtgaccagggcctagggtcagtctacaattggggaattgcatcagtccaaaactggagaattgtgtgattgaccatacttttggttttgaccaacactgcatctgtcctccaacctatagccacgagtcataataaaaaaatcacacaagagtgaaggagagaaaagatatttcccctgaaagaggaggtgcagagcacatgggggaaagattcccgtactatccgggttggttagctccttttttgtaaaggtaatttctccctcttcttttctcactctccatccccgcattttacatatgttcttaacaaagaaatatatggttagtgccacatctgggagtcttgtccacaaggcctgatggcaatatataatcagtttgggagagggggtggcacagcataaagaaaggaaatggtttctctagactaggaaagaa

SEQ ID NO: 233844 - DNA, 448 bp, Homo sapiens
aacttgggtaactgactaaatccttctgggactcagtttcctgatctgtaaaatgggggagaatggcagtctctacttcctagagggtgttttgagaattaaagaacagaacaggctgggcgcggtgactcacgtctgtaatctcagcactttgggaggccgaagtgggcggatcacctgagttcaggagttcgagaccagcctggccaacatggtgaaaccccgtctctactaaaaatacaaaaattagccgggcgtggtggcgggcgcctgtaatcccagctgctcaggtggctgaggcaggagaatcacttgaacccgaatgcctgtaattgcagctactcgggaggctgaaacatgagaatcatttgaacccaggaggcaggggctgcagtgagcccagattgtgccactgcactccagcctgggcaacagagcgagactctgt

SEQ ID NO: 233845 - DNA, 240 bp, Homo sapiens
tggctaggatggtctcgatctcttgacctcgtgatccacccacctcggcctcccaaagtgctgggattgccggcataagccaccgcgcccggccagtatgagttattattacattttcagtctattactgaaaactgcaacatggtagtttatcaagttcttaagcatagattccccatttttcagtcatgcagcaacatccgcttaatgcctcctaagtgcagaacactcaggatgaca

SEQ ID NO: 233846 - DNA, 438 bp, Homo sapiens
agaaaatgtccatagttgtaggctttataacatttcaaattctgtaataaactatttggcacattatcatatcattttaggtatatagataccatggcattttattaagcaaaacaatttttttcttctgaagaatacttaaggtgaaatttactggttttgagcttgaaagtggtttgagaattatacatgaactccacttaaactttggagactttcctttttgcagtgctaaagatccatgacttggttccaaactacaaccttttatttgcagatgtatttatggcacagtaccacattctgattagaatttaagagttcacatttctgatatttctgtctctaaatgctgtgttgcttctgtttacctagttttcttcctattcttcctaatttcttaaagaaatctgcacatattcattgaggtatttaatc

SEQ ID NO: 233847 - DNA, 307 bp, Homo sapiens
ttgcctcctgagagctgttccccacacgtggacgggatcgggggaaccatagatttattccagctgaagctgcaaggtccagaaagtgggagagttgatccagataattccccatggcttttctagctataaagtgttaggttccgatcctttaacttggttatttctttattgcaaaatgcaaaaccacgctgttttaaaacaagcctcggggtaagcctcagtttcatggaaaagaagacagaggattattaatcatttttatgctgtaagccggtagttcctaaatttttattatctgaatcct

SEQ ID NO: 233848 - DNA, 309 bp, Homo sapiens
ctaaaaaattattaatcatctatgatgtgtaagactctagatatagttggaaacagagatgagtgtatcactaaaaaaactcctatcataggtgaataagtggtgtgcttgtaaagataattaataatacccagcagtgtagggtaagagacaaatgagtgatgcagaggacaaatgctaaagaagtccaaagagagagaccactgtgggttatacattatttatgccctactttattttggataaaggaagagtcctgactatagtagattaaggagaaagtaaagagagtttaattttttaaaaata

SEQ ID NO: 233849 - DNA, 371 bp, Homo sapiens
caggcctttgttagaacaagaaattgtccagccccttgtgactcaagatgtggcctgggaaccagcagcgtcagcattacctgggagctaccaaggactgtggaatttcaggcccagcccagacctactgaatcagaatctgcatttttaacaggacccccaagtgatttgtatacacagtgaaataggggaagtactggtctcggagacaaccaagttcatcatcagtctttatatccaaacacatagctgcctaatgaagaaccatcaacttagcctgtctctcagatgctaccttttgagtgttccttaggctaatatttgagttgctcacatttactggatgaataaaagggctgtcagaagtcttt

SEQ ID NO: 233850 - DNA, 380 bp, Homo sapiens
gtacatgcagaattaataaagcagcttgccttgtttttatttcttgtgaggtcagatgacagtggatgatattgacttgggaagatggccagaagccactatttaccatgtacatatatcagagagccatttattaagtttgaggagattggatcttaagtacttaattagaatgacattaataattttaataaaatgttttgcattgagagaactattcactcagaaatagcaggggtgaactcatctccaaagaaatcatttaacatgaagttagtctaggattaccaaccaagagcatggcattctcccatgtatctgactttcttcgtggctgccaggattcccggtatagaggcaaatacaacctgtaaaggctc

SEQ ID NO: 233851 - DNA, 488 bp, Homo sapiens
agcaactctttattacatgtctggcactggtctttacatatatcactcatcctcatgaaaagcctgtttcacagctaaagtcacttgtgtttaccctgtcttgagtaaatcaaaacactgaacattctgaaatatttggaaagttgccatgattgtatgaaggctgttaacattgctttgatttctgtaatgagcatggatgtcattctagaggtatgcatgtggcgcttcctcttgcatttctttagtaggaattgtaatacggaaaagtgcacagaagttcagtgaaacagataattagaacatcccttgatcacccagatcgagaaatggactcacacccccgaaacagcctagctccggatgtactttcctcctttcggaagtttgccatattcctgacttttatgctaatcatttcctctcttcatagtttttaccacctctgtgaagttgttgttgtttttttttcccctgcattttgattt

SEQ ID NO: 233852 - DNA, 412 bp, Homo sapiens
ctcaaaactgcacagcaggggcctctggagcaagatcccagcaactactgcaagagcacccacgaaggtgagggagggtgtcgcatagatgttggtattatcagcacttatccctacacagtgatctgcagaacattctattaggtgaagaaaaccctgcagaatggtgtttctagagtgttaccttttgtgtaagaatggagcagcatgtaaatactaacatgtcacatatgcattgcttacatctttcacaaagaaaccgccacaggatacaacataataaagatgcttaccctttatagaacgggaagaaatagagtggagggcacaggaatggaagcatgttttctaaaccctgttctgtggttttgaaattatataaattccttgcataattcataaaagaaatggc

SEQ ID NO: 233853 - DNA, 701 bp, Homo sapiens
tcccagcactttgggaagccaaggcaggtggatcacttgaggtcaggagttcaagaccagcctggccaacacggcgaaaccccgtctctactaaaaatacaaaaattagctgggcatggtggcgcatgcctataatcccagctactcagcaggctgaggtatgagaattgcttgaatctgggaggcaaaggctgcagtgagctgagatcacgccactgtgctccagcctggacaacagagtgagagcctatctccaaaaaaaaaaaggggtggggaccatattcctgctttatgtcaagacactggtaagagacagactagatgggccagggagccccttggcagttatcagtgcagcgcctatttagccctgtccctgaacaacacggcaagagcccaacctgccaagtctcaaatagcagttaaccagagtatcgggttggaggtggggttgagattctgtaattccccgcttattgttcccaatcagagaaggcagccagagaaggcagcttcatcccttcactggcccagcagctgaactatatggaaacctccatgtcagggctagggtactcctggacagccaccaaggatgagaaaccctgatggagctgcctggccacagctctgcggtaacttccttgaactctctgtgctgcaggttttcactttacctaatggcccttcttgcaccttta

SEQ ID NO: 233854 - DNA, 543 bp, Homo sapiens
tctttctactgtggttgcgacatcgccatcgtgtgtggggaggccgcgcggcatgccgcgggctcactggaggctgcgctgtgtagaccaaggcgtcggtggcctgacgtgcaggcgtctggttacctgtggtttctgtggctgtgacgtcgggaagtaagtttctgtaaaacgagacgcccactcaacatcgttcaaagctgaactcaccgtctaacccccaaacctgctttttgagagcattggctttggagtcagtcagcggatctgattcaaatgccggtttcaacagggctttgcttgagaccgacctctccacgcttgtttcctcatgcgtaatatgggggtgataaaacggtcggcttcatgaggtttcatagggctaaatgagcatcactccagagatgctagcgacgttctgcttgttgatgtggatgctggttcatctcaggtgttgttgctttgtgaacattcactaagctctacgcttatttgtgtccttttctatatgtctgttatatattgattaaaaggtttttttaa

SEQ ID NO: 233855 - DNA, 538 bp, Homo sapiens
caggatttctgatgggctgagatcaatcaggttgaatcatcaaggactgagtgcattgccactcccaaagccatgtgtgttaatctggtagtaggagggaagggatgattctgccatgttattaatacttattctctctctgtgcttcacagctccctgtacaaacatcaattaatgcaggcagcacatcaaagcattgtggagacatgtctgtgcctccctccagaccatcaattctcaactcaggctgctcgttagacatacctgaggagctttcgaaagaaaccagtgcctagaccccatgcacagagattttaatgtaattggtccagatgaagccccagcataactaatctgtaaaagctccccaagtgatttgaatgtgcagggtgttttgagaaccctgccatagacccagcaccttaagaaccctgtctatgtccccttcaactagcacataaggctcacaggaaatcctcactgaatgaataaacaaataaatggatggcagagaatttctgctccaattctgcagccc

SEQ ID NO: 233856 - DNA, 589 bp, Homo sapiens
  misc_feature (230)..(230): n is a, c, g, or t
  misc_feature (447)..(447): n is a, c, g, or t
  misc_feature (571)..(571): n is a, c, g, or t
gagtctgatctctagagtatcctcaagatcctgtatccaggggaaaaaaatagccaggcatagtggagcatgcctgtgttcctagctactcaggaggccaaggaaggagaatcacttgagcccaggaggttgaggctgcaagtgagctgtgatcatgccactgtggtccagcctgggatgacagaacgagacctgtctcaaacaaaagaaaaaaacaactctgaatcccncaatgcctaagaggccctggtacacagtacatgctcagatatgtgttaagtaaatgagacagtatctccaagcatggcagcatgaagtgtatgtatacaccccttgctcttttctacagggaacaacaatagcagaggcctttgttgccctctccgcgaaactgcccagtaacctggcattagacgggtccctggctgacctgataaagaaggtagncccttccttatctatcttctctatctatctatctacctacctatctatctatctttttcctttcagttatccccccatccaggctggacctggaggtctccaacatcagggagggaaggggatnggaggcctgctgaacttc

SEQ ID NO: 233857 - DNA, 531 bp, Homo sapiens
gatccagacaccaagagagggttcttggatctcacgcaagaaagaattcaggggaacaacaatagcagaggcctttgttgccctctccgcgaaactgcccagtaacctggcattagacgggtccctggctgacctgataaagaagctccctgtacaaacatcaattaatgcaggcagcacatcaaagcattgtggagacatgtctgtgcctccctccagaccatcaattctcaactcaggctgctcgttagacatacctgaggagctttcgaaagaaaccagtgcctagaccccatgcacagagattttaatgtaattggtccagatgaagccccagcataactaatctgtaaaagctccccaagtgatttgaatgtgcagggtgttttgagaaccctgccatagacccagcaccttaagaaccctgtctatgtccccttcaactagcacataaggctcacaggaaatcctcactgaatgaataaacaaataaatggatggcagagaatttctgctccaattctgcagccc

SEQ ID NO: 233858 - DNA, 771 bp, Homo sapiens
gacaacaatttaaaggcatgtggcttcatttccacatatatttgtgactggattcttatttttagcaagaggggagatcgccacaaaaaaaactttagttcaaagaagactgtgcaaatcagttacctgtactttcatagtctaccatttacattaactgttctagattaatgactaagcatggccattaccataattacatcatttttttaaaaccacatttgttcgaagtatccttttctagtggttagaactgtccctataatttgattgtccctcatatactaaccgaaagcaaaatgctctgatgagatgcttataaactatgaattttttaattcttgaaatttttttcagtttttatgattgttgaatagatatgtatgtttagttccattattatttcactggaagttttaaattttgagaagatgaagcagagatagaaatccattgcagatatatgtatatttaccccatcttgcaggtttcagttagtaaaacacagaatgataggtcggttttaatgttttaaaaaaaaactaaaaaactaaagttagagaaacctttctgtttgagctactgtatagaaaagacaacttttattgcattgctggtccacatgataaatatttcaatgctgttctagactgtatgagaagtacttaatgaaaaaagggatacattacatttaagaattgtatcagctaattactgttttaaaaaaatcaactcatttggaattcttcggactataaaattgagcaagta

SEQ ID NO: 233859 - DNA, 335 bp, Homo sapiens
ttagaatctagtcttttgaaaaataatgatatatttttatttaaattacatttcaaggctgggtgcagtggctcatgcttatagttccggcactttgtgaggttgaggtggacagattacttgcccacctcaggagttcgagaagcagcatggcaaaaccccatctttacgcaaaatacaaaaattagctggatgtggtggagcatgcctgtagtcccaagtacttgaaaggctgagatgggaggatcgcttgagcccaagacgttgaggctgcagtgagccaagactgcaccactgcattccagtctgggcaacagagtgagaccctgtctaaa

SEQ ID NO: 233860 - DNA, 460 bp, Homo sapiens
ctcgggtgaaagcaggtttggattaaaatttcctaatgccaaggctgcttgaacgttggattactcttcacctatacttctataaatgtgtaatcttgttataagttttccacaagtggcatagagtctcttctgtgaacactgttcttctgtgcaggtgggatggactagatcaagggtcttcagcagttttgatcagccagtggatttcaaagacccattaattaaaagctttttaatcaaaagctttcttacaaagggcccctgtgttaatcttacctccctgaccttctctttggcacgctccattcttgtcgagattcccagtgaggttgggattctttgaaggttagctggtgttctttcttcattccttattcaactccaggttttctgctgggtcaagaccacatccctgccttcaggcctcaaagatttcattaaaagcaatctacaacct

SEQ ID NO: 233861 - DNA, 381 bp, Homo sapiens
tctagtatggtggcccttggccacatgtggttattaggcattgaaacgtggctagtctaaattgagatgttctgtaagtgtaaaatacacagatattgatttcaggctgaaaaaccaatattttggctctgttgaattaaataagagatgactaaaattatgtttacttgtttctttctcctttctttaacatgactactagaaaatttaagattacatgtgtgagtcatattttcattagacagcactgctctaaacaatcattttaactgactacttagcattactcctactgtgtattctcatctgcatttttccagggagttgacagaagtggaagataaactaacttatgcctaaagaaaatgtttttaaaaattg

SEQ ID NO: 233862 - DNA, 224 bp, Homo sapiens
ccgttttctcatctgtaaaatggagatgatactagtacctacctcatagggtggaaggattacataaactaatctatgtaaaagtgtttagaatgaggccgagcacagtggctcatgcctgtaatcccagcactttgggaggctgaggtgggaggatctcttgaagccaggagtttcaagccaggggaccagcctggacaacataacgagaccccatcactatg

SEQ ID NO: 233863 - DNA, 550 bp, Homo sapiens
ctagatataagatatcattgctatcagataaaaataaaggggaaaaaatatctgcaaatacataagactaatctgttgaagtaagttagagtgaagactagtctgatttaaagtactgtaaaatgtcaaaaatttaaaactatgcctgtaaccccagctactcaggaagctgaggtaggaggttcacttaagcccaggacttcaaggcgagcctgggcaatatagtgagatcctgtctttaaaaaagttttttattaaattaaaaactacatctctctgttgttcttttttttgttttgagatggagtcttgccctgtcgcccaggctggagtgcaatggcgcgatctcggctcactgcaacctccgcctcccgggttcaagaccaacttggagaacgtagtgagatcctgtctttacaaaagtattaagatgggcatggtggcacacacctgtagtcccagatacttgggaggctgaggtggggggattgcttgagcctgggagttcggttccagccagggcaacatgctgagacccagtttcttaaag

SEQ ID NO: 233864 - DNA, 401 bp, Homo sapiens
ctttcaaatatgtggtcaattttaaattagcacctcacagttttcgggctggcttcttgtgaaccgctacgaagctaccttaattcaccagacaagaggcaagaagctgctgcttgacttcaggagaggtcctgggaacgtctccagggactgaggttgcttgcaaagctggatttgcccccagggttcaacccattgtttaactaattttattaaactttaaaaataatctttcactataattatcttttaggttttcaaccatctagtgacatttctataactttaccatggttttattaaatgaaagcctttctgactggatctcatgtgacgctgttacatttaatgttggacttcctgtttgctttgtaataaaatacaactaaaatgtgcccatg

SEQ ID NO: 233865 - DNA, 418 bp, Homo sapiens
ttttaagggtagggatgggaatgtcttatagagaaacaagaactgaaaatagatacagccattaaagatgggcacaagtcaatgaatattagaaagatctgtaggacatataggatattcaccatataagaagagattgcagggattcgtagttcagcaggcagtcttaggatatgtaactgaatgaaattgagagtgtctataaagctagtatcatagagttcagaagtcaagacacagcattaagaaattctaatagaacatagagtgccatcaggaatgtttatttactcttagcagggtgtatggatcacaggtttatgggtcatagactggtactcagttagggaaatatgttaggacaagttgcaatttccaaaataactgaattactgaataacaaaataactgaataggc

SEQ ID NO: 233866 - DNA, 773 bp, Homo sapiens
gagcagaagttgagttctggccttggcctgggattgctcagagggtagcagcccctttgcccaagagattgagctgcagccgtgttgctgcctcttcatttggtgaccaaagacaagacaagatcaccacgtggggaggagacagaagtgaaaggcccacctcaatgcaagggtgattagctctttctccagcagtactgactcactttggcctactaatcaatgtgaattcttcataacaggcgatcccctttgagtccaggaggacagagttgatgacagtgtagcctgaaattcctggggccctggattgaagctgtggccctgccatttcctcagtaactctgagctgttattgggcaacagacttcctaggttgtggaggaggctgggttaactggggactttaaatgcttgagccgtgtgttgactcattaactatgtctaccctaggctgaactggtgttgcccttcccttcccaggaaaggcctggcctctcccattctgcccaaggaaaccctctgtgaacttttacattcttccaaactattctgatgtttattggtctggatccattacatcagaagctactgagggtaatatcaggcatctatattttaaaaattggttcccttcacctacaccactcaccttcatggctgtgagattaggggtgggagggcaggggagggttacaccaagggccttgaagctctcaggacagacttgaacaacctttttctcctccatgttcccttcccctttttctttg

SEQ ID NO: 233867 - DNA, 881 bp, Homo sapiens
gagaattgcttgaacctgggaggcagacgtgcagtgagccaagattgcaccactgcactctagcctaggagactccgtctcaaaaaaaaaaatctgccaaattaatactgctttataatatcctctagtagtttgtaagatttttgttctaggctttctctctccccatgtgttctataataaattgaagctgcaaattaagccgatccctccagaatatccagtttccagttagcctgtttatgcccttttgactgtgcctctgggggcactagcagagtctgcactcttacagagagaacaccttagagcctggatagccttgttccagaagcgacttttccaatggagcaaatgtccatgaggctctggataaaggaactgagatgtcagtgtaaatggctgctgtgggctgggccccaagctccccagggtgaaggggccagcacagtccattgaaatgaattcccaaggccagcccttgggtatagtggggggaaaccctgtggctttcctcttcctttctctttatcagctcaggcgccccattgaagtgggaaaggagagagggagaagttagaaaactccatgagaagaggctagggttggtggctcacgcctgtgatcccagcactttgggaggccgaggtgggcagatcacctgaggtcaggaggtccagaccagcctggccaagatagtgaaaccccatctctactaaaaatacaaaaactagctgggcgtggtggcgggtgcctgttaatcccagcttctcaggagactgaggcatgagaattgcttgaaccctggaggtggaggttgcagttagccaagatcgtgccactgtgctccagtctggacaatagagctagagaccccttct

SEQ ID NO: 233868 - DNA, 167 bp, Homo sapiens
ggagcagcatggatgaaggcatggaagtgggaaagggtgaggctggtgagaccacaagcaatacatgtaaagaggatgatgaggctggggcccctatcacatgtcatgcactttcaaatctctaggcatttaaacatgctgttccctctgtgtggaacacaccttcc

SEQ ID NO: 233869 - DNA, 442 bp, Homo sapiens
aacagggctcccacacaccactccgggctgcaccctcctgctgtcttgccacaggggccctgtgccccacaagtggcccgtcctattgtggatcctcaaatttacatgcactgtttcagcataagcctcccattccactctggctttgttttctctttacatccctttgaaaggacagggatataaaaaaaaaatgggctaagagtaaccctactatgcccaggagtggctgctgcatgggggctggatttccttatctgagaggctgtctcacagcgctctgaacgaagctcctgccttagaacaattcgaagccatacacgtgtggcctgtgacaccaaggatctactgggcttttcccatggggctcagtagtgacctaggtgcccagatccctcttctaggcatccatgcaaataaaccgtggtctgtttgaaaggtt

SEQ ID NO: 233870 - DNA, 425 bp, Homo sapiens
ctggatgccctgggacctttgcatgcctgtccttcaaccacactcccagcagatcccagccacagcttgcagaactagagagggcacaggcgggagatgacgactcattctcagcctcctttgccagcttttcttcctccttgagtcctgtgtgccccaggttccatcaaaggccctctgctcttctcttccctcctacacgtttccaggttgtcccacccagacccaaaccttcaattctctcactcctgtggatgaaccccaaatctagatgtccatctctggctgctctcctgtgctcctgacctgagctcccctagaacataagctgcattgaggacaagcatgggtgtctcttttctctgatgtgtctccagctcctggaatatatttggtgatgaataaatatctgttgaatcaattaa

SEQ ID NO: 233871 - DNA, 508 bp, Homo sapiens
cggcagcagagcgagagttcgtctcaaaaaaaaaaaagaaagaaagaaagaaagaaagctatgccccttgaagaataatcaaagatccaaaagagttttgggctgggtattggagaagaggagagaaaggtggtgtagcagagtggtcagggccattgcctttgaaatatcagaggtgccatttacatagctgttggaccttgctaaaatcataagctcttcaagccttatttgcttcatctataaaataggaatcaatgataggaccttttcatagattgctttgtggagtaaatgtgttaaaccttataaacctggcaggtagctgcccagcatatagttgcgttatttactcaattcaaagtactttcctgccgggtgcggtggctcaggcctgtaatcccagcactttgggaggctgagaatcacttgaacccaaaaggcagacattgcagtgagccaagatcgcacccttacacttcagcctgggcgaccgagactccatctc

SEQ ID NO: 233872 - DNA, 455 bp, Homo sapiens
cggcagcagagcgagagttcgtctcaaaaaaaaaaaagaaagaaagaaagaaagaaagctatgccccttgaagaataatcaaagatccaaaagagttttgggctgggtattggagaagaggagagaaaggtggtgtagcagagtggtcagggccattgcctttgaaatatcagaggtgccatttacatagctgttggaccttgctaaaatcataagctcttcaagccttatttgcttcatctattgttaaaccttataaacctggcaggtagctgcccagcatatagttgcgttatttactcaattcaaagtactttcctgccgggtgcggtggctcaggcctgtaatcccagcactttgggaggctgagaatcacttgaacccaaaaggcagacattgcagtgagccaagatcgcacccttacacttcagcctgggcgaccgagactccatctc

SEQ ID NO: 233873 - DNA, 473 bp, Homo sapiens
ttcacctgtgaaatcaaaagataaaatttttaaatttttaaataagaataataattaaacataaaatcttccagagaactaaaaaataaaaaaataaaaatactttctaataccttttatgaatctgtgtaagtttcttatcaaaatttgacagggactttacaagaaagacaatttaagggccaatctttctcttaaatacaaatgcaaaaaccctaggcaatataatagcaaactgaatttagttatataatatgctaatacattatatccaagttgatttattacaaggataaatattgtatagcctttacgaattaataaaatttacaaaattaataaatttaagggcaaaactgcacaaatattttaaaagttgaaaattatttgataaaatttacactctaagtgttaaaaaatttttagctaacaagaaaggcaaaaagaccttcttcaatctgttagatggcacc

SEQ ID NO: 233874 - DNA, 569 bp, Homo sapiens
ggacgcgcatgaaatttggtgctgtgactcggattgggggacctcccttgggagatcaatcccctgtcctcctgttctttgctccatgagaaagatccacctacgacctcaggtcctcagaccgaccagcccaagaaacatctcaccaatttcaaatccgatcttctcggcttagcggctgaagactgacaccggccgatcgcctcggaagccccctagaccatcacggatgccgagcttcgggtaactctaacagtggaagaggccaggctaacagggactgctgatggggaaataaagaaataatcaaggatgaatcctatatctggggcttgagcaaagagtctatcatctacgtagaactgaagatgacagaagacaccaaaggaggacgggggcttccaggaagagccagtaagatgtgctgagtaggaagatgtgaagaaaattgttgaacatgtctgacaatagaagacctaaggcctaagaagtccatttcaatgaatcacaaaagaaatcaaagaacagaatttctctcttttgaagagagaataattgctttattaagt

SEQ ID NO: 233875 - DNA, 440 bp, Homo sapiens
actgaaagaaatttatagctataaatgcttacatttaaaaagaagagtctaggcatggtggttcccacccataattccagcactttaggaggctgaggtgggagaattgcctggcccctctacaaaaaatttaaaaattagccagggatggtggtgcacacctatagtcccagctattccagaggctgaggtgagaggattgcttgagcccaggagtttgaggctgcagtgagctaagtgagctatgatggcaccactgcactctagcttgagcaacagagcaagatcctgtctctaaaaaaaaaaaaacaaacaaacaaaaccaactgaactgtacacattatttacacattaaggcacaaaaaaagagcaaatgaaagagctaacagaaggaagccaataagaacagagctagaaggaagataacagagctagagaat

SEQ ID NO: 233876 - DNA, 1159 bp, Homo sapiens
  misc_feature (14)..(14): n is a, c, g, or t
  misc_feature (136)..(136): n is a, c, g, or t
taaaaaatgtttanagtaatggggtctcactacgtttcccagcctggtcttgaacccctggcctcaagcaatcctctttcctcagcctcccaaagtgatgggattacaggcataagccactgcgcccagctccccnttaattgtatgctgaacaaaccttccattccaggaacaaatcccacttggtcgtggcttataatccttttcatatgctgaatttgatttgctagtattttgttgaggatttttgcatcaatattcatcggagataatggtctgaagttttctttttttgtggtgtctttgtctggctttggaatcagggtaaagctggcctcatggaatgagcttggaaatgttccctcctcttcatttttttggaagagtttcaggaggattggcgataattcttctttaaatgtttggtagcattctccgatgaagccatctggtcctgggcttttctgtgttgggaggtttttgattactgattcaatctctctcattattggtctgatcagactttccatttcttcatgattcaatcttggtaggttgtgtgtttcctctagaaattggtccatttcttctaggttattaaatttgtaggcatacaattcttcataatattctcttataatcctttttatctctgtcgtattggtagtaatgttccctctttcatttctgattgtagttattgaatgttctttttttttcttaatctagctaaggatttgtcagtttggttgatcttttcaaagaaccaactcttagttttgttggttgtatttgtttatctctgctctgatttttattattgccgtttttatgctggttttgggtttagttcttttcaagttgaaataaaaggatggggccgggtgaagtggctcatgcctataaatcccaacactttgggaggccgaggtgggtggatcacaaggtcaggagttgaagatcagcctggccaacatggtgaaacctcatctctactaaaaatacaaaattagccgggtgtggtggcacacacctgtaatcccagctactcaggaggctgaggcaggagaatcactttagcctgggaggtggaggttacagtgagctgagatcatgccattgcactccagcctgggcaaaaagagtgaaactccatctc

SEQ ID NO: 233877 - DNA, 1036 bp, Homo sapiens
gaagggcaaaaccctctcacgccccaccatgcataaatctgcccctgtcgaatagaacagggggatttttagggagattcagctgcccccgccatctgggaggacatcgcaaacctctacatcgggcttgaaaggttaccctggacactggaccctacggcagatggatctcccagtccaaaatggtttacttggtttagctcacaagcgcatgttctgatcattctccatcccaccccatgcccactgtccccaaggccttcctccggccttcccctctgccagattcacaacgtccatttttctttttcggctcttttatgctttaaacatcattgtgatcaaactgggggaaacgttgtcttttctaggggtaggaaggagactctgcttcaggtgatcgaggtggatttgcctttccttcatcgaaagcatcatgactctgaccaagcgcacccaaccagtgcctccgacagccagcgccacgagggtcataacgcccggggcatttgttaccccctcctcaccaccatccccattaaaggcttcgggggcggccgccaggtgtttcagtacagtgggggtggggtgagaaaaaaggtcggtactcaccctcccccccgcccgggcccctagaaactcttgactcctgggaacgcgacagccagcgggtctccggactggagctgctgcagagggccgggaaggagctgggcgggctccgggcccctcgggggctcgaggggccgccagggcccaaagctctagggacacctgtgacaggggccgctgccgcggagtccccagccccaggccgagcccgagccggagcccggctgccgagagcttgctgcctcgtgcgcactcccgtaattcgttaattgctgtaaatcccaaggacggccacatttgagtacacatacagtataagaaccgacaacaaagcgacgaattaattaccaacttcattaacataggtccccaaattaaaggcagcgagctgtttctttgggcccactggccgtggtggtgatgg

SEQ ID NO: 233878 - DNA, 1475 bp, Homo sapiens
  misc_feature (3)..(3): n is a, c, g, or t
  misc_feature (590)..(590): n is a, c, g, or t
  misc_feature (696)..(696): n is a, c, g, or t
atntcagaggcgggcttccctcggaaaacggagggttgaaacccagaaagctcctcggagcccttctggggttcgggcgatctgggcagagaactctcgggtggcaaggaattaagggcagcgcgaacgacggtctctagacaagtatgaagcctcccctgagtgtgtccggcgctcagggggtggaccggggtgttggtttcaaggagggggccatcgtttgcaccacggcgtccagaaatactcatcctttgcccttcggggaggcaacagagcagccaactgactgttctggccaaagagactggagatccagtatcagcaagctactttcttggtaaacctccatttcccaatgctcatctttgtcctctacccccacccatcccaaggcaaatgatgaaaacatctattggatccagcctttgctatcttctccatgctgctcatagtgggtctagcaatgtcccattctcggtaatgtttggtaggtctaaaacatcctcacgaaatgttccccaaatgttctgctccagctgagcaactaataacaatgggaagatgcagaaaaaaaatgcatggagcataangttagttttgggactcgtcagtggcaacgttttagagatgccatgaagaattcctggtaataatccttcttcctacagcatttagcaatgaatactatgggattanggctaaaagatggtcaagactgcctcagccattaggatcagaattctaagttccaaagaagagcaaactcaagaggatttcctcaggcctctgactatagatgctgcctggggagaacaggtgctacactcaaaacattctcattttatttatatcctccctgaactagtacccaactccataaccccagactcaaataacagaaataaaagccatctcactgattataagctctctagttattacaaaaataaataagcatcaatcaaccaacaggcatcagaatgagaaaatcactgatttgagacattcaggctgcaggaaaagaacactttttgttaatatgtaactatatcttcagtagtacagaaaaatgagaagaacgagagttcttacctggatttgcggctcacttaaagtagagcacctgagatgctgggaaatcataaagataaataaccaatctaacaaattcctgccatgagaccaaagtgatccttgactactctattagtaagcgactctgagccaagagtacgaacctgtaagtggagtggtggttggcccattagaaatctctgaaagatctaaacatgacagttaccttcctactggactcatacttctcaattccctctcctaaaagaatacttttgggctggccccagtggctcacacctgtaatctcggcactttgggaagccaaggtgggaggattgcttgaggacaagagtttgagaccagctcggtggaaacatagcaccatccatgtctctacc

SEQ ID NO: 233879 - DNA, 991 bp, Homo sapiens
  misc_feature (3)..(3): n is a, c, g, or t
atntcagaggcgggcttccctcggaaaacggagggttgaaacccagaaagctcctcggagcccttctggggttcgggcgatctgggcagagaactctcgggtggcaaggaattaagggcagcgcgaacgacggtctctagacaagtatgaagcctcccctgagtgtgtccggcgctcagggggtggaccggggtgttggtttcaaggagggggccatcgtttgcaccacggcgtccagaaatactcatcctttgcccttcggggaggcaacagagcagccaactggtaagccctttggggaataaccttgggcttgcacacggccaggcctgaggatgatcgccgctccagtcccgggccctactccctccaggcctcggccctctgcctcggagcggaagacgccacctccgcgtggcgagcaggcggccaacgccgcgggaagaggccgcagccaggccccgctctccaccctcgccctaggagagccaggctgaaggcctctaagggctgggagccgatccggccaggatgcaagcctcccccaccgcttcccggctgcgccgtacagaacccccacctctgttacttggccttcgcagcatcccccttcccatttcctggaggatctctgtggtctgggcaggaaatttgtacccagtgataaggcagaagacaatgaagggggggccactagaccggaggctctacgggaggaaacaatccccgcctcaaggagctggacgccccctggggacccggcccgctggccattccgctgaggccgggcacgcctggagcctgcaggtgctgccggctctcccccagcctttctacgacacacacccggcggccagaaagggtttccgccgggaaactgcctggggcccagaaggggcgcgcccttccttcaccttgtggaccaccagcgacctccccaggtcccacatttataattccactttccagaaggtagaggagagttaaaaga

SEQ ID NO: 233880 - DNA, 1121 bp, Homo sapiens
acctaatttcttttcttccattcctagaaacaccataatgtttctaaataatgattttatagtcattgtcacacccttggcttattttacactaaagaacatagttgagtttttggaaggtacaggatttaaaaatttggtctgtaatatacacacacacatataaatgttgcagttaatgaaacaggaaattattgatgcataagatgaatgtttattgtgaaacagtatttcaaatgttattttttaataatttggtttaattggatatttttctgtactataagttgataatggttttttgaagtaactataagttgataatggttttttgaagtttatttaataaaggtgattcattatactgttttatcataccagtaggacttttaatgttaaatcagtatgttgagttagataagtgtttatattagtatttaaataatgaaatattggccagctagtttataccaaatgtttttgcagtccaggggtgaatgtttctgctggtttgatgcctaatacagcttcaaagaaaaaaaaaaagcaaatatgaattcactgttttttatcttttcttcatggactaccccttagaaccaaatttaaaagaagcttctttgtagagcaagagaaatgagacgttctctttttctataatcaaaactccaagaaatagtagatatccaagaattcattctggtaagatctctgaaacattgcgtgagtaaaggaaaggtaatactgacaaaactctcaggatttgcagtgcagtgaatgctgaaataatctttaaccagcaatatagtatcatcaagatttccagtgttagaacattatgttaaaatgtgattattgtttaatgctttgtctctttaaattaaatttgtgtccataaagatgtacagcataattgttcatgtatttatttacagactacaatttccatcgcagctcaataaatagtctttcccctgttagtgctaccctctcttctgggactcccagcgtgcttccttatacttcaaggccttattcttatccaggctatcctttgtcaccaacaatatcacttgctaatggcagccatgttggacagcggctatgtatctccaatcagg

SEQ ID NO: 233881 - DNA, 408 bp, Homo sapiens
agggggaatttgaagtatctggcctgggggtggcatctaggaggacctgtggctctcagtatgtgtgtaggaagagagaggatggggggaaactgcagtgcttctgggctagctgggtgggacagcatcttcaatatgtcttctctattcacggaccccttccctggagccccatgtaggccatcggagaacttcatatagaatgaaaaggagagaagggtctgggttcggccagacagggagggaagagaccttgatttgtgcctttcatcacgaactccccatgttcaccttccctcttggtaaaaatgaagggcttggagaagccaggggagagggtacttccttggtacctggagatactgtcactatggggagcatgcaaggttcatctttagcagaggttat

SEQ ID NO: 233882 - DNA, 417 bp, Homo sapiens
ggcttctcttctcctgatgaaacctggatgtcaactgtccccctctgctctgattctatggctgcatatctgaatgtagaacttagaacctcctcaggttcttgttttgttttttctctgtctccaaaaaaggaaaaaagaatgaatgtgtaattgtgtctgtcagtaatgatattgttttaatggactatgggacattaactctattcctttagatccttcactaccaattctccaggtagaattcagagcccaagcagtcatttcatctacctcttatgtctgagtgcagttgtgcttaagctatttgagaagatggttattttacttattaacacacataaacacacacaaatatcacattgttaataatgaagtattttccagcctgggcaacaaaacgagacttcgtctcaa

SEQ ID NO: 233883 - DNA, 387 bp, Homo sapiens
tcaggcgaccaggaagagctgaaacgcggcctctccatccctgctacagcagcacctttctcactgggctgcaggcaccctgaccgcaaaggtgttctcacaaccccgcagggtcttgctcctccctgtgccgccaagcttgccactccatctgcctggcacgctcatccccgccatccccatcactggcttcccattgtcccctgggtcttgtccgtgaggaagcctcacaagtcatcctgtctaagtagcactgttggtcttctccatagaaccttctcttcctttcctggcatctatatcatcctggaaccattttatctgcgtgttcacctgtccaaccacactgcgatggttttaaaatatgttcttaattcttagacactc

SEQ ID NO: 233884 - DNA, 479 bp, Homo sapiens
tctggcctcaagtaagcttcctgtctcagtctcccaaagtgcttcagttacaggcaagacccaccttgctcgcctctttctaatcttatactgtcataatatataacatttagcattttgtttcttcttttaaattactccctatgacacattttcagaatcagagatgatgaacatttttacatctaatacaaaatcaaattattaggcagggtgcagtggctcacacctgtaatcccagcacgttgggaggccaagacaggtggatgcctgagtttaggagtttgacaccagcaacatggtgaaactccatctctaccaaaaatacaaaaaaaattagcctactgtggtgatgcatgcctgtagtccaagctacttgggagactgagttaagaggatcgcttgagcccaggagattgcagtgagctgtgattgcgccactgcactccagcatggacaacagagccagacttgtctca

SEQ ID NO: 233885 - DNA, 412 bp, Homo sapiens
caggcatacggtttgcaaatatttttttcctagtctttagcttctttcttcatcctcttgacagtttttcaaagcaaaaaaaacatttcatttcaatgaagtccagtgtatcaatttttccttttatactccttgcttttggtgtcaagtctggagctttttacctaatcctagatcccaaatatcttctcttaggttttttgtaactgtatcattgttctgcattttaagtttaagttcatgatccactttgagttgtttttttgtgtgtgaggttaagatcaagattcaatttttttgcctatggatgtcccattggtccagcactaattgttgaaaagaccatatactctctccattgagaaaggattgcacatttctcaaaaatcatttatgcttatttgtgtgggtc

SEQ ID NO: 233886 - DNA, 549 bp, Homo sapiens
ccagttaagttttcatatccctctaagtcctttggaagcacaggaacaaatgggtccaggggcctcgggaggacaccctctgctcctgctgatgccccagctttctcctgagcttctctaggatattaaagcctggatctgatattgaggagcctctgatctctggctgctggactgactgcccagctggactgactaatgctgctgttttattcttaatatcttacatgccacctcactcctcagagataagtgccttaggttagtgacctaaataacaaaggccaggtatagaacgagaaatcagtggacctgatttaaattgtcattgtctctcattctattcctctctttcccacagaacagtctaatggacctccccaggaaaatgcacatgcacaaaaaatttgcatacaaatttgagagagttctttaatcctttgaggtccatccatggaatccaaattagaaactcctgaacatattactgaaataatccagacaaaagacaataaacagaaagaggcaagagtcataggaaatagtaga

SEQ ID NO: 233887 - DNA, 425 bp, Homo sapiens
ctacagactgctcactagatgggaatggtagccactagtcttctgggcttgcccctttcaacatggaacctctaccctataagcaatctggggaggggctatcaggtccaccattcttggcctggtgtacctggagcagagcttgtgccctatgagtggggcctgggtgggggaagggggccccaggcctcttggccatcccaccagagagagactctgcaacagagttgagagggatgacaccagtggcctgggtttctcagtatgaaactgtagcctcagaccgggagcttggagtagaggcagccccgtcttcttggcagtaaagcttctgtcacactgagctagggcaggaatgggggagggctgtggctccaatgccatagacttttgcttttcttaccaagatttaatagattttcttg

SEQ ID NO: 233888 - DNA, 372 bp, Homo sapiens
ggaaagccccgcgcccgcgttcgttggggcaagcgggatgggctccctcccgcccttaagtctgtcctgtcggggctgacccgcaagaaagcactctttcacagccgctgagggaatcctctccacagcccaggaaggctggaatcagtgatttccttatatgatggacaaggagactgaggctcagagaggtggagcgtatgtcccaaagtcccaagctgcactgagctcctagatgctgtgacccaccctgcacgcctgacacatggaccgacttgaatgcccaggagtggacctgcctgggggccataagggatacatacaactaaatgcagcagagataatcctaataaaagtttttaatgtactgga

SEQ ID NO: 233889 - DNA, 305 bp, Homo sapiens
aggaggtatacagcaccatgatgacatcttgtgtgctgcgtttttacctccacaaactcttgttacggggagttatgatggagaaattgttctatggaacaatagcacagagaatgctcaccatgttcttcaccctgattaccagaggttgctaaagtcaaaattagatacaaaacctcaaaaacttctcagtgctgggagaagccaaccctcccaccccatggcagaccattctaccacgggagtccgcaactttgagattgacactgagggcaaaaatgctgttatgagactttgctttctta

SEQ ID NO: 233890 - DNA, 497 bp, Homo sapiens
ttgcatctgtgttcatcagagatattggcttatgggtttcttatgttgcatccttgtctgtttttcgtatcagggtaatgctcacctcatgaaatgagttagggagaattcccttcaattttttggaatagttagaggagaatgggtgttcttctttgtaagtatggtagaattcaataataaagccatttggtcctggattgggaccaaatgggagacattttattactgattgaatctcattactcattattggtctgttcaggttttctatttcttcctgattgaatcttggaagattgtatgtatccaggaattgatccatttattctgggctttccagttcatgcacagcagttagcagtagtctctgatagctaggcatggtagcttatgccggtagtcccaggactttgagaggccgaggtgggagatcctttgaagccatgagttcaagaccagcctgggcaacatagcaagaccctgtctctaccaaa

SEQ ID NO: 233891 - DNA, 257 bp, Homo sapiens
ccccagatctctggcttcagtgacaggccaggtggaggagccgttggtgagagagaatccagaacaatctggaggggagagtgaacagagccaggagtatggcttgggcttcactaagttggggacgtttggggaacccacttggaaaggtctaggaagcaagctgacataagtgtctgaagctcagagaagtttgggataggacatatatttatgtgcagttggtggctccaaccttggtagttggggcctctggc

SEQ ID NO: 233892 - DNA, 415 bp, Homo sapiens
tgaggtgctggaggaaaacccaggctctattttttttactacatctgtaccctctctcctgctagctagtgtcctttctgcaagaatagaatttttaaagtttcacttactgtttgctgttcctcatttacacatggaaaacagattggcttaatgagcaatagaagatattaaaaattcattatattttcctttacttgggattttcatgtaggctgtctttttatctcatttactaattaattcatcagtcattttctgagcttctaccatgtgccaggcactattgtagacacagaggatatggcaatgaagaaagcacacacagcaccctcgtttcctgcttagacctttctctgctgtgctgatagcctgaatatgcccaattttgagacatttcagattattgtttgaa

SEQ ID NO: 233893 - DNA, 511 bp, Homo sapiens
gttattttatggaaaaaaattatatatcatgatcaaataggatttattcttggtatgcaaatttgttaaacatatgtaaataaatcaatgtgatgcattacattaacagactgagagacaatcatatgatcatatcgattaatgcaaaagaagtatttgacaaagttcaacatactttcttaataaaatctcctagcactctatgtatagaaggaaagttcctcaacataatcaaggacatttatggaaaacacacagctaacattataatcaatgaggagaaactggaagttttccacctgagatctacagtgcaaggatgttcattttcaccacttccattcaacatagtactggaagttctagccagagcaattaggcaagaaaaagaaataaaaggtctacaaatcagaaacgaagaggtaaaactatctgtttttgcagattacataatcctttatatagataatcctaaagattctgccaaaaaactgttatgtataataaatgt

SEQ ID NO: 233894 - DNA, 489 bp, Homo sapiens
agctgcagtgcgctatgatcacacctgtgatcactgcactctagcctgggcaacataatgagaacccatctctaaaaaaatactaataattaaacatttttaagaagacaagaaataaatgctgaccaggattcagagaaaaagaaacatacgctgttggtgagaatgtaaattagtacagctattggccaggtgcagtggcttatgcctgtaatcccagcactttgggaggccaaggtgggcagatcacttgaggccaggagttcaagacttgcctggccatctctactaaaaatacaaaaattagccaggcatgatgggacacacctgtaatcccagctacttgggaggctgacgtgggagaatcatctgagcttgagaggtggagattgcagtgagccgagatcatgcctctgcactccagcctgggtgacagagtgagactccatctcaaaacacacacacacacacacacacacacacacacac

SEQ ID NO: 233895 - DNA, 462 bp, Homo sapiens
ccacctgacagggctagtaaaatgctgccgattacaatttatctagaaagcatagacgggaaatatacaggtcttcttttacagaattggcagctgatggttattgaacctgagctaacattcccaaatgaaatgaggtggggcaatttgagtcatatgataacaatgttgtcatcctggagaacagtctcggtatgaatcagcacagttctgtgaaaattaaacatgtgaacaccaagcaaatgccacagaacctccttcagttacaggcatgcatacctgtatccataggagggccccccactagagcgtgaagtggcccaatgttcctggagaaagagaggggctgctgtcaccgactagacgaggtttgtaatagtatcgtcctgttttcactctccacagtagaaaatttctactaggctaacaaggcagagggtaatgagaaacatgccaagttta

SEQ ID NO: 233896 - DNA, 368 bp, Homo sapiens
gagtgcttactgctctacaggcctcccaatgggcctgggctcagagaatacagtggttaataaaacagacatggaaatgacagtttcctcatctgtgaaataggtacagagatagaatgcgtgctcttccacggagggatttcatgcaatatagtacaggctttagcgatttgcattaaaaggcttgtgaacacttaaattttaataaagaagttataaaatttagaagttgaatctgttttcgcttaaacattaccatattcaggaattattatgggtttgaaagtacatttaatttaaaaaggttagttgaacattgttggcaaatataggatattataattgaaataaaatcattaaaaacttga

SEQ ID NO: 233897 - DNA, 500 bp, Homo sapiens
cctcctactctaccttccttcccttcaaggaaagggaataactcttgatagacataaactaagttaatgtctacccatttttatcttaaggcactgatttcttaatttaaaaaaaagaggttgtgaaaaataagacataaacaaaccatggtacgtatggtccagaatgcttggaacctgaagttcttcaacagagaacaaataggcaagcatcaggaagacagagaggggccaggccatgggtaacgtggcacagggaagggaggggatgaacatgtgcacagagcacatccctgttttaacctgagatgcagaagcagattcaagatgtcagcgtatcccagagagtggagcaccaagtcacacatgcaaatcagtaaagaaagcagagtccctgaagccaccgaaatgcatgttccaccagcctagaaaagcagagggagagttcgtatacaattcccaaggaggcagaagagaggggttcatggctgaaatgcctg

SEQ ID NO: 233898 - DNA, 320 bp, Homo sapiens
gtaacttttcaatacaactggctttctttgtagtccagcttattttatgcatttaaaaatattctgagaggggttccacagaactttcagcctgctaaaggagctcttgccatacagaaaatatgagaactactggctttatttaatcccaaagcctacctctctttccattttgccacccagcctgcctcacactgtattttcctccctggttctcttcttttccagattatcttaaaatgggtccctacacagaattaaaaaaaaaaaattcactggaaattcaaccactaaatcaactaatgcactgtctcctatta

SEQ ID NO: 233899 - DNA, 569 bp, Homo sapiens
tcatgttctagttggcttcaactagaagcatttctcccactagtccattaagttcaaaaaagaactgggaggtgagaatgataattctatttaatttatgtgcaagaaaggaggttcaggcaatgactgagaaactgagtaacgatggcatataagagaaagactgcatgagcaaagctaatgttaggtattgtagcaggccgcaaaactagaggtgctcatttatttttctgttttgctcttaaaacaaataataaaaatgtacgctttgggttaatgaacttaaaaatcttgccaaagtatatgtgttaacacagagagagcccaaggctggctgccagcaccccggagtctgtaattatatatcagcaggtagacactctcattgtgactccttgaatttgttttaactattaacaacaacaacaacagaaaagtctttaaaaatctccttaccaaatatttcagtagagtttccaacttcaattatcaataatctctgtttttactctgagtttctcaatgtaaaaactaaaggatataaaatttccttaacagccgggcgtggt

SEQ ID NO: 233900 - DNA, 382 bp, Homo sapiens
agtttctcaatgtaaaaactaaaggatataaaatttccttaacagccgggcgtggtggctcacgcctataatcccagcgctttgggttaatgaacttaaaaatcttgccaaagtatatgtgttaacacagagagagcccaaggctggctgccagcaccccggagtctgtaattatatatcagcaggtagacactctcattgtgactccttgaatttgttttaactattaacaacaacaacaacagaaaagtctttaaaaatctccttaccaaatatttcagtagagtttccaacttcaattatcaataatctctgtttttactctgagtttctcaatgtaaaaactaaaggatataaaatttccttaacagccgggcgtggt

SEQ ID NO: 233901 - DNA, 521 bp, Homo sapiens
gcctgagccatgcgcacagcattttgttttgttttgttttgtttttgagatggggtctctcggtgttgcccaggctggattgcttattcacagatgcagttacagtgccctatagcctcgaactcctgggcctaagtgatcctcttgcttcaatcccctgagaagctgggactacaggcatggaccaccacccctgattgatcttctttagtttctataacaaaatagtacactgtttccacaaacttgggaaggctagtatttgggggtggggggcgtggaaatcactaaacaacaaagaaaatctgatgaattggacagcataaaaatattggcataaagatgaacataacataagcaggaatatttaaagcacatactttttatagagtgtctcccctgtaatgtctctggttaaatgaaagggtttcaaatgtgaagacaaccctaaccatactcattatctgtaaaagatgtagcattgtcatggactccttaataaacgtgaagactttaatcca

SEQ ID NO: 233902 - DNA, 373 bp, Homo sapiens
gcaccattgcactcctgaactccagcctggaccacagagtgagactctatctcaaaaaaaaaaaaaaaaaattgctttctgggtaggaaaaaaagggaagggaaaggaagggaagggattgattttgaaaggaataggaattctatacacatatacctccatatatacaaacttgaagtatggataaagattgagattgctatgtgggttataaaagcatgaggttggaagtaacttatatgtctagcaataggggattgattaagaaatcaaagtacagtctttcaatggaattgctatgcaactgttccaaagattgaggaatgtctagataagctctggttagtaagagtctccgagatgtattgtcaaa

SEQ ID NO: 233903 - DNA, 487 bp, Homo sapiens
ggacttccagtaaaatattgaaagtgggccttcttatttggttcctgagcttttcccttttcactatgatgttagctgggagtttgtcatatatggtctttattgcgtttaggtgcataactctatacctaattcgttgagaaattttgtcatgaaaggatgttgaatcttgtcaaattattttctgcatctattaaaatatcacatggtttctgtcactctttcttgtaacgtggtgtagtgcatttgttgatttgtgtatgctaaatcatcttgcatcactggcattaatcccacttgatcatattgaatagtcttcttaatatgctgttggatttggattgctaacaccttactaagaatttttgcatgtacattcatcaaggagtttttgttggcctgttgtttttgttgttgttgctgtgttgtttggttttaccaggccactactgccctgattccaaaaccaaacaacacagcaacaaca

SEQ ID NO: 233904 - DNA, 753 bp, Homo sapiens
agagactactatatagagactacttatatagacatagagtccctggacacaaaacacctgaccaaccgaccaaacctttccaccttgcccttcttccacagtgcttcggagcagagaggaagcactcccctctgggctgctggacagctcagcgagtccactgacctggaacaggcccaggaaggcaaagggggagaggagggtagagcagacactcaggactcaacagcaggaataaacaggtccagacgggccacccaggatacagtaaagggcctgaagtcattgttttggtaagggagccccatgggacaagagccaggaaaataaaaaaacgtatttcaatagatacccatttctacaaagcagcgataagctaagagctgctttgctgagaagtaattgacaaaaagtaacaagtagaagacttcttggtcttgaggaccttcttgtaaaaggcagaagcccgtgacagatgccaaactgctagctttgagcagcagtcccattgtgccggcccagctggtaaaccatgactagaagcactctcagggctctgaagctacgttaagtgcctcctggactcctcaagacacgaccatgagttgtttggtttcaggtttgaaaagcctggctgagagcctgggctccaccacccatgtgtgttcagagagctcttgcttatgcttcaaaaccctatttcatcagcatcacctcctctgcaaaaccacccgtgggctcatttaaaatttt

SEQ ID NO: 233905 - DNA, 1739 bp, Homo sapiens
gaaaaatatgatcatttcataatgatgaaggagtcaattcaccaagaagacataataatcctaaatgtttatgcacccataatggagcttcaaaatatatgaagcaaaaacatacagaaccagatacatcacaattatactagaagatttcaacacccctttagcaatagttgatagaatagttagaaaattagtaaagttataaaaggcttgaacaatactatcaaccaacctgacctaatttttttgttttttgagacagggtctcattttgttacccagagtggagtgcagtggcatgatcatggctcactgcagcttcaacctctcaggttcaggtggttttcccacttcagcctcccaagtggctgagagtacaggcatgcaccaccatgcccacctagctttttaattttttgtggagactggctcccactatgttacccaggttagtttcaaactcctgggctcaggtgatcctcctgcattggtctcccaaagtgctgggataataggtatgaagcactgtgcctagccaacctgacttaattgatatgtatagaacatgccaccaacagcagaatatacattctcttcaagtacacacagaacatttagtaagataggcattctgaattataaaatacatctcagtagatttaaaggacttaaatcatgttctctgactacagtgaaattaaatttgagatcaataacagaaagtacactggaaaaaaacccaaatatttgaatactaagtaacacacctctaaaaaaaacttagggggtcaaagaataaataaaaaggaaaattataatgtattttgcactgaatgatcaaaacacagcatatcaaaatttgtaggggcagtgaaagcagtacttagagggaaatttatagtgctaattgcctatattaaagaaaagaaggtctcaaatcagtgaccttggtttccatgttaagaaactggaaaaacaagaggagacaaaaatataagtagcataagaaagtctgtagtagaagtaatgaacaagtaaaaagtattagaagagaggaaattataaatatcagaacagaaatcaatgaaatagcaaacagaaaaaaataaacaacaaagagcaaacaggaaaaaacctgttctttgaaaatatcaataacactgataaatgtttaactagaccaatacagaaaataagagagaagacacaaataacaaaattaccttatatctattaaagaaatacaattttaataaatttgaatcatcataaagaagacttcaagcccagatggctttgttggcaaattctactaaacatttaaggaagaaataataccaatttcacataaaatattccagaaaactaaaggaggagggataatttccttctcccgctatgaggccagaattatgatacaaaagataggcaaagatattattaaaaaaagaaaactggccgggcatggtggctcacacctgtaatcccagaaatttggggggccgaggcaggtggattatctgaggtcaggagttcaagaccggcctgcccaacatggtgaaacctcatctctactataaatacaaaaaattagccaggcatggtggcaggcccttgtaatcctagctactcaggaggctgaggcaggaaaatcgcttgaactcaggaggcagaggttacagtgagctgagattgtgccattgcactccagcctgggtgacaagagcgaaactctatct

SEQ ID NO: 233906 - DNA, 1105 bp, Homo sapiens
tgcccgccctcccctgggtgcggagccggacggcgggcactggcaacccccgggcccctggagagccccgcggcggcccaagacccgctcccgagacacgtgggcccctccggacttggttggtccctggagccagctgcgcgcgtcctctccggcctccttgtcggcgctggagtgggtccacgtctgccttgcggagcgcggtggttccacgctcctgagcgcccacgctgcgcagacctggccgctctgcgaggcgacggcagcgcactgaagaccgtggtgtttcccaagccctccctgctctcgggcctccagggcgcagcaggggagggttttgtccccgtggccaaagctctgcaggtcgaaccttatctgctatgggaaggccccgcattttcagattcacgcagggccctctgcagactgttggcagaaaaaaggtagccaccaaacacatgcataagctggacttttcccagaatgctgcagcagaactaccctccagatagacactagcctgcgggccacagtgctacgtgagtcttgcaaagaggagatctttatggcgaggctgagagcactgcctgcatgctttaccagagcccagcctccagcctccacggaaaatgtgttttggaatcaacactctttgcaaaggctccacactgctttctggtagcattggcctgggcgcccaggcactcctttagaacccacctgttccccccacccaccctagtgggaggaggagagggttacactgacagataccggcagctctgcaacccgggaacaacgcagacaacatacaactcgacagagtcacagaaggtggcgtccatcgcgcctggatggtgactactgccctgcgggctgctgggtgggtgaaacacacagggaagaagcacaaatacacacacagatgtggctcagggacatttgaatgcttcagtgtgtgaattttttagcgcattctgactcgaaattatggctgaatagtggcgcactaatgtccaagtccatgttcgataatggcaggaagtctgcactaattggtctatttagtagttgctgaggtggcaaaagctgcagctgctggtgg

SEQ ID NO: 233907 - DNA, 696 bp, Homo sapiens
  misc_feature (10)..(10): n is a, c, g, or t
  misc_feature (44)..(44): n is a, c, g, or t
  misc_feature (57)..(57): n is a, c, g, or t
  misc_feature (70)..(70): n is a, c, g, or t
  misc_feature (78)..(78): n is a, c, g, or t
  misc_feature (81)..(81): n is a, c, g, or t
  misc_feature (85)..(85): n is a, c, g, or t
  misc_feature (94)..(94): n is a, c, g, or t
  misc_feature (102)..(102): n is a, c, g, or t
  misc_feature (109)..(109): n is a, c, g, or t
ggtaagcccnccccaaaacaacaattgccaataaaggttgggancttttttcccaanaaatgcttgaaanaagaaacntancccntcccaagantaggacanttaagcnttgcgggggccacagtgctacgtgagtcttgcaaagaggagatctttatggcgaggctgagagcactgcctgcatgctttaccagagcccagcctccagcctccacggaaaatgtgttttggaatcaacactctttgcaaaggctccacactgctttctggtagcattggcctgggcgcccaggcactcctttagaacccacctgttccccccacccaccctagtgggaggaggagagggttacactgacagataccggcagctctgcaacccgggaacaacgcagacaacatacaactcgacagagtcacagaaggtggcgtccatcgcgcctggatggtgactactgccctgcgggctgctgggtgggtgaaacacacagggaagaagcacaaatacacacacagatgtggctcagggacatttgaatgcttcagtgtgtgaattttttagcgcattctgactcgaaattatggctgaatagtggcgcactaatgtccaagtccatgttcgataatggcaggaagtctgcactaattggtctatttagtagttgctgaggtggcaaaagctgcagctgctggtgg

SEQ ID NO: 233908 - DNA, 748 bp, Homo sapiens
  misc_feature (145)..(145): n is a, c, g, or t
ttctccaaactgccgcattctgctcagatggaccagactttgagaatgggcagataaccagcagaagatgttagtgaacgtgtttaaaagaaggagcttctggtgatgaactgtcattcgaactgggcgggattgtgaggcttcngtcaccccagggctcttccaggaaaggctggcaggggccgcgggtgccctggagctgcctgcaggagtcaggcactaagtcagtgggagccaaggttggaaaggaagacccccttccattccatcctgaatgactccatgggtgagtgggacccaggacggctgcccttcagagctcagcccagttcccagagacgagacggtgagatggttaccaggatggtccctgccccttggccccggcctctgtttccagctgctccccttagcatctgcacaattgcctagtgaggccatcatgaccctgtgggcacagacttctgggactgatgcctgtggttgtggcacccccaccctcaccccttctccccacaggctgaactttgatccacacttttcctttgatttcaccgtctcctcccacgcctaaaataacatacaggcctttggctatttccaaagggtttctgggaactgcgccccagtgaggaggcttcccagcagccttggccttcccttcaggcagactcctcatccacagtcaggagcccacaggtctcagttcactgacctgctgagaaagaggaaaaaccttcaacacatt

SEQ ID NO: 233909 - DNA, 419 bp, Homo sapiens
atgaaggcccacattcttagaaggcccgtggggctctgtgtgatctgaccccgatttccactctagcctcccctctccctgtttcccctttgctgtctgtgctcagggcacagggctttcatctggaactggtcagacgcctttccaccgcagggaaggtccatgctgttcctgctggtttctgctgtcttttgccttgataacctccactcatgttttagaactttgttccaaatcacttcttccagcctcccccgacccctactccccaaagggtcaagttttcctttgtagacttaccacactgtaattaaatgcatgtgtcagggctgggagtgtacggaaaatctctattccttcctctcactttttctgtgaacctcaaactgctctaaaaaataaaagttctttaaaaaaaa

SEQ ID NO: 233910 - DNA, 454 bp, Homo sapiens
aagggtggggaggggtgcaaaaagttcagtcatgaagataagccatatttaatgcaatatgttaaaaatcaaaattaatccacaacaagttataagcaaaatatctagatattattaaagacagcataagttctgcaacagcagaactgagcagttgtggccaagagtgtatcacctgcaaaacctaaaatattaactatatttagtttacttgctaactcttactctacagcatttaggccttagagttattttcatatttcctcttaacagtttctacgttagcatataacgtagattagtaaagttttgtttgacaaaatattccttgccaaagactctgtcaatcagaaaataaataaaataaaatgtatgtggacaataatatggcaagcatgaactctttatttatttattattattatttttttttcttgagatggagtctcgctct

SEQ ID NO: 233911 - DNA, 361 bp, Homo sapiens
tgcaaaaccaggtttgaaacatttcccttattctgttattaaacctcacccttttgtaatatttgaggtttaattttcacatacttacaacttgattttttagtgcatttatagatcaactcattattcaggatttgtatttgtgtcttatattctttaatatttcttggcatccagcacatgagtctaaaagatacatggtaattttagttcctaagatgacaactacacatacacagccatatatccagaggtggggaaaagggtgaaaaatcagcctcatcaggaactgaaaatagatgggtttctatttcatgcctttaaaatattgtaaagcagatcccagggatatataggtttt

SEQ ID NO: 233912 - DNA, 712 bp, Homo sapiens
gccaaagtggcatattttggggtagcgttttctgccacccttcaagcccaaatgtctatcaactgatgaataaataaaatgtggtatatccatgcagtagaacatacttttcagccacaaaatgggataaagtactgatgcatgctacaacatggatgaaccttgaaatcattatgccaagtgaaagaagccaatcaccaaagaccacatattgcatattatgtgattccatgtatattaaatgttcaagataggtaattcatagagacaaaagttagattgttggttactaggagcatagaggaagggggtggagggagtaaggaatgactgctgatgggtagcaggtttctttttggagtgatggaaatgttctggtgatggtggaacatcttgataaatacactaaaagccactattttataccaccatacttggaaaaataatttaaaaatagagaaactggtagttttggagagagaaaatgtatttctacttttggaacactgggagttctcaaatttctcaagcctactgtgaagaaaagactactctgaaatttgggttacttagcttgtttgtttgtagagatggggtcttgccactatgcctggcctaacaaattgtttttgaataagataaaatgagccgagaggggaggatctcttgagcccaggagatggtgaccagcctgggcaacatagtgagaccc

SEQ ID NO: 233913 - DNA, 201 bp, Homo sapiens
gcgtccccactcccggaagaactgcgcgtttagagtaatgctctgccgtcagtgccttgacattctccatcattcttcaacaagaagcctcaggttttcattttgcactgggcctcccaaattatgtagccaatcctatctcaaagccaccatcatcttatgccctgccagtctattctgcttgtagctgccaagagattt

SEQ ID NO: 233914 - DNA, 397 bp, Homo sapiens
aagaggtttaatttgcccctagttctactggctttatagaaagcgaggtgctggcatctgcttctggtgagacctcaagaaacctacagttatggcagaaagccacggggagccactagggagccaacatgtcacatggccagagctggaacaagagagagtggtagaaactgccatatgcttaaataaaacagatctcgagagaactcacttgctaccacaaagacagaaccaagctatgagggatttgtcccatgacccaaacacctcccaccaggccccacctccaacattggggattacatttcaacataagatttggaatagacacatatccaaaccatatcagtgcttataaaattaaatattggcaataaatagaaaggtgtgctttaaa

SEQ ID NO: 233915 - DNA, 351 bp, Homo sapiens
ggagaatctcttgaatccaggaggaagaagttgcagtgaaccaagattgcaccactgcactccagcctgggcaacaaagcgaaactctgtctcaaaaaaaaaaaaaaaaaaaaagaaaagaaaagaaaagataattagggactcggaaagacaaagactgaaggattggtggcaatgagttttggggaaaaaatatgtagatgaaccacagtatcatcaggaaggttatcaaatagatatgaaggtatgaaacaatctctttcaccaggcactacattgcttgctcataaggctaataaacagcaacattggtggtagcagtagtagaatacacataggtttagcaacatg

SEQ ID NO: 233916 - DNA, 2465 bp, Homo sapiens
cagcccagaggaccccaggcgaccagagtccaggctgaggcccgaggtggctcaccagctgttcagatgcttccagtatcaggaggacatggggccacgggcgtccctgagccggctccgggagctctgcggccactggctgcggccggctctgcacaccaagaaacagatcctggagctgctggtgctggagcagttcctgagtgtgctgcctccgcacctcctgggccgcctgcaggggcagccgctcagggatggggaggaggtggtgctgctgctcgagggcatccaccgggagcccagccacgcggggccgctggattttagttgtaatgctggcaagagttgtccccgtgcagacgtcaccttggaggaaaaggggtgtgcttcccaggtccccagccacagccccaagaaggaattgcctgcggaagagccttcagtgctgggcccatcggatgagcctccccgaccccagccaagggctgcccagcctgctgagccgggacagtggaggcttcccccaagttcaaagcagccgctgagcccggggccccagaagacattccaggccctgcaagaaagcagtccccagggcccctcaccatggccagaggagagttcccgagatcaggagctggcggctgtgctggagtgcctgacctttgaggatgtgccagagaataaggcgtggcctgcacaccccctgggattcggaagcagaaccccagacaaggaggaatttaaacaagaagagcccaaaggggctgcctggcccactcccatcttagcagagtcccaggcagatagtcctggggtgccgggagagccttgcgcccagtcgctcggacggggcgctgcggctagcggccctggcgaagatgggtcccttcttggcagcagtgaaattttggaggtcaaagtggctgagggcgtccccgagcccaatccggagttgcagttcatctgcgcggactgcggggtgagcttcccgcagctgtctcgcctgaaggcgcaccagctgcgctcgcacccggctgggcgctccttcctgtgcctttgctgcgggaagagcttcggccgcagctccattctcaagctgcacatgcgcactcacacggacgagcggccgcacgcctgccacctgtgcggccaccgcttccgccagagctcgcacctgagcaagcacctgctgacccactcctccgaacccgccttcctgtgcgcagagtgcggccgcggcttccagcgccgcgccagccttgtgcagcacctgctggcgcacgcccaggaccagaagccgccctgcgctcctgagagtaaggccgaagcgccgccactgaccgatgtcctgtgctcccactgcggccagagcttccagcgccgctccagcctcaagcgccacctgcggatccacgccagggacaaggaccgccggtcctccgaaggctccggcagccgccgccgggactccgaccggaggcccttcgtgtgcagcgactgcggcaaggccttccggcgcagcgagcacctggtggcccaccggagggtgcacacgggcgagcggcccttctcctgccaggcttgcggccgcagcttcacgcagagctcgcagctggtcagccaccaacgggtgcacacgggcgagaagccctacgcctgtccgcagtgcgggaagcgctttgtgcgccgggccagccttgcccgccacctgctgacccacggtggccctcggccccaccactgcacccagtgcgggaagagtttcggccagacccaggatctggcccgccaccagcgcagccacacgggcgagaagccctgccgctgcagcgagtgcggtgagggcttcagccagagcgcccacctggcgcgccaccagcgcatccacacaggggagaagccccacgcctgcgacacctgcggccaccgtttccgcaatagctccaacctggcccgccatcgccgcagccacacgggcgagcggccctacagctgtcagacgtgcggtcgcagcttccggcgcaacgcgcatctgcggcggcacctggctacccatgcggagcccgggcaggagcaggccgagcccccgcaggagtgcgtggagtgcgggaagagcttcagccgcagctgcaatctgctgcgacacctgctggtgcacacgggcgccaggccctactcctgcacgcagtgtggccgcagcttcagccgcaactcccacctgctgcgccacctgcgcacccacgcccgcgagacgctgtactagcttggcccgccttccgccagccgcgccctgcgccacctacccggggtcctccacagcggaggcctgcaggaatgtcccttcccaccacaccccacttccctctccttccactttcacagctgtccttccctggccgaggcattgctttctggcctcagctatgtaattaaaacgcccgaagtaaaatggccttctccaa

SEQ ID NO: 233917 - DNA, 416 bp, Homo sapiens
caggctggcggaggctggctttggccctggagtcctcagaaaaccccccagcatctctgcctgtgtagtggggactccgagtggtgtgggaggagaggagagagacccaagagcggggctggcgttagggaggcatccccgcagtgaaggatgcttggagaatcagtcccagctgccgtggagcaggagcagctgggggaagtcaaggctgtactagcttggcccgccttccgccagccgcgccctgcgccacctacccggggtcctccacagcggaggcctgcaggaatgtcccttcccaccacaccccacttccctctccttccactttcacagctgtccttccctggccgaggcattgctttctggcctcagctatgtaattaaaacgcccgaagtaaaatggccttctccaa

SEQ ID NO: 233918 - DNA, 224 bp, Homo sapiens
tgtggaaacaggcaggtatggtcaagagagacactggaagatggaagttacttcagtgttccagttgctggtgtagccagggcttcacagcgtggaagtatggcatcatgatgtctactgcacatctattcccaaccccatattcagttgtttcatgtagtctcttgaaatctatggaaactagaaaacactacaaataaagccttgatttattgttttgttga

SEQ ID NO: 233919 - DNA, 412 bp, Homo sapiens
aagtgaatttgtgagccccgtggcagtgtctaggtgggggtgcctgtgacctccaaagccccagagggaatattacagtgctcttttagctctgccatctgcagagggcttaagtgttagcacctcagttggccttctgctttttcacgtgaggtggctgctttttgccagcaagagcaaagggccagtgtgacagctttttgtatccacacttgtggctcccaagctcttgtccagcacccaggaaaaatgaggtcgcacaaacaaattgaaggatgcgtggaagtatggcatcatgatgtctactgcacatctattcccaaccccatattcagttgtttcatgtagtctcttgaaatctatggaaactagaaaacactacaaataaagccttgatttattgttttgttga

SEQ ID NO: 233920 - DNA, 470 bp, Homo sapiens
atggaggaaactagacatgtgaagtatgccacctccaaagattctgacaccctggcacaaaattgagatgataaattctgataagattccaccagtaggtcatctcttggtagatatttgaacatgccctagaattcctctgttagttggaagtttggcttacctagcaactgggtgaggctgcctactgaatggcattttgaaaagttcagacttaaaatttcctattttgttttttctccattatgagtcttaccagtcctatcacaaacttttatgggaaagtggtttttcagctacaaaggtatttgtgcattttgcccaagacatatgtcctcctcaagaatatataactgtcatattctgtattgacatgagaatcaggatcatattaccacaagtagctagaagatttcattggttgtaagccagggaatggtctgattgattttgtccagcaagtaaaaaaa

SEQ ID NO: 233921 - DNA, 378 bp, Homo sapiens
cacaagtcatgtgatcacgggtgctctgtgacccttagctccattgtccacaaagcggcgacagacatagctcatagatgctaagggcctcactgtgcctctagaaagatccaggtacatttaaccagtgcaggtttcctgctccttctctccaaggaggacctggtgaggtgaccaggccaggtaactccagagagaagctgtgccttccagccaggaacgcttgatgtgggtggtccgcccgagctgtgtccctggttgctgacaaggcccttaaggctgtccccaaggggatgggagtcgtgggtctcagtgacctggctctggcctgagcttctcagagctctttcacacagcagcctctttcctctgcctttt

SEQ ID NO: 233922 - DNA, 390 bp, Homo sapiens
ctctgtttcctaacacgtgcatcaagcagaaggccactgtcctgccaactcccagggcgatggaaggaacagaatgaggtgtggacacaggagtagtttgtgccacagcactgtggggctgggatgtggctgtgtctagaagcgtccaagagagccttgatgtgcaaggtccaaccccacctctgcccccagctccaagatggcctggcacatatcccccacccaggtttttcctcccaggctgtgccccaccccccaagcgtctggccactcccaaggaatgtgggcccccggctccagacgcccacttggcctggcttcttccacaggacatgccccatccagctgcatccctcaaaggagccccagagcaggcagaccctgctgcca

SEQ ID NO: 233923 - DNA, 479 bp, Homo sapiens
ttgttcactgtaagtactttgtagacatatgagttgttttcagaattgttccttgtgattttctttcagcttttggtttttttggagacagtgtctccctctctcacccagactggagtgcggtggcccaatgtcagctcaccacaacctccgcctcccaggttcaagtgattcttgtgcctcagcctccctagtagctgggattagaggtgcatgccaccacgctcgggtaatttttgtatttgtagtagagatgggggtttcactgtgttggccaggctggtcttgaactcctgacctcaagtgatctgcccgccttggcctcccaaagtgctgggattacaggtgtgagctactgtgcctggcctcttcttttccaaaaaaaataataataaaaaaaccttttctgcttatgtattttaaattactgaataaattacatgtttgtacatgtttgttttagaaacactagaaaatgt

SEQ ID NO: 233924 - DNA, 377 bp, Homo sapiens
ggcaggattattctgatttgtatcacagtaacttaatgtaggaacattgacctttggatgtaacggagaggaatattaaaattcaaccttggggccaggcgcagtggctcatgcttggaatcccagcactttgggatccgaggtaggcggatcacctgaggtcaggagtttgagaccagcttggccaacatggcaaaactcccatctctactaaaaatacaaaaattagccaagcatggttgcatgcgcctgtaattccagctactcgggaggctgaggcatgagaatcgcttgaacctgggaggcagaggttgcagtgagctgagatcatgccactgcactccagcctgtgtgacagtgagacctgtctccaaaaa

SEQ ID NO: 233925 - DNA, 402 bp, Homo sapiens
tggtgtaagcgtatggccacaagtcctctctgggtgtcggcagagcctctgtgagggcatagtgtctgcttagggatcttgaacgtccttgctgcgccaacacaaaacaacacgtgctacaatgaaatgcaacccagagaacacgaagtggcggcttctgctgcagtggttacgtggtgactggccagtcctcagaaagttgatgggaaggatatgagcctctgtaacttcccagaaaaagaagaatgaaacctgccaagtgcatctactagacagacagcgaaaataccagctccttcatataccaccactataaaccactgtcgcaacagaaaaggccctgctcacccttgcacctccttcccaaatctgctgtcacattttctcaaagagaagcaggga

SEQ ID NO: 233926 - DNA, 379 bp, Homo sapiens
tatatcttataatttgtataggtagcaatgaaaatctcttttcttacttaaggaccagtccttttattttttgttttagcaatttttttgtggacccaacttttatcttttattttttatttatttatttatatttttgatatggtcttgctatgttgcccaggcttgtctcgaactcctggactcaacagatttgcccacctcagtttcccgagtactgagactacagacatgtaccactacagtcaaccagtcctattttctataaatattcccatcagcccgtcaggaccttactccattattttacatcagccttctgtcaaagtgtttctattgctgtgtcctttctctcacatttctaaatgaaattaaaaca

SEQ ID NO: 233927 - DNA, 210 bp, Homo sapiens
gagagggggtgcctggtgtcttctttctctctctgcccccaccaagtgcggacgcatcgagcttcggcccccacccctgcattcgcgattggctcccggaggaggtggctggtgctgccgccgctgcagcatctcctagggagccgcgaccctgcgcccgccgccgctgccgctgtcaccagcccggccccaggggtgccctgggctccg

SEQ ID NO: 233928 - DNA, 164 bp, Homo sapiens
cctttagaccaccactttaattgattgcagttggaaagtgaaaggaaagtgaaatgaaatgttttccagatactgggccaggtgatttctgtggttcctttgaatatttatcattttctgattttttggaattcccaaatcctggccaaccatctcccaaaagc

SEQ ID NO: 233929 - DNA, 568 bp, Homo sapiens
aataccggggaactgttagaacagagctttcaaagtctctgtggggaaggactgggttggtttattttatttacatgaattttcaatgtgtcataagtcaatactttgtgaactataataaaaatgtcacagtagcggcaaactgctatggaaacacataaacatatactttaaatttctgtacttacctttcatggattaataatattttgcgatggcccctggctgcagaccccctttgaagtagccccgaaggcccatttgtgcttcccagtgctgctctgtagacagctgcaggcgctgcatgggaatcatctgcagtgagccttcaaaccccccacctaagcccgttccatttatgttcatagaagtatgtgaatccggattttcccctaccatgcagcccaaacgagatgaaagtaattagacatatagggtctcttgagactgcatctgtatctacaactcctgacttcagatttttgctttcttcaaaacagccttatactctttgcattgtttgatgttttaaagagtaaatattaaaaatttgaacttataaaataca

SEQ ID NO: 233930 - DNA, 156 bp, Homo sapiens
cttatatttaaatgctcacttttctcagatactgttctaagtgctcagtaaaaattaagtcattttatctttataaccaacccttgaggtagggaccacctttatatccatctcacagatcagacacatttgaaacttcgaaaatttattcaacgt

SEQ ID NO: 233931 - DNA, 112 bp, Homo sapiens
ccagcctggttaacataatgagaccctatttcttttgtttttcttcaggaaatacgtaggtgtggtggctcatgcctatagtcccacctactcaggagatgaccctatcttt

SEQ ID NO: 233932 - DNA, 369 bp, Homo sapiens
cctgacctcaggaaactcaaggtcttgactcaaggtcgtgaacgatttgcaattgtatcttcacatatacgacacaaatgaggtataagcatttggctcaagtcataacgattgcaaattaaggcaaacactttgacgactgaagggcagcttccggacttttgatgggagaaggctaatgctgttttttagaagcattagcacacccgcggtcacttaattcaacaaatcagaactgtcttgtgcatataaaagttaaaaattttaaaacttctgtgaataaagataaaatcttgaacgataccctgatttttcagggaagcgctgtttgtataaatataaaataaatgagaagcgtattgtgtcatc

SEQ ID NO: 233933 - DNA, 313 bp, Homo sapiens
gcatggggtgattgctatagagtgacagtttgcatcccccaacattcatatgtggaaatccttatgtctaaggtgatggtattaggaggtgggccctttgggaggtgattaggccatgggtgcagagcgggattggtgcccttataaaagaagttcaagagagactcctcgccccttcctccatgtgaagacacagcaagaaggcaccatctataagccagaaagcaggtcctcatcagatactcaatctgccttgatcttggacttcccatcctcccgaactgtgagaaatacatttctgttgtttataagc

SEQ ID NO: 233934 - DNA, 390 bp, Homo sapiens
agtgtatcatattatgtcttatacatagtagttgctcaataaatacttactaaatttaattaaaatatttatatatttcatttggatagctctaagtacccatctcattcttatctatttttaattggtgttctttactttctggttttattctttatgtgaggaagcaagtctcaaaatttttggtctcaggcccctttgtactcttaaaaattattgagcactccaaagtgcctttatttgggtaggttatgggtattgttatttttgcattagaaattaacattgagataatttaaaaatatttattagtgcattctaagatagcaataatcaacccattatattttaatacagataacacttttatataagtttctatattttcca

SEQ ID NO: 233935 - DNA, 504 bp, Homo sapiens
agactgaaaatgcaaagtgcacaagagtctctggccaggacaggcattgaaggtcagcttcttctcctcctggagctcagctctgtgatcaggaaaccaattgtaaagtccagaatgaggacacgggctctacatggtgtggaatggcagtgagacgggctaggacttcagaactcaactgatcacacacaggagggagaagaacaaccaagctgggcttcaagatgccttatttggacactagtttttgatgtgtctctgatggttattaaccagacatttcaagggcaagaaactatttccccaaaactaccttttgagacatttccagaggctgccctgtcctctctgtccagagactcagccccgactcacctcctctaggaagtctcccacacggacctcgctctgctccctcctcctcacggctgaccctgctgggtcgtcctgccagctcggacacttgtttgttgtggcttttgtaaaatactctgtagtcatttt

SEQ ID NO: 233936 - DNA, 445 bp, Homo sapiens
gtgcacatttacgtggacgggtgaatggacaaagtcatattgtttgacgtcagattctgtttgctgcatcacttgaccttgaaatgtgccaaatttagatccactgtttgtggtcacttgcacgaaaaagcaatgaaatggtgggggtcggggagtatgccagatgaatagaaagaaatattagccaccaaggccctctcaagtgtacgtgtgtatacatgtggcctacgtgctctatgatacccacatgcatccagagacatttcacattttaaaacttatattttattcttaaaagtggaatggggaggaattataacaataaactgcgtttacttccttaggacacggtccaaaattcagggcttcaggtttgtaggatggaccctggccacagaatgtttggtcacaaatgtgtgaataaacggctcaaagtgtgatttgt

SEQ ID NO: 233937 - DNA, 401 bp, Homo sapiens
cgtcagtccacatcccaaagatgcacacattgggatgtgggaggaaactggagcacctgaagaaaacttcgcagacatggggagaacttgcatgctccacacagacattggcctcggccaggaattgattctttatccctcatcaacattataacaaaacgacactgaacagaataatgttattcaagaacctgctgtactgcacatggtatttttcagttctacagttaaatctttttaagtctcttccctgcccacttccaaagcacacatacacatcactatcactaccttgggggtctacaaaaatctagttcaaatacggaagaaaacaggtcatgctggaaggccatccaggtggggatgttcaaagggcagttggaaacttgtgtggaactcca

SEQ ID NO: 233938 - DNA, 599 bp, Homo sapiens
gggacagagtctcgctccgtcaccccggctggagtgaagcggcacaatctcggctcactgcaacctctgcctcccgggctcaaatgatccacccgcctcagcctcccaaagtgttgggattacaggcgtgagccactgcgcccggccatgctacgatctttaaaatgaaaacctaatcttggcacatctcggcctaaaaatcaccatgacccttattgccccccaagtccaggagctttataagaactagaaaactgcccctcccgcaagtctcatgtctcttttcccttcttgtaggtcaggcttcagccatacaattcctgaaatttctctcccatcctttcttactggagatacctgcacttgcttttcctctgcctagagctctcccctttacactccacccccacctgtgcctggcctgttccccctcacaggttcccccttacctagaaggcctttcctgactccctctgaggagaaggaggagcagggcttcaagctgttttgtgcctctgatttccagttaactgtgagtctcccgcactcaagcatgactgctgtgaggggagttacttcagctgtcatgtaactccata

SEQ ID NO: 233939 - DNA, 172 bp, Homo sapiens
cagattcttaaccaagccactccctgtctgtttgactttgggaaaattacttcatctttgaaaactttcatctgtacaataagaagaatgacaagtgacaagtacgtcatggggttgatatgaagattacatgatatagttaaatgataaaattaaatgctatcattataaa

SEQ ID NO: 233940 - DNA, 852 bp, Homo sapiens
ttaacctcttggactcaagcaatcctcctgcctcagcctcccaagtaattaggaatataggcacatgctaccaggcctggccttacagttattttttgtagaaacagggttctctctatgttgcccaggctgatgttgaactcctgggctctagcaatcctcccaccttggcctcccaaagtgttgagattacagccatgaaccattttgcctggccctttttttttttttaaacatagcattacattgtatgaggtattataagtaatctagagattacttgaagtatatgggagtatgtgagtagcgtatcaaagttgtatttattgagtggctgaaggtgaggtattattttgtggatttgtctttaaaatcaacattgaagtattttatatttttttaaattatgagatagcattacatttcagttaaattacaatgcttttaactaggtagatttcctctgcggcattatgattttaatccagtggttgatgagtatgactatatatgtttttcaatccctgatcaaacattaagtccttattagaaatcagtgaaatgtggccaggtgcagtggcccatgcctataatcccacactttgggaggctgaggcgggtggatcacctaaggtcaggagtttgagagcagccttgccaacatgcgaaaccccatctctactaaaaataaaaaaattagccaggcctggtggcttgcgcctgtaatcccagctactcgggaggctaaggcaggagaatcacttgaactggggagatggagattgcagtgagctgagattgtgccagtgcactccagcctgggtgacagagtgatgatctgtctcaaaaaaa

SEQ ID NO: 233941 - DNA, 691 bp, Homo sapiens
cttgctcctaggttgccttctaggagtttattgttttgtgttttacattaggtctgtaattcactctacattagtttttgggaaaggtgtaaggtctgtgtctagattccttcttttttttttaaacatagcattacattgtatgaggtattataagtaatctagagattacttgaagtatatgggagtatgtgagtagcgtatcaaagttgtatttattgagtggctgaaggtgaggtattattttgtggatttgtcttatttcagttaaattacaatgcttttaactaggtagatttcctctgcggcattatgattttaatccagtggttgatgagtatgactatatatgtttttcaatccctgatcaaacattaagtccttattagaaatcagtgaaatgtggccaggtgcagtggcccatgcctataatcccacactttgggaggctgaggcgggtggatcacctaaggtcaggagtttgagagcagccttgccaacatgcgaaaccccatctctactaaaaataaaaaaattagccaggcctggtggcttgcgcctgtaatcccagctactcgggaggctaaggcaggagaatcacttgaactggggagatggagattgcagtgagctgagattgtgccagtgcactccagcctgggtgacagagtgatgatctgtctcaaaaaaa

SEQ ID NO: 233942 - DNA, 440 bp, Homo sapiens
gagcacactgcgggtccgtgggtcagctggggtgtctccgctcctcgtgtctcttatcctccttggacctagccaggaatgctctcatgggaatggcagaggcaaagatggttgggagaagaacaatcaccaaaaatgcagagtggggagcgggcctgagtgttggacctctccttaaacaaaccttcctgcagcctccaggtcaccatccttgtcacctctactgccagagacatcgagtgccttgaagtcctgggctttccggggattctgtggggtatttccagtgaagtcccactctcctcaaccctcagaggatctctggaaggccacacagaacctgggacaggaaccaaggcacagggatgggatggagactcacaattcactgttaacattttgattctcatttgaatttttaacacacgcatctatcactt

SEQ ID NO: 233943 - DNA, 447 bp, Homo sapiens
ttcatttgtaacattttgatttctccaaatttcactgagggttattgacatcacatctagttaatgactaagttctgaatctggtgaggaggttaaaatcttagagacgagtaacttgttattaggacattagaagagaagaaaattcaaataattgcatttttgttcagttagttttgacagtagttattctaccaaagcgacatttacagttgcagtttctccgtaaaacttttttatgtttagcactaaatgctttttataatttcgaataatttttagacctagtggcagaaaattcttcagtggtccctaagtcttcttcatattgcactcacttggagacctttcaaataatagattactgggtcacatcccaatatgtctggtcctagtgaattgatattgtgtggaacagagaaatctatttttaaagcaagctttcca

SEQ ID NO: 233944 - DNA, 347 bp, Homo sapiens
tgatttactattgactcattccaatgctagccttctctctgagaatatattactatgggtgcccaaggtcaaggcaacacaagtcatttcccactcagggtagtgaggtcaagtttcatttatttcctgccacatgttaagttggaagatgacactagcatggcatcgtaagttcattgtagagctctaatcaccataaaaagcatcaagttttcactgaaaattttttcctttttttcctaccaggacgtctgtcattttcatattgatttatcagcccttagtgtaaggatatcatccattgtttgtcttacgtttgcaaataccaattcttttctcagtcttct

SEQ ID NO: 233945 - DNA, 438 bp, Homo sapiens
agtctctaagatatatcactcaatttcataacagaacacaaattaatgtataagatagtaatgatgggaatgaaaaggtaactaagacatagttccagtcctcaaggacttaaaaatcttactcactgttgagtttggccaactatgtactacctttataaacaggggaaaaaagtagaaaatcatcagcattctggtgttattcagaacactcgagtcagagcaagttctgattccagttctaacagtaactgtgattttagacaagtctctttcttacaacctctctgtgtctgtgcttcatatacttattcaatgaatgaactaaatccactggtttccaatcttactatgcaagagccccatttattctttttctccataatcctgtttttaaaagttttgtctttaaaactttccatttgtaagtcgtggcaa

SEQ ID NO: 233946 - DNA, 484 bp, Homo sapiens
ccatatgtatcacgtcaaccattgcccatctagcatctggcacagtgccaggcatatagtaggtgtccaaaaaatattggaatgaatgaaattctcgagaagttctctcactttagggccttgggatcgagggcaggagtgtgcctgtgaccagctgtcattagttctattgactacctgtgggaaagctggtcaagtggccacttgctcacctcaagacaatgaatgaagctttcctggatgctaagtgactgccaccttgtgagctaagcctggcaagacctttgggctacacttccctcctcactgtgagctgtggcttgggcaggctcaaaggggcccactcactctgcagatgtgcctcagggacatggatgactctgccagctgcacttgagggcaaaataatcatttacagcttcccaggtaaggctaacacttactcaactgcagtaactagatgcccccaatttaataaaaatta

SEQ ID NO: 233947 - DNA, 219 bp, Homo sapiens
cccatcccccatccctagtaaacagcaccagtgcagtttgagttagaaaactggaaatattgagacattcctaaggttttcatcacgactaagggccagtcagatggggctctaatgaaaacctctgccatggccgttctccaataagcaccccatgtaattccctctaagtttgcaaataaaacatattaggtctaatgtaaggccagattctggaaa

SEQ ID NO: 233948 - DNA, 266 bp, Homo sapiens
cctcttctatacttaagttattttgactataactgatcactgatcacccatcatttaaaaaatctgctagtgtttttcattcatgtgaaaagggtatctgcccacaggaccaaatgaaacatagtcacctcatgtgtagccatcacagagtaactatagcaattccacttttgaaaagtgaaagaaagaaagctcctcaagcacatgctgaaaataagtaggtactttcaatcttatccttagcatcctatattgtgtactattca

SEQ ID NO: 233949 - DNA, 2472 bp, Homo sapiens
  misc_feature (885)..(885): n is a, c, g, or t
  misc_feature (2083)..(2083): n is a, c, g, or t
  misc_feature (2140)..(2140): n is a, c, g, or t
ttaggaaatgcagttttagtaggattgtatggactgaagtagagaattaagtgaagaaatttttaactgaggagaatcccttaatgtggttttggtttggaatttttttcttaaatttttgtagatacatactaggtatatatatttatgaggtacacaagatattttgataacggcatgcaataaataatcacatcagggcaaatgtggtatccattacctcaagcattaatcctttaattgtattacataactaaaaaagtataaatggattgatttggggtttttttaccttatatttaaaaataacctttaaaaatcccacatactgaatgccacatgaactaaaagcatgaatttattaccaaaagttgtttgtaaatctaatatttcatatggaatcttactgaacagcattcaggagatttcttgttggctaattcctcttgagtctttttgcaaagtaattgtattctttattccatctatctattgtttacatttatgtattgagggagaacgtagagtttagttttgagcatttttgtttgagtcgttcattaaacatcaagtggagatcttgagtgacaattaagttgtatctggagttctggagaaaaaatgtatactggattagtcagggatagatgggaagtaaagttgtgagactggatgagaactctccaagagaatgagtataaatagacttgcaaaaatctgtgttagaattatcaacacagattatgacccagccaactgaaggaaaggaataagatcagctcaaaatattggcagaggacaagaactagtttaaaaaaaaaaaaatgaatgaatgagtgaatgaaaccctcgcagtacattgtatgctaatactattctcctatntaaggggctttgagtatccgtggattttggtgtcttagggtgggaatgggagggtgattcctggaaccaatcccccatggatattgaggaactattgtaaatttactgctttctctctcgttatttttcagatttacctgtctactccagcatatcattgcagagtaccagatttaattttaacaattcataataaagtctaaaacatttttaaagctgatcaataaattttaaaaatttgttaatcccataaaatggggagagttggcaccaatataatattactctgataaacaattctggggcaggaatatttccatgcctctatgctaaataaaacttagaacaagcaaacatagttgtatgcttgctttaggaaaatctcactcttgatggtgaaacaactaaaatagcttatttatcaagactgatttcccaaaaagacttgcttcaggacttcccatttcatcattcttaccaatccaaaactattttgtcagttctaaccaggttctcaccttgaaaaatgctgattaaagtggtccagcccacccaaccctaaaaccttgtaaatatccttctctgtctttcctcttcttgttcttcctcactgaagtcagtctgctaaacttagctttgctagatgagtgaggttttttaatgttgtttggagagttgacagtatataagctagttatgctgaataatatatggggaagaaatcaagaattcagaatcttaactttcttttcttattttttaactgtctgctagtttatctgtatggacatgcatgtctgaccaagctatgaaatctccattcttagattgaacttctttccttctcgcctccatttatttttctcatctacccccaccccaagtcatgggatagggagagttgtcctattccttttctgtctcctaaagtagtttacccttatagaagtcttgaaaccagattcatattttatctcattttagtaactagtatccaaatcccaccaagtttacataagaaatagcaaaacaaaaggaaccaactgggtatttatctaccaatgaagatactttaaatagcaatacatacaaggtaatgatctaactttgtatgttttgacatagaaaagtaaacaccgtgaaagtaggtgaaagagtatatatattacctcatttttaaatgctttcgtgcataaanaaaatctgaaagtctgtgtgcctcaggaaagaagtagataatcactttatttttttnaaataaatatcttttattacctctgcaattaaaagtattacacatttttaaggatgaaacaatgagagacacaatgatgacatacatctgccaagtagatgctgattttagagaagacttttttcccagtttgttgaaaagtatgagtaggtaggtagttaactgaaggtaactgaaggtagttactgaaacttttaaaaaattaaattcttaaagtctttgtaccgtcttttcccagaatatggaatatgtctttctacttgaacttctgagattcctaaagcaatactgtttaaacacttacattgtcactaacaatggatttaagtgaa

SEQ ID NO: 233950 - DNA, 1318 bp, Homo sapiens
ttctaatgaggacataagtgagggacactggaaagaccaaaagagaatggaaagtactgacatggtagttgcagggtgctagtgagcagtcatgcccccaaatcagccaccttacatagaactccccaagttcagggccactggatggggttgtgacgcagtcaagcagggcccagaaagcatacaagcagttggtttcatctcctgtaagaaagtggcatcatccctgctttgtaaacggagaacctgacacacaccaagagcactcctagccgtggaaaaaagccgctagaacccgaggttagtctgatttttggttcctctgaaaattagcttttgctggatgctagattcagttctggacttactgagtagtctctgggtttttgacattgttaggcactgtgggaaaattataacaggtacgtctgcgctgagttgcttgctaattcctaggagagacttggacattttggacaattaagaagcaatacaggccaggcacggtggctcacgtctgtaatcccagcactttgggaggctgaggcgggtggctcatctgaggtcaggagttcgagaccagcctgaccagcatggtgaaaccccatctctactaaaaatacaaaattagccaggcgtggtggcacatgcctgtaataatcccagctactcgggaggctgaggcaggagaattgcttgaactggggaggcaaaggatgcagtgatccgagatcacgccattgcactccagcctgggcaacaagagtgaaattctgtctcaaaaaaacaaacaaacaaaaagaagcaatacagctctttgagaaagatgcagtcataagtggtgcagagttgcagtctgcccattcctgctcctcactcatcgctgttccgaacaagtcagccaggaagccgcactgcaccaaggcttttaaagataccagaaaacacctgtgaagctggaggtgaccattcaccaaattcgaatccctctaatgatccgcagcgtaaaatccctggagaaggtgtgtgctgactggattcagaggaggaaaggaaaagaatgtctaagtgaagggaccagtttgaatgcctgccaagactttgagaatcactataagaaaatctccttgtggtgaaggttcagagacatgggatcgtttccagatgagaatccacaagctacccactgacttgcacagtccttctgagattgttaagcagttgacttccatcagtgttgagccaggaattgaggtggaagtcaccattgcagatgctcaaagtcaactattttaataaactgattagcggttgttat

SEQ ID NO: 233951 - DNA, 235 bp, Homo sapiens
tcatgctcgggcctccatgcctggtccagggcttttgccctggcctcggcctgccccctgcagccctgggacagtggcagccacccttctcgagcacctgcttccttcctgccggacttgggtggggatggtaattgctgctcggttttcctgtctgggctgctgtgaggattccgtgacactatggatgccgaaaccctttctaaagaaccataaagccctagagtatggaagg

SEQ ID NO: 233952 - DNA, 409 bp, Homo sapiens
catacacttgccacgcggaccctaaagccagtgcctgggcgcccaagtcaggcagtccacacagcagtggcaccagggtgaaaacctgctgctcaataccatcccggttaccacgaagagccagccctggtggcccctgagttcttggaggaggccaagtcacagcaacccctcaagtgggtgggcgatgcacttgaccctgaggacatcaggtaccaggcctgccagctgactccagcatcggagccgcagctgcagtctagacgtggtgcaccggcaataagtgactggacaccccagaccaggcccgcccccaagtagcgtggatcttgaggccagacccctaggcggcaaaatcaggcgacgggccccgccagcagccgctcagtttcatccatgtggatacaga

SEQ ID NO: 233953 - DNA, 375 bp, Homo sapiens
taggtccatccaaacacctgctttgtccacttttgactgggactttgggcactactgggccatcccaactatccacagggccctccataacgtgcattgcacctgacatctcccagcagtgctcagcagcccccactgaccaggtccctgctgaccatatcccacacatcaggtcctcccagaacacaccctcattgattagaaccccatgaccaggccccactaaccaggcccctgctgccaggcccacaatgaccaggaccccactgaccaggaccttactgaccaggccccactgacaaggtccttactaacaaggcctcactgaccaggtccttactgacaaggcctcattgaccaggtccttactgacaa

SEQ ID NO: 233954 - DNA, 549 bp, Homo sapiens
tccacaaagagcaactgtaaaacctgggtaaaattttgtttaaaaatatgtttgagggattgagaggctgcagaggcagccaggacttggggagccaggttctggaattttacagaggtgagccccactttctgcatttcatggtgaagtattgaacgctttgccgctgaggtcaggaacactgttctcatttctattcaggattgtgcttggaggtaccaggcagacaacaagacaagaaaagaaaagtcttaaggattgaaacagtaagaaacacaggtatcattcattatttgtagacaatgtggttgtgtatgaagaaaatccaaattaagtaacagtcagactcttaagctgagtaagtaatttagcaagatcaatgggcaggggtcaatatactaaacttaattgtattttagtatttttatatatatcaatgatgtacaattggaaaatgaaatttatagatatcacttataatcacatcaaaattgagtacataggaataaaatcatatctaataaaagacgtgcaagacttctaagcaaa

SEQ ID NO: 233955 - DNA, 307 bp, Homo sapiens
atgagttaatttctgagatctgcagataagtagggcctctgagaaagcctggttgtttacttcaccaatatagatttttctcaacagatgcaaatcttaatgaaaggcagctttttagggctattgttgtctgcaggccctctgaatagccgtctcaaaataggtcaaagaaatatatttgagggtgaaatctttttggtttcctttagtctcccacttgaaactttatcttcacaaagattcacatattaatcaaagattggtagctatggggaaatttgggttggagattgtgagatagattgac

SEQ ID NO: 233956 - DNA, 151 bp, Homo sapiens
tgaaaaatttatttgtggattccttagattacctttttgcattactttaaagaagaaacactgtaaatgtttgctgtattaaagagaacaactcatacaccttttcacagaaagtagcaattaaaaactgtatcttagtgctattatctac

SEQ ID NO: 233957 - DNA, 652 bp, Homo sapiens
agtcagtgtagacttctgggaggaaggagtaactgtaaggtagcaaaagtggaccttttagggagtgggtcacattctgttcttcaactggatggtgcttagaaggtgtcactttgtaaaaagtctgtgagctctggactcaagatatatacatttatacctcaataaaaatttattttaaaatattaattagaataattgcaaggtagaacccaggaaacctcccagcaaggagagcaaaaacacagagaaagaaagcaggaaaaaaaaaaaaaaagatgaaaactggacctgtccaggagactgaacatctaggtaataggatttccagaaagaactgagaaaaatggaagaggaggtgatcaaaataattcaggaaaaattcaagaagagaaatacagggatcacctgtttgacagggcccacaccaagtgtacaacccaaatggatgaatctgcttggattcatcactccaaagcacctcatcaaaactgtcacaaagtattaataatcagatcaacactaaattcatcaacagccacactgcaaggtacctaccttaagaggtaggtacctaccaagagatagcatttccttaatcatttcttcctctacatctttcctttcccccaggacaggcaaactaccatat

SEQ ID NO: 233958 - DNA, 472 bp, Homo sapiens
acagggtgtcactctggagcccaggctagagtgcagtggtgagatcacggctcactgcagtctcaacctcccaggttcaagcaatccaccaaccttagtttccccaaagtgttaggactaccaggcgtgagccactgcacctggctccaaagggaaatttatgtatatttaaatgacaagttttggcaagatgctgtcgtggaattggtaaaattttttgtgagtctattaaatctaaaatactcaacatcaatgaaaagtaactataagactcaaccacacagacaaaaaggaaaagcacatatattaaagaatttggccaggtgcggtggtacgtgcctgtagtctcagttacctgggaggctgaggtgggaggattgtttaagaccaggaggcagaggttgcagtgaaccaagatcacaccactgcactccagtaagggcaatagagcgagacactgtctcccaaaaaa

SEQ ID NO: 233959 - DNA, 449 bp, Homo sapiens
ttgccctcatcccctgccctgtctctgagacgtgtccagtaaacctgaggtcagcacctcaggaatgaaataatgtcttttgcagcaacttgaatgaagctggaggccattattccaagtgaaataactcaggaattaaaaatcaaatgccatatgttctcacttataagttggagctaagccatgcgtatgcaaaggcatgcggggtgacataatggactttggagactcagacatgagggtggcaggtggatgaaggatgaaaaaactacctgttgagtacaatatatactactcaggtgacaagtgcactaaaatctcagaatccaacactatataattcattcatgtaaccaaaaaccacttgtacccaaatgatattgacattaaaaaaaatttaaaactaacaaaatttataataaaagctttttaaaaaataaaaaataaaa

SEQ ID NO: 233960 - DNA, 422 bp, Homo sapiens
gaagtttacaatagtgtgtaggatgtagccgctacccttggggccctgggaaccttgcaccacagttatgtatgcgagtatattctctccccaaggtgaacggtggagcttttgagggcaagaccctgcacctcacagcccaggcattgacaaacgggaaatcggacttttattttcaggtttgagctcagtttaattcttccatacagctaaatatgctattgctgtttgggcctttcagcaatcttagggaggcgagtgtgccgtctcgttttttgctcgcagaaacaatacgtggtcattgtattttccatttccgtttaccttttttttttgacagaaaagcacaaagaagcaaataaattataatcccagcactgagagagaataactgttgtcgtgtagtgtgttttcttctgtca

SEQ ID NO: 233961 - DNA, 1195 bp, Homo sapiens
  misc_feature (994)..(994): n is a, c, g, or t
  misc_feature (1146)..(1146): n is a, c, g, or t
  misc_feature (1150)..(1150): n is a, c, g, or t
  misc_feature (1154)..(1154): n is a, c, g, or t
  misc_feature (1156)..(1156): n is a, c, g, or t
  misc_feature (1160)..(1160): n is a, c, g, or t
  misc_feature (1165)..(1166): n is a, c, g, or t
agcgggtttccggaagtcgcggccggcgtcaccgctgcggctgcctcagctactgccgcagtcgccgcggaattcggcgagtagaaccgctgaggcgggcgcgggcccgggtggggccaaggttccggccactctgcagaatggagataatcaggagcaattttaagagtaatcttcacaaagtgtaccaggccatagaggaggccgacttcttcgccatcgatggggagttttcaggaatcagtgatggaccttcagtctctgcattaacaaatggttttgacactccagaagagaggtatcagaagcttaaaaagcattccatggactttttgctatttcagtttggcctttgcacttttaagtatgactacacagattcaaagtatataacgaagtcatttaacttctatgttttcccgaaacccttcaatagatcctcaccagatgtcaaatttgtttgtcagagctccagcattgactttctagcaagccagggatttgattttaataaagtttttcgaaatggaattccatatttaaatcaggaagaagaaagacagttaagagagcagtatgatgaaaaacgttcacaggcgaatggtgcaggagctctgtcctatgtatctcctaacacttcaaaatgtcctgtcacgattcctgaggatcaaaagaagtttattgaccaagtggtagagaaaatagaggatttattacaaagtgaagaaaacaagaacttggatttagagccatgtaccgggttccaaagaaaactaatttatcagactttgagctggaagtatccgaaaggcattcatgttgagactttagaaactgaaaagaaggagcgatatatagttatcagcaaagtagatgaagaagaacgcaaaagaagagagcagcagaaacatgccaaagaacaggaggagctgaatgatgctgtgggatttctctagagtcattcacgccattgctaattcgggaaaacttgtanttggacacaatatgctcttggacgtcatgcacacagttcatcagttctactgccctctgcctgcggacttaagtgagttcacagagatgacaacatgtgtattccccagactcttggatactaaatagatggacagcacacaaacttttacngatntcantnaacnacacnntcctttcgcattgcgaaagcgctcacaca

SEQ ID NO: 233962 - DNA, 954 bp, Homo sapiens
agcgggtttccggaagtcgcggccggcgtcaccgctgcggctgcctcagctactgccgcagtcgccgcggaattcggcgagtagaaccgctgaggcgggcgcgggcccgggtggggccaaggttccggccactctgcagaatggagataatcaggagcaattttaagagtaatcttcacaaagtgtaccaggccatagaggaggccgacttcttcgccatcgatggggagttttcaggaatcagtgatggaccttcagtctctgcattaacaaatggttttgacactccagaagagaggtatcagaagcttaaaaagcattccatggactttttgctatttcagtttggcctttgcacttttaagtatgactacacagattcaaagtatataacgaagtcatttaacttctatgttttcccgaaacccttcaatagatcctcaccagatgtcaaatttgtttgtcagagctccagcattgactttctagcaagccagggatttgattttaataaagtttttcgaaatggaattccatatttaaatcaggaagaagaaagacagttaagagagcagtatgatgaaaaacgttcacaggcgaatggtgcaggagctctgtcctatgtatctcctaacacttcaaaatgtcctgtcacgattcctgaggatcaaaagaagtttattgaccaagtggtagagaaaatagaggatttattacaaagtgaagaaaacaagaacttggatttagagccatgtaccgggttccaaagaaaactaatttatcagactttgagctggaagtaagtatttatattgtatgcagcagctctgtgggggacccaggatttaaagactaaatataatctcttagttctcatttcctttttgaaattctgcggttctcagtgatttgactacatgaagttccccctactttcttaagttgaatactcac

SEQ ID NO: 233963 - DNA, 1112 bp, Homo sapiens
  misc_feature (911)..(911): n is a, c, g, or t
  misc_feature (1063)..(1063): n is a, c, g, or t
  misc_feature (1067)..(1067): n is a, c, g, or t
  misc_feature (1071)..(1071): n is a, c, g, or t
  misc_feature (1073)..(1073): n is a, c, g, or t
  misc_feature (1077)..(1077): n is a, c, g, or t
  misc_feature (1082)..(1083): n is a, c, g, or t
agcgggtttccggaagtcgcggccggcgtcaccgctgcggctgcctcagctactgccgcagtcgccgcggaattcgattttaagagtaatcttcacaaagtgtaccaggccatagaggaggccgacttcttcgccatcgatggggagttttcaggaatcagtgatggaccttcagtctctgcattaacaaatggttttgacactccagaagagaggtatcagaagcttaaaaagcattccatggactttttgctatttcagtttggcctttgcacttttaagtatgactacacagattcaaagtatataacgaagtcatttaacttctatgttttcccgaaacccttcaatagatcctcaccagatgtcaaatttgtttgtcagagctccagcattgactttctagcaagccagggatttgattttaataaagtttttcgaaatggaattccatatttaaatcaggaagaagaaagacagttaagagagcagtatgatgaaaaacgttcacaggcgaatggtgcaggagctctgtcctatgtatctcctaacacttcaaaatgtcctgtcacgattcctgaggatcaaaagaagtttattgaccaagtggtagagaaaatagaggatttattacaaagtgaagaaaacaagaacttggatttagagccatgtaccgggttccaaagaaaactaatttatcagactttgagctggaagtatccgaaaggcattcatgttgagactttagaaactgaaaagaaggagcgatatatagttatcagcaaagtagatgaagaagaacgcaaaagaagagagcagcagaaacatgccaaagaacaggaggagctgaatgatgctgtgggatttctctagagtcattcacgccattgctaattcgggaaaacttgtanttggacacaatatgctcttggacgtcatgcacacagttcatcagttctactgccctctgcctgcggacttaagtgagttcacagagatgacaacatgtgtattccccagactcttggatactaaatagatggacagcacacaaacttttacngatntcantnaacnacacnntcctttcgcattgcgaaagcgctcacaca

SEQ ID NO: 233964 - DNA, 319 bp, Homo sapiens
acagatgttttatttcccttttccagcattccatggactttttgctatttcagtttggcctttgcacttttaagtatgactacacagattcaaagtaggttgtgttaacaaacgttgggaattccgtttttgtggcacaatgtcacctcctaagtctccttttatcttatcccaggtatataacgaagtcatttaacttctatgttttcccgaaacccttcaatagatcctcaccagatgtcaaatttgtttgtcaggtaagtagcataattgagatttttcttttctgaattgctgatgaggcagcatggaaatgtga

SEQ ID NO: 233965 - DNA, 384 bp, Homo sapiens
tgtgtggatagtggacaggtgctgggaatgatggatggcaggaagatctgatactagagcagttaaaattatctaggcaagtgagatggggaaatgaagtcaaacagcagcagcagggatggagggaaagtgacaagtttatgagtctaaactggagagagagaggatgagggaagaagaatgtagaatttgaagattgtttggttcttctggtcttccaattatgttcaagtatatgtgagatgcaatggtcaaagtaataggtacataataaataaaccatttctgttttcagcatctgtagatcaaactttagcttgccttagtttatcattcgtgtgtttagactatgatcaaataaatatattcattttcacactctat

SEQ ID NO: 233966 - DNA, 340 bp, Homo sapiens
gagaccctgtctcaaaaaataataataataaagcagaaaaattgagataagaagtgaatgtgaacaaaataagatggaaattggtggctgcgtgccatggttcacgcctgtaatcccagcactttgggaggctgaggacagaggattgcttgagcccaggagttcgaggccagcctgggcaacatagtgagaccctgtctcttacttttttaacttttttattatatggggaagactggacccagatgtctgcctgaatacataactaatacttatagagtgcctactatgtgctgggcagtgcttaaagagcttaataaatattaactgaataatttaa

SEQ ID NO: 233967 - DNA, 743 bp, Homo sapiens
attgcttgagcccagaagttcaaggcttcagtaagctacaattaagccattgcactccagcctacatgacaaagtgagaccttttctcaaaaaaagaaaaagtatcaaagatccaaagcaacattgcttagaattcccttcaaacaaatttaagctatttaagaccaaattaaatagaccttattttaattggggttccttgtaaccgtgtacttgacagtagaattctttttctcttgatgttatagtattataaattgggatattgtggttgtcatgacatttgaaatgatataaataaactgagaagaaattgacttaaagtgagagtctggcttcacttacgctgggattcctgagacaaaggtatgtgtccggagcagagtttagagaagaagctttgtcagaatggaaggatctagagttatgctctgcagtatggtggccactagccatatgcagctatttaaattaaaattaaagattcaggtgcacttgccatgtttcaagtactcagtagccacatgtggtcacatgtccttgtcttagcacaggtttgtaacatttccaccactgcagatagttctattggacagtgctggtaaggatttctactgtctgtattttcttatttatatgaaagagcagatgctgggcacagtggctcacacctgtaatcctagcactttgggaggctctgtttgagaccagcctgggaaacatagcaagaccccatctctaca

SEQ ID NO: 233968 - DNA, 535 bp, Homo sapiens
attgcttgagcccagaagttcaaggcttcagtaagctacaattaagccattgcactccagcctacatgacaaagtgagaccttttctcaaaaaaagaaaaagtatcaaagatccaaagcaacattgcttagaattcccttcaaacaaatttaagctatttaagaccaaattaaatagaccttattttaattggggttccttgtaaccgtgtacttgacagtagaattctttttctcttgatgttatagtattataaattgggatattgtggttgtcatgacatttgaaatgatataaataaactgagaagaaattgacttaaagtgagagtctggcttcacttacgctgggattcctgagacaaaggtatgtgtccggagcagagtttagagaagaagctttgtcagaatggaaggatctagagttaatatatatagtgtctagaatcctgcacggttatatactgagctacaagtgttggctgacataattattgtgattattatcaccacccaagaccagtgtgtgatgagag

SEQ ID NO: 233969 - DNA, 369 bp, Homo sapiens
tgaaagatgttagctcctgtttaaagagaaagaaattactctcctctgaaagccgcacttggcagcaagattactggctggtgagaagcagcgtgagcccggacgctgcagctggagtggcaatgcctggcttccaatgagagctgcttacagtgactacatgtccatgcatgcaatcgtccatctatccatccattcacctggtcaggtaaatcctggcgaagatctgggttcacacagaacacaataccctttctccagaggaccactgacacaagactatttgaattaacattcctacctccactaacttggcagaagaaaacaagtgcataaaccaatatacaggttggttgttcaatgtaatcg

SEQ ID NO: 233970 - DNA, 577 bp, Homo sapiens
caagttggacaagcttgaattaaaccaatagaacaatttgggtataatctatatctttactatgttcagcctttcatcccgtgaatatagtatgcctctccatttctttagcttttattactttcctcaacattttatagttttcagcatagaggtcctgtacatcttttgttagatttacaccagaaatatttcatttttgttggagtaactgtaaatgatactgtttttcttgtattttcagatattgattattgttacatagaaatgtgaataattttgtttgttgatcttgtatcctatagccttgcagaacttacctattcgttctagaaatttttttgtatattccttgacattttatacattgacaattatgtcacctgaaaatagagacaattctattatttcctttccaatctgtatgccttttatttctttttcttgtctagtgtattaagacatcaggtatgctctttagtaagaatgttgagagtgggcattttttagttcttcttgatcttggaaaaaccattcagtccttcatcattaaatgtgatttaactgaaaaaaaaaa

SEQ ID NO: 233971 - DNA, 670 bp, Homo sapiens
  misc_feature (670)..(670): n is a, c, g, or t
tgcattttcccatatggccgggccaagcgtggtgaatatgcaaagcaggaagagaccattcctggcgggcgggggaggccgcggcgctgctgtcagacgctcaactttgcgcagcggagctggaaggcagcccggccctgatggagctcgaaatcctaatgcatacgcgagatcgattcaacttttccgaggggtttttattagttcctcgaataatgccgattcttacaaatttctgcagtcttcacttttttctttttcttttcttttttttttcctttttttttttttttttgttttgttttgttctaggcacccttttcttctctaaaatttccactcaactgccttagggtaaaagtggaacagggtccattattgagcagaatacaaatgcagttaattgactccccctctctctctctccctctctttcttttttgttttaatttgattaaaaagcgagtggcaggaagggaatcgtatgatgcacatctaataactctgccatctgtctctgctgctggctagctcccagcattgtacgcagctgcctgagaactcgactcggagaaaggggagggaaaggggagggaaaaaaaaaacccacaccatgtcggccgccttggccaggcgactctagactgagccagcttatgcatggcgccgn

SEQ ID NO: 233972 - DNA, 780 bp, Homo sapiens
  misc_feature (610)..(610): n is a, c, g, or t
  misc_feature (780)..(780): n is a, c, g, or t
tgcattttcccatatggccgggccaagcgtggtgaatatgcaaagcaggaagagaccattcctggcgggcgggggaggccgcggcgctgctgtcagacgctcaactttgcgcagcggagctggaaggcagcccggccctgatggagctcgaaatcctaatgcatacgcgagatcgattcaacttttccgaggggtttttattagttcctcgaataatgccgattcttacaaatttctgcagtcttcacttttttctttttcttttcttttttttttcctttttttttttttttttgttttgttttgttctaggcacccttttcttctctaaaatttccactcaactgccttagggtaaaagtggaacagggtccattattgagcagaatacaaatgcagttaattgactccccctctctctctctccctctctttcttttttgttttaatttgattaaaaagcgagtggcaggaagggaatcgtatgatgcacatctaataactctgccatctgtctctgctgctggctagctcccagcattgtacgcagctgcctgagaactcgactcggagaaaggggagggaaaggggagggaaaaaaaaaaccganccctccaataaaaaaacatgtcgccagcttggccagtcgatttagactcggcagctatgcatgcggccgaattgaggtacttggcaacttgccttatgggaggcgattcttaagggccgcgtttacaagggggactggcctgcggtcccaactaaggcttgggttctctn

SEQ ID NO: 233973 - DNA, 692 bp, Homo sapiens
tgcattttcccatatggccgggccaagcgtggtgaatatgcaaagcaggaagagaccattcctggcgggcgggggaggccgcggcgctgctgtcagacgctcaactttgcgcagcggagctggaaggcagcccggccctgatggagctcgaaatcctaatgcatacgcgagatcgattcaacttttccgaggggtttttattagttcctcgaataatgccgattcttacaaatttctgcagtcttcacttttttctttttcttttcttttttttttcctttttttttttttttttgttttgttttgttctaggcacccttttcttctctaaaatttccactcaactgccttagggtaaaagtggaacagggtccattattgagcagaatacaaatgcagttaattgactccccctctctctctctccctctctttcttttttgttttaatttgattaaaaagcgagtggcaggaagggaatcgtatgatgcacatctaataactctgccatctgtctctgctgctggctagctcccagcattgtacgcagctgcctgagaactcgactcggagaaaggggagggaaaggggagggaaaaaaaaaacacccaccagaatcgagtacttgccaattcgcctatgggagcggataccttctgccggcgttacacgtcggactggcctgcggtact

SEQ ID NO: 233974 - DNA, 674 bp, Homo sapiens
tgcattttcccatatggccgggccaagcgtggtgaatatgcaaagcaggaagagaccattcctggcgggcgggggaggccgcggcgctgctgtcagacgctcaactttgcgcagcggagctggaaggcagcccggccctgatggagctcgaaatcctaatgcatacgcgagatcgattcaacttttccgaggggtttttattagttcctcgaataatgccgattcttacaaatttctgcagtcttcacttttttctttttcttttcttttttttttcctttttttttttttttttgttttgttttgttctaggcacccttttcttctctaaaatttccactcaactgccttagggtaaaagtggaacagggtccattattgagcagaatacaaatgcagttaattgactccccctctctctctctccctctctttcttttttgttttaatttgattaaaaagcgagtggcaggaagggaatcgtatgatgcacatctaataactctgccatctgtctctgctgctggctagctcccagcattgtacgcagctgcctgagaactcgactcggagaaaggggagggaaaggggagggaaaaaaaaaagagtcgtataccaatcactgggccgcgttttacaacgtctgactgggcaccttgcgtaccccatttcgc

SEQ ID NO: 233975 - DNA, 718 bp, Homo sapiens
tgcattttcccatatggccgggccaagcgtggtgaatatgcaaagcaggaagagaccattcctggcgggcgggggaggccgcggcgctgctgtcagacgctcaactttgcgcagcggagctggaaggcagcccggccctgatggagctcgaaatcctaatgcatacgcgagatcgattcaacttttccgaggggtttttattagttcctcgaataatgccgattcttacaaatttctgcagtcttcacttttttctttttcttttcttttttttttcctttttttttttttttttgttttgttttgttctaggcacccttttcttctctaaaatttccactcaactgccttagggtaaaagtggaacagggtccattattgagcagaatacaaatgcagttaattgactccccctctctctctctccctctctttcttttttgttttaatttgattaaaaagcgagtggcaggaagggaatcgtatgatgcacatctaataactctgccatctgtctctgctgctggctagctcccagcattgtacgcagctgcctgagaactcgactcggccggcgcagcgaacgtcccggtcctgatcaccccccccccactccctaccccctacccgggcgcccgcgcttacccagctgcccctcgaactcggcccgctctcgccagccgctcgcttcgcggctcctcggcccaccctccccccc

SEQ ID NO: 233976 - DNA, 645 bp, Homo sapiens
  misc_feature (579)..(579): n is a, c, g, or t
tgcattttcccatatggccgggccaagcgtggtgaatatgcaaagcaggaagagaccattcctggcgggcgggggaggccgcggcgctgctgtcagacgctcaactttgcgcagcggagctggaaggcagcccggccctgatggagctcgaaatcctaatgcatacgcgagatcgattcaacttttccgaggggtttttattagttcctcgaataatgccgattcttacaaatttctgcagtcttcacttttttctttttcttttcttttttttttcctttttttttttttttttgttttgttttgttctaggcacccttttcttctctaaaatttccactcaactgccttagggtaaaagtggaacagggtccattattgagcagaatacaaatgcagttaattgactccccctctctctctctccctctctttcttttttgttttaatttgattaaaaagcgagtggcaggaagggaatcgtatgatgcacatctaataactctgccatctgtctctgctgctggctagctcccagcattgtacgcagctgcctgagaactcgactcgggggaagcnaaggtgagggcctgacagctatgcatgcgcccaatttgagtcacttgcctcgccctagggaggcgg

SEQ ID NO: 233977 - DNA, 278 bp, Homo sapiens
ttccttgatggccagttgcatcaggagtgcaacctggagtggctttggagtgcatccttccagccacccagaacgctctccctttagtacacttgccaggtcatccagtgacaaggaggtcacccacgcatacagtgtcacattccgcatatgacagccataatccttagactgtgcttcactttgttgaccccagctttgcctccatgcagattccaatcatgtatccaggccctgccctctagagtatagaagagtatattgtatttcttccagaa

SEQ ID NO: 233978 - DNA, 484 bp, Homo sapiens
taagaatggtaagttttcctgactttaatggtcagagagaacgctaaacctttatttaggtagaagaattaaatgacacagggaggaatctccaaaaagtaaaagaagtctcctttttttggaggaatctccaaaaaataaaaataaaataatatgctattattttaattccccaatccatgttggtaagaacacttaaccacaaatattatagcactggggcatatatatgacagcctacaggcacattcctttgtaatgattgcttgcctgttctaaattggtgttttttaaaaacctgcttatttacttatatatgtgtgtgtgcatgctactgttgaaaaatgtataactgcgttacatctaccctttcccactgaacaatagtagttctacaaaactcctcagtgcattgtagaccctccagaaagaaagtaggatgaaatcactgggtggtctcggtggtcatgctgccttttggctc

SEQ ID NO: 233979 - DNA, 437 bp, Homo sapiens
gagtaactttagcttgatatagtgttatttcatggttgattatgccttgattgttttgcttgatctgaatgttttcagtctttgcttaattttacctgtgactgaaagagttttgaaaacatcatacagaataagctatcgtctggcaagtaaggaaagctgtaatttttaagtttagaggttcaagtggcctagtagtcattggtaccaacttctactttctatagctagagtttaatgagtgacacaactgacctgtgtcagatcagaaagaaaacataagggcagtacaatttcataaagtctactattgtgcttaaaactttccatttcctcattttatacatttaactgattgtaccagattccactgatagtaataattaagggaagagtttaagatgatgtatttctggacattaaacccatacaaccca

SEQ ID NO: 233980 - DNA, 370 bp, Homo sapiens
gaggtttggggatttttgttactgattattatgggttgaattgcattcccccaaaattcacatgtcaaaatcctaacccccagcacctcaggatgtgatcttatttggaaataagatcattgcagatgtaattaggtaagatgaagtcacactagactagggtgggcccctaatccagtatcactgatgtccttacaacaatgggaaaatttggacccaaggacacaggaagaatgtcacataaatatgaaggcagggattgaggtgatgcttctacaacccaagaaatgtcaaaagattgccagcttttcttagtctattcaggtttctatcatgaaataacatagactgggtagcttagaaaaaatac

SEQ ID NO: 233981 - DNA, 614 bp, Homo sapiens
gagctggaatcagccatggtgggcgtggtgtgagaggtccttccaggctcctcaggactgccccagcctgcagctagacagatgcccttggcgggtgggacaagggctttgtccacctggggcccaggtctcactgggcaggaggactgtcagggttagtcctgatcctctgagggtgcggagtctgttcagcttcagtgactccagagctcagggtaaggcccgggcaatagcaggcatccccttcggctcacaaatgcctgttaggtgaggatggctgttgctcactcatcgaaatgcattcttcagcccaagagtgtcattagggcctgtccacgctggcaggccacgtggccctgtgccacagagccctctgggtacaacacccccgacccaggtgtgaacactcagggcgggtgagtctccaaggcccaggggtgaacgcttagggtgggtgagcctccgaggcccaggtgtgaacactcagggcaggtgagcctccaaggcccaggcgtgaacactcagggtgatgagcctccaaggcccaggggtgaacgcttagggcaggtgagtctccgaggcccaggggtgaacactcagggcgggtcgactga

SEQ ID NO: 233982 - DNA, 545 bp, Homo sapiens
acatgagagtctatgggattacaaacagttctgtgtcttcagtggaaaaggcctgagtcaccttttagtagagatggcaactgtctaaaaccactgtgccctctggtgaaaatacaagtacaaggtcatccacaacctgttacagcaataggaaatttttcctgactagctttttataatcctgtatagctaattgagatctacattgttacagcaatgctgttttaaacaaacctgaaaatttgaatatatttagatttaaataaaaataaatgattatacaaaaggaaccataataggatttcttaaaatagctcctcaacctagagatgttgagtaaagtgaaaaattaggattcagtcatgttgactgtgattacaacaaagtaaaaaacatccatctagaaaaagaggactacactaagacattaatagttattgtattattactatgtaattataggtaatttattttccttttacttttcataattttaatattttcatatgcttaaattttcaaaataaattggtaagagtccctta

SEQ ID NO: 233983 - DNA, 454 bp, Homo sapiens
caaacataccgactcagaggcaggttggctagagtggagttaggaaaatactctttctggaaagaaaggtgactttaatcattgctgcctatacatgccactatcaccagtgagtcttcacttaatgtgcatatccacctgctggcagcattgccagagtgactgtctgaaagaatggccgcttgttcattcgttcattcattcatcagattatggtagcatggattacagaggtgaagagaaatgaagagatttgagggtggtctagatgtaaaattgggaggatttgtagtcacatatgaaaggtaatagtaaggaagaaggagctattgagaatgggatcagggatttgggattttggtagttatgatagccattgagtgctgagaatgggttaggctctctattgagctctgtccaggcattattccatatgatcctgaaaaaactaaaa

SEQ ID NO: 233984 - DNA, 371 bp, Homo sapiens
aggggccacaagggatctgccagggccactgggcaagctcgcaacccaccaggcacagtctcaaaagaatgctgtccccacaaggagacaaaacaaatattctaatcctaataatggtcatcagatcactcagcaagtccttattagcaccccacctgccctttcccccagccctgatggaaccctagtcttatgccctgccctagccttggacaatccaatctcacctcttacactagaacaaggcaaagaacatacccccccgccccccgccgagagaatggcctcatcttctaagcctctgtttctcattcttaccctggaaatgggaggctggcctggatgacctcctctggggtagtgggctgcag

SEQ ID NO: 233985 - DNA, 474 bp, Homo sapiens
gatcagcctgcctcagcctcccaaagggctgggattacaggcgtcagccactatacccagcagtatattcttaaatattactgttgagccatatatacgacaatggtggactttgaatgtccgcacatctgtagtaaaatgcaatgctaccttcattttttgttggtatgctaaagaaattttaagtatctcacttttaaaaaaataggtttgtgtattttatgtgcttacacatttttccatagtactgtagatcattttagtgatgaaatttgatacttttgacagaaaaacaggtcagtgagttccttgggatcaaaaaggggttgattacaagggcaggaaggaattgttagtgtgattctacagttctgcatcttgattatggtatgactgtgcgtttgtcaaaccttaacaggatgaattttgctgaatgtaaaatcatacttcaataaacatgactttaaaaactta

SEQ ID NO: 233986 - DNA, 582 bp, Homo sapiens
gagccatgattgtgctactgcaccccagcctggataacagagtgagaccctgtctcttaaaaaataaatatataaaaaattaagttttgagtgaaaagttagatattgtcagatactcaagatctcaaattttgtcttccatttggattttctcaggaagcacctgagtgatacactcctccaaaatggaggagagtaagtcatgcaaatgaaacgggatacaacacaggagctggctatttctggggtgaatgaagtccagaatgccagttgtgcagcagccttacatgcagccattctcgtccataggaccagaactgtgaaatactccagaatggagatcaacaaaataaattgatgataggttatcacatacatcttatgtgtgtaattacattgcgatgaagtgcaaagaaggaattagcaaaactaggaagaactagtagaaaaagaaaactaatcaaatagcaaaagatgtaaagaagcatttttacaccaacatggcacatgtatacgtatgtaacaaacctgcacgttgtgcacatgtaccctaaaacttaaagtataataataataaaatta

SEQ ID NO: 233987 - DNA, 793 bp, Homo sapiens
gtttggtatgatgtttcatatattttaatgctggctgtattacatggagtgaatttgcagaaattgaattgctgaatcaaagcttatacttatattctactaaataccgtccgactgctctccctgagggtcatcatgataataggctatcattgcctgggagcacctgtttcaaactgtccccgccagcactgtgttaacattttaatcagtttcctttgtatgctttgagttcatattgtttccatctttgctgatttccctttctgctgcaacatcccttctgtttaagtcaaaacctttacaaggttctgaaaccaaggtggatacctggactatgcatagaggaatgagatggggttgctctcaaggtcatgtctggtgtagaagacagaggcctctaacagttaaccacaatattgcacatggtgagaactgtagaaatgggggtcctgccaagggaggagcaggacagattggggagggcaggggatggtgttgggagagacctcacagggctgatctttgaagcggggtggagcagagactttgggaggagtgcaggcatgggagcatgaaggtgcagggtgcagtggggaccatggggctggagttcagggtgcctggtggatggcaggagatgagatgggaaaaagagggagaagcctagcaagaagagtctcaaacgccgtctgaggggctgagactccctcctgcatgcagcattgtggcaggccaggtctcaccaacacaggcctccataacaagtgtttcagtactgactgagtggtta

SEQ ID NO: 233988 - DNA, 740 bp, Homo sapiens
gtttggtatgatgtttcatatattttaatgctggctgtattacatggagtgaatttgcagaaattgaattgctgaatcaaagcttatacttatattctactaaataccgtccgactgctctccctgagggtcatcatgataataggctatcattgcctgggagcacctgtttcaaactgtccccgccagcactgtgttaacattttaatcagtttcctttgtatgctttgagttcatattgtttccatctttgctgatttccctttctgctgcaacatcccttctgtttaagtcgaatgagatggggttgctctcaaggtcatgtctggtgtagaagacagaggcctctaacagttaaccacaatattgcacatggtgagaactgtagaaatgggggtcctgccaagggaggagcaggacagattggggagggcaggggatggtgttgggagagacctcacagggctgatctttgaagcggggtggagcagagactttgggaggagtgcaggcatgggagcatgaaggtgcagggtgcagtggggaccatggggctggagttcagggtgcctggtggatggcaggagatgagatgggaaaaagagggagaagcctagcaagaagagtctcaaacgccgtctgaggggctgagactccctcctgcatgcagcattgtggcaggccaggtctcaccaacacaggcctccataacaagtgtttcagtactgactgagtggtta

SEQ ID NO: 233989 - DNA, 909 bp, Homo sapiens
gcgctgccccttgggggtctccaggcacagaatgggttcctctccttccagccagtgctgtctgtgtgccccgcgttatagctttcctttttcctttttttttgtcttctgggagaagaggtcaccagtcttctagttttactaaactggaaatatttttgctatatttacttacagatttcctctttgtagggagaacttgagggaaatgtcacgtatagtctggtaaagatactggaagttgtgctttgaaatggggccatggcaggcagggtgctgcgctggaccatgagcactgggcagtggccatgaacctgttaacccgagcttatttttggtcgctttaatggctcctgtaaaatctattgttggttttatttatccaaaactgagccttctcataggctttacacccggatccttaattaacttttgttgacaaaatgtatgagaatgttaaatatatgtatttatttctgccattactggagaatacagataattaaaagcaaatgtaaatacctagtttaaaaggcactaaacattcctgccacctaggggtaatttcaagtattttcagttgcctagagaaatggtatctttctcatttctgttaatgagaacaatgcagtttttttcaggtttcagttttccctctggctgtcaggaagctcaggggaaattgtgatgcccctgtactcccctttgccctctgagctgaccagtgtctttttggcagatgcaacatccagagaaagcttcccccagcgtcccccttacccacccctccctcccatctgatttgggctactttaatacttggattcacatacccttgttatcagccttgctaaggaaatcgtattttatttgtataaatgctcccactgggctctgagctcctgcagg

SEQ ID NO: 233990 - DNA, 697 bp, Homo sapiens
acttctgggtctaaaaagcacaccaagtcctgctaaatcttaaaccgtaacaccagtcaaaccctcatcttcagacccaggaaaagatgataatcaaaataaactgcattcatgagacacagtgccagaaattaaaactgctgaacccctctaatcccagggactgtcacagaagacatgcgtctgtgaaattataagggccaattttgagagataaacttagttcagagtttccatataaattacacattaatattatagtttgatgaaagaccagcatcaggacccctgcgttagataaacaaggttcttatagcattaacccactttttaatttaaaaaaacattaaaaggttatttaaaggtttatggaaattatagcttatggtcaaaatgattaaaatttaatagatttgtttataagatttgagagacagatttaattggcctcatgcagtctctcttagggctcattgtttgggaaattaagtctcctctctcaaaaaataaagatttttgccttttttaaaaaaactttgagttatcactttgactaaatgaatgatttcttttacaatgacctatgagcctatattatcatattaagtattttaaacttctgacatttgacagactttccaaaattaaattgtaaaattagtactttgacttcatatatttattaataataggtcac

SEQ ID NO: 233991 - DNA, 643 bp, Homo sapiens
acttctgggtctaaaaagcacaccaagtcctgctaaatcttaaaccgtaacaccagtcaaaccctcatcttcagacccaggaaaagatgataatcaaaataaactgcattcatgagacacagtgccagaaattaaaactgctgaacccctctaatcccagggactgtcacagaagacatgcgtctgtgaaattataagggccaattttgagagataaacttagttcagagtttccatataaattacacattaatattatagtttgatgaaagaccagtaatttaaaaaaacattaaaaggttatttaaaggtttatggaaattatagcttatggtcaaaatgattaaaatttaatagatttgtttataagatttgagagacagatttaattggcctcatgcagtctctcttagggctcattgtttgggaaattaagtctcctctctcaaaaaataaagatttttgccttttttaaaaaaactttgagttatcactttgactaaatgaatgatttcttttacaatgacctatgagcctatattatcatattaagtattttaaacttctgacatttgacagactttccaaaattaaattgtaaaattagtactttgacttcatatatttattaataataggtcac

SEQ ID NO: 233992 - DNA, 409 bp, Homo sapiens
ttgcccaggctggtctggaactctaccacttgaaaatttttagcataaagcaattacattctcactcagaagtattgttttaagctaacactttcaaatggtagtagattcatcatttacaagttaaaaaaaaaacctaaaaaccggtgttaatagcatcagacagttcaggtagattttttaaaaggtgattcttaatataacaaaaatgctttgtaccttatcaagatagttttttacttatcactacttaatgtattaacatgcagtatcactgtgaaaattaaaagggctgtgagaattcggaaagtcaatgttgttttcttgtcagcaaagccaaaataatgtagtcatagtttctgaaataaataacttacattttaagtacatgataaattgatctttttgc

SEQ ID NO: 233993 - DNA, 404 bp, Homo sapiens
tgaaagctcagtctctgtgggctcttctccaagtggccccataaagggagtgcttataaacggaggagaggcttataaacgggggcgaggggtggtcaatgcctgctttgtcttttccaagtgtcacacatttttactggctgagagagaaactccagcctccaggtgaggtgctgggccaggtccctcgcctccttgcaggggtagtgtcaggcttcccactcatgatttgcaaagtaacatggggtccccagctgccgccgacaaagctgttacaccttctctatcatttccagatacgatccccgcttcaacacctggatacacctggccagcatgaaccagaagcgcacgcacttcagcctgagcgtgttcaacgggctcgtgtacgccgcgggcggccg

SEQ ID NO: 233994 - DNA, 452 bp, Homo sapiens
cttacagctcaatgctaatcaggccttcttcctgttggtgaacggacacagcatggtcagcgtctccacaccaatctcagaggtgtatgagagtgagaaagatgaagatggattcctgtacatggtctgtgcctcccaggagacgttcgggatgaaattgtcagtgtaaaaccagaaaaaatgcatctcttctagaattttttaaacccttaccaaggaaaaaaaaagggatgttaccaactgagatcgatcagttcatctaatcacagatcatcaaacagtagtgttcccacctaggagtgttaggaagttgtgtttgtgtttcaagcagaaaaactgagctccaagtgagcacattcagctttggaaactatattatttaatgtaggctagcttgttttcaaattttaaaagtttaaaaataaaatactttgcattctaaaaaaaaaaaa

SEQ ID NO: 233995 - DNA, 302 bp, Homo sapiens
aaatattgccgtatagaaaagcaggaaattaggaagaataattgatcaatcaaaagcaaattgatcaatgggcacagatattataattggaagacaagttatcactgtattctgtatgttcagaaagttaagtagaaatggtgaagatgtaaaaggaagaaaacccaaactttcagggtgaaaaccacaacacaggagatgaagaaggcaccaggtggggtgaatgacaatgatggcaggagaaaacattggagaacttagagacatagcaacagaaacttttaaaaagagaaaatgaaatt

SEQ ID NO: 233996 - DNA, 90 bp, Homo sapiens
gcctgagcaagagtgagacactgtctcaagaaaataaaaaagtccttaaaaatgtagctagaattgagaatatatactgttcaacaattc

SEQ ID NO: 233997 - DNA, 424 bp, Homo sapiens
tgccctgtggtaggaagaaatatattaaaaattgatttttggttactgcctttgtctgcataacatttataataaaagatacaggagaaagtatcccttaaaattgatatttcaaagtattttgggcttgctgatgttaaaaataaatttttattaatggttttttattgcatggtaaaaggtcccgatctgaatatgacagtgttatcttcttagaaaaaaatggtgctagtgttcttcaataattacatacaagccagaaattttgctacattattgagttaaacgatttttatacatgaaattatcctttgaatgcaatgtgagctaagtgtagtaaaacgtgcagctcatatttccttcttctattttctgtcttctttactttcttcccctgtctctttctatatgcaatagggtgcaa

SEQ ID NO: 233998 - DNA, 362 bp, Homo sapiens
ctgcccccacagccaggccctctccctccccaacctatgacttcccaaggctgtcaagatgtaaaaagtattccttgtgctcctcaccgactcccttagatgagtgaaggaagctttttcctggatttatccctgggaagtgacactgctcaccatcctccagccagaaagtcaacactcccagcattgaccatggtggccgggaactctctaaaacacctcagactcagtaggaggtgcagggggacggcgttccctgctaagctccggacactggagtgagtgggagttcccagaccctctcactggccaggctgacgtgtgtgctgcagggctgcaaggagcacaaccaggagacggga

SEQ ID NO: 233999 - DNA, 477 bp, Homo sapiens
tgaaaaagtcttagctcctggcagggagagaaggcggccaggtttccagagggctcttctgggaaactttccctccccactgccccctgcccccaggccactgttccgagggaaatgaagccccccttcctaaagtgggtcccccacctctcccttaggccctcgtgcccacctgggtctcagtctcctcctcggggatgcgctttgagggtggaagccaggggatgggtgacgccagctgggtcaggggacctggtgcgaggcagccggggcaggctgcagtgggcactctggacgagtgggcacctagctggagctttccagcctgcgtcttctgccccacaccccgtgacccgcggcccgctcggcccttaccttgaagcatgggaaccgcgctgccccggccgcgaggacttgggcgcacgtgacggggcgggcgggcgtccgacccgggcagggcgcagctagcggcggccg

SEQ ID NO: 234000 - DNA, 543 bp, Homo sapiens
tcttttagcagagttttgttatgtgaatgtatatttcctgatatttacactttcccatttttgcttctaagctaattaggttataagagctgttactctaaacaagttaatcaatctctttcaacatcttccaaataagataagcaaaacaggtgtgtgtggatacacactgatattcaaaatggtctgtgtatacagctacacaaaacccagttagcaattcttacaaagaaaaaagtggagaattagatatgttattctccatccaaaagaatgatttcatataaagcctagaaaagtcagtgaattggaattcccttggatgataaggggatggtgactttcagggataaaaaccaccaaggaggtagctgtgcacctttggctggggctcagaattgttgattattagcaactctggcttaaagtgtggtcagttaagaccagtggaggttaaagcctggttgaaatgtcaaccggggatgtgaaaaagtggtctggtggaagtggagacagtgagtgagaaaataattttaattatag

SEQ ID NO: 234001 - DNA, 483 bp, Homo sapiens
actacctttcacttatcggaagcaattttgagcgctgttttaaccttactctgtgccttgctttcttcttggaacatggagataataatatgtaactcagagaggttttgtgagtatttaatgaaaaatgtgaagtatgtgaaatattttacatagtgtctagtacatagcaagggtgcaataaatgccacttttaataaaataatgtattagcagaacagacaatctgcagaagtacttgtacagagcctggatgaccataaggaaagtaatgaatgcctttattatgtgagaggatgaaaaaatgttttgaggttctaaaaggaattttaaactagcagtaatctgatacttgacttaaaaagactcatacttataccatagtactcttcaggttattatctgtattcccaggttagagagatgaggagaacagggtggaggataatttctctttgattttcccagatgttgttttgatta

SEQ ID NO: 234002 - DNA, 496 bp, Homo sapiens
ccaccttgacaggagcaaactcgagggggagggaggggagggcactgaagcacccacagtcctgaccctgctctgggagaatagagaccgtgcttagctcctgcttagaccttgttaaatgcccacattaaggttagccactacagaaatagaaacaggaagagagaaaatgcaggcaacagcacagagactgcaggcaaggagaagatgaggaccctgtgttgaaatgtatcagtaatgagaacacaagtaagtggattagaaacagtgaaacattcataggcgaacatctaaagcatcaagaaacaacgattagaactggaggcttttcacacgtgggtcagccaggcccgagaagctggtgtggggatatgaatatcaaacaacatgggtttttggtcaaaagccactgtcaaagatagttattttcctaagatgcaaaatgcataagccataaagaataaaatagaaaagttgctatattaaaatcttaaac

SEQ ID NO: 234003 - DNA, 414 bp, Homo sapiens
aaagtactaggatcacaggtgtgagccatggtgcccagcccaatagtgacattatctgtaggagcaattgaggaagtcctaaatcttgtgacctctgaccacatgactcctgagcagcaaaggattatagaaagacaggctaggggacaatggctggttaccatttagctacacctacgatttagcagaattcaggtttctcctatgatcctaatcttgtggcttttcattagtcttacaaaggtggtttgggtcccttagcaaggaggagttcattttagggagggagtattataatccttgcttcaaagttaaactataaattccttccatggttaacttggcctatgcccaggaatgagcaaggacagccagcctgtgaggctagaggcaagatggagtcagccatgctag

SEQ ID NO: 234004 - DNA, 448 bp, Homo sapiens
gactcattttcaaaatatgaaaagatcattcagaaatgctcaaaatagtaaccaccattttactttctcttcctatgagtttaactgctccaggtactgttaagtaaaatttttaggggataattgatttggaccaggattctgtaccaggcccaacagaagaaaccaatatggagtcattcatgccaagtgaacctagttagcttaggcgtatacccatgtaacaaatagctgagttctggttagctacaacagctaagctttaatcaatcatagatggccacctgattcaaacaaggcaaaccaattaagctccacacctcactttggttttcagcccatcaacactgcctgaccacgttgcaggccagagttctttgaacctattctggttttgtggcctgcctgactctcagttcatcaataaaagccaattaacatctttaaa

SEQ ID NO: 234005 - DNA, 369 bp, Homo sapiens
ttgaagtttatttttgttgggtatagtattgtaggacaaaaaggtttttcatttagcagtttaaatatgtcagaccggctggacatagtggctcaggcctataatcccagcactttgggaggtcaagatgggaggattgcttgaggccagaagttcaagaccaacctgggcaacattagggagacccagtctctacaaaaataaaaataaaaaatcagctggatgtggtgacctgtgcctgtggttccagctatgctggaggttgagacaagaagatcgcctgagcccaggacgttgaggcagtagtgagctgtaattgtgacagtgaactccagcctgggcaactgagatccccatctcaaaaaaaaa

SEQ ID NO: 234006 - DNA, 259 bp, Homo sapiens
agtaccaatctgttttaattactgaagctttagaatgcattttgaagtcaggaggtatgaagccctcagctttttgctttctcaagattgtttcagctgtttgggattctttatggtttccatacgaattttaggattttttttttctgtttccgcaaaaatgctgtaggattttgaaaaggattgcattgaatctgtagcttactttgtggtgttgacatcttaacaatattaaacctttcagtgcatgaacatggga

SEQ ID NO: 234007 - DNA, 543 bp, Homo sapiens
aggatcatgcaatcacgcagtcacttcacagtactcactctgccttcagtgagggttcatcttggtgaaaactaggtcttacagaaatgctggcaggaggggagtctaggaaatgtagcttttggagatttagcagcctctagtattacacacaacatcatgatagaaaggggttgaaatagtgttaagagagtcggtcttcaaaatatgcagcctattaggtgatggggaagccttttactgcagagacagatggtgtttgagcagacacctgaggggagtgaaggagcaaagccagagataacctcagagaagagcattgcgagcagagggaacagttgtaaaggacgatgccgttagtaaaatagccttttgttttgggtaattgaataggcaaagtaacctcgaattttcatgagagacttctttttttccctcccagaaaaataagggaacaatgtactttcttgcaacaaaaaagatgattatattcaccaaatctgtagtgccatccattcaaagacacatcattgttttaggaac

SEQ ID NO: 234008 - DNA, 408 bp, Homo sapiens
ctttgtctctcctccccaaaagacatccttcctaaccttccaaattctcctgaattgcttaaggagagcaggttaactctctgcctttcttcttacccatccccggtaagttgtttctagattcagaaccccttaatacctgttaaaaagtgcagaacaaagcaactcatttttatttattgtcaatttatactattttattcaaaattatttgttgatactttcaagaaaaaaagttataaaaagaagacaatcccttacatttcagaagtaaaggaattcagtgttatcagttacccaagatgatttgattaccgtaattaggtcttaaatttagctgaattaaatttcctggcagtaaagaaaagaaagaagatgtgagttatgaagcattgactttctggcaga

SEQ ID NO: 234009 - DNA, 348 bp, Homo sapiens
ctcttttctctcccagcactgtgggaggctgaggtgtaagggtggggtggcttcagcacagtgtttgaggagtgggcactgagtagcgtcccctgaaatcttgtggtgtacagcctgtgctgaccgcccaaggctgctctgcactagccttttagccagatgggttttctttcaaggacaacttttctttttcttatttctcttcctcctcttctcttacccttttccttctctttcccctcttgctcttcctcctttatttagaaaatgtataaggtgtatatctctctgatctattttctataaatattagatgttcaccaaatgcacattttgatcaaatgctga

SEQ ID NO: 234010 - DNA, 507 bp, Homo sapiens
ggataatagaaatcaggaaacaaaagaaaacaaagaattttctgaggagatggccattgggggagtggaggtagcagctggtttaaacctaagtaaaactagaaaaagaaactgctgtttcctttttcttatatccaccttagaggatcatgtttgaacgtccctactcctcctcctctttttaaaaagccttgtctcagtcattcattcctgtgcttcctgctcttctgctagaccccagcagctgtttgatttggtgaggcccccctccaacctctgagtggaacttcttttctaagggcctgcagaatgtcaaaactgaggctctggcttcggagctagagctttgaacagccaatccacacaaaaaggcagctggctgctttaatgaaaactgctataaagcttcaagaactttagccttgggggatgcatttataaggaacatggaaaatgcatttccaagttgctggttcttgggagagacataataaacatttaccaaaa

SEQ ID NO: 234011 - DNA, 416 bp, Homo sapiens
ccaggcgctggccgtggtgctgattctgtcaggcgctggcggcggcagcggcggtgacggctgcggccccgctccctctacccggccggacccggctctgcccccgcgcccaagccccaccaagccccccgccctcccgccgcggtcccagcccagggcgcggccgcaaccagcaccatgcgcccggtagccctgctgctcctgccctcgctgctggcgctcctggctcacggactctctttagaggccccaaccgtggggaaaggacaagccccaggcatcgaggagacagatggcgagctgacagcagcccccacacctgagcagccagaacgaggcgtccactttgtcacaacagcccccaccttgaagctgctcaaccaccacccgctgcttgaggaattcctacaagaggg

SEQ ID NO: 234012 - DNA, 527 bp, Homo sapiens
acagtcttgaataggcaaagtgatcagtttttaaaataagcattattgcagacacacaagactatgttttaagatcaaacttacattctagttagaggatttattttactttgtcacaaaaatgaaaaggttggcaaaaaaaaaaaaaagacttcctgccacaaggttttatctttgaacactttattggtttgcgttttgattaattttttttctagttaataagagtttaaatgatcaagttaatacatttgtgaggaaaatctcacttagaaatcagagatttttaagtttaggggattagattaaaaataattttatttgaaagttaggcataaaatgtatgtatatttgcatatgtgcatagtttttaaaaaaaactggaaggatgtggtatgcattaaagaaagatactttgtttgctcctgctttcatttctgttgacaagttgccagaattatttgtatagggcctctattttcggaaccatgatataaataaaggattcaaaatgtttccaatatgaa

SEQ ID NO: 234013 - DNA, 625 bp, Homo sapiens
tctatgtgcagcataataagagtgccacatactccgtgggaatgcagaaaacgtactccatgatctgcttagccattgatgatgacgacaaaactgataaaaccaagaaaatctccaagaagctttccttcctgagttggggcaccaacaagaacagacagaagtcagccagcaccttgtgcctcccatcggtcggggctgcacggcctcaggtcaagaagaagctgccctcccctttcagccttctcaactcagacagttcttggtactaatgtgaggaaacaaacatgttcaggccccgaacatttccggtgctgactcggccttaaacgtttgtgccataatggaaaatatctatctatctgttctcaaatcctgtttttctcatagtgtaaactcacatttgatgtgtttttatgaaggaaagtaaccaagaaacctctaggaattagtgaaaaaagaacttttttgaggtgtgttactatactgctgtaagttatttattatataaagtattgtaaatagaatagtgttgaagatatgaaatatggctatttttaatggtgacaattatgacttttagtcactattaaattggggttacctatatcagtacaatttgtag

SEQ ID NO: 234014 - DNA, 364 bp, Homo sapiens
tgcccaaaaagggtcagccactctgccagtttaggggagaaaacttctcacctgtccaaagcatagccttgctcctgcccggcctacccagctatgacactgtccctgagcagagatgagcacaggactttgggccctggatgccggagagtgggtgtttgtgtgattcccctgcagtctggaacaggccccaaaggcaacagcatgaaggctgtccagaggttctccatcaccctcagccgagtggggtgctgagcagtgagggaggggacctgggaggggggcccagcctggatcctgcaggggagaagagaagacagccagaagccagcagctgtggctcagatctgagcccgagcagcct

SEQ ID NO: 234015 - DNA, 491 bp, Homo sapiens
attcttcaggtttaaaaagatattaaaatattacataagagacctcccctccctggcccacctccagcctcttaaaaatttagtgtgtcgccttttagacactttctcaaagcttcacttatttaacaggcacttaaggagcacctacctgtgccagaaactctccaaatattaactcaacctgacaccgactcagtgtggccgaatattactctccccattttacagagcgggcagctggtcaaggaagtcgcttgttgaaagtcacacagtggtggagcctgtgtgccaacccaggaccctggggagctgcctccccctctcccacgtagtcctgattctttaagtgtccacatattcctgtaatgcctggagtttcagtaattagcagggacttagtgtgttcagagaaaaaaaaagcttttaaaaattattgttactgtgtttgtaacagtttggatagagaaggaaaagctggaatttgggaagtg

SEQ ID NO: 234016 - DNA, 2234 bp, Homo sapiens
  misc_feature (1036)..(1036): n is a, c, g, or t
  misc_feature (1438)..(1438): n is a, c, g, or t
  misc_feature (1944)..(1945): n is a, c, g, or t
  misc_feature (1947)..(1947): n is a, c, g, or t
  misc_feature (1949)..(1953): n is a, c, g, or t
  misc_feature (1958)..(1958): n is a, c, g, or t
  misc_feature (1962)..(1962): n is a, c, g, or t
  misc_feature (1964)..(1964): n is a, c, g, or t
  misc_feature (1973)..(1975): n is a, c, g, or t
  misc_feature (1988)..(1988): n is a, c, g, or t
  misc_feature (1999)..(1999): n is a, c, g, or t
  misc_feature (2002)..(2002): n is a, c, g, or t
  misc_feature (2006)..(2006): n is a, c, g, or t
  misc_feature (2010)..(2010): n is a, c, g, or t
  misc_feature (2019)..(2019): n is a, c, g, or t
  misc_feature (2024)..(2024): n is a, c, g, or t
  misc_feature (2028)..(2028): n is a, c, g, or t
  misc_feature (2038)..(2038): n is a, c, g, or t
  misc_feature (2041)..(2041): n is a, c, g, or t
  misc_feature (2053)..(2053): n is a, c, g, or t
  misc_feature (2061)..(2062): n is a, c, g, or t
  misc_feature (2064)..(2064): n is a, c, g, or t
  misc_feature (2092)..(2092): n is a, c, g, or t
  misc_feature (2094)..(2094): n is a, c, g, or t
  misc_feature (2096)..(2096): n is a, c, g, or t
  misc_feature (2102)..(2102): n is a, c, g, or t
  misc_feature (2104)..(2106): n is a, c, g, or t
  misc_feature (2113)..(2113): n is a, c, g, or t
  misc_feature (2126)..(2126): n is a, c, g, or t
  misc_feature (2129)..(2129): n is a, c, g, or t
  misc_feature (2138)..(2138): n is a, c, g, or t
  misc_feature (2140)..(2140): n is a, c, g, or t
  misc_feature (2143)..(2143): n is a, c, g, or t
  misc_feature (2147)..(2148): n is a, c, g, or t
  misc_feature (2150)..(2150): n is a, c, g, or t
  misc_feature (2158)..(2158): n is a, c, g, or t
  misc_feature (2164)..(2165): n is a, c, g, or t
  misc_feature (2182)..(2183): n is a, c, g, or t
  misc_feature (2187)..(2187): n is a, c, g, or t
  misc_feature (2205)..(2205): n is a, c, g, or t
  misc_feature (2210)..(2210): n is a, c, g, or t
  misc_feature (2216)..(2216): n is a, c, g, or t
  misc_feature (2225)..(2225): n is a, c, g, or t
  misc_feature (2234)..(2234): n is a, c, g, or t
gaaacatgcaacttatatgaaatttaaattccagtgtctggacacctcgggagactgaggcgggtggattacctgaggtcaggagtttcagaccagcctggccaacatggtgaaaccctgtctctactaaaaatacaaagaacatctgggcatggtagcgcatgcctgtaattccagctactcaggaggctgaggtgggaggattacttgaacccaggaggtggaggttgcagtgagccgagatcgtggcactgcgctctagcctgggcaacagagcaagacttcatctcaaaaaatataaaaatttaaataagtaaataaattccggtgtccattaaaaaagtcttaactgtctacggctgctctattttcttctatctagctagctgtttattgagctagggtctcactctattgtccaggctggagtgcagtggcacaatcacaggtcattgtggcctcaaactcctaggcttaattgatcctcccagctcagcctcctcagtagctgggactacagcagcttgtggctacgttactgcaacaatgactaaatagttgcagagttggaaaaaagacccaaaaagcctaaaatacatactatctagcccctgacagaaaagggggcaatttgtaagagtaaaataattttcaatatcactctctcttcctacactacacattggctaattcatgattagtaaaatgacctaagcacataccagcaaggagattatattttaggaaagggactttaaagtctactcaaatgggggattcaactaacttctcacctaaaaagcactcaaagaatgaggtatatttttccaggaagtctgatgtcatttatctttctccttttgtacctcccaagggaagacagaagctaaattaaacacattatccctgttcttatattcctataaaactgaattttttgaaatgtggtgcaggagaacccatggtcatatatatgccatgtttcatattactagttatgtattaatttcacatatattaggaaaagccacaacangcaatttaaacacacgagcctatacattgtgtttagcttaggacaaagctgcattacaattttcatatttaagtatgtaataaaatacggcagaaaaccatggcaatgaaagttcaggcaacactaattcacaaagtcgctgccaaggttaaaattttaaacatttcctgaaaagcatgctctttatgggaattaatgtgccgaaggattgtgtaattaagtaccatgttttgtgaacttggcttaaatggaaccgtgtcatgaaacaaagtaagcttttaaggactctggtcagaaacaagggggtaaaaaggaagacttttctgaaactgtgtcaacacaaattatgtcaattccaaaacaaagctctatgactcaaccatgagtgtctaggaccacacngctatgaatcagaactagagaaagatatagactgcagcctttattttacagaaccaaaagccacaggctctctctacccctcctaccaccatctggggagcagctagaagcagttcttgaaaataacccaaggaaaagaaaaaagaaaaaaatttcccaagaaacaacacaagcaaagtcagtagaattatttgagttcacaactaaatcctcattattttaactcttggggacattcatggtatcctgaagaactgatgcttgctccttaaagaattcctgtgtgaagggagtgagggagagagggagggagagagagagagaccaaggaaggaagcgagtgtgaaaggctgtccaaggctttaggccagaagcctaaagctggtactccaacctgctttattcattctagaaaatcttccaagacatcttaaactgacatttaataattggagattttacttaaaaacctgacatttaagaattggaggttttacttaaaaacnnanannnnnggccnggcncngtggctcannnctgtaatcccagnactttgggagnccnaggngggngatcacgangtcangagntcgagaccanccnggccaacatggngaaacccnntntctactaaaaatacaaaaattagctggncntngtggcncnnncctgtantcccagctactcnggnggctgaggnanganaatnncntgaacccnggaggnngaggttgcagtgagctnngatngtgccactgcactccagnctggngacagngcgagactntgtctcaan

SEQ ID NO: 234017 - DNA, 441 bp, Homo sapiens
aaaagaaaccaagccaaacaccatggacatatttctgaaaagagtgacacctccttaagaagagcctcaggcaggtccttcagtgggtgttccagaagattgttgtcatagcaaatgacagctccatgcatgctattttccctgaagaccatgcagtgggacaagctgtgcagatggaagacagtgacatcgatgaccctgacctccctgtgtaggcctaggctaatgtgttgtgtgtgtcatttttaacaaaaaagttaaaaagtaaaaaatattttaaaatgttaaaaatagagacttacagaataaggatataaagaaggaaatatttttgttcagctgtacaatgtacttgtgttttaaattaagtgttacaagagtcaaagttttaaaaaatcagtttataaagtaaaattagttagctaatgttaatttattatt

SEQ ID NO: 234018 - DNA, 512 bp, Homo sapiens
agacaggtcactagctgatcaggctgaaatgctcacttatccagtgttgagtcagaaagagaggagaatttaaaattagctgacttcttggactggcacctagcactaaaataaaataatcccttagcatgtttactagccaaaacatactgtatcacattgtaagttgctttaaagtttgtattttctattaagcttgctgcatggtgatcatgtaaaagtgtctaatggttactgtaaaattagaggctgtccaaacgaaacttaaaatcctgaaactttctctccaatgtatgataattcttggctacactagtaaacagtttgacatgtgtttaaacataattcaatttttttatcagatcgtcttttcttaaaggtatgtctaatgaagtgtgtgactgtataatagaggagacagtatttgatttttaatttttatgttaaatggtttccactgttgtatgcccatttgagtttttacaataaaagacaaatataaaaatgtgaat

SEQ ID NO: 234019 - DNA, 351 bp, Homo sapiens
atacaccaaagcactgccagtgaatgcttctgctcttgtgcatacgtctgcatgtcagacaagaggcagtttcgcctgtgtctttagacagggagtgctgacagacccccaatgaggccatgagatgaaggagggggctcagcagagagtgtcgaatgcagctcaaatcttgggtctggaggctcctggctctgatttaagccttggcgacgccctctggccatgaccttcgactggcttgttaatttatctgaatgtcagtttcctcattagtcaaaggggcaatggaggtgcctctttcctggttgtgagagagtcctggggaaggtcttagcagccctggaaggaggc

SEQ ID NO: 234020 - DNA, 620 bp, Homo sapiens
  misc_feature (38)..(39): n is a, c, g, or t
atgtaagtctgaaatgcaatgctatttataactctttnntcagatgttcactaagggagctactgcttaatgaacatgaggtttcctttgggaatgaggaaaatgttctggaaatatgatgatggttgcacatgattgtgaatgtactaaatgccactcagtggtaccttccaaaatggttaaaatagtaaaccttatgttttgtatattttattgcaataaaaaagaatagtcatcatttaccaagaattaacctttccagacacaagcttataatgcgatgtatctcacttaatcctcgcaatagtcctgtgaaacaggcacttttatcatttctgttctactgttaaggaaactgaggcgtaaggaggttgtgtagttcagcctgagcctgggtctgtggagtcactgcccaaatgcttcctccccatgcgtgttggccccactcttgcttccagctttccacatctttgttcataaagttcattcttattccttaacattttctgagtctaagttcccataaattacatagacatatttctgtctcccaataacgttgccaaattattttctaaaagggtgtgacagtgtaccgtgccactagaaaacaatcactt

SEQ ID NO: 234021 - DNA, 565 bp, Homo sapiens
  misc_feature (38)..(39): n is a, c, g, or t
atgtaagtctgaaatgcaatgctatttataactctttnntcagatgttcactaagggagctactgcttaatgaacatgaggtttcctttgggaatgaggaaaatgttctggaaatatgatgatggttgcacatgattgtgaatgtactaaatgccactcagtggtaccttccaaaatggttaaaatagtaaaccttatgttttgtatattttattgcaataaaaaagaatagtcatcatttaccaagaattaacctttccagacacaagttttatcatttctgttctactgttaaggaaactgaggcgtaaggaggttgtgtagttcagcctgagcctgggtctgtggagtcactgcccaaatgcttcctccccatgcgtgttggccccactcttgcttccagctttccacatctttgttcataaagttcattcttattccttaacattttctgagtctaagttcccataaattacatagacatatttctgtctcccaataacgttgccaaattattttctaaaagggtgtgacagtgtaccgtgccactagaaaacaatcactt

SEQ ID NO: 234022 - DNA, 299 bp, Homo sapiens
tgcgctccgcgcaggcgctgtgcgggcagcccgggcactccatcagggcccccttatcctttaggaggagtcctccctgggcggtgctccagggctgtgggctggggcatgacggcccccagctgcgtagctccagcccctttccagcaggctggtgggcggctccgagtggggacctgggatcggaggggactcctcccgggactacccgctgccttcacttgtcccgggacgcagctggaccccgagtcaccgactgcaacccgcgcacgaccctcgggagcctgtctccgcggccg

SEQ ID NO: 234023 - DNA, 226 bp, Homo sapiens
gtggagaatacatggaatttcatgcctactataaattcctaccataaaatttcactataaatataaattcctactataaataaatacatggaacttcattcctactattaatgaaggtaggcttttcctacttcatttatcattctacctacctctatatatgcttcaaggtttctttaataaaagttaaaaaaagtaatgcccagaccaggctctgcaaccatgt

SEQ ID NO: 234024 - DNA, 1524 bp, Homo sapiens
tttaatgctgttcattaaactttcactaaaaggattataacctgcacttttacaaaaacgtatttaatctttacaacaatcctatcaggtatataagcccattttacagatgagaaactgagacacactgaagttaagtaacttgtaagaagtggaactggccttgatcagaggtagtctggcttagagcccaccttcttcacctgtacaacaaagcactcactagagattggccattatcattatcaacattattattaattattattattattattattcagccaggagttaagttatgaagggactcatatttgaattatgaaggaactcaaaatcccacagtcacataaaccagtttcaggatgaaatcggcatgccttccttttgttcaaagggttgtacagctaattagtatgtaaatctcacttctttgaattgaacacattttagagtcatctattacaaaagtgctgcatgcttgaaacagaaagcttgcaaaatctgtaatctcagcactttgtggggctgaggcaggaggatcacttgaggccaggaattcaataccagcctgggcaacataaggagaccctgtctctacaaaaaaaaaaaaaaaaaaaaaaacaaacaaacaaacaaaaaactaattaattaattaattggctgggtatggtggtgcaagcctataatcctagctactcaggaggctgaggtgtgaggatcaagaagatcaaggctgcagtgagctatggtcatgccactgcactccagcctgggtgacataggtagtagacctgtctcaaaaaagaaaagaaagaaacagaaaacttggaaaatccaggaaaaaaagtctttaatggatagagttctgattcattaaaacaattttttggtaaaaatctatatgtgttattttgaaatgagaacagttacctcctaatctatgtggactgggaagtagacttacaatacggcataaattggagagctgataaatttgaggatggtagagacacttgatagaaaacaactgtttagtcttaattaactatgaataactttggcattcacgttttgaaactcattcatgtttgctttacatcagattaattttattttaagaaagatttttgtatactcttatcctctccctttcatccaagaaatacaaccatacatcccaagatagtgatccacgaggcagatctttgggctgcctacgtggtgaaaggccccaccaacctcctataattcagagaactttgcctgtaattccagcactttgggaggctgaggcaagaggatcacttgaaccaaggagtttgagattaccctgggccacatagcaagaccctgtctctacacaaaataaaatataagccaggtgtgctagcacacgtctctagtcctagctacttgggaggctgaggcaggaggactgtttgagtccaggagttcaaggctgcattgagctatggtcacaccactgcaccccagcctgggtgacaggggagaccctgtctc

SEQ ID NO: 234025 - DNA, 272 bp, Homo sapiens
ttgcccatcaaaaggaaatgcattttgctgaaagtagcgcagttttcccagggaaataacatttgagccgagccttgaaagatgagtaaaagttcgtcaagctgaaaaatttcatcgtaagatgagtcgaacacagggtcattgtgagccgttggctggcccccgcagaaacctggcagccccttccaggctttgcaggtgatatggttccttctccatccaggataactccagtgaaggatggacagaggcaagattctagctccattttg

SEQ ID NO: 234026 - DNA, 357 bp, Homo sapiens
actcctccttcatgcttttaagatttataggataaatgtagaacttcaagcaagtcattttttaagtgatgatttttctcccactgaactggaatgtccctcttctatcaccccatgtatattttcatttgaatttgacatgacagatagtaccgatcttttcacatgtggaaaagtgaataaagggatctgcagcatattaaaatgcatggagatgataatacttttcacatgatttaggttataaataaatcaagtgcaacgtttctgggttcttgttcaaagaagatatattttcatctgatatcttttcaacgtgtccctttcctgggaagccattgatgacagtttgatcga

SEQ ID NO: 234027 - DNA, 377 bp, Homo sapiens
aagatggaataatgtacagatattcgctactgtaggtggtgagctcactgtaatcgcgcatccacttgaactacaaaggccagctcccttcggcaaggcaggtgagaacaaggcgtttcccttccaggtggatctgtgataggcctggctccgcattaaaatatggagcaacatcatcttgcgccagcgcccggagcaagtgcagctgcagcgccagcagcgcccaccagccgcggcggcccggccccaactttgccgcccgccgcccgccgcaccgccccgcgcccgccgtgtccccgccggaggtctcgggcgccgcccggggtcgcgagggctccgggccggggcgcggcgccagcgaggggcgggcgcggccg

SEQ ID NO: 234028 - DNA, 1031 bp, Homo sapiens
agcggggaatcggcacttactacgtggcggattctgactgtgaagaggactgtcccaagtgaagagtgggaggcaagtgccttgtgaccgggaggaggtcgaccttaaaggagctggtattgtagctcttctaaagcctagtctacttaggaaggcaaaagcgaagcagcaagaagtggccacagaagccgtgtggtccctagaagtagaagggtaaggaggatgcaggagatggtcctacttgtggccgcaacggggctcagaagtccgcttgttagagatggcagtgacctgtgacaatccagtctgcccgacacgcctcccgcctccttaggaacgggaaggagccccggcccagtgcactgacgtagttagcctaagatcacgtagctggttggtcacagaatcatgactttaattcatgtcttctgactctgacctggcacgctttgtacctcaccaaagacagtgatgaaattgcaaaagggcagagtggagaagactggaatgttcagccaaggcatttgaacttttaatgctgcaagtcaagacttcctgaagatttttgagcagatgagtgaagtgataagaaaatgcatcttcagcagtgacagcatcaacgaggaggagactggccgggaggctattacccgcatcaaaaccagtgaacattaaaaaaaattttttttttagagagagggtcttgctcttttgcccaggctggagtgcagtggcttgaccatagttctctataaccttgaattcctgcgttcaagcgatcttccttcctcagcttccggagtagctgggactacagatgcgtgccaccatgccaggccaatttttaatttaggtttggtaaagatggggtaactgtgttgcccaggttggtctcaaattcctggcctcaagccatcctcccgcctcagactcccaaagtgctgcaatttacgggcattagccaccgcacctggtccaaaaccggtgaagatttgttaaggtgttggcaatatgggtatacctagattatc

SEQ ID NO: 234029 - DNA, 336 bp, Homo sapiens
agaatgaatgttttttggggtggaaagcaaacaaaaatatatatatattcttaattgaaactacgatgctttattgggtaaaagcatatgataaaaaatgtatttgaatattttgcttagatgaatttttgtatatttagctaaaaataagatggtagcatacatgtaggtatataaagttgaatatcatatgaattaagctgtttttaaaaatatgttttaagtcagatttttaagcgtaagaagagaaatttagttttgtgttagtaagaggaaaataaggccaacaaagggattagaaacttgggtctgggtaaaggtctgagagagaggaga

SEQ ID NO: 234030 - DNA, 376 bp, Homo sapiens
gcagaacacaatgatgaatgtctcaattcagacaggaattgaatgttgcctgtggggtaggctggctctgccacctgcactgacaatacatcatccctggaaattaacccatcttcaccatagccattgaaatggaaagaagtgcttgttcattaaaaacacccttcaaatggaaaggatgaaggtctagcgtagtatatatggtgcattaatatctataatcatgtttaatttgcattagtctaactctgccacttggaaactgtttttaagatattgtgttgcctgaatgggtttgtgtatgcattatttgcttcttgaataagagctgaacagaagctaatagctttatataaaatatagtgattaccaaatt

SEQ ID NO: 234031 - DNA, 396 bp, Homo sapiens
ccgaaatggggtctcactctgtcacccaggccagagtacagtggcacaatcacggctcactacagcctcaaccgcctgggctcaagtgattctcccacctcagtttcccaagtatctgggaccacaggcacataccaccatgtccagctaaatttttttttattatttatagagacgaggtctccctatattgcccaggtgggtcttgaacacctgggctcaagtgatcctcctgcgtcagtctcccaaaatgctaggattacagatgtgagccaccatgcctgaccttttataaaggcattcatgatccagctcccaggtacctctacctctgtttttcttcttgagatggagtctcactctgtagcccaggctggagtgcagtggggcgtaatc

SEQ ID NO: 234032 - DNA, 365 bp, Homo sapiens
aaaaagattcaagtaggaaaaaaaaaaaaacctaaaaataattctgtcaaacagactatctttcctagatctaacttgctttagaaaatgtatataggaaattgcattaacatccctttagcaggagacaattcttaaacttaaattaaactgaaaaagccacagaaaaaagggtttgacaccctaaagccagtgtccaaatgaacgctacggttgacctcataggtgtgttatgaatgtttaccctgacctcctagaagaaaaggaaaaagaaaggaaagagagagggagaaggtgagggaaggggggaagaaaagaaaggagagagaagacagagaaaaaacagggagggaggaagctgggga

SEQ ID NO: 234033 - DNA, 595 bp, Homo sapiens
catatcctgttatcttgatttttaagtttcatgataaattttatgagatgaaacttggtacctcctagaagtgttcccatgactaattgtttactacatgattttttatagaaataataaaataatacatttattgtctgaaaggaataaatgcttttgcttttctaattgaggtataaaatgtaagcaccaaaaattttctttttttatatgaacactgtgtttgagtgatttcattggagttttcagtttcaaaaaccaagggaataaatctgacatggaaattaaagcttgaacccagtgactccaacctaaggctaatattgagcctacaaaaaaaaaagattattaaaggcccagttagttctttctggggagcctcccctgcagatgtcccagcctgctcaccccagccatggaagaagtctttccatcctgagagaagctccaaagccttggaaagctggggccccacaggcagatgcagttaaggttaagatgaaaggaaactgggagggtctcactgatgataaagttttttattgttttgaggcactgtctagactttgtaaaataaaacaaagttagatttgtg

SEQ ID NO: 234034 - DNA, 362 bp, Homo sapiens
gcagcactgaggcctggacaggaagatgggactggaatgcagaggggccttgcagggctcagtcggggccaaagggcagagaggcagggcacagagagaagctgtggccgccttggttggtcccatggaatcctcgcccattggggccatgggcattgatcgacactgtggagcttgaaatctcaccaggtggaaacatctctgccagccctgtaatcatttccatagtttcttctggttcttttcatgaacattttccaatatttttatttgagcattaataaaagagcaagcttgtgcaaccacaagcaggtcacatgcagcccaagatggccttgaatgtgacccaacacaaattcgta

SEQ ID NO: 234035 - DNA, 349 bp, Homo sapiens
aaaaaaaaaaaaaaaaaaaaaaaaaaactgtaaggcgagctaagacgtctgtctatcagtgttccattacataatacacctctttccttcacatgtgtgtgcacattctcaggattatattagagatttgattctttgcaagggtcagtatcagtaatggctgagactggtgggctgcagtcatgttgctatgccgtaagaggtttttacaacatttccccttatcacactttattctaacctgatgatgggcctatctcaggtgaagattgcaatagtttccttaattgaactttggtatttgatgcattaaataaatatggctttttaattttgctatcttctgtga

SEQ ID NO: 234036 - DNA, 1192 bp, Homo sapiens
taagtcagcttagggagactgttccgatatcaagattctgtttgaatactatatactctcagctgcttatttattcatatatatatgacacgtttatcatggaagtatttcaaaactatctgaaaatgaatattgattattaaggcattcagttttaggaagaaaacatacataaatatatgatcttcattattttcctttctccatgcaatttcaatagatatttatcaagaactcaaaatatgcctagcactgcctaggtgttggaaacattagagaaattaaaacagataaattccttcctttagtagacttagtctaactaaataaatgatttttaaaagggcataataaatggtataagcaaaagaaaatgaaggtgaggggaatagggcatgccaagtagggagctgctattttaatgaggcctaggagaaaaccatttataaggtgacatttgagcagagacctaaagaaagtgagaaaacgtgatacatgtatgtacatggaaaaagaatataataagcaaaaaaaaaaaaaaaatggaggccaagagggaatcttatgcattacacagattttgaactaaaagcaagaaggccataatggctaaaaataaatgaggattcattaaagagggtgaagaatatagagagttaggactattgctgtgatgtaaagtcattggagagatgacctgagagattagaaccctggggtaacttacatttcatttgctgttttattccaaagtgatattcattatctaaagaaaaaaatcaaatatacagaaatgataaaatacaaaacaatgctgacctttaagaaacattgacctataaatactaagatgttaaatatttgtttcttgtgatttgtatctttattgatgtgataattatgtatctataagtttgtgagtaaaatacataacaagcctggaatgtattttctttataattcacattaattttttgcactaaaattcaatctagtaaatttcctgttatagtcaattaattttgacaacacatattttaatgctccatggtattaacaacccattatgatttgcatttaagattatttagagtattcagtgtaataaataatgcaaatgtaggcaaaagcttttccatgtatacacacacactacacactatatttttaattatttcattcacatagatta

SEQ ID NO: 234037 - DNA, 399 bp, Homo sapiens
  misc_feature (34)..(34): n is a, c, g, or t
  misc_feature (69)..(69): n is a, c, g, or t
  misc_feature (72)..(72): n is a, c, g, or t
atttattgcggcgacagtttgactatgaatccancccaaacatataatttagagtgtttgcttggatcnccnaggacggattcttgcaaaatgtgagcactacagtcattgttcgtgtctgggatgagaatgacaattcccccaccttcttgcatgatgtgttgtttttgaaagtcgaagagagccctgttccccaaggggtaataggcaaaattacagctattgacatggactctggaaagaatggacagctattatatttccttttgtctgatggaaaattcttcaagatgaatcctaatacaggtagcacttcatagtttccacctattcctttaaaatgagggttcagtactatcacactcgtctttaagtaaaaataaaaataaaaaattaaac

SEQ ID NO: 234038 - DNA, 423 bp, Homo sapiens
aattcctagaataaagaaaaagcaaaaacaaaaacgagggaacctttctgtttcctgtgaacgtgtgatatatacatatgtgttcctatacacgtaatgtaaagtatacatatatagcactatatttttattttaaagctctgtctgacgctattacagacattttgtgtatctggtaggaaaggaaaaggaaagcaaaatggaaaagttggcttttttttcctttaaagtctaccccattttatgattattagctgtcagattttctcaaaccctgtttgcagttacagatggtgttttatgtaatgattctgaataagtagagagcctttgtgactccttgtttctgtcgaggatgaattctttatgtattttaaaacgtgttatggctaagtctacagaataaaatgtgtgtcattgggg

SEQ ID NO: 234039 - DNA, 419 bp, Homo sapiens
tgaccttttcttgaaagtgtatataagtttattttagttttctgggattaagtggtatgctatgtcctttattttctaaaaccatgttacaagatgatggtggggggtgggaatggaggattaatactacatatgtgatcaaaatgttttctaaactacagttgttccagtataatttagttggtgtaaaattaagaaattgaatggagaatatagttcaaagaaaatggtttatgtaaaccttgattgtttgtgcaaatttaatatgatttgataacttacccctgttttaaaatagagaaagctgaatttatgtatataaaaccataatctaatcaattattaacatttccaccctagtgtaagatattataattcaagatgaacagcaggacccaatcgtaatcatgtccaacgcc

SEQ ID NO: 234040 - DNA, 481 bp, Homo sapiens
cttccatagcaatttagtatatggaagtcaaacttctttaaaaatcctagtttgcagaaaagaaaggctgagtgctggcagcagaaggtacatgatactggggaactctactctttactccagttgacaagcaagcaattagatccatcgagctgcggatctatgttctcaaggacccaaggaagtcagcttttggaaggcaataaaatttttgtttttaatatgcagtgtccttcagtgaaaatgacaaggaggctgaagtaactttaggatgctgcagacaagaattctttatccagagataaaggtgaaaagacccaagaagctggataagagctaaataaaaatgtcttgccaaaatgatgctagaaagtactaattctcagacatttgcagagtatttctccatgatcaaaaggcatgcagacaagaaatacaccagcacctatgtgcatgaccaaccaaataccaccccaccccc

SEQ ID NO: 234041 - DNA, 501 bp, Homo sapiens
tttttctttattgattcttctctcttcctcactgtcttgtttcacccctcttttctaaagtatgtttcagacatagagggagaggctgtgatggaagtcagccaagcgaagacgaagggtgggggagcagtcggcaattccagtttgacgctaatgatttgtgtacaattcaagatgagaaaactgaagttaagaaatatgtatgaaattcaaggatagctaataacttactgaagaccctgcagctgtgtccttcagtgaaaatgacaaggaggctgaagtaactttaggatgctgcagacaagaattctttatccagagataaaggtgaaaagacccaagaagctggataagagctaaataaaaatgtcttgccaaaatgatgctagaaagtactaattctcagacatttgcagagtatttctccatgatcaaaaggcatgcagacaagaaatacaccagcacctatgtgcatgaccaaccaaataccaccccaccccc

SEQ ID NO: 234042 - DNA, 382 bp, Homo sapiens
ggttcctaggaccaaaaatgttggggaccgctgttttaagatcttctgtaggtaatatgtcattgccgcaaatagcgctacctttgaaagcttgtttgacaaatcttccaaacccagctcacatgtatttaaagaaatagttgacaagtgcagttctaagtgagcctcacaatttagaacatcagtttaggaacactggcgtgcattgtacagatttggcttccctgcctcagctttcctaaaggcactgatggttaagcagcacttaaccagagaacagataacattcagactcttaagccaccactgtgtgactgtccgcacatcatttactctgactttcctcatcagagaaatggggatcctgttttctgtcccagcc

SEQ ID NO: 234043 - DNA, 409 bp, Homo sapiens
atagcatcattcagactgtctgtgaacagctaaatggagataagactacaaaggtccctccatgggccttcaatttttgtctttaagcagactgctcaccatgccttgatagaaatagcaaatatagggccaggcatgttggctcatgcctgtaatcgcagcactttgggaggccgaggtgggtgaatcacctgaggtcaggagtttgagaccagcctgatcaacatggagaaaccccatctctactaaaaataaaaaagtagccaggcctgatggcagatgcctataatcccagctactcgggaggctgagtcaggagaattgcttgaacccaggaggtggaggtttgtggtgagccaagattgcgctattgcactccagcctggcaacaagagtgaaactccatctc

SEQ ID NO: 234044 - DNA, 431 bp, Homo sapiens
ctgctgaactagggatgactcatgcaggccttgtgcaaacatctagtctgatttgcatttaagagaaaaggtacacctatagaagtatccaacatgtattaaaacatcttcaaaatgttttggagttttaaagaagtgcccattaaagatgctttctgctccacctcttaaaaaaagcatggccccaggaaaaatgataatgtattctagaacttttttctgctgtgatattttctcctcccaatcaatgtttgcttcccctttaaaatctctgtgtactttcatgggtgcagtagcacatggtgatgagggcttgggtttgattgagcaatgctcaccccatctccagcccctaccccacaaaggcaagtagtacagagaatatatatacttatgattctgacataaaataaaatgtaaagccaatcaaa

SEQ ID NO: 234045 - DNA, 160 bp, Homo sapiens
aatgtgggttcttatgcttctgcaattcacagttcattgtgagcgtagagatttgcatggcttgtttccaaaaacctcttttttgcttcagactgaagggaaggtaagaagggctttttttcccccaaatcttcttagtgaccattagatgtaaaatccc

SEQ ID NO: 234046 - DNA, 458 bp, Homo sapiens
atttggggaagctaccttcccctatgtattttagaagcaagcacataatcctttaaagttataactgctaacaatggtgaatccagccaacaggtaaagtaatagtcataggaaaaagaacaaaatttccagaactcttaagtgagtaataggttctcttcacttaaggaatatgtaacacttccacatacataagctacattaatttatctgtatttcaggagaataatctaggtttacttttagctaccattaatgaagaaccatcttccttaattttttgaacatagtaactagggcaaaactgtaaatgaggccagtgagaaggcttcatgtgagattggggtgatgggatgggatttgtttagatattagggttactaaagagtaagggtaaagggatttttttaccccctatctcactacccaacctgctccctaagcccctttgccttgca

SEQ ID NO: 234047 - DNA, 551 bp, Homo sapiens
agggattcagaacctgcggatgtggagggccagagggctgaatttgcaagttgggcaatggggaaagccttcacaaaggagaaagcctttgggctggaattggaggagtaggagtcaatagagagagaagagagtaaagggcaaggccatcattccaggtttagggagcaagtacaaagacacagagaaatgaaaaggcttggcctgtttggagaatgtcaagctgtctggggttgagagaaagacattctaacaaggcttccattaaagaggctagatttgctgcttggacattttctagctcttctgagacaactttttgttgagttaagcgaaaatgaatgaaaatcagatggaccatatttctcttgaatgcacacgggcttaaaaacgaaggggaaaaagaacttgacagaatgtgtcttggcttttgccaaacccaaagtatttgaaaaatcacacagtacacatctcgaacccaaaaacatgcctggattctaccacccctaactgcagctgcagccatttaataaaatgaattgtgtacaaga

SEQ ID NO: 234048 - DNA, 383 bp, Homo sapiens
cagaaatgaagaatgcctttgacgggctcgttaacagagtcaacatgactgaagaaagcatcagtgggctttaagctgtgtccgtagaacttcccaatctaaaaagcaaagagaaaaaaaagatgaaaaagacattacagaatatccgtgaactgtgagaactgtgggataattacaaagggtaaacgtgcaatgggaataccagaaagagaagaaagaagaaaaggagcagaagaaatatttgaaatgataatggctgagaatttttcaaaattaatggcagacactaaaacacatatccagtaagcacaaagaataccaagaaggataaatatcaaaacatctgaacctacatatgtcatattcacactatacaaaatcaa

SEQ ID NO: 234049 - DNA, 164 bp, Homo sapiens
tgaagcagacagcaactcattgcaactgctcctgtcctgtcggtcgagaggagagtgcagcatgacccaacagccctgctgctcccagccgcagacaagccatccttcttggctgctgttttcatcattttttaaaggactgttgagggtgggaggaagtagga

SEQ ID NO: 234050 - DNA, 366 bp, Homo sapiens
ccattgtggtattagagcttcatgaactgtgtatctttgattagttgatttaacctgtctggccctcatttttctcatctgtaaaataattgagtcttatgtgatttgaagatcaaaagaattactacacaaacagtgctagtaagagtccctgccacatagaaaggctagtacacacacacacatacatatatacacacaccccctcatacttttatatattaaaggtgtatgatttatgaattattgcattagaaatgtaaatctgttatatatatcatatatatgataagtgaaatacagattatgtaatttacaccacctattttattttgtaacttcgtaaacagattttgaaaattttat

SEQ ID NO: 234051 - DNA, 523 bp, Homo sapiens
ctaaagacccagatgggactcattttgtgccttcaaggcgctcagagttaagaggcagtgagctagagtagaagttaatggtgcagtaagggtaagtgctgtgagctgcagggagaactgtgcctggagtcccaggcgacactcaggtctgctctcacatcgaaagcactgtctatgctcaccagactgtgagccgctgaggccagagccctccattcatctctgcgtccagcacccgacaccaaccctgcccatggatgtttgccggatgagccatccgtttgttttgttttgatttgcacaagtaatccatgctcatagaaactagaaaatagtaaagaaaaagattaaatctcccttaccctgaggcaaccactgttaactgtttttctaggcatgtatgtatacatgcagcccctttattaaaaagtgagttatatatgatacatgttgtcttgttagctgctttcattcagcaggctgttggggccagctttctatgtcagggattatgggcttccgt

SEQ ID NO: 234052 - DNA, 301 bp, Homo sapiens
tcggcttactgcaagctccgcctcccgggttcacgccattctcctgcctcagcctcccgagtagctgggactacaggcgcccgccaccacgcccggctaattttttgtatttttagtagagacggggtttctccgtgttagccaggatggtctccatctcctgacctcgtgatccgtccgcctcggcctcccaaagtgctgggattacaggcgtgagccaccgcgcccggctacagtttcactttctctaaacaaataaaggtgcccactctgggccatcgctagctccttaccctgcgtt

SEQ ID NO: 234053 - DNA, 510 bp, Homo sapiens
agtggagcagggacacaagggggaatacaggtcaaatggtggtgtacttacataactggcaaaaattctgcattagcataaattaataaattaatcaaatgtctactacactgcctctacaataattatcacctaattatatgaaaagattaaatattttaaaatgaaaaattcttattttccatcagcatacatacaataatcattcatctaaaatgtaggcttgattttaacctatggctcatatgaagacaaactctgggtgtgctcatcacttttttccctgccttggttctacaattatacccctcttactccatgtcatcctgcataggttttcagacatcaaagtatgatgtcaaattattgctatatgctctgtgaataaagaaattactagacaggaagatatttgtatatgtaatatgcaagattcaattaacttgaatttccctttttttttaaaaaaagggtataaaatgagatagcatctttttaaggatttcagca

SEQ ID NO: 234054 - DNA, 411 bp, Homo sapiens
accctataacctcagctccccagtgaatcaaaactgtccaagtccctggtccaataggcccgcatcactgagctggcatcattgtctcatggctgtaaccagatctgattgatatttggccagtgagtccctttttaatataggatttgttaagatattgaagtgctctcgaactggttccagcctcctagctggacaaggagcccagggccctgctccaggggctgttcctattggtcacttagcttagctgtaggaggaccctgcttgacttcttaaaattctttcctgagtcctctttcctttctccctcccttcctttctgggtccccttccttcttgttttccttcttcctttctcaaactcttccagaaaggcattaaagtgattgttgaaaatccaaacaatga

SEQ ID NO: 234055 - DNA, 244 bp, Homo sapiens
atatggcttcgagattggaaggggaatgaattgcaacgctgtatgctaaagaagaaaatggttggaaacagaatgtttgctgatgagctgcacaacctcaataaacgcatcagctgtctctacaaacactttaactgacatgggaaatatcgatagaagagaaagctgagaacttcagaaaaggctcatctgtcaccctggagaagggaagctgtacttttccttatgaggaaacggctttgta

SEQ ID NO: 234056 - DNA, 524 bp, Homo sapiens
ctaaagctcaaattcattttggctacaagtttactttcagggaattgagactttaatccttaactggccagtttgctgacagcaaccttttcctaagttaatcagaggccagaggatcagttaaaatcaattctactttttggcagatgcagattaatgtcttaatgtagtctgaactcacacttttcactctggagtgagttaaggcggggcttatagagagccaggggatggactgacaaaacccaggaaggatggtccacgcctcacactgctggtcaagggctccatccgcaagcctgcatggtacatctgtggatgggagagcttgatgcccggagccagagctccaggctgcgtaggggctaagagctcatggtacggagttttctgatggataccaggtgctgtttaacacaggactttctctgtccataaacacattagtcattatacaaaagagtcatctgaagaatttaaaaatgaccaaatggaaatataaatataaaatatcaaaaaatatg

SEQ ID NO: 234057 - DNA, 588 bp, Homo sapiens
ctgcactccagcctgggtgacagagtgatactctgtctcaaaaaaacaaaacgaaaacaaaaaaaacctgtgacttttggttactccccttctgtagaaaagatgagcaggtattgagagaagtaaactgtaaacttgcagaggagttaaaaacagactcaggttttcttgaacagtggacatggtggcactgtccctttgtcatgaacatagtccacatatgccattacaaactgttgacagtactgtaaaatataacacattctaggtaaggtattgtctatatggtagattaaatcagaaatacaaaggctgggtgtggtgtttcacgcctgtaatcccagcactttgggaagccgagggggatgggtcatgaggtcaggagttcgagaccagcctgaccaacatggtgaaaccctgtctctactaaaaatacctgtaatcccagctactcgggaggctgaggcaggagaattgcttgaacctgggaggcagaggttgcagtgagctgagattgcgctactgcactccagcctgggcgacagagtgagactctgtctcaggaaaaaaaaaagaaaagaaaaaaag

SEQ ID NO: 234058 - DNA, 359 bp, Homo sapiens
ctgcactccagcctgggtgacagagtgatactctgtctcaaaaaaacaaaacgaaaacaaaaaaaacctgtgacttttggttactccccttctgtagaaaagatgagcaggtattgagagaagtaaactgtaaacttgcagaggagttaaaaacagactcaggttttcttgaacagtggacatgtagctgcacgtggtggtgcacacctgtaatcccagctactcgggaggctgaggcaggagaattgcttgaacctgggaggcagaggttgcagtgagctgagattgcgctactgcactccagcctgggcgacagagtgagactctgtctcaggaaaaaaaaaagaaaagaaaaaaag

SEQ ID NO: 234059 - DNA, 431 bp, Homo sapiens
ttctcatgagttcacttgcttcagagaaagatacttcctattttcttatgagctaagaatggaaagctaagaactatcaactatattaaaacaatgaaaatgatcaaccttataagttgagtttgtattaaatctgaagtattgtagatataatgatactatatcacctattgtaggtataaatatattataagggcttttacccaaaagaataggacttgcttttagaattattctgggttatatttgtcttaccataaattcttcataaatatatcttacctatattattaacatcattttttcactgttttctcagctgatagactctgtatttggagtaattatttgcctaaaaaatgcatgccatcttgacgaggtcaacattccaaaatattttttgtactgagttaataaaatatgttacatta

SEQ ID NO: 234060 - DNA, 503 bp, Homo sapiens
caatttaaagttaagtttagctctttctccaagtataaggcaaatagcgatctctcagattattttccttatcatggatgattaacaaatggatgtagtcggagaaagcagtcgtatctgtttattgactcatcaaaatcaattatagctagattagcagggcaggattatatagatcattcactggattcattgatgataaaaaggacaccaagttgatatgtgaagaaacaaaattgcaggaagggcatatgcttcttaaatgacccactgttagaggtttcttttcagttatggaaatgttaagcaatcttttcatagaatcttccagggaactaaaatgacttggtgcaggaatgataagtggagaagagtttaaagttaatgcaaatgcatgatctaacttatgcaaacactgtggcaaagcacacagactaaggaacccaagttagcaagcacatcagctagcatcctgtttacatttctgtcctcagctctactca

SEQ ID NO: 234061 - DNA, 676 bp, Homo sapiens
tatgtccaattcctgccaggatccgcctaaatccaagtattatcaagtactatctattgtagacagatccatcaggtactagtcaggaaaacatcaattgttccagacacctccacataacatgcataatgctaagagcatctgcaaacagaggttgttaatgtatcatttatgattttataaatatccacaaaactaatatattcaaatatcatatatattgaccttccttaaagtcttccaaaatcacccaaagtagacttcctaagtgccctatgtactccctgagggctttgaaaaacccctttccataagatttatcatactcctttataactgctgtttgctggtctggctccctcattagactaaatattacaaaaaaaaaaaagatatcttatccctatctctggttctagaaagtgcctgaaatatggcagatagtcagatatttgcccaatgaatgtctaatcaaaaatatgttgcaccaaactgaatactacacttaaaaggtaattcatttcttcctagcaatttttgccatttaaaaatatagagagcagtgcatggtggctcacacctgtaatcctagcactttaagacgccaagataggaggatcacttgaggccaggagttcaatgccagcctgggcaacatagcaagacttcatctcta

SEQ ID NO: 234062 - DNA, 514 bp, Homo sapiens
cagggttctgggctgtggtaaaaattacgattttccacaagactattctgacactacacaagcaaggaggggatcctcatttcttctgaggtagagagactgagactaggggatattgaatcatttacccgaggacacactattaggaagtgtcagggttaggattctatatccagtcctgtctcgtattcctctcttacatagactctgtgcttcagccaatctgcttaaccgaagatgaaattaaaagataaaatggatgcaaaatacttatttagtaagaaagcagtgaatggaggatatatgtggttcgtagggtaactcagctccacagtacattggggacccagacctttgcatcctattggaggattctgaagagtaggaatgaagctgaagagtagaagtagaatctgaaaaagtaggacaactggcttcggatatagaagcattatctgagctcagtaattttttttcaaagaaaaaagcatgaataaatacatgtgtgaaacct

SEQ ID NO: 234063 - DNA, 453 bp, Homo sapiens
aatgatgaactaaatatacagtatttctacattctttggcatgcacatgaaataaagtcatactttttttcaacaaatacaacagctgcaaaagtaggtaaattttatttcataaacttacctttctttagatgattttctttgtttttcatatttttagtttcaaatgctttgtgagatctctagatgccgtttagttttataagagggcttaatattaaacttgggttaaatacgtatatgtttatttgaatatttcacttgctttcaattgtttgttttgcttttaatgacaaggattttatttgatctttataaaatttgtatatgcaaatacaaaaaatattttcctttctatttcttatgaggtcaaatttttaaattaactaaaagaggggcaaaaacttgtacttgataaatatctgtgcataataaaaagaaatcccagactat

SEQ ID NO: 234064 - DNA, 4040 bp, Homo sapiens
tgcagagaacagagaaaggacatctgcgaggaaagttccctgatggctgtcaacaaagtgccacgtctctatggctgtgtacgctgagcacacgattttatcgcgcctatcatatcttggtgcataaacgcacctcacctcggtcaacccttgctccgtcttatgagacaggctttattatccgcattttatatgaggggaatctgacggtggagagagaattatcttgctcaaggcgacacagcagagcccacaggtggcagaatcccacccgagcccgcttcgacccgcggggtggaaaccacgggcgcccgcccggctgcgcttccagagctgaactgagaagcgagtcctctccgccctgcggccaccgcccagccccgacccccgccccggcccgatcctcactcgccgccagctccccgcgcccaccccggagttggtggcgcagaggcgggaggcggaggcgggagggcgggcgctggcaccgggaacgcccgagcgccggcagagagcgcggagagcgcgacacgtgcggcccagagcaccggggccacccggtccccgcaggcccgggaccgcgcccgctggcaggcgacacgtggaagaatacggagttctataccagagttgattgttgatggcacatacttttagaggatgctcattggcatttatgtttataatcacgtggctgttgattaaagcaaaaatagatgcgtgcaagagaggcgatgtgactgtgaagccttcccatgtaattttacttggatccactgtcaatattacatgctctttgaagcccagacaaggctgctttcactattccagacgtaacaagttaatcctgtacaagtttgacagaagaatcaattttcaccatggccactccctcaattctcaagtcacaggtcttccccttggtacaaccttgtttgtctgcaaactggcctgtatcaatagtgatgaaattcaaatatgtggagcagagatcttcgttggtgttgctccagaacagcctcaaaatttatcctgcatacagaagggagaacaggggactgtggcctgcacctgggaaagaggacgagacacccacttatacactgagtatactctacagctaagtggaccaaaaaatttaacctggcagaagcaatgtaaagacatttattgtgactatttggactttggaatcaacctcacccctgaatcacctgaatccaatttcacagccaaggttactgctgtcaatagtcttggaagctcctcttcacttccatccacattcacattcttggacatagtgaggcctcttcctccgtgggacattagaatcaaatttcaaaaggcttccgtgagcagatgtaccctttattggagagatgagggactggtactgcttaatcgactcagatatcggcccagtaacagcaggctctggaatatggttaatgttacaaaggccaaaggaagacatgatttgctggatctgaaaccatttacagaatatgaatttcagatttcctctaagctacatctttataagggaagttggagtgattggagtgaatcattgagagcacaaacaccagaagaagagcctactgggatgttagatgtctggtacatgaaacggcacattgactacagtagacaacagatttctcttttctggaagaatctgagtgtctcagaggcaagaggaaaaattctccactatcaggtgaccttgcaggagctgacaggagggaaagccatgacacagaacatcacaggacacacctcctggaccacagtcattcctagaaccggaaattgggctgtggctgtgtctgcagcaaattcaaaaggcagttctctgcccactcgtattaacataatgaacctgtgtgaggcagggttgctggctcctcgccaggtctctgcaaactcagagggcatggacaacattctggtgacttggcagcctcccaggaaagatccctctgctgttcaggagtacgtggtggaatggagagagctccatccagggggtgacacacaggtccctctaaactggctacggagtcgaccctacaatgtgtctgctctgatttcagagaacataaaatcctacatctgttatgaaatccgtgtgtatgcactctcaggggatcaaggaggatgcagctccatcctgggtaactctaagcacaaagcaccactgagtggcccccacattaatgccatcacagaggaaaaggggagcattttaatttcatggaacagcattccagtccaggagcaaatgggctgcctcctccattataggatatactggaaggaacgggactccaactcccagcctcagctctgtgaaattccctacagagtctcccaaaattcacatccaataaacagcctgcagccccgagtgacatatgtcctgtggatgacagctctgacagctgctggtgaaagttcccacggaaatgagagggaattttgtctgcaaggtaaagccaattggatggcgtttgtggcaccaagcatttgcattgctatcatcatggtgggcattttctcaacgcattacttccagcaaaaggtgtttgttctcctagcagccctcagacctcagtggtgtagcagagaaattccagatccagcaaatagcacttgcgctaagaaatatcccattgcagaggagaagacacagctgcccttggacaggctcctgatagactggcccacgcctgaagatcctgaaccgctggtcatcagtgaagtccttcatcaagtgaccccagttttcagacatcccccctgctccaactggccacaaagggaaaaaggaatccaaggtcatcaggcctctgagaaagacatgatgcacagtgcctcaagcccaccacctccaagagctctccaagctgagagcagacaactggtggatctgtacaaggtgctggagagcaggggctccgacccaaagccagaaaacccagcctgtccctggacggtgctcccagcaggtgaccttcccacccatgatggctacttaccctccaacatagatgacctcccctcacatgaggcacctctcgctgactctctggaagaactggagcctcagcacatctccctttctgttttcccctcaagttctcttcacccactcaccttctcctgtggtgataagctgactctggatcagttaaagatgaggtgtgactccctcatgctctgagtggtgaggcttcaagccttaaagtcagtgtgccctcaaccagcacagcctgccccaattcccccagcccctgctccagcagctgtcatctctgggtgccaccatcggtctggctgcagctagaggacaggcaagccagctctgggggagtcttaggaactgggagttggtcttcactcagatgcctcatcttgcctttcccagggccttaaaattacatccttcactgtgtggacctagagactccaacttgaattcctagtaactttcttggtatgctggccagaaagggaaatgaggaggagagtagaaaccacagctcttagtagtaatggcatacagtctagaggaccattcatgcaatgactatttctaaagcacctgctacacagcaggctgtacacagcagatcagtactgttcaacagaacttcctgagatgatggaaatgttctacctctgcactcactgtccagtacattagacactaggcacattggctgttaatcacttggaatgtgtttagcttgactgaggaattaaattttgattgtaaatttaaatcgccacacatggctagtggctactgtattggagtgcacagctctagatggctcctagattattgagagcctccaaaacaaatcaacctagttctatagatgaagacataaaagacactggtaaacaccaatgtaaaagggcccccaaggtggtcatgactggtctcatttgcagaagtctaagaatgtacctttttctggccgggcgtggtagctcatgcctgtaatcccagcactttgggaggctga

SEQ ID NO: 234065 - DNA, 392 bp, Homo sapiens
atcaccctttcggggccaattttaataacttcttgtttaatgttgcaaaactagatttcctaggaagattgttctgatgtacgagtgtggagcgtcgcttatcctaaaagcttgcattttaaccaggaccctcttaaagtagccagtccccagccaggcgcggtggctcacacctgtcctcccaaagtgctaggattacaggtgtgagtcaccacgtccgtccagtcacggtgatccatttgtaaagtcgggaataaatgacctctgaagtgttgtctgtatgaaacggcacattgactacagtagacaacagatttctcttttctggaaggtgagttttaagcgtcaacttaaaactcaagggaataaaactgaaggcagaaaaagaccta

SEQ ID NO: 234066 - DNA, 1741 bp, Homo sapiens
cctacattaaaagccatatcctttaatacatgcctttcttcctttatcttcctttcagaaattccctacagagtctcccaaaattcacatccaataaacagcctgcagccccgagtgacatatgtcctgtggatgacagctctgacagctgctggtgaaagttcccacggaaatgagagggaattttgtctgcaaggtaaagccaattggatggcgtttgtggcaccaagcatttgcattgctatcatcatggtgggcattttctcaacgcattacttccagcaaaaggtgtttgttctcctagcagccctcagacctcagtggtgtagcagagaaattccagatccagcaaatagcacttgcgctaagaaatatcccattgcagaggagaagacacagctgcccttggacaggctcctgatagactggcccacgcctgaagatcctgaaccgctggtcatcagtgaagtccttcatcaagtgaccccagttttcagacatcccccctgctccaactggccacaaagggaaaaaggaatccaaggtcatcaggcctctgagaaagacatgatgcacagtgcctcaagcccaccacctccaagagctctccaagctgagagcagacaactggtggatctgtacaaggtgctggagagcaggggctccgacccaaagccagaaaacccagcctgtccctggacggtgctcccagcaggtgaccttcccacccatgatggctacttaccctccaacatagatgacctcccctcacatgaggcacctctcgctgactctctggaagaactggagcctcagcacatctccctttctgttttcccctcaagttctcttcacccactcaccttctcctgtggtgataagctgactctggatcagttaaagatgaggtgtgactccctcatgctctgagtggtgaggcttcaagccttaaagtcagtgtgccctcaaccagcacagcctgccccaattcccccagcccctgctccagcagctgtcatctctgggtgccaccatcggtctggctgcagctagaggacaggcaagccagctctgggggagtcttaggaactgggagttggtcttcactcagatgcctcatcttgcctttcccagggccttaaaattacatccttcactgtgtggacctagagactccaacttgaattcctagtaactttcttggtatgctggccagaaagggaaatgaggaggagagtagaaaccacagctcttagtagtaatggcatacagtctagaggaccattcatgcaatgactatttctaaagcacctgctacacagcaggctgtacacagcagatcagtactgttcaacagaacttcctgagatgatggaaatgttctacctctgcactcactgtccagtacattagacactaggcacattggctgttaatcacttggaatgtgtttagcttgactgaggaattaaattttgattgtaaatttaaatcgccacacatggctagtggctactgtattggagtgcacagctctagatggctcctagattattgagagcctccaaaacaaatcaacctagttctatagatgaagacataaaagacactggtaaacaccaatgtaaaagggcccccaaggtggtcatgactggtctcatttgcagaagtctaagaatgtacctttttctggccgggcgtggtagctcatgcctgtaatcccagcactttgggaggctga

SEQ ID NO: 234067 - DNA, 449 bp, Homo sapiens
gtagcagttcagcccttatttgccttcaaaaaaagaaaagtacaaagtgttctctaattctggcttttagaaagttctaggaagttaaatgaacacttttttttcactatgaattatatgagtgaattcatcagaacggctgcttctaagaaggattttggtggttttagaaaggtaggtgtttattcctttgcctgggaagcctcaccagagatgttgactctacaacccatctcattcgttagtttttgtggacagcagttgcctcatcgggaatttttttttttcacttccttaccatgtttcccttcggatggatagactagcccgacccagttggtccaggccttttcactaccaaggataatttatctaacaggaacaattaccctgctgacaccatgatttggaaatttttattcagaactgattcactaaaatgattgctt

SEQ ID NO: 234068 - DNA, 798 bp, Homo sapiens
tttgggtccgctgtcaatcctggtgccgtgatcgactcattctccacaaagattatctttaaacttctccaagctaggtgcagtatctcacgcctgtaatcccagaactttaggaggctgagatgggaggactgcttgagcccaggagttcaagagtctgagaccaacctgggcaacacagtgaaacccaaattctacaaaaaatacaaaaaatcaggttggcacggctgcgtgcacctgtagtcccagctactctggaggctgaggtggaaggatcacctgaggccgagaggtggaggctatggtaagccatgatcacaccactgcactccagcctgggcgacagagggagacaccgtctccaaaacaaacaaatgttgaattattgctgtaaattgaaacattagaggttaatgatactttgagtatttacaataacgagatcttgagaggtaggacaggaaaggcttttgtaatgagagcttggtgtgagatctgatgccttttacaaagaaaggagggaactcctctaagcagagggaatcaggcgtgcaaaggctggatggcaggaggaagcacagtgagtacaaaggctgaggaatatctgaggggtttgagctaatcgacctgaatggagtgtggtgtgagttgaagctggagccggaggaagcagagccttagccataccgagaagttttgtgcttatccaagaattaaaggaaaccagtcataagctttaagcagaagtgaatgactggtttcctttaattcttggacaagagcaaaactctgtctcca

SEQ ID NO: 234069 - DNA, 430 bp, Homo sapiens
tctcctcttctcatcgcgggcattcaacattcctgctctgcttcagaaggaggagctctatttttcaagactaaacaaacctgctcttctctctgtaaggtaatgggacctgtatcttccaaggctctgtggtatatgaacgtcctggaagaggtttttcagaataaagtgcagttatggcctcacaagatgttaagaaatgtgaattgaagtaaaagttctgtgatatattaagctatgatatactaaaacttttagtttgcatttttcatctgtgaaaagtctattgaatctttttcctgtgtataaatagattgttttctatgtaaaagtgaatttttggtttcggtcattgctaaatacctagtgcctgttgtagtgtctacacatagtagacactcaaataataaataatatttgttggataaat

SEQ ID NO: 234070 - DNA, 356 bp, Homo sapiens
gaatctcatacctaaggactgcagaaaatgcttgattctcagcctgaagctaggactcgaaagtttaattgatactttcaggctatagcctatctgataccatgaacatttattttcctttgttatttcttaactgtttgttctgtttgaaagagtgcataaagtaccaccattacaagggaatacagtttgaagaagaaaacaaattagctccttaactttcaactgccacccgatcactcttgtttcctatgcacatattctttacattctctcttcccatctgtcactttatctctctcctctttatatatgttcacagacattcacaattctacggaaatagtcattctatc

SEQ ID NO: 234071 - DNA, 654 bp, Homo sapiens
aacccccacactaagttttcactttttctttcctagctgtataaatcagaagctgagtgaagacaacggttttgcttgctgctgctgattttttaaaaacaaaagcaaaaataactgtgttaataaagagaattccagtgcattacacagagcagatcctcaagcatctgccagaaattagagtaaaagcagtcatgttattccaagagacgagcactaactttcactccggctctgcagagttcacaggtgctcacgctattcttaatgctgaacttgtatgactgtggccagcacagcccatccttcaatgcttgtgtcttcatcaaacctgtagcgcttctcagtgcagggggcatcctgcatcacctatttcatcattcaccttgctgaaatacagaccctgactcagcggctctgggtggcgctggggtgagggagagcctgcatttctaacaggctccagggaccatgcatgtcttcaggctgtaatttgaccagcaggtgcgaggcagttgataagtgtctatggatcctgataacatgttatgattatcatccctcattacagagggggaatctgagtcatgaagggtaggtccttcccttcactcaacccttcagtaagttccatgaactctgggcccaggaagg

SEQ ID NO: 234072 - DNA, 437 bp, Homo sapiens
ttttttaaaagttatacatcttggctgggtgcagtggttcacgcctgtaatctcagcagtttgggaggctgaggcgggtggattgcttgaggtcaggagttcaagatcaccctggccaacatggtgaaaccctgtatttactaaaaatacaaaaattagccgggcatggtggcaggtgcctgtaattccagctactcggaggctgaggcaggagaatcgcttgaacccgggaggcggaggttgcagtgagctaagatggcaccactgcaccccagcctgggcaacagagagagactccatctcaaaaaaaaaaaaaaagttatacatcttgacagcaataatcataaaattaagcaaaattagaaggagggagaaactttgtgtgttactttcttcaattttggtggtgggagtgaataaatatggtctaaaattga

SEQ ID NO: 234073 - DNA, 511 bp, Homo sapiens
aaaaataaactcttttacttaacaaacaccttggtaagtgaatgtcatggtatattttctagaagagtaaaggttgaagaaatgatatttcttattaaagaaacttagccagttatttgtacttcaaaagaaaaaaagtcttaaagtgaaacaaacacacacagagaaacaagaacaattattgaacctactaaaaggctgctatagtttgaaaacatccccatcaaaattcagtattaaaagatggggacattaagaggtgactaggccatgaaggctcttcccttgtgaatgggattaaggctatagtaaagaggcttaatgaagggttcacctagcttgtccttctgatttctgccatgtgaggacacataaagaaggccctcacaagatgctgctgacttggtgttggaatttccaccctctagaaccgtaagaaaatagaattccgttctgtacactttacccaaactcaggtattctgttagagcagcacagatggattaagaca

SEQ ID NO: 234074 - DNA, 198 bp, Homo sapiens
cccctgcctgaaatgtttccaagaaatgcatgtggtagaaaacataattaatcagggtccatttttgtcaacctccaggagtcagggcaaagccaagtcattgattttgctgcatttgaaaggctgttgtttggtatgtcagccttgttagtatagttgaaagtacctattaagaggctagaagcttggctagctcta

SEQ ID NO: 234075 - DNA, 224 bp, Homo sapiens
ttacaaagcaatactcatagaaatttagacatagaaggtaacttccttattctgataaagaatgtctacaaaaatattcaagaaccaaacacatggttaatatcatacttaattgtgaacctttataataggaatgatttaaggatgctctcttttacctttttcatttactattacactggatgttctagctatacttaggcaggaaacaaaataagattaga

SEQ ID NO: 234076 - DNA, 317 bp, Homo sapiens
ggtggcctcctgaaattgacccaagcgtgtcagctagtttccagttgttttctttttccagccccagggtctgttctctctttcaagccagttccaggcctacttttttctaggtctccccctagaaaagcggccccacctcccctgcatctctgccactcggatgcatctttggtgagtgccgtgggagcaaacctccaggcatcccagaatttcaggtcctcctggaattgggcccttactcaacatttccagtcctgatggaaacctgcacccaggcaggtctctaagctaacagtgtccttgctggggcctgg

SEQ ID NO: 234077 - DNA, 167 bp, Homo sapiens
aactactgaggcagacattcctaagtgaactgtctagaaaaagctaaattaatgaaccaagtaatcctgggaaatcctgtcccataaaaccattagttgcaataggctaattctcaataaaaagcctggcaaattctcagaaggcaaaaagcctcctgagccttaag

SEQ ID NO: 234078 - DNA, 422 bp, Homo sapiens
taatcataaaacagaatggtagagaggaatattttaatattattcttaattcaggagcccatctgggtcagaacttttcctcctgtttgtttttatttactctacccaggagttcataataatgaactaaaacagctacggggccgggcgcagtggctaatgcctgtaattccagcactttgggaggccaaggcaggcggatcacgaggtcaggagatcaacaccatcctggctaacaatggtgaaaccccatctctactaaaaatgcaaaaattagccagacatggtggcgcatgtctgtaatcccagctgctcgggaggctgaggcaggagaatcacttaaacctgggaggcggaggttgcagtgagctgagatcacaccactgcactccagcctgggcgacagagcgagactccatccc

SEQ ID NO: 234079 - DNA, 524 bp, Homo sapiens
ttttaaaaaatgattaatattgccaaaccaaaggtcatgaagctatccttctacgtaattatttgaaactttttttaccttttacattcacaattagattgtaggggtccaaatgaggcaggagaatagagtctggagacagggaacctaaggccaacccctgctgacttcttggaattggactaagaggaaaacctcacctctccgtgaccaaataacgaggccaaaggccctccttctctgaacctcccctcccctgtgtcacaatgggaatgcctgtgattggttcattctgaatccctcatttgcagggtgcctctgattggtcctgggcagaattcttcattcctatagagtatgacctgttagaggcttctaaaggacgtttaggcgtgctactatgctcttttagtttaataaaatccccaaggaacattataatctggacttttgagccacttgtttgagccctctctaactctgtggagtgtactttcacttcaataaatctctgcttttgttgc

SEQ ID NO: 234080 - DNA, 325 bp, Homo sapiens
gagacagaagaattgcttgactccaggaggtgtaggttgcagtgagccgagatcgcaccatcgcactccaccctgggaaacacagtgagactccgtctcaaaaaaaaaaaaagaaattaaaacatatatatgttaatatatgggaaggacaagtactgctctcctacgtgcatatattgtgtagtggtaagtctgggcttctagtgcacccatcacctgaatcgtgaacagccagtcaattcttatcctggttccttcacctcctgagttgtgattttgagaatctgtggtgtattgattgagatagcggtttaagagaaagaga

SEQ ID NO: 234081 - DNA, 444 bp, Homo sapiens
agtgaacagcatgttcaaaagcaccgggctacaaaaatgcaaggaatgttcaggaactcacaaggagggaaaggaagccagctggctggctaacaagcataccgtaaaagtagtgccagcaaaagatggaactttaatgattccaagacaggcagttgaggcaggacttggtgactaataggaaatgctggatgagggagagaaatgaattgctaatctgaggtttctagaccaaaaatatttttaaagatagaatattaaataagacaaagtgcaaaggcaggttaacaaggaaagctttgtatagttgtggacatgcttagtatatacctgtggaacatctggggggaagcgccctgtgggcttttggaaattcaagtgtagaaagtagatttggagtcgtcagcaggagatgatgagaggctgaagctaatgaaaaagtgt

SEQ ID NO: 234082 - DNA, 803 bp, Homo sapiens
ttgtgcaatattatgaattgatattaataaatgccactgagtggtttattttaaatggttaattttatattatgtgaaatttatctgagcttgaaaaaaaaaagcatggaccttgaaagcaaatagatttataatcaggttccaacttgacttctcattagccatgtgattttggccaaattatattttctctctgaacttctgttttgtaacactagtataaaaataatagactttttttccagttagaaaggccaacagtgttaattagttttcagggaaatataagatgcatataaacataaacaaaatataaaacaaaacaatcaaaatcttacagtccaggagcatatcaagacagagcattttttgcagacacaagagtactatcaaagggaaaaatgatacctggaaagtaaaaggccaaggggcttgggtgggtcccttacccaaggacactgcatttttgtggtgtagccataagatttttttttctttttaaaaagcacttcagtcttaaaaatattagaaacaggccaggcacggtggctcacgcctgtaatcccagcacttcgggaggctgaggcgggcggatcaggaggtcaagagatggagaccatcctggccaacatggtgaaactgtctctactaaaaatacaaaaattagctgggcgtggtggcagatgcctgcaatcccagctactcgggaggctgaagcaggagaatcacttgaacccaggaggcggaggttgcagtgaaccaagatcgcgccactgcactccagcctagcgacagagtgagac

SEQ ID NO: 234083 - DNA, 416 bp, Homo sapiens
tggtatctattaattcagatatgatcatgatactcttctggtagaacctttcaacatctccctttaacaattcttacccaagtttctatataccttagactaaagcacatgagaccagatagttaagagaaggcagttatgtgtgtgttccatgttgagtagataatattctgatagctttttctcctactaattgagaatctgattggataagtaacaccacactttcttttccaaattagagtccaaacaatacccacctcaaaaggttgtgagaaataaataagcacattcatattgcatatgtagcccataagtggtcggcaccaaatatctcttataggtgttttttttttttttttttttttttttgagctggagtctcactctgtcacccaggctggagtacagtggca

SEQ ID NO: 234084 - DNA, 521 bp, Homo sapiens
acctgctgctattattttctctataatccactttggtaaagatacataatagacatttatataatgcatgtaaaaagtcagaaaaccagaaagttctctgacagtaacaccttacaacctgatactgaagaaaatatccttgtaagatgaacattgtgcatttcatagacattgctcttttagttccctaagcctaactggcaggcctagcatttcattacatctcatatagcgactgattgcttggggcatcatattcctttaaaagtcatgcctttactgcctttccgtaattgcattctgtgtgtgcaatgatctgaaagctatttgagaagaaggagcataatattacatatatgttagagagaaataccaaacccctgtaccatttcttgacacttgaaggttttaatagtgctgattcaataataatgtagtcacatcattaatttgtattaccctggtttgcaatttctacaggctttttaaaaagaaaaataaacccatttaaatcttttatt

SEQ ID NO: 234085 - DNA, 159 bp, Homo sapiens
caaaattcagcttttgattttccattttaagttactatggtggaagcagctaaataatctctactatccactctccctttctttcttagttagaacatacaagttgtagccaggtacatggccttaaagattacatactacatttgcaagacctcttat

SEQ ID NO: 234086 - DNA, 291 bp, Homo sapiens
tccaagttctctgaggaaagcagttttgttgtctgcgataaatgaaatgaattggataagagttggtataaaatgcctaagtcttcccggaatgagggttggcagttatcagattcctcgtggaagttggtgctttatgaaactagcagcagtagtttgggacttattttattatacatatcaaagactgcagaaaagagagctatcatgggcccagatttattttcttgaccagatctgagctcacctggaaatgattcatttcagactggaatttaagtgaaggtaaaa

SEQ ID NO: 234087 - DNA, 583 bp, Homo sapiens
tattctgtaatcatgagaaccatgcagcacgtttacatgtagcatgtttagcatgtagcatgcaccatgaatacagaaaaaaggtcaggctccccttctagaggggatcctttgacaacttccatgctaggaagttatcatcaaagaccctcatttcacagacaggaaaacagattaagtcactgatacaaatttatgtaaccataagacactgaattatgtcagttatatttcagacataaatgggcttaaaatattctacaaaaaaaggaatgttctaaaaacagaagaccaagcaaacaagatgttatgaattctctcaatttcataaagctcttctggcagaggagacagattatttttttctaattgacagatgttttcaagttattttaaaaacagatcaggaactaaataaaaatgggtattaagatcacatccacactgagtgcaatggctcacacctgtaatcccagctacttaggaggttgaggcaggaggattacttgaggccaggagttcaaggctagtttgggcaacacgttcaaggctagtttgggcaacatgatgagtccctgtctca

SEQ ID NO: 234088 - DNA, 521 bp, Homo sapiens
aaaaactaactattgggtaccgtgttcactacctgggtgacaggatcatatgccctccaaacctcagtgtcatgcagtacattcatgtaacaaacctgcacaggtacccccgaatctaaactagaagttgaaattataaacaactgggacagcgtgcccctgggccagagctgtgtgtgtgcatgcatgtgtgtgctaaccagctgcaccagatgttaaccccgtagttgctgactgaggggaaggggtctgggggagggggacagtggccagagcagcagggatggggtacttaagagcctgcagcaggccgggcgcgatagctcatacctgtaatctcagcactttgggaggccgaggtgggcagatcacctgaggtcaagtgttcgagaccagcctggcctacatgatggaactatttagtctccactaaaataaaaaattagccgggcatgatggcaggcacctgtaattccagctacttgggaagctgagatgcaagagaatctcttgaacccaag

SEQ ID NO: 234089 - DNA, 481 bp, Homo sapiens
tgttttaaatgcttatgtgtagtgagaatgaagagcttttctccctttgcagggattcaagaagtcctgtctcacaggacagcttttagccctctgcagaggccgaacctccgcttattctcttgggagaaaaagctccaccctccaagtgttggtccaacttttcccacttgttcttctagaaattttcctgtttcagcagggcccggtggctcacgcctgtaatcccagcactttgggaagcccaggctggcggatcacgaggtcaggagatcgagaccatcctggctaacacagtgaaaccccgtctctctaaaaatgcaaaaaatgagccgggcatggtggcggacgcctgtagtccctcccagctactcgggaggctgaggcaggagaatggcgtgaactctggaggcggggcttgcagtgagtcaagatcttgccactgcactccagcctgggcgacagagcaagactccatctc

SEQ ID NO: 234090 - DNA, 482 bp, Homo sapiens
atcgataagacttatgcattaatctttttttttcttttttttaaatttcaatcccttttggggtacatgcagtttttggttacatggacaatagtggtgaattctgagattttagtgcacttgtcatctgagtagtttgcatcgtacgcaatacatagtttttttttttatcacacaccgccttcccactctctcccttctgagtctccaaagtccattattccactctgcatgcctttgcctactcatagcttaactcccacttacaagtgagaacatacagtatttggttttccattcctgaattacttcacttagaataatggcctccagctccactggaggatcgtttctttctcatcaccaataaagttagccaattttcacggtggaatatggaaaaggaaataattttttcttgagtgttaaagagatccctgaggtttaatcactattacttgagccctggctctaagagaagt

SEQ ID NO: 234091 - DNA, 372 bp, Homo sapiens
caagtctctgaaagtttctaaaatattgaaataacttgttcactgcaagtttggaagtactcacccatggaactgtttattttctttatgggaagatttttaatttctaggtcaaaagaactataaatcatcaaatgacaattcaggctttctacttattattgagtgagttttgataagatttttttaaaaaattgagaaaatttaaccaacttaaaatattacttggcaaacacttttatagtattcttgttatattttttaattcatctgtatccattttgtctatcctttccttcgcaatattatttatttgtgcctttgattattttttccttacactgccagctttttatctattgtttatttatt

SEQ ID NO: 234092 - DNA, 306 bp, Homo sapiens
tcccaagatagatggtcacacatgttttcaggagacctctatataaatgactttgatcacttgataccttgaaaagaggtcttggggcactagaatgacatctataagtgacaagtataaaatgtagtgctcagtgacattaaaaaacaaatcaacccacatagaggaagagctttggacgtagggatgtcaaactggtctagaatgtaatgaaaacccaagaaggtgccccagtaagaaagaagaaatcaatctaacaatgggatgcagcagcaagaatactgagacaggaaagaaaatatttta

SEQ ID NO: 234093 - DNA, 484 bp, Homo sapiens
cccttggggtgcagatgaataatgtgtgcacatggaaccagttagcaaattgtcattaggtctgctagatgtttccctcagaccatcctgtctgaaaccaccccatctcaaattgaactcttccatcactttctagcccctttccctgctctatttttcttcataatgcttactactacctggcattatattatgtgtttgttttttattgtccatctctccaattagaatgttaactgcagaaggccaaggactttgtccattggtttcccactttactgtatttggcacatagtcggtgctcagtaaatatttcctcaatgaataaatctgttcagtgctatgaagagctaaaaaatagaacataggccaggcacagtcatgtgtacctatagtcctggccacttggaaggctgagatgggaggattgcttgagcccaggagtttaagtctagcctgggcaacataccaagactccatgtca

SEQ ID NO: 234094 - DNA, 552 bp, Homo sapiens
tggtccaaaagggtgaactctatgtagttctttgctacacagttatgatctttcagtggaattagctcaaaaagctgttctgtgggctgaccactctcacctcctaccaaaaagagagaaggaaaattaaagaatcgtgaacatgctggtagcaggatatatacgcatctgagtgtgcagtttatggggagcaggtctgtgatactctttagtcacactgaggggccagtgttcgaaatgtgcccttagaaatagcaacaggggcccaggcgcggtggctcacacctgtaatcccaacactttgggaggccgaggtgggtggatcacctgaggtcaggagtttgagaccagcctggccaacatggggaaaccctgtctctactaaaaatacaaaaattagccaggcctagtggcacatgcttgtaatcccagctactcaggaggctgaggcaggagaatgacttgaacccaggaggtggaggctgcagtgagccgagattgcgccactggactccagctgggtgacagagcgagactccatctcagaaaata

SEQ ID NO: 234095 - DNA, 422 bp, Homo sapiens
agtctctgtctttgggaagtagagcaagggcgtaggatggtgggtgaagatgaaaccattggaaaagtgattatgatatcatgctgtttttcttattaaaaagttccatctaaccatttggaaaaaggaatattcctaagtaggggatttatgttggcaacttgagaaagaccatgtaactggatgactccctggaccttcatctcttatctcctgtggccttctggtgctatcctgctgttatcctgcagctcagggggtacaagtctctgggccagcttgtttctcacatacccaaagatgagccctttgatcataagcacttcaaaaattttaccttcatgatagaattctttccaaaacgtgttgcatactttcctgccttggtaagaataataaaatggcaatactactaccactaa

SEQ ID NO: 234096 - DNA, 494 bp, Homo sapiens
aatccagcctaaaaacccatggtctcagccaccatgccatgtttcctaaaaaaattacgctatgacagtggaccgtttttgcttaactccagagactttaattcacccacctagaaaacctgtcatgaaaatatagaggattttttcctgagagttcttaggaccgtgaaacagtgtcacaaatcctgttcagaaagctgggatcatgcagatgaccaggcagatggaagaaaagtaaaaatataaaaatttaaaaacctgggatcactgctttaagtttcaccgagctttaactttctggaagaggagaaatataacacagaccctacgcattgagaatagatggcgttggagttgtggattatctgtgcttgccaacagtgtacaggaaaaaaagcgatgcatttgacttccctgcttggcagagccactgcctctagagtattactcaaaaattgattttttaaaaataaaaataaatgaatttgaagacg

SEQ ID NO: 234097 - DNA, 401 bp, Homo sapiens
aattgagatggagcctcgttctgtcacccaggctggattgcagtgttacaatcttggcacaccgaaacctccgccttccaggttcaagtgattctcctgcctcagcctcccgagtagctgggattacagtcacccaccaccacacctggctaatttttgtatttttagtagagatgaggttttgccatgttggcctggctggtcttgaactcctgacctcaggtgaccctcccaccttggccccccgaagtgtggggattacaggcgtgagccagtgtgcctggcccattcattaagttctgacaaaagtatgtatctttgcaatttaaactttctgtcaagatgctaatcatcccctttaccccaaaaagtcccctcatgcccccttctgtcgtcttctc

SEQ ID NO: 234098 - DNA, 472 bp, Homo sapiens
actgagtagagacattagtggctacatactgtggggagatacatttcacagttcgagtccaggccagtcaattgactgctatcccaaccaataaccaacaaccttcagaagagcaacacaaaatccacagttgctacaacatattgcacacaatgtcctgcttctgtctaaaaattattagatgtgcaaagaaacagaaaataatgtttcatactcaagaaaaaaaggtcttaataagcaggtacttagtaagcacagatattcaattgagcagacaaacatgtggaagcagctattataaatatggcaaataactttttaagaaaagctttgaacagatagcaaatctcaataaattagaaaaatcaaagaaaaataatttggtaattctagaattaaaatgtactgtaaccgtaaagaaaaattcactagatgatctaaagcacagatctgagatgacaaaaataaaaaa

SEQ ID NO: 234099 - DNA, 564 bp, Homo sapiens
ggcaggggcatgatgtctgagccatgccctccctagagacctcctctttgccctaatggcttaaagtcagggccatttcaggaaggacagcatctcaaatgctcatctagggactatgagcccctcagatcacctcagtctttaaaaccaactgcaaaggtgcatctcctaaacctgactactaatcattcctcacagagaatggaatctgggattctctagaaccttctacctgatggaggcctttcagtgttctgtttagccacagagctggtgccttttctgctagaccaccacctaatgattccagaggactcactcccctaaaccagttaccctctcccacaagtacccagggccttgctatccacttcttggatgaaaatatttggatcagactcagacaccttgaccccggttcagtttttcctggggagcggctgtggccccctctgatgcccccagctcaatgcatcacagaaagaattccagccactcagcaacctcttgtgatcttccaggtgagcaggttaacaaattaaagaatcattaccattaccatta

SEQ ID NO: 234100 - DNA, 402 bp, Homo sapiens
gcctgggcctcccagtgttcgggctcccacactgctgccctcacccactatgtgcatcttcccaacttctggacatcctcactcctcctctgtccaatgtaaatcagaatagtgggccgggcgcagtggcgcacgcctgtaatcccagcactttgtcaggctgaggcagaagaatcacttgagccaggagttggaaaccagcctgggcaatacagtgagaccctgattctacaaaaataaaaaattagctgggcggggtggcgtgagcctatagtcccagcaactcaggaggctgaggtgggaggattgcttgagtccaggaggtcaaggctgcactgagctaagattgggccactgccctccagcctaggcgacagagcaataccctgtctcaaaagaaaa

SEQ ID NO: 234101 - DNA, 416 bp, Homo sapiens
aataaattatgtgctttgacaataaatatttgaaaataatacttatagtaggtaagtgatatagtttgaatgtgtgtccccaccaaatctcatgttgaaatgtaattcccagtattagagatggggcctggtgggaggtgtttggattatgagggaaaattcctcatgaatggcttggaccatccctttggtgataaatgagctctctctctttgttctcaggagatctggtggtttaaaaatgtgtggcacccctccctctcacactctcttgttcgctccttttcttagcatgtgacatgcctgttccccctttgccttctgccatgattggaagcttcctaatactgctatgcttcctgtgtagtctaagaaccctgagccaattaaacttcttttcttataaattacccagt

SEQ ID NO: 234102 - DNA, 287 bp, Homo sapiens
tttccatgggccctctaatacacaccttaaaagtgcttccttttccattcatttcctgagttactggtgttccagtcagggttgtctaccagaactgcttcctttcctagtaggaatggagtttccacttcttcctcaccttccctatctcctctttgtctcctcggtttgctacaggaggcatgttgctcatctccatatttttctgctgcctgcagaactttctgcttttcagcttcagtgagggtctgacgtagcagcaacgtaacatccctctatgaaggtca

SEQ ID NO: 234103 - DNA, 411 bp, Homo sapiens
taaactactagaaggtcttaccttcaacaacaacacaactcgtattgaactattcatgggtcggggcagcataaaccaccacgcttaacatttattgagtgcctcccatgtgctgagtactttcttttcagacaggccaggcatggtggctctggcctgtaatcccatcactttgggaggctgaggtgagtggattgcttgaggtcaagagtttgagaccagcctggtcaacatgacgagaccccctctctactaaaaatacaaaaatcagctggacatggtggcacacgtagtcccagctacttgggaggctgaggcacaagaatcacttgaacctgggaggcggaggttgcaatgagccaagatcacaccactgcacttcagcctaggtgacagagagaccttgtctcc

SEQ ID NO: 234104 - DNA, 478 bp, Homo sapiens
  misc_feature (12)..(12): n is a, c, g, or t
caaatggataanctgtgatatatacatatacatacacatatagttctcttacataattttcagctttacatatgtagaatcatgctgtttgttttcttctgtacctcagtttttttcactaaaaattgtcttctgaaaaaaaaaagcggaggtatcatacttcctgatttaaaattatattacacagctatagtaaacaaatcagtatagtacttactcaaaaacagacacagtgaaacagaatggagtccagaaataaattcaaacatatacagtaaactaatttttgacagagacaccaagaggatacagtgggaaaaggttaggctcttcaataaatagtgctgggaaaattgaatttccacatatatgcaaaatttataaaatataagacctaaaactataaaattccttaaagagaacacaaaaagctcctggacattggccttggaaataattttttggatatcacaccaaa

SEQ ID NO: 234105 - DNA, 1369 bp, Homo sapiens
  misc_feature (1)..(2): n is a, c, g, or t
  misc_feature (5)..(5): n is a, c, g, or t
  misc_feature (7)..(8): n is a, c, g, or t
  misc_feature (347)..(347): n is a, c, g, or t
nntantnnggaaaaacatctgcctgaactccaggcagtaccagcaccttccttgtgtccagcgttgcatggggagtgccagacagcaaggccccacttgtgggcaggtctgtgcactgtgacatgccagcctcttcacagcccaggtcatcctcacctccaccccatgaggtgcaactagatgaaactgccacttcccagataaggaagatgcacagggagctaagaggcccggctgaaggtcccacagtgagaaaagtcagtagcccagctgtgggcctgagccccaggtgctccagtgggcaggatggagtcctggtcttcagcaaggctcagcttggtgggggngacacatccccgaccccagacagactttgagttctggcagctgggcactgggggagctttctgggaacaagcgtgaaccacacatggtccctgccctggagtcgcttacatctcccaggagagggggatacatccacagactgtgaacacatgggcctaagaggggccacccagggctgcagaactgatccatcccatacaaaatcactgaaaagacccccacagaccttgcttaaaaatagtcttcttggccaggtgcagtggctcacgcctgtgattccagcactttgagaggctgaggtgggtggatcacctgagggcgggagttcaagaccagcctggccaacatgggaaaaccccgtctctactaaaaatacaaaaaattagccgggtgtggtggcggatgcctgtaatcccagctactcgggaggctgaggcaggagaatcgcttgaacctaggaggcagagattgctttgagctgagatcacgccgctgcactccagcctgggcactagagcgagactccgtctcaaaagtctcctggcggtgtgtccgcatcagagttcaggtcgttcattgtgaatggatggtgcatcttttacatctaagtggactcctttttaagccgtatttgagacctagttggctttcccttcccaagaatgtcctggcccatggtcctggagacctctgaacctgggtgtccagctactagacacgtaaaaaccatttctaagtaccccttgtgggccaggcttatatctgtaatcccaacacttagggaggctgaggcaggaggattacttgagcccaggagtttgagaccagcttgggcaacagggtgagacccagtgtctacaaagagtaagatgattagtggaacatgctggtgtgcacctgtagtcccagctacttggaggctgaggtaggaagatcacttgagcctgggaggttgaggctgcagtgagtcttgattgtgccactgtactccagcctggacaacacagtgagatcctgtctc

SEQ ID NO: 234106 - DNA, 455 bp, Homo sapiens
ctcaaaaaaaaaaaaaaatctatcttttaaaaatacttactgaaatgtagctacgtgaattatgattttgggtatttgcttcaaaataattgagtggattgtaacagaaacaaaaattgacaactgggacctaactaaagagcctctgcatagctgaaactatcacagaaaaggagaccatcgacagaataaacagaaaacccactgaataagagaaaatatctgcaaactatgcatctgacaaaggtctgaaatccagaatctataagaagcttaacaagaaataaaataaccccattaaaaagcaagcaaaggacatgaacagatacttctcgaaaggagacataaaagtggccaacagacgtgaaaaaatgctcgacatcaacagtcatcagagaagtgcaaatcaaaaccacaacgagataccatctcacacccgtcacaatggcttttat

SEQ ID NO: 234107 - DNA, 463 bp, Homo sapiens
agctgtccttgagcctcgactctgggtgagccctctgggtcttagatttgagatgcaattttcaaacttgaagatcacggtgagcagagagatctctgagctactgccaatcctaatgtcccttgtattgagcgttgactgtgttgacaatgaaaagccagaagagcctcaaggaggaaagaggtcaatagccaaatgtttcaagaagtcaaggaagtcatgaaatgttggggcaagtcaggcaggtgcagaacaacatgtaaagaaagtgaagtatactatatattatgcaaaactgaggctaagtgctgtgtggatcccaagtatgtacctgtaaaaccaaaattaacagacacaaatacaagcctggaatcaacttctgcagtctgacacctctcttccaaccttgagtctcaacatcatgggatcctgcagttctattaaatcattcttggcaacaccc

SEQ ID NO: 234108 - DNA, 373 bp, Homo sapiens
ctgcgatagctgatagtttcactgatcatttgatcactgcataatataagttgctaatcttttagcctccaataactttccttgcctccttccacccagctcctaaggcttcatcatatattttaggctttttggtaaggcagcaccccacttctggtttctactcgtagcagcttggataagccaaattatgctgtggtaataaacaatgcaaggtctcagtggctttgaaaacacactgtgtggctgggcacggtggctcacgcctgtaattccagcactttgggaggtcaaggcgggtggatcacctgtggtcaggagaccagcctgaccaacatggtgaaaccctgcctctcctaaaaatacaaaaaaa

SEQ ID NO: 234109 - DNA, 523 bp, Homo sapiens
taccaatgtgatgagtgtggggaaggccatagaaaggaccggcgaatgctggcattgatgtgtgttattttaacatttctgaaatcctgttcttagtctgcacaccttgtccgaggctccgatgttatccaggtcaccaggtatgcccctgggctcctgccgcagctgatcgggtgctaggtgctgaggatacacgtctgggagaaagcaattggaagaaatgcaaagctcttcaaaggagacctataaagtcatctttgttttgttcattcttctcatgtttctgcattctgggcattctcctaaattggggagaaaccaaaatgcccagaagtcaaattctgcaactgtcatcaagcaaaatgtcaaatgagagaaccaaagtatgctggattctatattgttaggaagggatggttaatttgattgactcttgggagctatttttctagcattaagtaattctagggaacccttctgtgatcatctctgagtaaataaagaagtgaaattgcaattcaaa

SEQ ID NO: 234110 - DNA, 475 bp, Homo sapiens
tgggcagaaatgcaccagggaaaggacataacgaaactggttttatcagaacagcctgcctgagagagatcaagcagggcacaggtcaccaggtatgcccctgggctcctgccgcagctgatcgggtgctaggtgctgaggatacacgtctgggagaaagcaattggaagaaatgcaaagctcttcaaaggagacctataaagtcatctttgttttgttcattcttctcatgtttctgcattctgggcattctcctaaattggggagaaaccaaaatgcccagaagtcaaattctgcaactgtcatcaagcaaaatgtcaaatgagagaaccaaagtatgctggattctatattgttaggaagggatggttaatttgattgactcttgggagctatttttctagcattaagtaattctagggaacccttctgtgatcatctctgagtaaataaagaagtgaaattgcaattcaaa

SEQ ID NO: 234111 - DNA, 507 bp, Homo sapiens
tgggcagaaatgcaccagggaaaggacataacgaaactggttttatcagaacagcctgcctgagagagatcaagcagggcacaggtcaccaggtatgcccctgggctcctgccgcagctgatcgggtgctaggtgctgaggatacacgtctgggagaaagcaattggaagaaatgcaaagctcttcaaaggagacctataaagtcatctttgttttgttcattcttctcatgtttctgcattctgggcattctcctaaattggggagaaaccaaaatgcccagaagtcaaattctgcaactgtcatcaagcaaaatgtcaaatgagagaaccaaagtatgctggattctatattgttaggaagggatggttaatttgattgactcttgggagctatttttctagcattaagtaattctagggaacccttctgtgatcatctctgagtaaataaagagagtttcgcccgaagttttttttttttataaatatgcgttaacaactagct

SEQ ID NO: 234112 - DNA, 2862 bp, Homo sapiens
  misc_feature (1431)..(1431): n is a, c, g, or t
cagttgacacctgggtcaggtgctctattaaagagtcattaaaatcatgtggccagggaacaaatacagtcttcgaatgtgacgattcaagcttcctcattgctgaacatgtttaggcaggtacaggcatccttaggtgtccacgtatttgggacatgtaagtggagaggcatgaacctgattcatttcctgatccagtgatgctcccagcccacccccaaacagacacagcgtagcccgggccagctcttaaggagttcaggagtgagaagaggccctcagagatctgacagaacaagtcttacgtagtggcctgtaagcctccccagaaaaaggactctcagcaattccacctggttcctgtacacttggacagagtcctttaggtttccagactggcttgctctttggctgaccttcaattccctctccaggactccgcaccactcccctacacccagagcattctcttcccctcatctcttggggctgttcctggttcagcctctgctgggaggctgaagctgacactctggtgagctgagctctagagggatggcttttcatctttttgttgctgttttcccagatgcttatccccaagaaacagcaagctcaggtctgtgggttccctggtctatgccattgcacatgtctcccctgccccctggcattagggcagcatgacaaggagaggaaataaatggaaagggggcatatgggatttgtggacacagctgtttctgttcctgaactagaagtcttccccagctctgacgtggcagtgaggtgacctgaaggaaagaaaaatataaataaataccacttcatatttgtatagaatcctctaatcccttgtgacatagacttgacagggattgtatgccttctttatggatgaggaaattaaggttttagaaagcttaatgaattaaagagcttgtctaattagttagtagcagaacctggacttgaacctaggtctccttgctctaaatacagtgtaccttctactctaccagttgcgcaagaaagaagtcactgttacagaggcaagcggtgaactaggtaagagttcactcatgaagaaacgagtgctctgaagagccagttaccctgtgttggctgcaataaaggtcattacctctctagccaagagattgtttatgaggtgctctggcattttattccttctctctcttcctctctaactgcccctcccgtttctctagaccactgctcttccaacctaggccctggacctggctctggccagatccccttggcctgaagacataaggtaaagggagtgtctgagcttcatcccccagatccaggatcacatttcctttgaccttaagggacttccgtggccctgagcctgcttgtcacaaacaggctggtgggagctgccagagcttccttcctccngataatgatctcccctgcctcattgctaccctggctctccactctggcagtctgcccaggcctgaggggttgagatgcgaaaatgccatttccctgtccccctgggctacagataccatttctctcgttctggggactggagctggagaaggtatggcttggtattggccagtcctgatggtctctccaacattgcttgaccagcaccatccccttctttcttcctttatctcagtcccaaacaagctgcattgtgtcccatgcctgttctatttcaaacccaaattcattataagacattcccaaccctgctgaggattccactctacctatccctccccatcaactcctgtgcttttttactactgaccagagtcagagtaagctttggagccagacagaatcaggtgtaaatcctgactcccgtctacatgacctcgaacaattggcttgtctgtttctctacagcaaaatgtgaggaatcctacctgccaaataggattccaggtaaagatgtggaaatgctatctatgaaacgcttgtcagccccaagtactgacaggtgttagatcataactagtagtagcaatatccatctttggaaaacacgcagaccaaggcaaatacccccactaaggtctcccgagagacttccttctgccagagtgatgatcatgagtgggttagaggacaagcccgcaggcagagtcctgggagggcagccaggttgtctgagatgatgaggagagaaagtaaggaaaggatgattaaaggaaaggagagcagatcattaaacagttctaacagaatgagggccaataagtggatgagttggtcacaacagccaaacgactgagtgtaaaaacaactgttacctgaaaacagaacattgccatcatcgaatggacttctgggattcttgaataaatctgaagtttatccaaaatctgaatttgttttgaactcttgtggtcagtatactacatttaccatcctaaagagatgattttcacttgtggtgcacagaaaagcaagatacttggggcagccgatttttctcttcattttattcttttttcacaactctatcttctttattgatgatctttcttatggataatatggttttagagacattctcctcacaaaatttaaagtggctaaaattatgccttcaatgcatcctcccaaaataagaagaatttccaactaaaactttttcttgaaacttgacctaatatagcattaaaagttgacctaaatagcattaaataactagaaagttctgaagtaacctgtggtgatacaggtcagaatagttgtagccttggggaagtataactgtgaaggggcatgggggagccttctgaggacctggaaatattctattcttggtctggatatgtttcctatgtgaaagctcattgaacg

SEQ ID NO: 234113 - DNA, 757 bp, Homo sapiens
atggcaccggccagagcaggattctgcccccttctgctgcttctgctgctggggctgtgggtggcagagatcccagtcagtgccaagcccaagggcatgacctcatcacagtggtttaaaattcagcacatgcagcccagccctcaagcatgcaactcagccatgaaaaacattaacaagcacacaaaacggtgcaaagacctcaacaccttcctgcacgagcctttctccagtgtggccgccacctgccagacccccaaaatagcctgcaagaatggcgataaaaactgccaccagagccacgggcccgtgtccctgaccatgtgtaagctcacctcagggaagtatccgaactgcaggtacaaagagaagcgacagaacaagtcttacgtagtggcctgtaagcctccccagaaaaaggactctcagcaattccacctggttcctgtacacttggacagagtcctttaggtttccagactggcttgctctttggctgaccttcaattccctctccaggactccgcaccactcccctacacccagagcattctcttcccctcatctcttggggctgttcctggttcagcctctgctgggaggctgaagctgacactctgttgcgcaagaaagaagtcactgttacagaggcaagcggtgaactaggtaagagttcactcatgaagaaacgagtgctctgaagagccagttaccctgtgttggctgcaataaaggtcattacctctctagccaagag

SEQ ID NO: 234114 - DNA, 1159 bp, Homo sapiens
cagttgacacctgggtcaggtgctctattaaagagtcattaaaatcatgtggccagggaacaaatacagtcttcgaatgtgacgattcaagcttcctcattgctgaacatgtttaggcaggtacaggcatccttaggtgtccacgtatttgggacatgtaagtggagaggcatgaacctgattcatttcctgatccagtgatgctcccagcccacccccaaacagacacagcgtagcccgggccagctcttaaggagttcaggagtgagaagaggccctcagagatctgacagaacaagtcttacgtagtggcctgtaagcctccccagaaaaaggactctcagcaattccacctggttcctgtacacttggacagagtcctttaggtttccagactggcttgctctttggctgaccttcaattccctctccaggactccgcaccactcccctacacccagagcattctcttcccctcatctcttggggctgttcctggttcagcctctgctgggaggctgaagctgacactctggtgagctgagctctagagggatggcttttcatctttttgttgctgttttcccagatgcttatccccaagaaacagcaagctcaggtctgtgggttccctggtctatgccattgcacatgtctcccctgccccctggcattagggcagcatgacaaggagaggaaataaatggaaagggggcatatgggatttgtggacacagctgtttctgttcctgaactagaagtcttccccagctctgacgtggcagtgaggtgacctgaaggaaagaaaaatataaataaataccacttcatatttgtatagaatcctctaatcccttgtgacatagacttgacagggattgtatgccttctttatggatgaggaaattaaggttttagaaagcttaatgaattaaagagcttgtctaattagttagtagcagaacctggacttgaacctaggtctccttgctctaaatacagtgtaccttctactctaccagttgcgcaagaaagaagtcactgttacagaggcaagcggtgaactaggtaagagttcactcatgaagaaacgagtgctctgaagagccagttaccctgtgttggctgcaataaaggtcattacctctctagccaagag

SEQ ID NO: 234115 - DNA, 472 bp, Homo sapiens
caaatagaagagaaacagaagatagaaaaccggttacatttcagatgaaaaaagggcgaagacctatctcaccgtgaaaagctgaccgaggcacaccctgtagggtggtaaacggttgcctaccccagaaagacctcagaaggtcgtatgtttatttaacaaacattacgtagcactcatgggccaggtgcttcacagacatgacctcattcgatcctcagaacccccccgagagaggtaccactgctgtctccagctcgcagtcggtgggacacagaaagatgcccacactctactgctgactagcgggaaaactaggacttaaaaaatatgagcactggctagttaaggagacaggggggtcccagatggggaacagggctcctctctatgcctctatattgcttatgacaacacatttatcatttaatgggctgggtgtgggggctcacgcccgaaatcccagcacttt

SEQ ID NO: 234116 - DNA, 180 bp, Homo sapiens
caagaaggaaaaggctgtggctgcagctgctgcagctgctgtgacccctgcagccattgcagctgccacaaccacattagcacaggaagagccagtggcagcgccagagccgaagaaggaggtggaaagaaaaagaagaaaaagaaggacaagaaacacaaaaaggataagaagcacaag

SEQ ID NO: 234117 - DNA, 539 bp, Homo sapiens
  misc_feature (61)..(61): n is a, c, g, or t
atctcttcaaatattttacagagtttgactctttgtagacaaggtaaaaaattggtatctntgagtcttcaattctaccttgaatgcactaagccacgttaaaccataccactaagctttaaaaaaaaaaaatccttcaagcccttttctctcttctaaatatttcttttaatttaagagggaaatggtccctttcccagatattagttatagtgctttaaaatgaaaagaaacttatgagccaccgcgcctggctaaaccaatgtatatcttaacatgtatttgattgatgtctcatatcacccttaaatgtataaaactatgctgtgcctcgaccaccttggccacatgttctctgagagctctctcaccatgggccatggtcactcatatttggctcagaataaatctcttcaaatattttacagagtttgactctttgtagacaaggtaaaaaattggtatctttgagtcttcaattctaccttgaatgcactaagccacgttaaaccataccactaagctttaaaaaaaaaaaa

SEQ ID NO: 234118 - DNA, 660 bp, Homo sapiens
  misc_feature (26)..(26): n is a, c, g, or t
  misc_feature (28)..(28): n is a, c, g, or t
  misc_feature (45)..(45): n is a, c, g, or t
  misc_feature (48)..(48): n is a, c, g, or t
  misc_feature (54)..(54): n is a, c, g, or t
  misc_feature (62)..(62): n is a, c, g, or t
cttcagggtaatatctcacaggtagnanatggggagaaatggtantgnaggtancagcttgnacgtgggagatgttgggggagaccaggtacgtgtactaggttggtttctggcagcattaggagaaatctcagactagcggggcatgttgcccagagcatgtgcttctaagaagttcctcatgaatgaggtggggaggcttttattcctctcgccacaacactgagggataacaactcttttcagaaaatgagattttaaaaatctaagcctagctttttaggcaaactgtataggcaagatcgtctttaaacccttttgtggaatttttttttttttttgaattgcttccccaaatctgatgttgctcatagtgtcaccaacccagggccacattcatatgaaatatttgcctggccgctcaggctgtgccatcttgagtgatgtgttcctctctccccacaccctggttctgcttaacttccaggttccagtttaggtcttgctttttccagaaacttttcatgatcccttctgtcctctttgctgtctgtcatgtctgaaattcttcagcttttatagtctacagcaattaattattaatatatcatgtcttttaaatatttacttgttgattggtgacgtaaagctttatgggtt

SEQ ID NO: 234119 - DNA, 364 bp, Homo sapiens
tgtatttttagtagacacagggtttctccatgttagtcaggctggtctcgaactcgcgacctcaggtgatctgcccaccctggcctcccaaagtgctgggattataggcgtgagccaccgtgcccggcctcatgtgttgtttttttttttttttttttgaattgcttccccaaatctgatgttgctcatagtgtcaccaacccagggccacattcatatgaaatatttgcctggccgctcaggctgtgccatcttgagtgatgtgttcctctctccccacaccctggttctgcttaacttccaggttccagtttaggtcttgctttttccagaaacttttcatgatcccttctgtcctctttgc

SEQ ID NO: 234120 - DNA, 387 bp, Homo sapiens
tataaaaactgattttcccccaaattagaaatatgtaactagaaatgattcaaagctgatcctcctaggtaccaaaacacaatatcctgaaaaataagcttacaccttgaaatatcatacataataagaccacttaaaacacacatttatataaactataattattattttacatattatataatattatataaatacatattactatatatgtaattattattgaattttcacaatttagaaaaatgtaccactagactggatagagagggactaattgaaccatggtaactggtatgaaaataatgatgatacaatttttagagatattaccttttctttttttcttaggaagcatggtcatgcacggtgcttattttgaaagga

SEQ ID NO: 234121 - DNA, 350 bp, Homo sapiens
gcaaacatttatattaactgttaagactgaactatatacagctacactggcaaggctaaataaaaggagggagggagagagggagaggagaaaatagcctcagaattctttccagaagcagctctttgtccctgtttgggactgaatctcagtgatcctccctctgggacctggagattggagaagggggcggagggcaggtacagcctccaagcacctgggctctgcatctgagcctctggatggagagcattcatctctgattgctgtgtgatttgattgtctattatacacatgtcctgtctttgctaaaaatcatcttcctcacagaggaaaactgtcaaaattgt

SEQ ID NO: 234122 - DNA, 225 bp, Homo sapiens
gataacagtatatttataaaatattgatgcattatttagctccagctcattttagtttttcatctcccagtacacaaatcattcccaacttgtctctccacatctgagttcctagttaatttcttccattgccttgtatttttccactgccttctctgtggtttcttctcatgcctaccctctttacctctgatttgttttcagtgttgattctggtccttctaa

SEQ ID NO: 234123 - DNA, 1780 bp, Homo sapiens
aattatgtttattgcagccaaccatgttctactggtacagatagtcccactggcacagattatctctattgtatgggtgaaggcaattgaggtttgacaagttgactcagcaaatgagtggcagtatctgggctttttcctcctgtctgacccagagtaattttttaactttccctggagtcctgataaaaaacgcagattcctctacttcactcccaaagattccatttaggaactgaggtggagtcccaggaatctccattctaagcaagcaacacagatcgttctgatgtgagggcttcttgaaccccatttgaagactcatggtcccatgtcatccaacccctcaatcaagttcatttctttccaaagcctattctttctcccaccatcttgggctgacatcaccatagcatccacacatccactcctatccctcatcccagacacaggtgtgcctcaatataaaagcagaaggtcctggttctctgggatctgcggttcaaaagtacgatcactcaggaagatcggagggtgggggcactgtctcctcttccctcctcttgggaagtatttgtcaaaatggtcatcctgggtggtcacagattgacacaatcagctttacttattcaaccaaccagcccactcattacttgggtgtcaactccctggaaaacagtgaagtgaaatgttcatgagtctttgtttgtgggaaaggggaggggaggaatgggggaaaattgtgcacacgttcatttttatttcaaaagaaacccacatggtttgttgtcattcagctctttggctttgcctgagagacacagaatccaaatgtaatattgtagaaagctgtgaaaccaaagttttgaatttttctcaagaatttcatttttaataataaaaaatcaccaagcccatgtgtcccataaaaataaatgaacgttttcactcatgaaccaataaagcagatgaaagttggaagccacataatactttctgtgtagctcatccaggccatgcaaggccttggagaagaattattttatgttttgcagatgggggaaactgagggagcaccaggtccatgtgcctgggaaagtaacctgccagctgctctaatttggaagagcagctctttggagggttggagaaaagcccggaccctgtagcatggcatgttccagccaagccaggatgtccagctgcatttctggaggggaccttcttgcccctgaggacctgtggttcttcagagggtcatgttgcttcatgccttgtccctgctgccctttcttatggaaatattctcctgctgttttccagatagcacatacccacttgtccctcactcatcacgagaagctgtgggtcctcccacgtggctgcattctctggccctgccacagcactttaacacccactgacatttacggccaccccaccatccccccaccaaacacacacagagtctgttgaaggatcctgcttaatttatcttaggttcccaggaccggtcacatggtcaggcacataatacatgctcattaagtgcttgttgaaaggataggtgaataaacccatgcaggcatggggtaatgtaagaaaaaagatgacaccttcaacctcttgttgttctctaaaagaagctggagggaggaagcccattcaagtttctggccagccttttcccaggggctgtgtctcctcacttggtttcaggaatgtaaacactgaaagtatagttcagattcctttcactggtaaataacttcttccactc

SEQ ID NO: 234124 - DNA, 582 bp, Homo sapiens
ttgtaaaaaactttgtgtataaaatatatcacacactaaaattaaaacttaaaatcacatggaaaacatattttcaactaacttaagaaacagtaacttaggattagtacacctaatgtaaaaaaaattccttcaaattagtaagaaaaacacagacaccctaatgagaaaataagctaaggatacaaataacacagacaccctaatgaaaaaataagttaaggacacaaatagacaattgacaaaagatagagtaaaatttgccaggaaacatatatattctacttcactaatagctaaataaaagttactatttttatctatcaagttggcaaatttaacgaaatggtaatattgaatggttgtgagtgtagtaacacaggctccttaatacattagtggtgggtatttatgagattgaaatgtataagatttataggggagggggctggacatttttaaatcaaggtcttcaacaacattcacacaatttaacccagtgatcccactccttggactctagctaaagaaatatagaacaagatttatgtataagaaaatcaacacagtgttaattatttt

SEQ ID NO: 234125 - DNA, 1002 bp, Homo sapiens
taaatgcatctgcattactggactggcagagaaatattactgtcatcaacttcctatagatacttggaaataaccttattgtatggtactagaggctgtgttaatgtttgttaaaaaggattataccagtctagaatcaaagcatatgtgttatctcattgatctgttatacttatttgcagtaacactgttctgaagctgcgtccaattagaggttgtccttcattgatagagggctagtatttgtagtcaaatcgctaaactttcaaaattattctaatagaatctattgtggatttttaaagatcaaactacctttttgcttccttatacagtatgtatttaaccaagtatgtatccactagggtgatagggggtgggacaggcaaggacactgaaatttatatcagatagccttcctaccagttaactactgtggtataaagtttggaggaagaatggataaaacacatgtgaacataagttttttttaaaccactaaaatgactttccccttaaattatgagatgtacttttatagtaataatagtcttgattacatttttattttttaaaaataatgtatattttatagttcaaagctgtttaaatttcctattcttggtggctgttttctttaaattcagtgaattcctatatttaaaaggatagatgttttatttatgtcagatttatgaatgtggcccagcaggatggctcaatgcctgtaaatcctagcactttaggaggctggatcacttgagctcaggagttggagaccagcctggataacatagccagaccttgtccctactaaaaattttaaaaattagccaggtatgatggcacatacccatattcctcccaaagtgctaggattataggcatgagccactgctcccgaccctactaatcaatttaataaatactgtgccagttaatttgaggacttacataaaaatggacaagctcctaggaaaagataacttaccaagatgatgt

SEQ ID NO: 234126 - DNA, 714 bp, Homo sapiens
ctctctttctaattttaccagctgttctcagtaatacctgctttgggtaattacttgaactttttgtcatctcagttggtaggatccttttcagcaagtgatacatgtttgttttcctaacactaatctttgcatttagatcacttattgtcatgcaaagattgtcttttaaaaattaaccttttaagagaaacattttttctatcctgtagcagcatttttcatgtttctttgacctcgtgaatcctttagaaaagtcaattctaatcaataggctaagtttcaagtttttttaaaaaaattttcattgcacaggtaaatgagaatttttaagaatctgttaacctgctttgtagaacttaactatttcgataaatacttgattgggtgtgttggctcacacctgtaatcctaacactttgtaatcctaacactttagcaagagcatcacttcagcccaggagttcgaggctgcagtgagctgctgtggttgtgccactgccctccagcttttgtgacagagtgagagcttgtctcttaaaaaaaaaaaaaaaaaaaaaaggaaaaaatatagatgaatacttgaggaaaattaagcgttaggcatactatatatctgaaaccgattttattgacagatactgcaaatgaagtaggaaaatgcagtttgctttctgatgagagctgtcctagatatatttggcttaagagcat

SEQ ID NO: 234127 - DNA, 141 bp, Homo sapiens
gcgcagcactttcatcaccaaagcaatggattttaaaaagactgtattaattagatgcaaatggctgcaagggaaacagaaccttttagtttttgagaaccagagtttaaatctgatatattgtagggtatgatatggaaa

SEQ ID NO: 234128 - DNA, 578 bp, Homo sapiens
gtgtgttccaccaggaggcaaaggtttctgttcaaatcttcctgttcacttgatttaggtgtttgataagtgactgcttgagtagtttcctcctgtgttttgttcatctgaacaatgcattgacttgccctatgtaggaaggctggagagctgcttatgaattgtagtaagatgtcttatggcttccagggagcaaacctagggagttcccaggtactgattttttttttttttaatattaattcttgttctgttgtccaggccagagtgcagtggtatgatctctgctcactgcaacctctgcctcccggattcaagcaattctccagcttgagattacaggtgtgcatcaccatgctaggtattgattgattaattgattgattgattgattgtggtgcctccatggactagactctgcctcccactttacttgtagcctaaatgtaggtgacaggtgaatgtagggttgccagatttagcaaagagaactatggggcatccagttaaatttcaatttcagataaatagcagatattttttcgtattaagtatgctctgtattttatctggcatcc

SEQ ID NO: 234129 - DNA, 485 bp, Homo sapiens
gcccatcttcgtgcatactctctctttggtcactgctgtgcggcatggtgagcttggcacctggccttcagaatgcagccacagaagggagttcatgggctaggcattctgctaagggacacagctgtctctggctcctgcatccaattactggactctctgcttcattgctctggtggagctgccagcctgagtctccacatgttctttcaacactcccttggtggccagcccagtgtgcttttaatcattgacaagcaagaggatgccacagagaaggatgttggctgctgttcaggcatttggggactggcagggagggctgctgtccacgacggaggatgccacaagtggattcaagactgagttttttgtttttctatccatcaactcaagcatttgttattttgtttgtgttacacatagtccaattatactcttttagctatttttaaatgtacaataaatttttattgattctagtc

SEQ ID NO: 234130 - DNA, 324 bp, Homo sapiens
cttggtatctcaggggtggcagaggcagaagaaaatttttgtataagtgggcccatggagttcaaatccatgttgttcaagggtcagccatgtgaagaaccatttaaaactagctgtaaacctttttgggtaaatggttatttgtagcaagggcttgtggaattttgaagggtgcattcttatttatataatagctttattgagatagtttacatactataaatttggccttttaaactatataagtggatttttatatattcagagttgtataaccatcataactacctaattttagagtatctcaacacccccaaaagaaac

SEQ ID NO: 234131 - DNA, 507 bp, Homo sapiens
gctctgatacacattttatatttttaaatattccgtttttatctcatgtttgagctgtttttattaaaattcaagtttttattaacttctattactcaaaaaatccaaatggagaatcttcaccttgggttatattttcccccaggattgaatatttatctgtatttgtgtgctacattcttttattgctgctgttttctaattccaaaatgtttgggtagatgccacatctttgttttttccctctcttattcatgcttattaggcagacacagcttttcctagacctcagcctgtacaagtgtcacaggtgaattctcgctggctcttttccctccgtatctgagcgttgtctgcttcgccaggagctgcagttccagggcggagtactgccttctctcagctttcctatagctgaaccggaaaggagaggggctcagacaaggctgtgtgtggctctgcttgacaggtagcctctgctctcctgtggctttcctgagtgtccta

SEQ ID NO: 234132 - DNA, 452 bp, Homo sapiens
atgttcctttaagaaatgtctcacgatcaagtaagaatgggagatgctggggtgtacacattttgccttccttctcctttcccctccgttgagctgataatagcagaagagtctttatatacagttgcttagtgtgggtgaaactagataaatccatcacaggccctcccttagaatatggaattgggactaagagaccccaacctcgaaagtctcttggacctgggatcccttgggcagactggttccatcctgtaagacagggaacctgtagagaaagagtggagttgagagagaaaaggagagtgctgacaatgtctctctttcacatgtttctgtgcctggctggctgcctctacccttggagtctgagccgcattcctggatccttatggtaaattctgcttctttgcttaagctagataaagtgaatttctgttacaaccaagagt

SEQ ID NO: 234133 - DNA, 349 bp, Homo sapiens
gtttctgaatatatgctggaactgcaaagagaaatacagatgctctttaattcatgatgaggttatgtctcaataaacccacctggttaaaatatgtcagaaatgagtttaattcacctaacctactgaacatcgtagcttagcctagcctatcttaaatgtgctcacaacacttacattatcatatggttgatgaacaaaatcatctaacacaaagcctattttataataaagtgttgaatgtctcgtgtaatttatcgaatactgaaaagtggccgaatgcttgtatggatacttgatgtatggtttctactaaatgtgtatctcttttgctccatcatgtccaaaa

SEQ ID NO: 234134 - DNA, 208 bp, Homo sapiens
acaacccttggacagcattcaataacccacctcttgccaaccccatctcatcccaacctttcagagggcctggagtctgattccggagcctctcgggtggatcctcaaggtcttctgcctgcacctctgactgcagacactcggtagccagcttccttccctctgctaagtcaccgcccacccatggctgtgtctgctttcctcttca

SEQ ID NO: 234135 - DNA, 360 bp, Homo sapiens
tgccattcctcagccttggagtaagagatcacttcacctggggcatgtttgacttgctgccccagggctaccttggcactcatccgtgaaagtacctgatattctgtttcatggtttatcctacccctcacctgttagagacccctcaacttctgtcagccttttgtgtgttagggagtgtatctccagcccagttgagaaattatgttgtgaaatatatagtctcagcaccattgccactggaggtggcaattctggaaggcagtctataactcagagttttatctagtcatacttgatctcacctcttagaaaacaggatttctggagagtcgacatgatactagcaaaggtaggcct

SEQ ID NO: 234136 - DNA, 283 bp, Homo sapiens
cattgaattctaatttcataggtagatcagtgactcagagagtctagagaaaaaagactgctcttagaagcaaaaagaaaaaaaaggcatgttaattaatgttaactcttacagacatttcaaaactactcattacttatggaatcaaatagtggaaaagtcttaaaacactaagggaaggttttctgtgaaagtccttaagtttcaatactagttggctgaataaactaatcctcccattgggaacaaactagaaaagctgaaccagatatatatatatata

SEQ ID NO: 234137 - DNA, 282 bp, Homo sapiens
agaagtgacacacccagcatcaggtcctggaacacttgtctccaaaggctatgtacttagccctatttgctttaactggagtattagtgggcattacaaaaattgatgcatatgtacaaaggatggtaattttgtccagtatgtttttgttaatacttttccaacttgagttaattttaagattttctgttgtacagaattctttaaaagtttatagtaaaatctatttatcttcaatttcctattcatcttaaaattaaatgtcacctatattttcttcta

SEQ ID NO: 234138 - DNA, 496 bp, Homo sapiens
cgttagggcatgagctgctgaatgattcatgtgaacaccatgcacatgggagtgaggttttgagcagtgtgccacaggagcctaccctcaggccccaccataaaatgtagggccagtcctacattttatcaatgacttgcgtgaacacagaaaatgtggatacaaccaaaaggtaacaatccaattaaaaaatggacaaaaaacttgaataaacatttctcaaaagaagatatacaaatgatcaaaaagcatatgaaaaaatgctcaacatcgctaattgtaagagaaatgcaaatcaaaactataatgagataccaccttatattgattaggaagactgctataaaaatagtaaacaaacaaacaaacaaagtaagtcttggggaggatgcagagaaattaaaatttttgtgcattgttagtgggaatgtaaaatggtgcagctgttacgggaaatggtatgacagttcctcaaaaaataaaatgtagaaacagc

SEQ ID NO: 234139 - DNA, 451 bp, Homo sapiens
cactctcatacagagaaatacattttaaatgactaccatagtgcttggtacagagtatatgctattatgattgagaatgaggtagagtgctgaagtttaactagataaattaagtaattagtggcttaccattagagaattcattgttgcagaatgttgggaaggttgaggaaggccatgtttaattgtaaggtatgcataaccttccttacgctggctgaataaaaattccaataccttttttgatgtgccacactgttccaaggcttctctgggacttggggtgcatttcatcttgaactatgaattgcagagatttttatcgtcttctgtcacatacacagcatccttttattgtggtttttgatgcgttaaatatgtttttatggccccctatgtctattgtgcctagcatactgttggtacttaataaacgttaaataataataat

SEQ ID NO: 234140 - DNA, 343 bp, Homo sapiens
gaaatcctaaatgaaacccattctgatgggttagttcttaagggcactcccagctgggagatgtgaaggccgtcaggggctgacttcagctgttggtccaagtctacgggcgcgtcctgtggactggccgtcagccgtgtgaatgcaggcctcccgcagccgcccagttccacttagcctcagcattagtgacttcattttctttcacatttcccccttttgaccaagttcttcctccagaaagtgtcacagatcagttggtgaatgtgatgatgtcccttgttgctgggagggacttgtcccagggagtcatgtccctcgttggggacgtgacctcagtcaa

SEQ ID NO: 234141 - DNA, 627 bp, Homo sapiens
aactcctgggctcaagcagtcctcccaccttggcctcccatagtgctgggattacaggcatgagccactgtgcctagccagaaattggcttaaaatgcagatttttggaccctgtccccagcaaaaagattcggtagaaatctttattcgtagccagtttactgtgttgcaggtggtccccagtttaactttgagtaatgctgtcttcattgttaaaataatcagatttaattatatggtagatattttaggtaactagggtatttcaagctgtcccatggggctgagtagctggcagctgcttgacttggcttctagaggacttactgctcagcaaggtaaatgttattaataccttcattgctctctgtgtcccaaaggtcaatacccaaactttgagattttgtagactggaggaatctttgtctcccactccttccccaagaaagacataggttgctaatttttattttgtcgaatgaggacattaaaaataagttaaccgtgagccaggcacagtggcttaggcctttcatcccagcacattgagaggctaaagcaggaagatcacttgaggccaggagttcaagaccagcctgtgcaaaatagcaagacctcatctctact

SEQ ID NO: 234142 - DNA, 435 bp, Homo sapiens
accacaggggtcacacaccctccgttaggaccaccagcaaggcagggccaccgtcccacactgttcttgcagagacggagactggggatcaggagcctggccctactctggcctgcagccttgggggctgctggggctgtggagggcctctggggtgctggcttggactgggggagccattgaaggtccatggggaccgggactccttcagcagcgtttgttttttagctgactcaaaactgctccccttggaggccttggcccaggatggggaagcctcagccgggcaggtccctcggccttgcccacctctcatgggcctcacgctcaggaggtggcatcctgctggccacaccatggcattagccccgtgcctcacccacacttggtggcaataacaggagccacagccccaaccagagccggcggccgcgt

SEQ ID NO: 234143 - DNA, 512 bp, Homo sapiens
tatgcagtctctaatgaaaattggttcttggtggggtaggggatgaaaaactattaaatactactatggtttggaaccccccatagggccacagtacatagatagtatatctgtgttattaaaattcatggggatgaggaaagcaatctaaaatgtcccagggccgggtgcagtggctcatacctgtaatcccaacacactggaagctgaggcaggaggattgcttgaggccaggagttcaggaccagcctgagcaacacagacctcgtctctacacacacgcatgtgcacacaacagacacagtggtgcatacctgtagtgcacgcatgcacacacacgtgcgcacagtggtgtacacctgtagccccagctattcaggaggcttaggtggaggattgcttgaggccaggaggttgaggctgcagtgagccatgatcgcaccactgtactccaggagcctgggtgacagagcaagaccctggggtctcaaagaaaaacgctgtctcaaact

SEQ ID NO: 234144 - DNA, 412 bp, Homo sapiens
attttttcaactaaattgattatattaaagtttgcatgacatagatgaaataaacttgtatatttataatatgtaatttactaatttagacataaataatactttaaaagcatactataagtaataatttttagaagtattgctcttttcccactcttaaatttcatgagggagttttggtccaattcccccttccatgcattcttgagttcataatggtggcacctcttcaggcagctggcctgttttcactacctgtcatctggaatcgagtttaagtagcttggggtgcaggactttgtgaaactgtgtatgatggaaatcttttccccaactacaaaaaaagaaaaaaaaacccacttactacttatctccagtaaccacttaactgttacttttttgagtgatcttt

SEQ ID NO: 234145 - DNA, 579 bp, Homo sapiens
tgactttgagatgatgatctgaggctctgccagtggatttagattgacatacaaatgagatgcaaatgtatgtaaaggagaagggagatttgcaggtcaaagcagatgtggaatcaagtatacccctttagtaagtgctttctctgaaggtgcctgcaatgatatttaggcattggcctgtgagctatgggtgtgtttgcagatgacatgaggatgtgtttggaggtgatgtgggaggttgtagagaagttgcaggtgctttcgcagatgagcctcaggtgtgctgctgagatggggatctctgcaaatatgctggtgatgcatacagatgcgatttcagatcaacgctgtccagtatggtagccaccggacacacatggttatttagtgcttgaaacatggggactgcaaattgagatgtgctgtgagtgtaaaatacacaccaaatattaaaggcttagtatgatgaaaagaacataagacatctcaataatttttagattacttattgaaataataatattttgagcatatcagtattagtaaaaatattactaaaattattttcacctgtttcta

SEQ ID NO: 234146 - DNA, 438 bp, Homo sapiens
agcttgttactcacagctgggcctgggtgttctcctattgaacaaccaaccaccgagcatccacatgatgaggcccctctgttacatgaaagatggagccaaaaatgagaccaccctgccaccatacctgaacacagacccaacgtgaacactgtccaactccccacccctgaaatgcccagacaccccgccctggctgagccaagcctggcttcattaagccctccccagcccacacctgggcctttctaacccctctacacattctcccttgctgcatcaagtgataacccaatctgttcagccttaggggagctctgatggcctgtgcagtgcattgacagagtaaaataactaagcagaatatgtgacttccaaggtagagaaaaaagtattccaaaatgcaggttagacacctaaaaaatgatgaatccaata

SEQ ID NO: 234147 - DNA, 330 bp, Homo sapiens
tgtgtggacgaactagactggaagatgctgaaggacagaccttccagacaatgagctcttcctcaagatccactggcatattgtgctgtgcacactggaggtgcaggagtatccctactgtatactatgttaactgcgagacccaaccttctgctcagaggatgacaacagatggatgcaagttgtcctatgattgccattttggaattgccatttgaagacagcggtgacctgtgggtctggaggaatcactgcagggtgggatatacatatcaaattctgcaagctgggtcagttgtgggggtatctacattgggacacttcacaaag

SEQ ID NO: 234148 - DNA, 410 bp, Homo sapiens
ttctttattctgatttccatttgcttggtagattttcttccatcccttcattttgaacctatggatgtcactgcctgtgagatgggtctcttgaaaagtataccatcgggtcttgttttttatccagcttgccactctgtgccttttacatggggcattggcatggtttggctgtgtccccatccaaatctcatcttgaattgtagttcctataatccccacatgtcatgggagggaccaggtggagataattgaatcatgggtatgatttcctgcattctattcttgtgatagagacagtgatatccagactgtgggaaaccaagtcaaatgatatatgacctcaaatagataaaatgtaagaaaaagaaaaagatggaagggaaaatctgtagattaaaagagactta

SEQ ID NO: 234149 - DNA, 141 bp, Homo sapiens
tgttaaaagacaaactacagaatgttcctgttgatgtaggaatgaattctcataatatgagaagaaaggaataatagattttaaatcagcccaacttggttgtactgcctgcttagtactataaattcagccatggactgt

SEQ ID NO: 234150 - DNA, 681 bp, Homo sapiens
ctgaggtcaggagttcaagaccagcctgtccaacatggcgaaaccccatctctaataaaaaaaaaaaacacaaaatattagccgggcctggtggcgggcccccaggaggcagaggttgcagtgagccaagatctcgccactgcactccagcctgggcgacaagagcgaaactctgattcagaaaaaccaaaaaacaaacaaaaaaaaccccattaattgccagcaccctgaatggagccttgcctgtagatcttctactgtgttcctagatttattagccttttctttaggattatttaagattttcattaaatcattcagaaatgatttagatttctgaaagattaagatttctgaaaaatgttagattggttagactggaagattagtggaattaagccatcatctgtagagtgacattgcataacaggcattgtcttagtgacctttatgtaatttaactacttcatggagcacagttttatagctggtgtggactatgacctctgttaatagaggacgactacaaaaagcatttccaggctaatctgatgatgatgccggaatgtaaattgggtgagctgagattttagtcctttgcgacctaaatagtttgccacaaagcattttagatattaacaacagtttttaaatattaacaacagtagatgctaacagtca

SEQ ID NO: 234151 - DNA, 671 bp, Homo sapiens
ctgaggtcaggagttcaagaccagcctgtccaacatggcgaaaccccatctctaataaaaaaaaaaaacacaaaatattagccgggcctggtggcgggcccctgtaatcccagctactcaggaggctgaggcaggagaatcgcttgaacccaggaggcagaggttgcagtgagccaagatctcgccactgcactccagcctgggcgacaagagcgaaactctgattcagaaaaaccaaaaaacaaacatgtgttcctagatttattagccttttctttaggattatttaagattttcattaaatcattcagaaatgatttagatttctgaaagattaagatttctgaaaaatgttagattggttagactggaagattagtggaattaagccatcatctgtagagtgacattgcataacaggcattgtcttagtgacctttatgtaatttaactacttcatggagcacagttttatagctggtgtggactatgacctctgttaatagaggacgactacaaaaagcatttccaggctaatctgatgatgatgccggaatgtaaattgggtgagctgagattttagtcctttgcgacctaaatagtttgccacaaagcattttagatattaacaacagtttttaaatattaacaacagtagatgctaacagtca

SEQ ID NO: 234152 - DNA, 636 bp, Homo sapiens
agatacagccttaataccattatcacacttaaaaatttaccaataattccttcaattatttaccaataattccttcactggattgtctaataatccagtgaatgttgtcactcacaattattccataaatttttttttataggtgacttgttctaatcatataaagcccacactttgtctcttagatctcttttgaactggaagctcctcctccctctattttttcttgccatatattcagtgaagaaacaggttcatttgccctgtagttgccccacagtccagatttggctgactgtggcctcatggtgtccttccacttgtttctctgtccctggtatttcctgtaaactggtagttacatcaagaggcttgatcaggtcaagctcgatctttttggcaggaacactgcatagatggggctgtgtgtttctctcacgtcatctcaggaggcatctgtctggttgtgtctaagttattatgattgctgggtgtgttcaggcatcaccagcctgatccagtcctgagaaagtcccctgctggcttagctgccactgctgaccattgcacaggtgcatcattccatgaggggttgcaggtcagtgataatattaatttttatcattcctctgcatt

SEQ ID NO: 234153 - DNA, 450 bp, Homo sapiens
atatattatttgcttcttttctctcactgctttcaggatcctgtgtttgtctttgatctttgagagtttcattataatatgtcttagggtgttattatttgggtttaatctggttagcgatctttgacctctttatacctgcatacttatatctttcctcaggtttggaaatttttcttttgtttctttaaaaaagctttctacccctttgtctttctcagttccctttttaactccaataattcaaagatttgctcttttgatgttgtcccaaagatcccataagctttgtttattcctttttattccttttttcctcctctcactgtgtagtctatttatctatctatctgtctgtctatctatctatctatctatcaaactaattaactaactaacatggggtctttgttacccagaggtggagtgcagtggcacaatcatagctca

SEQ ID NO: 234154 - DNA, 330 bp, Homo sapiens
gctgctgcctttggacatcagaactccaggttctctcacgtagaaccgaggcacccatcttctgctgcctttggacatcagaactccagattctcaggcctttgtactctaggatgtgtagcagcaacccctgccccaggttttcaggcctttggcctcagacttcaagctacacctctggcttctctggttctgaggcttttggacttggactgagccatgctgcaggcatccctgggtctccagcttgcatatggcctgttgtaggacttctcagcctccataatcatgtgagccaattcccttaataaatagcctctcacttatcta

SEQ ID NO: 234155 - DNA, 440 bp, Homo sapiens
cgagggagcgtggctcccctcgctgtggttgttggcagcaacggagagatagcagcgcggctggaacgcattcatcaacaacttttgaaacatatacgaaaattatctaaaaatcctcaaaataccaattcagaaggaacatctacaggaacacctgacgaggctgcacccttggcaggaagaacacctgacacggctgaaagcttggtggaaaaaacacctgatgaggctgcacccttagtggagggaacatctgacaaaattcaatgtctggggaaagcaacatctggaaagtttgaacagtcagcagaagaatatgttaggccatgtgtctctataacagctattgaactctgcattgtacagtgaaagcagtcatagataatgtgtgagcaaataggcatgattgcactccaataaaactttgtataaaaaaccat

SEQ ID NO: 234156 - DNA, 216 bp, Homo sapiens
cctcatcagtcacacaagacagaaagccctactttcctcttgaggctggcaacctatccacctagttgctcaagccagaaacctgagagtcgtcctcgtcaccactcactttctcagccccataaccaacccaccgaaataactcttttatctgccttctcatcacctgcactaccagcacctatgtccaagccacaggcctctcacctttcactc

SEQ ID NO: 234157 - DNA, 232 bp, Homo sapiens
ttcctctgaactcaagagaaactagcaatattctgatagttttattggcatttccagtaagaatatttgaaagcctctgtctgaaattacaaagcttaatttttttgttttacaagattcctcaacctctactttttactctatactagtttcaaattggtttataaatagaacttaatgtttaatggctataattttgttattggcaaatattaaagtgttgttagctcta

SEQ ID NO: 234158 - DNA, 325 bp, Homo sapiens
tagtgtattatataataaaagtttagaatagtgagaagaggggaggtttttcttgttgaaattgacttgttccattttgtttcagaatgtggatttgatcttggaaagtatggtactatcttttgaatgataaaagtacattgaatttttctgttccaaattttgtaaagaataattctttagcagaacattctttgttgtaatgattttttttgtcaaattctaattgtaaagtaattggattactttaataaattactagttagtaaatgtaataaatttactttaaataaatttaataaatttatccttagttgcttatgca

SEQ ID NO: 234159 - DNA, 470 bp, Homo sapiens
tactaatctggcttgatttaggattgattttagactaccctaaaggatggatgggaccatgccttctttagccacccttcctggtatggttgttgtgttttgtttttgctttttccccaggattcaggcttttggtgaatatttatagtcagtaaacttaagactgtactctgggaaattcttagcttgtaacttctctgctatacttgagtacagccctattataccctagtaaatcacacaggacataggtttggcattctttagtgaaagctgagggacttgaggagactgtggcctaaaggaaagctgggggacccaatagagacctgaatagaaacccttttgggctccaaagcacatacacttttccatcataccgtgttgccccccaggccccactccccacacctgaaactagtgactgggacctgtaaaactctacaaacattttctcaaaaagaaaaaaa

SEQ ID NO: 234160 - DNA, 478 bp, Homo sapiens
gatgcagtatgtacccttatatctaaaagagaggttagcacaatagtgcacaccaagacatttcaagaggtacttgtgcaaggagaattttaatccattttcatttcctccacttcctcgatactctttccaaaatttgatcttcccatttatatacctgtctcagactggttctcttttcccacctgcccctttcacatatgtccttttttaaaagaaaggcataattttcacccatctttctcagtttcaccattgtcaaggtgggaaaagcaaaacaaacaaacaaaaaacccttccagtctatacaggtcatttgaaaatgtgttgagaaagagactccaataatggctaacccttttttgcaactcactggttttcagttatttgctttcaataaaattaaacaaaagcctaggcaggctgtcagccattaaatcattaaaatttatttcatttttgacgtattactaaaaaa

SEQ ID NO: 234161 - DNA, 483 bp, Homo sapiens
ctgcccgcaaactgtgagatggacaggtcatcttacctttctgcagatcattttgggtttctgtgaaataggcataggagcacctttcaccagagtcctggtgaagctcagatggtggaatgtacttgggagcactttgttcagtggttatcattctaatgacgggaggaattttcacttgttcaaaggctgtctttaaggcagccacaataaaataccttttaatgaaaccctaaaatattgcagaattgagccctttcacaggatgctgaagacagagaagccccacatggaggggagaatgaagttgcagtcatggtgcctcttacacagagaggttaagcaacttgcccaagatcacacagctgacattaattttcagttcaggctttatctcctggattaatcttaaggtctggttttttgtttttgttctttgaataataacctgttttaaaagtcaggattaaaaagaaagaaaca

SEQ ID NO: 234162 - DNA, 454 bp, Homo sapiens
tctcgggatggtgccaggcctccgctggggcagcaacagtccctaaagcttcccaggtgattcccagcaatgggcagccggggctgacaactgtgaccctaggggtcctagagaccatcagaccccacatctggggtctcaaactgtgatgccggaccgtttctccaactggtcccgtatcgcaggtgcctggggggtccttcgaaaattcagcttgccgggctgcctgcccaaaggggttctgtaggtctcgggtgggcccgaacatgtgtatctagttcccaggagacgttggcgcagctggtccagaacctgactttgagaaccgctgtcctgccgctttctgcagtctagcgttcaaaggccagggaaaacttaggcgcttcgagtgctcgggaaacaccatcgccggcacgatgtaatatttatttgcttattttattttatttatgta

SEQ ID NO: 234163 - DNA, 97 bp, Homo sapiens
ctcatcagctacatctgcactttcttttttaccccattcctgttgaatggacagctgcactttaaataacattcaaacccttttgtcaattttctgc

SEQ ID NO: 234164 - DNA, 398 bp, Homo sapiens
gttcctagaaaaacatgcacactcacttgcttgcattcggataagcttctttgagtaacagggaagaggccactaggattacaaggcagttagtgcccattggagtgtgactggcattgtgcaccctgtgaatcatagtggtggtatggggaaaggggtaaaaaagcatcaatctatggagtatgcgaaccagatggcatctgtcttctttggtctcatggctacttcctgggaggaaaaagtagtaatcagctccctccccccagctaaatgtgcatggtattagcaaattctaacccaagatgttaaaactatctgagaagaggcatgattctgcttcttgtctgtaccctcctaaagtcaaggtgcagcaaggagagagacatttgcatgtggcc

SEQ ID NO: 234165 - DNA, 440 bp, Homo sapiens
ttctctttccatttttatggccaaaaattccaagcctgctggtaggaatgccagtccttatcgatatactggaaaacaactgatgtcagtaaaagtcttcaaatatttttagttttcatcagcaatgttcacttctaagaatttaaaagaagaaaatgataaaaatattgtcacaaacattcatgaacaaaggtgatcatcacagccgttatttataattatgaacacttgcaggaaagcaaaattacagcagtaagggtttggaaatgatttagttgttgagatcataattctccctggcacatcttacactataataagtgaaattgccagttataaaaacgatacacagtcttcaattttgtaaacaccaaatatgtgcagttttgtaaaagacttaagatatgcacctaaatataaatgtttttaatcatacatgt

SEQ ID NO: 234166 - DNA, 140 bp, Homo sapiens
atgcttggactggagccccaaaggcggcacacaccccagttctgagcctgctgctcatttcctctatgtggctccatttgcagcacatttgttgcactgagaagcggctccaagtaagtttgtcttgggccaaattctaa

SEQ ID NO: 234167 - DNA, 308 bp, Homo sapiens
aggaaaaaaatagaagctccttcttacaaaagatctgttttacaaaagaagaaattgtgtgtatagccataagttatattatctatgaattccaggttaagatagcaaagaaggatttataaaatattttttaaaaagagtggaggtgtccagtggagctgaggcctcttgtgcaggacccacattaaatgggagcgatggtccgcacaccatggccagggtccccttcccatctgagggccgggctggagggcgtcagacagaagttagggaagcctctcagtgccagcgagatggggagagcatgc

SEQ ID NO: 234168 - DNA, 447 bp, Homo sapiens
tgtcaacctcttggtcaatatggttcaaactctttactcccccaaagagtaaaacatgatgtcgtctgcaaatccatgtctcatattggctgtcttcctactccaaggcctgtgttatcccaggccttgaccctctgcaatttttgctccctctgaaccctgccggaactcagccatctccctagatatctgatgtaatccttctctctactgattcccacagtatcatcagagatgatctcagtagaatgtagtggcggtggtcgtatgtagacattatttgcctataagtaaatctgttatttctaaattgaggaatgctttgtttgtgtgacttctttacttttcatatcaagtgcactcatcagcaataatgaagcaaaataatttgcatttctggttttctgttcttataattaaaaaaaaccacttttcttccacaaaata

SEQ ID NO: 234169 - DNA, 436 bp, Homo sapiens
  misc_feature (81)..(81): n is a, c, g, or t
ggttgcagtgagccaagattgtgccactgtactcagcccgagtgacagagtgagatcctgtcaaaaaacaaacaaacaaanaacttggcaggcacgatggatcctcctgtctcagcctcccaaagtgctgagattactagcataagccactgtccctggccagcgaagatttcttatgtaagacctgaaaaagcataggctatcaaagcaaaaataggcaattgggattatgtcaagctggaaagcttctccacagcaaagaaaacaatccacaaagggaatagattacccaaagaatggatgaaaatatttgcaaactatcaatctgacaagggattaataaccagagtctataaggagctcaaacaactgtataggaaaaatctagtaatctggttttaaaatgggcatgagacctgattagaaaactcaacag

SEQ ID NO: 234170 - DNA, 354 bp, Homo sapiens
aaagcaaggaaagtataaagggctttcaagtaaagatagtgggtcaaacatgtaagttcactctcaagtctaatgaaaatgatagtgaaggaatttattttaaaagacataaacccacaaggtcatagaaacgtgagtatgcaaaccatcaataaagttttggaggcaggaaagcagatggacaagaggtaatggatttagtgaaactgagaagaatgaatcctaatctggcaagggagaaatctgagaagtaatccaatttaaaccatagaaccacagaatgctcagtaactggcagtgccagaaaactctgaaagtggagtttaagctcgcactaaaaacaatgacctagtt

SEQ ID NO: 234171 - DNA, 484 bp, Homo sapiens
tgtggttcaaatcatatagtttcaaaagaagtgacttttgctgggaaattatttagacagaaacagattgctttgttgatcacctgttttatttctaaagcagccagcatatttaggctcactgtttttggtaagaagaacttatttttctgacttaagccgtgtatcagttgaaacaaagtgctgatcatttaaggttttggtccagggttttggaaattgtaacaatctcttcatcatttgatgtgcaacaggtgttgagaaaactgcatctatatttggatacatgccatttctgttaagtagcgacctctttttctccactccagtgacctaaatagttcctacaaatagagtagctatcactacaggaaatatgttaaatccaggcctccagatacactgcgaatgaattccacaaaacaaatatactgtgtattgaaatgtcgttctagataataaattgagtgtgaagaaagtaatt

SEQ ID NO: 234172 - DNA, 1772 bp, Homo sapiens
caccctaaccaccccccacttgactgtgatgcccctctagatccccccaagacatgggcttttgtctctcatagcacagagcaggaggggcctgtctcctgggagtgctttgagggtggggcctgtatgtgccctctgccctcagggccagccaggacacagcagctggcagggagagcctagagctcacctgatgcgccgctccttctcctttgccctctcggcctgctcgatcttgacctggggcacgtgctccaggttctctagcagctcatccagctggtgctcaatgatggtcagcatctgcacggtgcccaggttggcctcctgctgggtgccggtgcagtgccggtacacatccagcaccttgcagttcaggctctctagcagcttatcctgtggaggaggtggcttccagcagggtgctggcaggcagaaacccacccccatgccagtgccttcagcggtggcctgctgacctcccagggtgggggccaccgcttggcacacagtgggagctctgagaacatgggctaaaacagaacttggggaactggcttttcttggccagagcagcctatcccccgggccccctggagtcagccagatccctggttccagcccctctcccagctgcctctggtgagccaacggggcccagtcccctcctccagggaaccctgcaccctgggcaccccacagggctatgtcttctctgagactgttctgacacttagaaaacagataacagcccctccatgtgggctatatgaggagagaggagcagcaggcaggcagctcagcccagcctgggcacagccagtgcccatggattctggctgtatcgggagcgctgtcttgctcatggctgcatcccacacccttggccctgtgcctggcacacagcaggcacttgacagtaggaagccatcccatgcccggggtggccccaggctgtcaggttgggagcgggctgagcctttgtctgggtcctggcttctgctgctcagaacaccactggctttctcttctctcccaattctctcaccctctcagcctggcttgaggacacgcctcttcccccccttcaggatcaccttgccagacacaatatatgtgtttaagaagcagacacatttgttgaataaaagaatgaagcaatggatgaggcgtgggggcaaccaagctggctggcacaggcatcaatacatgtggtggctcctggagggaggcagggcaagggcagctgcagggcactcacccgggccttgtcctccatcttcccaagggctgtcagggctcctccagtgggtgcccaagggtccctccttaccctgggcctctggccaccttgatccccagcctacctgctgatcgcccttgtactcgccgaagtggaagactcgggctttgagctccagctcagctgctgtgtcctcctccttggtgatggacatcatcattgtggtgacccactgcttcagctggttgacctccctgtccctggaagaggggaaaaccggcagggcatcagtcactcagcacagccctgggcacatcgcttctctgagcctgtctgtacagtgctttgcccctaccagctgtcctgagggctgaaggatcatgggtgccaagtctctgcatgcccagggggtcagaaatgctggtagaatgtaggggaaaatgtaaaatatttaacaatcaacattaaagaaaataaacagcttcattgaggcataattcacagacaataaaattagcataaccatcat

SEQ ID NO: 234173 - DNA, 856 bp, Homo sapiens
tgtacaagagatcattgtcatcctgggtgttctttgtattcttcatactagaaatccataacacgccaaatgcccttagaaccatggacagcacccaggttttacaaatgtcttctccaggcttcagaaggaaggtggtggacattctttccatcatgacacaaaccaacaattacataccaggctttgttggtgagaaagcaaggtggcccacctggagatttatgccgaaacaaccactttacaacacaacccacggagtccttgacgttggcttggtttgtcaatcccaccacctcataccatttagaaacttatcagctatttctagataactgggtgttttagtttcctgtagataaaactgaaggctaaattgaatatatgactaagttatttactatgaggaatcttagtccaggaaaacctctcaaaatacacaaatgtctgagagatgtaatatatttaattaatcccttactccttttatttttattttttattttttcagagacaaggtcttgctttgacacccaggctggagtgcagtagtgcaatcagaggtcattacagcctccaactcctgggcttaagtgatcctcctgcctcatcctcccaagcagctggagctacaagtgtgcaccatcatgcctggcccctttattcctaaacgtttcttcatgaaggaagatacaaatttacatgagcccatgctcttcacatgggtaaggggaaaacagagagaactcacagggcacccacatattgtgctttatcatttgacctaggaacagtcttgaataggcagcttgggtttctactcccagaaaatactttgacatacattaatttattc

SEQ ID NO: 234174 - DNA, 1015 bp, Homo sapiens
  misc_feature (2)..(4): n is a, c, g, or t
  misc_feature (6)..(6): n is a, c, g, or t
  misc_feature (12)..(12): n is a, c, g, or t
  misc_feature (15)..(15): n is a, c, g, or t
  misc_feature (17)..(18): n is a, c, g, or t
  misc_feature (423)..(423): n is a, c, g, or t
annngnggcccnccngnnggatggtcaccggacccaaagtaccagatctgtctgtgcttcggtgaggaggacccgggccccacacagcaccccaaggagcagctcatcatggcggacgtgcaggtgcagcttcggcctgggagctcgtcctgcactctaagtgcctcaaccgagcgcccagatgggtcctcaacccctggcaaccccgatggcatcactcaccttcaatgcagctgcctccatcctaagcgagccgcttcctcttcttgtacccgctgaaggcagcccccaacaggggggctccctactcccacccaaccctgcccacactaagcccatagacttggggcctcccccggcacatcacccaggtctgccggacggcagaggtggatcgcggccttccactcctctgtcacgggnccccagctgggcatggggcttcggcaggaaactgaacttgatcttgaggccccagaaaggcagcaactggagcagaagcaagacttcatctcttgctgacagcccaatttgtcaatagcgctttcctcagagccagccttaacctgctgttgagtccattaaaacgtttgcttaaagtttttaccaataattagatcatcagggttgtttagtgtgggatcaagccataacaaaactgcctagcctctcaggggcctagaatttacagaaccttcctcctccctgcagctagtctctcttctttattctgggggctgggaaggatcccaaaacagggaacttggccgaaccctgggctttggatgctaaccactgaagtaccagcacctgtaggatgctgtctttgaagaaactgaggcggacctccaaatgcagccctaaggcagaggtcaacgtggaagaccagcccttctccaagccccactggtctttgcaagctgtacgttgtaggcaatctgagaactggaaagggggactacaaccagaaagttggttaccctgccatgggaataaagtagctgttttccacccc

SEQ ID NO: 234175 - DNA, 443 bp, Homo sapiens
ttattctaactaaaaggtaaattctgtgagggtaagaaagttgtctcttttcttaatgccctgtccctggtacttacaacagcatatgataaaatcaaaaatattgtttgtaaatgaacgacttaagaataaatgtattttcaatttttaaatattaattacagtttaatatgcacttaacaatatgacctagcttctatattttaatctagaacaatataaacctagattcttttggctctggagtagatttttacatttaaatcaattaattaatttcaggttggccttaaataactattttccttttatttcatggatacacattatgtctgtgggctttgtcccatcaataaatagatatcaatttgttccattgcaaggtaataatagttattgatctctggtctccatcttaaataaaaactaaagctagctgctca

SEQ ID NO: 234176 - DNA, 309 bp, Homo sapiens
ctgtggagcataccttttgctgaacacccactttgagtatggccctgaatgtgccagcagcttgcacaactgatgtacccctgagatcaatttgtaataagtggcttcatatcacctgtgtaaggcgagcctgcaacttaaagagatcctggcatgattcctcttgcaaagtagagaatcctttctgaaagtaaatcctgagaataagctctctgctgaaagaaacaatcctcaaatttcagcagcttaacacaatggaagttctatttctcgctcatatgatgattcaatataagtgttctgaggcag

SEQ ID NO: 234177 - DNA, 666 bp, Homo sapiens
  misc_feature (505)..(505): n is a, c, g, or t
  misc_feature (567)..(567): n is a, c, g, or t
  misc_feature (594)..(594): n is a, c, g, or t
  misc_feature (654)..(654): n is a, c, g, or t
  misc_feature (666)..(666): n is a, c, g, or t
tggactaatacactcccccaactagtgggatgactcagatgtgaaaatctgaccaacagaaatatcattattaagtcatagcaattacttatttcatatgttttgggaatacattcaatagttagtgttcaagcaattggttaatatttactgttcttagcatattctcaggcactggtagtagctaattatatgtctctcttctaaattactaggcaattattacctgtaatatctgtaatattcatttgaccaaaagtcttgcattttacatatttttttatttcctcccaagagccaggtattatgctaaatgtttgatgtgtaccattcctaatctccaaaatctcttattggtaggaaatattaccagcactttataaagagacactgagactcatggacactggatgacatatctaaagccacagacctagaaagtaatggagggcttttctaaactgagactctttgactccacagctcagcttgggctacagagcangactccatctccaaaaaaaaaaaagggaccccagacgtcttcagtgccttggataagctganagagtttggaaacacactggaggacangggctcggaacttatcaaccgcattaaacagagtgaacctttttggcgatgccggagttnttttcgactttn

SEQ ID NO: 234178 - DNA, 410 bp, Homo sapiens
atctcaaaaaaagtacattccttaaagtcatcttgaccttagtttatacttgtagttaaattctctcataagaaacaaatctgctgggattacagggcgtagccaccacacccggccagaaatgctttttaaaaacggttccacccgggcgtggtggctcacgcctgtaatccttcaaggcaggtgggtcacctgaggttgggagttcgagaccagcctggccaacatggtgaaaccctgtttctgctaagaatacaaaaattagcccggcgtggtgatgtgtacctgtaatcccagctactcgggaggctgaggcaagagaatcctttgaacctgggaggcggaggttgcagtgagccgagatcacgccattgcactccagcctgggtgacagaacaagattccatctc

SEQ ID NO: 234179 - DNA, 185 bp, Homo sapiens
  misc_feature (3)..(3): n is a, c, g, or t
ggntcactctagagtatcccctcagctcggacaaggcggggtaacgcaagaagcagctacacccgtctggctgctgttttatggaggagttggaatctgcacaggcctctgggtctgggggagaagagtgatccagaccatggggaaggacctcaccccatcacgccgtccaggtaagcctgggt

SEQ ID NO: 234180 - DNA, 166 bp, Homo sapiens
gtacccgactgcatccaacgccgccataaaacagcagctacacccgtctggctgctgttttatggaggagttggaatctgcacaggcctctgggtctgggggagaagagtgatccagaccatggggaaggacctcaccccatcacgccgtccaggtaagcctgggt

SEQ ID NO: 234181 - DNA, 186 bp, Homo sapiens
cctttaaaagtccaatctggggccacattggagaagcagggcatatttatgagtgacagtcatttttacctttagaaaatgtctataagtgcacaggcaccacattcaagacagggaagagctactttgggggacagttgtcattgaaccagcagttacttttgggacactgacttttgctctctg

SEQ ID NO: 234182 - DNA, 357 bp, Homo sapiens
gtctttactttgtactggaatatagttttgtttttgccataaagatttttttccaacagaaataactcaggaagaataaaaaagaaagttaaaaaaagggaaaaaaattgaccacaaaatgtactatgaagcttttaatataaaatgtagaaaagttaggtatgcacctcatgttaatagggatagaccaccttgaatgcaatggagagaatgatgaaatacttggctgggatactggtagccaggacactaagaagcaatgccggagacttacgtgaattcttgatttttgtggcatggataggtggtcatctttatctcacttgttattctcagacatgcattaaggaaggatta

SEQ ID NO: 234183 - DNA, 301 bp, Homo sapiens
  misc_feature (161)..(161): n is a, c, g, or t
tctgcccagtgactgctatggtactttgtcaaggagctctctccgaggatgggagaaaagggttcttgcctggttgttttgcatcacctaccacttttctggccaactgatgattgtagggcattccttttatttagatttcctttatttttttcatgctnctccactcataatcaaagaagattaagtacttgctcaggtgttttagactcttgtctaaggatcttgcccaaggtccctgtattagtctgttttccccctctatatataaagaaatacttgagactgagtaatttataag

SEQ ID NO: 234184 - DNA, 174 bp, Homo sapiens
tgaaacactgcttccacccttcaccatctgtatttatgcagaataaagtccaatatcttcatgaaccctcagaactttctttccgcactggtctgtgtctctctgagcagctttagccacctgcactcccttacacagcctgtttcagcctgtcagaagattccctgttctagg

SEQ ID NO: 234185 - DNA, 357 bp, Homo sapiens
agtgtttcttgacctggggttcttggaaacccatatgggaatttacatatgtatttttgggtgtctgagaattttctttgagaaaatatatattatttcattttggtggcattttcagctatctacattagtgtccctcaaactttattgtgcatgcaaatcactgggttatacagcctgtttggaatcagcaggtcctaggagggcctgaggctctgcacttctttttttttaagacagagtttcactgtattgcctgggctgaagtggaggttgcagtgagctgagactgtgctactgcactccagccggggcaacaagagtgaaactccatctcaaaaaaaaaaattgttttct

SEQ ID NO: 234186 - DNA, 372 bp, Homo sapiens
cctgggcaacagagcgagattccgtcaaaaaaaaaaaagggaaaagaagaagaaagaaagaaataaacagaggccaattatctaaagaaaatatattataaatgaaggaataagtctgtaatatcattcaataacagactatcactcataaaaatccagtaactattcattatttcttctctagttatcatgattaccactttgagagcagagactatggcatagacaccttcctaatccctcccttgaaactcagggacaaagcatctcttactgtgctctgcaaagaacagggtatttgcatgaattattcttttgcagcaattgtggtctgaatgtttttatctctcccaaattcataggttgaaatct

SEQ ID NO: 234187 - DNA, 572 bp, Homo sapiens
catccacaggggttccctgctttagactgtgccgagagccagaggtcttgaattcaagtcccagcctcaccacactgcaagggtgttcttgagcaagtcaggaaggctccccagagtcaggcccttagcctctaaaaatgggaataataatgcctccctcaagagctggtgagacaatggaagctgtttgtaaactgtaaagtaccgtgcctgatttggttattagtgttttattgctgatgtacggtcgaggtccaggccacccgtggtagataaaagtgcatgtgggctggacgaagtggctcacgcctgtaatcccagcactttgggaggccgaggcaggtggatcacctgaggctgggagttcgagaccagcctgaccaacatggagaaaccccgtctctactaaaaatacaaaattagccaggcatggtggcacatgcctataatcccagctactcgggaggctgaggcaggagaatcgcttgaacctgggaggcagaggttgcggtgagccgagatcgcgccactgtcacccagccgagatcgcctgggtgacagagtgagactcc

SEQ ID NO: 234188 - DNA, 158 bp, Homo sapiens
agacagccatatagtggaagactgtctaagcagtcaattttctggaaaagcagatctgtatgtacttacgtggaacaatttccaaggcactgcactgtgttttccatttgccccaacacccagatcaattcccctcccctccctgctctgctctatgc

SEQ ID NO: 234189 - DNA, 431 bp, Homo sapiens
gtcctgacaaagagaagtgagaactctggatgatctcatgttgataattaaatactcagcatagatatatgtcatgtctccttattggcttatatgagttaaaaagttcaattctatcaccagaaagacagcaagtataaatctaccatattcctcaaaacctttggttaatgatattaataatgaccatagggaaaaaaaaggttaaaacaatgcagtggtaaattttcaatgttttaatttcataaatgtaaatcatagagttaattccacagacatgtattgaatatatgtaacactccaagtagaatgttaaatattgtctaatgtaaatgaataagacattactcctcagattacccacagtatgatagcatggacacactgaaaacagtacttttaaaatggtatttgagtaggtagctagtcag

SEQ ID NO: 234190 - DNA, 371 bp, Homo sapiens
atggcggcggcagctgtacagggcgagagaagcggtggtagcggaggctgtagtggggctggtggtgcttccaactgcgggacagggagtggccgtagcggcttgttggataagtggaagatagatgataagcctgtaaaaattgacaagtgggatggatcagctgtgaaaaactctttggatgattctgccaaaaaggtacttctggatacaatctcctgtttctttgccatagtggctttgatttgggattatatgcacccctttccagagtccaaacccgttttggctttgtgtgtcatatcctattttgtgatgatggggattctgaccatttatacctcatataaggagaagagcatctttctcgt

SEQ ID NO: 234191 - DNA, 474 bp, Homo sapiens
cttattttttatattcttttttcataatttctgaaaaatttaaccctttattttgtgagttactggtttttgtttttccttctgatcttaaatgctctgtgtgtatgaagggtattatgttgtcaagtaagtcacatatatatttttagttgtaggtagcttttttatataaactataaaagtaaaaatatatataaaagtacataaattacaaatgagatttatgatgcatataattgtagtttgttcatttgcattgctatatagtattccatcatgtgaagataccacaatttatatcaccattctgctgttgatgaatattatgatttccttttctgtttcaggcttctatgactaatgctgctatgaacatttttgaatgtgtcttttgataaacatatgtatgtctctatggtatatacctgaaaatggaattacttatagaatatacagatattcagatttactaga

SEQ ID NO: 234192 - DNA, 594 bp, Homo sapiens
aaagaagactggtttgattatgtttctttgtatggttacactctatttacaagaagaatctgaagtgatttacagtaaaaatacataatgacaaataaagacattaagtaatccatgtaagaagggtagagcagaaattattttttaaataattaggcaacagagagagctcctgtctcaaaacaaaaacaacaaacaaacaaaaaagccccaaaatgaaagggtctgggtgtgtattcacaggagcagcaagagagagagatctactaaataatactggtggaaaggaagagttgaaccctagagataagggtgagcaataccagctttaaacaaaacaggaaatgaactggggtgaagattgtttctttggccagacacagtggctcacacctataattccagcattttgggaggctgaagcatgaggactgcttgagcccaggagttcaagaccagcctgggcaacacaaggagacctcgtctctacaaggctgagatgggaggatcatctaagctcaggagattgaggctacagtgaaccatgattgcccaattatactccagcctggacaacagagtgagacactgtct

SEQ ID NO: 234193 - DNA, 352 bp, Homo sapiens
gagtacagttggtgaaccaaggttctaatcactgacatggggtaagtccattcccttttctctactaagtggggcgagtgctggcctgcccaataatgtactggttcttccaagggtagagagccacccagcctatgcctataatttaagatatgctgccagtgaactcagttaatgcagtatgtacattataggtctactttaagaaccacagtggcctgacacggatcacatacatgctggaattacttgattctctgttagctctgtgtctgtgttttccagtgtggttttgtgaccacactgggaaagatccacaaatgtcaatattaaaatgttcactttgacttta

SEQ ID NO: 234194 - DNA, 166 bp, Homo sapiens
caatggctaagaattttccaaaattaattatagatacaagactatagatctaagaatgttacagaacaagtaggataaattccaaaattctacacctaaagctatattcaaactgcacgaaaccaaaacgggaatcttctaagaagacagggaacatttacctgca

SEQ ID NO: 234195 - DNA, 342 bp, Homo sapiens
tcaaaaaaaaaaaaaagaaaaagaaagtggacatggtaagcttttctgggatggccatatggtccttctacatcacttcagcggggccacagggaattgcagaggtgggcccacgactgcagcagctgtggtggaacagcaccccatagcgtgaagaaagcccctgaccacaacattctccagtgagtccacacgcagggaggagcgcaacacccactcacataaagacacacacctggccgggcgcggtggctcacacctgtaatcccagcacttggggaggccaaggcaggtggatcacccgaggtcagggtggccaacatggcaaaactctgcctctac

SEQ ID NO: 234196 - DNA, 379 bp, Homo sapiens
gctggagtgcaatggcacaaggcgatctcggctcactgcaacctctgcctcccaagttcaagcgattctcctgcctcagcttcccgagtagctgggattacggtcacccaccaccacgcccggctaatttttttatttttagtagagactgggtttcaccatgttggccaggctggtctccaactgctacccttaatgatccgccctcctcagcctcccaaagtactgggattacaggcgtgagccactgtgccccacctataatttttttaatgttacaaatttggtagtttattagctatttttcctctttgtatgttagttcgtctccatttttgttttgttgtggcaatataatcattataccattatatctctt

SEQ ID NO: 234197 - DNA, 476 bp, Homo sapiens
catgcctctctattttaactggctttttgtccctttccttgctcagcagtttttctgcaagtagctgataaatcaggaattcttaaattcttttaaagggtttttcctgaaagataagtttttttagagaagtagagtgggcctagggaataataccaaccttagatgtggaacctctaggggctggtcaaatgtatttggcacacttactctttactatgtcatcaacaagacttggatgtctttcctatttactgcctttgtcgttggagctacgattcacatctgttccagaggtcatggaaactcttcatctctcagcatttctagtgggtatccttggcaggcttaaagcagagtcaggagggtgagagctcagagagaggctaaggtgaaagcactttgtaaacttatagaggatggtattttgtacaaagcctggcacacagcagacattcagtaaaaatgcatagaat

SEQ ID NO: 234198 - DNA, 350 bp, Homo sapiens
ctaaaaaggttttctgtaaatagcatgcaaattagatgcctattaaaaattgtcccttttaatttagttgaattaattctacttttagggagctattgaataattaaataaacttaatatggaaagataactgaaaaatttaaaaattaaacactggaaacaagaatagtaactgtaaaaacaaattaatttactgacaacacccgagtattccttaactaaagccccagggttctggagaacgtggacaagcagctgaggagctgtcagcagaaaactgttatgcctaaaaatgtcagtaaatcttttccctattattaaagaggatgctctatttccctattattaaa

SEQ ID NO: 234199 - DNA, 273 bp, Homo sapiens
agtcaccaccctggccacagaggtgggcctggccttttcccaagcctaggatcaagattcacgcagacaggaaacacttccaataattgcctacacactgggctccccatgttgctctgactacagcccaagagctcaaataggccaaggcctgactatgaagatgagacaactgtctagaaaaaaaagacaacaactcttccgacaggccctgacccctgctctagactgagcacagccactgacaggtgaccttcagaatcctcacccaca

SEQ ID NO: 234200 - DNA, 155 bp, Homo sapiens
gggctgttggctggctcctgtgcaaggcacctgaagaacaggcaccagcctgcttattagttgaggtaactgagctgcttcagctctgagaagcatgtctaggtcacggagccggtgagggctgaggcggcagccgtgaacgccttgctctgaac

SEQ ID NO: 234201 - DNA, 475 bp, Homo sapiens
agattctcttgagcccagcagagcacagaggagatgaggagttcagttcagagcagagggctcagggcatgcagcccagcagagagtgcatgctcccaacttctaaactcacaggtctgaaggactcgcacagaagctccctccccaagtcacagggaagtgtgaggctcctggagctggacagcagcagcagggcagctgctcctccagtgcctatgttgacacatctgaggtgctcttggtaccaacctgaattcgagaactggaaagcaggagggttgggtcctagtccagttctgccatagctaactagctgtctggttttcttcaagtcactttgtttttctgaggctcgactgactttactggcttactcataaaatgtagcttaaaaataataaatgctatccttttgaacaccaatattctgttacctgaaatataaattcttctgaattaatcagtggctcaaaag

SEQ ID NO: 234202 - DNA, 319 bp, Homo sapiens
acctgcatgaatttatcctcacatttcctaggcttctaattgtttctatccaagtttgaaaaccagatacttttatcaagggaattatggacaaaaaaaaaaaaaaaagaagaaggttaccaaatctgtatttgtgggcagttaagaaattctattaagactgaattttgaaattagggtacaagtaatactacatctagggaagacttcaactttgcctacaattttacagcaaattacctatacaggattaaagcactgtgctgggaacggaacatcaatatatagaagatgagctccacggacatcactggcattg

SEQ ID NO: 234203 - DNA, 470 bp, Homo sapiens
cagtgacagccctgttccactgtaatgtggcagcatcttctttttgagttagaccttaaagatttaggtgtgctatagtcacatttaactgttcatttaaattttagtgctgccagagttgcaaaggaagaaaaatttgttagtttcttagatgaaaatggatggttttgactgggtacggtggcccacgcctgtaatctctgcactttgggaggcccaggcagggggatcacctgaggtcaggagtttgagaccagcctggctaacatgataaaatgtttagctctactaaaaatacaaaaaattagctgggagtggtggcacacgcctataatcctagctactcaggaggctgaggcaggagaatagcttcaacccgggaggcggaggctgcagtgaactgagattgcgccactgcactccagcctggtcaacaagagcatcaactccgtcacatacacaaaaaaaga

SEQ ID NO: 234204 - DNA, 468 bp, Homo sapiens
ctggctaagctctgttaggccttaggaagcttaatagagcttctctaattttgtagaagaagggcctttgactttttccctctctgcttcaggatgatctcatctgctactttggaagcatgagactttatttgttttgatggtactgaggttaggggtgagattgatttatttgtaattagtcctttctcctccttatccttccttttggataaaggtaaaaatataaaatcctcctgcctgctaaagtactgtttggccatcagagaaagggagcttcaggtagggcattccgcagtccctgtccccatcttagcaagttgaagatgctagtcaaaatttctctgggggcaggagagggcagaggatacttacgtatggattctggggttggtctttcagtttcaactaactcattctgtacctgaatgatactatttaataaaatttcgtggtatgagtttgaga

SEQ ID NO: 234205 - DNA, 560 bp, Homo sapiens
ggatttagaatagtccataaatttgagggttcgagaagattgactccaatgttggaagaagttctgctgtgggtaaaatgctatcagacagcatttcatactacagagaaacctggcatgaaaggaagagtcaatcaatgtgacaaacttcattgttgtcttattttaagaaattgcagccaggcatggcgactcatgcctgtaatctcagcctcccgagtagctgggattacaggcacctgccaccacgcccagctaatttttgtatttttagtagagacgggatttcaccatgttggccaggctggtctcgaactcctgacctcaagttatccgcctgccttggcctcccaaagtgttgggattataggcgtgagccaccgcacccagccctcatgtgaactattttaacagtgtcaactgttaaaataaaatgcatcttgtgtgatatacccgctgtctctgagctctgtgttgagtgctctgtgggtgcggcaggacacctgggccagtgcagcacgtccccgcaagctccccagcctacactccgctgcctaggt

SEQ ID NO: 234206 - DNA, 683 bp, Homo sapiens
cctgaagcacccgctttcctcacagacagcaaggggcagctctggaccctctccgtgggtgggcaagaagctaaggggctgtgagagcccagggaggcctctgcttctgaatcttgcagagcttggagaacgcagcaaattccagcgggagcctgtgtgcacaggtgaggaagctgagctggtgcggagcagtcacacagccacagccacagccgacgttccgaccccgcagcccttgcccttacatccccgagcgtcgggggctaggccggagacgtttgccccatcatcggaggaccggcccctccgcccatgcggcccacggcctgccagcctccgctggcgctttctgggtgctggccccacagaaggggtgggaggtgcggagtcggggcaccagcgcgcagcccgagatttcccagtttgctttcgctcaggaagtcatcagacaaacactcccatctcccaggcctagttcccactccttgctacattcacagccggagactgtaatggacttcacaggctcgcactgagcactcaggggcgcagagagcggcatttcccgagcatcttagaggccaggctctgtgcttggcgccaggacgagctgcacttccaaatccaaaccctgcttgctgcacgcgcccaaagccgcccaggctggcagcagctccgggcaa

SEQ ID NO: 234207 - DNA, 449 bp, Homo sapiens
atcccattactagctgttaccatttattgagtacctactgtatgccaagcgctgtagtaagtgctttatatatggcatcttattaatacacataagaaccctatgaatgtgctgggtggtattgttcccatttgataaggaaaagggacaaacagtgctgacttgtgactctccaaatccttctctttccccaggaattttgggtttgcttgttcaggttctggaaggtttttatactactgctaaggatgagtgaagaggtaaatttaaataatccaaaacaggctgaaatgatccacatgataaagagataatttagaggttagtggggccatgaggaagaaagggaaaagtacttgggagaggcaagggaagtatagttgtggaggtagaagagagagaaagaggttctttgtttgtgtgtttgtttttgtttcagtttttgttca

SEQ ID NO: 234208 - DNA, 272 bp, Homo sapiens
ggggcagcaggctatagttgattcctctgctctgggaaaagtataaaatatacaaaatactttacaattagacagaggtacaattgtcttccataactgaaaagtgaaaaaaagagaaacaagaaagtctgagtggatgttgagttaaaggaaaagaacttgaaaacccaggttattttagatcccaggtttgacaaaaggagagtaaaagttccgtgtgacattatgttacatcttttttcttcaccatcaactaggctagaggggcttga

SEQ ID NO: 234209 - DNA, 887 bp, Homo sapiens
tagacgtacacggtacggacgggtgactggtggctactgactggtggggatgatgaggctattgttttttgtgaattcttcgctaatggcccattatgcgcaaaaagccggttagcgggggcaggcctcctagggaaggaaggaaggaaggaaggaaggaaggaaggagaaaaagggaaggtaaaaaggaacaaagaaagaaggaaaaaaattgttttataaaataacacatttttctcaattacaagaacgtatactattacttttatgactagatttgtgtctagaactaggtaaggttattactgctttgtttttaaacctgacatctgggaaaccccatgtgctgtcactgttgcatgcagtctttccagctccaggccaacattgttaatatttggattttatgaatctttagcacttgcaagtgtttaatagtcactctcattctttggaggctgttgtttttttttcagttaaaaaagtattatatgcttactgcagataattagagaaaaagaaaagaattttttaaattaccatgtaaatggcgatttaaaatatataaacatatgtatttttaatctttaaattcatatatgtatatacatatgtgttttagactccttacaagtataaccatgctattgacagttaataaaaagtatttgttagtgaaattaatagatatggacaagattcttaatgattattaaagaaagatgaatacatataaaagatcgagatttttaagggtcgaattgcttttaattgcatgtatgtaaacttaggctagaaataacaatttaatattgtctactaatttaaacaacctctatgtagactttgcagacataaatataataaaatttcatttatttatgata

SEQ ID NO: 234210 - DNA, 367 bp, Homo sapiens
acttagcactgggatgagtatggaatagcttggaatgactttcaatttctagttaagaggagaagcttctcgggatggatttcggttgcccaagacgccttccccgacctcattctcaggagcctggctcgttcctgcggtgcgggggctcagatgcaagctcttttcagcgaaggcagtgctgcggacagaaacctcagtctcttacaggagcccccgtccgtcgcctaacgtccaccgaaaacccccctgcaataacgcccgtcacaggcgaggaaaaggccggcgtggccaaccacgaagcccccagccggcccaggccagagctcggccaggagggaggaggggccatcggaggcgcggccgc

SEQ ID NO: 234211 - DNA, 348 bp, Homo sapiens
ctgaaggaagttaaactactttcccaagttacataatcatgtgccagagctgaaacttgcagcggcagagcccagcgtaataaccttttccctcaccaccatttagtttagagcttcagaagtatttttccattgttcgataatcaaaatagtaacttaaatgataaaaatggcccattgttatctggcttttatcttttaaaaaaatctgtgaaaagggttactgaaatgatgtatacttttccaaaggtgtgaaaacaaagttatcagaggtgtagcaaaaatttgtagtaagtcaaaagcgttaaatgattgaatgtcttctttaaaaaaatcctgtcaaatccg

SEQ ID NO: 234212 - DNA, 454 bp, Homo sapiens
aataaaatattttcaagcataaaaatattacattagggtaatattttgaggaggaagtagaatggaaacagaagtttatgtaggaaaagaaatgatgcaaaatatctgtaagagaaaagtttgttcttgtgcttctgaaatatatgatgatggatagaaaattgctacagtatttaaaagataacataaaagtgatgtttggtcataaaaagtataactgatatataatatctgaaattacatgctatataatcatttaaatttaagataaaaattttaggtgtgaacttaaaaatgtgcatgcagtacgtaggttttcagtgttgtttaggtggcgcataagtgaaaagtgaagaccattagtcctcaagagagtaccatctccatccattccccaagagcttcccttctctcttctctatggtttctaccaattcctctggatagtaaaaaa

SEQ ID NO: 234213 - DNA, 484 bp, Homo sapiens
ctatcaaaagcaaaccctggtactgagtactttatatgatttatgctactttatcttggcgaaattcatggggatccttaacccccttgcataactgaaaaatccaaagtttagacataatgacttactcaaggtcacgcatagctaggaagggtcttggtgggacgtgttggtgtgtgaatgtggagcccatgccttcttatcatacctcatggatcagttggtccaggagaggacacactgctgccccccttgtctccctcctgctcctggagttgggaggccatcccactgccccaaacacgcacgcctgctgccatctttttatttaatgattttctttttcttcctaggtaaagcaaacatggcatttattcacaactttgatcctcagttatcacaagacactacaaaagtctaacactaggattgtggcgaactttaaaaatgagttgatggaaaagaaaaggcttcgtaaactgca

SEQ ID NO: 234214 - DNA, 399 bp, Homo sapiens
agaggagataaattaatagcatgggaatatattcatggcctggaccataatgtgttattcttcaagtatttgttgagctaaaagctacatgtttcaacctaaagtagatttgtggggacattctaaatgagtgcagacctacagaaatgtttgtctacctctgtatggttattccaagtctgaaaagataaccccaatagcagtaggacaaaataggttatcaatatgtcaggctggattatttatttaatctgagctttaataaaaccagaagctatttactttttgttcttatgatagtgttatatccacattataaaaagttcaattaaagaaaactatacagtaaaaaatgcatgcccgacctatcaaattcccatctccaaatttaataaaaac

SEQ ID NO: 234215 - DNA, 461 bp, Homo sapiens
aacatttcttggatattaaagtataataatgtatattgagtcaaatgaatgtctgggagtcatagattttgagcctaacaaattcagctaggtcattctgatgtaattataataatattattaatgaacaaacttacttttagtcaaatttatctagctgtttaatcagattttctattgaattaaatagcttctcccttctttgagccttttaacctctagttctttctaacctgcagtttcccaggtcccatgtcttcctacctaatgattttgtcctttattttcctagagtatgtcctgaaatatacagatagaatttgtggaagtttaaatttcttttattttcccttttaaaaaaattgactaattataactatgtgtatttatggagtacaatgtgctgttttgatacatgtatataatttggtatgattaaatcaagctacttaatatatcta

SEQ ID NO: 234216 - DNA, 465 bp, Homo sapiens
atgggccagcgggagacaccaaggccctaccaggagctgctctttgatcacgaggttcacgctgcatcttttcgggaaggttaaaaaataataaatgaccaccaggatcacagaaggaaagagctcgtgatgtccatggaattcacgcagatcacatccaggaatctttggaacaaaaaattcacaacaccatggcctcatacaaaaatgctgggctgcaggaaacctgaggcagagagctccatcatcacagtgaagtccccgccttcagcagatcccaccaacagccacagtgcttcccatcacctgaaaaaaactcatgtatcaaactattacacttcttcagaatattggaaaatggtgcatagttcatatgttctcatttgtttatcttgtgtccaaagtgtcttgtcattccaggccactctatttcttgtgtattaataaaaagtttgaggtataaaa

SEQ ID NO: 234217 - DNA, 656 bp, Homo sapiens
gaccccaaagtgcttcctaaagctaatggtggactattatattgaacttggcctaacccttcagtcttttgtgcacaggtctatcctcctgacacgggcaatggccaaggttgtcccagctcagaggatcagtgaactcctgtgactttgtttcctcctgagaaggacaggcacaccagcctttgacttggcctctagttcctggctgaacgtgaaagaggcacactggatgtgaaaacccactttccctcctctaagtattcctccttgaggcacaggagagcaggggatgcctttgtggattcagaaaagattggcaaaaatgaaaagtggtgccaactactgctgatggggatggggggaagtatatactctcatacactatgggaaacatctaatgatgtcaaaaattatacagacccttaacccactcccaagatatcatgccacaaaaggaaaataaccagatactaagaatacatgttaaaaaaagaaaaagaaagcaaacatcaataaataggaaaacagctttatagactatagttaattcaatctatgaagtatcattcaggcattaaaaaagaatgagccgggccatattgttgtcttagaagacattttgaaagctgttattaaatgacaatagtaagatgtag

SEQ ID NO: 234218 - DNA, 305 bp, Homo sapiens
ggactgaaacccttactctttctttaccacaggagtcatgtgggtgattctttcttcctctttctcctcctgttttttttccttttctttcctcaaagagaaaactaggaagagaataatgaggattgattaatggtcaggggaatacaattcacacagaagaaagaaatggagactaaatggttattggcagcataggaatctgatagaggagaattgcttgaatccgggaggcggaggttgcagtgagttgagataacaccactgcactccagcctgggcaaagagagcgaaggtccatctca

SEQ ID NO: 234219 - DNA, 506 bp, Homo sapiens
tgggatctcttggaagctggacttgatactataagtcctaggcttctaaggtcgaacacagatcaaacttagtggcatgtttggttaagagttagattagacaaaaccaatgaagttgttaaaagtttcagaaacaattgaaaatgaaattgatgcatgattttagctttgcaacaaattcaactttagaaatatccttaagcctaagattaatcaagattcaggaccttgaagaattttcaaagttagaactgtaatttgtgtagggacgtaaaatctttattttcaacaaacagcaaatgtttccgttaaacaaatgtgtattttatttgaaacagatgaaatcataacagtttggcttgctttacctaagttattgttccataatatcaaaaaaattacttaaaataagttcttctcttcatattccccgaagtttttgtccagttttctgtatagctttttggttcagccaaaaagagacatttcatttgcagcattaggga

SEQ ID NO: 234220 - DNA, 350 bp, Homo sapiens
cagagaactgctaatatcagtataaaactgcctgattcactgctgtgctcatgtttacttctgaaacattgtaactttctatgtataatgttcccttcatctatttttaaaattaacattttttattgacagatcctaattgtatatgtttatggggcccctcgtctttgaaagtctatgaaatggttataacacaacctgcttcagctcttcaataaactaaagctgttgttattagtaattatatttaattattatggtttagaactatggggttcattttattataatgattaattgataacaactaattaacatagaacttgtccttattgccaaccctagtttta

SEQ ID NO: 234221 - DNA, 596 bp, Homo sapiens
taaagatcattattgttactcagcaatgacattcctgccacacagcgcaggctctctacatttctatttacaatcttcatgttaatccccaagtaatatttagattgttgtgtaaaaccctaaattctgctccaaaagaagattgtgccaaatccatctatctgagtccttcccactgaactcctcatcttcttgcccagaggtagtccttcaatcatttcctccagaaatcttactaaacaaagaacagctgactgcatttgaatgctcaagacctaaattgaatggggaaggaaagagttacacaaaaaaacacaccagccaattggcttcaactcacttgaactatgagagcttctaaaaggtacctttcatgaataaggttggaaaaggactacactcagttaaattctttgaacaatcatgacaaaagccaaccctatatccagcagaagttgagtataaaagggtagagactgcactgaaaaattgaaaagtaaattattacatgcaaagcatgtacctttgcatgaaaacagaattttatgactgtaccatctctgtctattagccaataaagttttaaatgatatttt

SEQ ID NO: 234222 - DNA, 450 bp, Homo sapiens
tatgagatacttaaactaatggccaaatttgcccatctagagacacaggggaagaggagattagatgaaagatctttgtgtcatttgattaatctggaagtagactaatgtcatggctccttctatggcagattgataaaaacatgtcaccgctgggccagggagtaccagctgtaagcagcagccattttccagaaagaacacggcggtcacctcagacccacagcactgcatcttagaacactgcaatacagggagaaggcaaacaaggggaaaaacgcatgatgatgaagtacatcaatgtcgaatctttaaaagattcacttaaaaaggaaaaagcctttaaaaaaatcacaggagttttacaatgtgtctaagtttctaggtgaggcattacctcatgtttttgcaatttgttttgcttgcttaagggggcaatttagtaagtac

SEQ ID NO: 234223 - DNA, 364 bp, Homo sapiens
ccagatgaaggatgaaccccactcaggacaaaaaaggcaaaacacttgactcttttaaaacattagggaactctggccgggcacggtggctcacacctgtaatcccagcactttgggaggctgaggcgggtagatcacgaggtcaggagatcaagaccatcctcgttaacacggtgaaaccccgtctctactaaaaatacaaaaaaattagcaggacgtggtggtgggcgcctgtagtcccagccactcgggaggctgaggcaggagaatggcataaacccgggaggcagagcttgcagtgagccaagattgcgccactgcactccagcctgggcgacagagccagactccatctcaaaaaaaa

SEQ ID NO: 234224 - DNA, 428 bp, Homo sapiens
tctggcgcacacatgcttaggaagcagctgtgatcactctaactaccatcttccctcaatgtagatactattattatgtctgccttcaaatcaggagatggaagattagagaaataaagtagcaggaccaaagaacacagccaccaaggcatagaacaagcaggcctgactccaaggcccacggcctctttccctcctccctggagacttgggacctactttgcagaaggcagggctgagggaagccacttgcccaaggacatacaagtgtggtacggcagagacgagcaccctgtctcccattcccagcccactgccatgccctttactctgcagactccctggagggggtagagtttcacttcctattctctaaccatcaaggaaggtcaagggccatgtatctcttttagggagaaaaaaaaatg

SEQ ID NO: 234225 - DNA, 2683 bp, Homo sapiens
aacagaaatgctgttcagtgaataccaatgcactgaatatacaaaaaagcttagttacaaagtaatccttaatggaaatctatattgaaaaatgttgagtataaaagtcaaatatttgtaacatatatccaaggagtattccagagagcagacctatttatgaataattttaaaagtaagcagagaaagtactctgttttaaacactgtatacagtgtttgaatttgaatcattttccacttttatgttctttataatgtttagaaataaaacataggttcttattttacacttgcatccatggagcacaaatcctaccaacacaatcaggcaatgtaagttttccaattagaacaactcaactgctggaattgttaagtaattgaatgatgagtattttgtaagagttcagtaaatacttgaatgagtaattggatattggaaaaggcattaccaggtagttcaaccataactctcatagtattttctaaatctgcaaatatacatgattttcccccaaaatattatacattaagttatttcagaaaatggactagatgcctctccttaaaggtaaggtcataagcacctcttgaagttgagaataatttaaaatcattctgttaaaaatcacagtagtttttattaaaattactatttagtgtttttcgagtgaaaggcattgtgcagtgtactttgtctaccttatcttatatagtcttaccatagtcctacttgataattttgtaaaatatcgattttatcagtgagaaaactgtgagttagaagagatcacttgctaaaagttcagtagctcgtaaatggcagagctgggatttgggtccaagtatgcccaataccttagcaggcagccctgtccattgtatgacacaacttgtatatttcgcttatcaaagggatgctgggctgtttgttcactagttttcaggttggtactattttaaatggctgacttataataaagcattcagatttgagggttgtggcagactcttacatttagtgctgcttcctactgtcatgataataaagaaaatggaatagcttgtcagaattcatcactctttgttttcataacgcttgtttatttgcttcctttgttaaccttcttttcatattctacttgatgggttgattctactctatcataaccagcagtaaagccccaaaatattgcaactaaataatattacaacaaatttttgtccttttgatgaaaaacttattattttggaaaacaagcaacacaaagttttcatctctttcagagtttggatgataaaattattgaaaatatcaacctctgtggtgagtcagcacaaatataaagaactagctcagtcacataaataatgagagttgctgagttagagtatggttctgctgaaaatctagatgatggtacagtgggcacttaattgaaatgtcgtaatgagaagatagtgcctctttttggctaagcgtgtttggcttcccaacacatagcttgaaattgaacttaggagtggttcttagagttggaaagatgaatgccctgtactatttcaggtatatatgagaaactattattggaaagaagtgggaggaaaataagtctgacctggcaagccaaagtgctgacctggcctcttgtctagttactcacgctcaaaactgtctggactgtaattagaaatgcactgacaccacactgcaggaacaactgctacatcaaatagtgctttcttaggttggttcccaggagggatctggcaatccaaaagttaaaagcggagctgccaagacgaacagttgcttcactaatatcctgacatcagaagggctttcttcatttaattatagacataatgaattctgtgtgggttctaatccatgatggaaacacaactgatgagagcttaggaggtactgttgtttgggacctcgcaacacctggcccgtatatggaaacagctaggcttaagtgttactcagacattgctagattcagcagaatccacagccccgtccagcggagacaaggaaattaaagactcatgttttttcttctaagtaatggtgttcctctataattaagcatgcctgggctctccttagggaaatagctggcatggcagcatatgactatagttgttgtatggaagaaaccactatacagcttaagctctttaactttggtgaaaaattgatttattttccagcaaataatgtaattatttatttaaaattatacgtgatgctacaaatgttaaatgtttaatttactgaattgaaaacattctaaatataggaagttacatattgtatttcactactcaaaagcacagtgaaatgtgtaagagtatacatttatgaatgtctatttaaaaagttctgccaactttctaggaaataaggtaatcccagtgctttgggagtacaaatagagtcacttgagtccaagagtaccagaccaggcgggacaaaaaagcgagacctcatttctaaaaaaaaaaaaaaaaaaaaaaaaagccacatgtggtggccatacgtgtattgtagtcccagctagtcaggaggctgaggtgtgaagattgcttgatcccaggagttctaggaggcagtgggctattattgtgccactgcactccagcctgagcaaccgagcaagaccctatctctt

SEQ ID NO: 234226 - DNA, 125 bp, Homo sapiens
atacgtttcagtttgggcctaaacggaggtctccagaatcccacaccattgctgcttctgctaggtcacactatctaggtgagcttcgtaaagagaattcatgtagaattgctcaggaaaaaaca

SEQ ID NO: 234227 - DNA, 1011 bp, Homo sapiens
atgtaagatgtgtgacatcttatcctgtggcatgctgagcaccgacagcctctgaagcccacactcaaccaggacacacatgctccctgctcttggggttgacctggggtttatggagtcagtgtgcttgctcacaaacctctttatgccaattgcactggttatcagaattatgtaatttaatgaaatagtaccaaatatttcataaactaattaaatatgactacataaaggtcactgcttctttgaaagttcactattttggaaaagactcaaaattagtcactacagaagcatttctgtcaatgtaaatgtgttatgataactataaaaggcgagggggaatattataaaatctaagaggattctactcttcataagcatcttcagctccgctgacttcaaagaaactagactggaaatcagaccttgttattggagtgagttgtaaaagaaagtctacatggaattccaatgggtagatccttattcagagaactatttgtgcctcatcacaggtagaccggcatgttttgccacaatagctgcgagttcaaaatgttgtaaggtcttgtttatgtttatgtatttttttatgtattgttttcaaaaggattttctgctttaatcagcttttaccattaattgccttaggcctgattatgtcagatgagaggatttggccgtataaactaacagcaacacctaaaaaaggaaaagtttttcctttgtattaaaagccttttttaaaattccatttcctactattagcaagatctggaataggtttattagcactaaatattatactttggttatgtacagaaaatggaatgtgtgcaatcatgttgatgaagtaccttcccctattgtgacatattctttccctttccaaatggcagtgttagatgagatttcttatggataaagaaaacaatacccggaacaattttgagtcaaaatgacaatcggaaatatgacaaggagaaaataaacctttttcacatctgt

SEQ ID NO: 234228 - DNA, 561 bp, Homo sapiens
ggaggatggcagtgccaggcatgcataaagtgatcaaggaaggggacaaggggtccagtgggaacaggagctaaccaggggttcaaggtcagggcgtggggagggaggggcgctggtgacatgcatggttcccgggaccagcccgtcctgccatcccagaggcctctgcatcccacaggctgtgcaccctggaacgtggttgtggctttaggtgctgccaccagggggcgtggcagaactgtctttggggctgaccacgggcaggcggcccctcaccaagctgcttcctgttggtgccatcagagtctgggctatcctctcctgaagccctctctggtctccacatgccccacccctttgccctgtccctcttatttccttccagggtacctcctcacctcctgtccaggtcaccagagcttcacctgtggacatgccccattccctgataatcctttcttcattctccatttctccaccactcccagctcccccagcactcccagctgctccacactcagtccctgctccacactcagcccccagctcccccaccattcc

SEQ ID NO: 234229 - DNA, 570 bp, Homo sapiens
ggaggatggcagtgccaggcatgcataaagtgatcaaggaaggggacaaggggtccagtgggaacaggagctaaccaggggttcaaggtcagggcgtggggagggaggggcgctggtgacatgcatggttcccgggaccagcccgtcctgccatcccagaggcctctgcatcccacaggctgtgcaccctggaacgtggttgtggctttaggtgctgccaccagggggcgtggcagaactgtctttggggctgaccacgggcaggcggcccctcaccaagctgcttcctgttggtgccatcagagtctgggctatcctctcctgaagccctctctggtctccacatgccccacccctttgccctgtccctcttatttccttccagggtacctcctcacctcctgtccaggtcaccagagcttcacctgtggacatgccccattccctgataatcctttcttcattctccatttctccaccactcccacacccccaccactcccagctcctccacactcaacccccagcacccccaccactcccagctgctccacactcaacccccagctc

SEQ ID NO: 234230 - DNA, 281 bp, Homo sapiens
ggaggatggcagtgccaggcatgcataaagtgatcaaggaaggggacaaggggtccagtgggaacaggagctaaccaggggttcaaggtcagggcgtggggagggaggggcgctggtgacatgcatggttcccgggaccagcccgtcctgccatcccagaggcctctgcatcccatgggaactcctacgtgggaagcttgttaaagtacagattcctggaccttggcagcacgatctgtatgtgggcaggcctaagatcacattccaacctcactgagata

SEQ ID NO: 234231 - DNA, 432 bp, Homo sapiens
taaggtatgaatgtgtgaaactcagtctaacttgattttaagttcggagaagaaaaataccaggcaattggttcccaaatgtacactcaacattttttccctttttactgggtacatagttgctataccaatcaatattaataataaagattattgtgtggaaatggttcatgtaagacaaaaactctatacataatttataaaatgtctgtgttctaaggatttagaaagaagttttgcctttttgatatctacatacttcatttgtgcccctttttgtgctgtgaaggagaagagcaagttcgacgttcagaatttctttggggttccctctcttggctttgggccccccctccctgtctgcatacagggaagcttctttctttctttccccttcttttgtgcctattaaactgtccactacttaaaacc

SEQ ID NO: 234232 - DNA, 738 bp, Homo sapiens
tcatacctccctaaaagcctagccctagtttctggtacaatatttcttctttccatcttcggttttctaaaccacaagtttctaaaagcaccaaggaattttctacctgtttattccgtttggtttttgtttctgtttttttgtccaaggtaaggcccaagttgacactgagtattctctgtgaaactctgcaaggagcaacatgtgatttcacagaaataagtctcgatacactatattcatggctgtaagttctatgctgctcacccattcatttgtccattcagtcactcattcatgagacatttatcatctgcctcctggaacataccagggcctacaccagaaaacaaggaaacaagtaaacactagtaaactttaaacaggctctccccacaagcaactgacagaccagtggagaagacagatatgtcaacagatgattacaataaagtttcaaggccgggtgcggtggctcacgcctgtaattccaacattttgggaggccaaggcgggtggatcacccgaagtcaggagttcaagagcagcctggccaacatggcaaaaccccgtctctactaaaaataaaaaaattagctgggcatgatggtacacactggtagtcccagctactagggaagctgaggcatgagaatcacttgaacctgggaggtagagatcgcagtgagccaagatcgcaccactgcactccagcctgggcaatacagtgacactctg

SEQ ID NO: 234233 - DNA, 445 bp, Homo sapiens
tgctttcggttctggccggccacctctcaagtcccacccctcccgggggaacggtgccttaactcctctccaagacaagcactcctggtaaacgtccttcttctaagaaagaagcatttcataaagcccccaactcgccgcgcactttctgccccactgggctacagcggacctagtgtgacgctgcacgttttaaatcggggttggttctgcttcggaatctggaagattcggaaagttaaaaaacaaacaaaaaaacagctttcagggaggcacgccccaaaaatagtatattctgcgcccaccttcgtgtccccaagagtgaggagaggagggaagaagaagggaggcaactgcccctgtgctgtgtcccgctgcccaccctctccggccgccccggggagcgcagcggtgcgctggggctggggctgagggttggcggccg

SEQ ID NO: 234234 - DNA, 302 bp, Homo sapiens
cacccaagttgtaattgaaaaatgtagcccattctggaaccaacaatgttaaaggactgattattagttacgaattctgctgctgtttctactggaatcacataagctttgaacagacttatggcaagaatcagcgttttaatttcatgtccatctcccactaaaaagcaagcatggtgagggcatgaaccgtatcttatctctcttcacatccccacctgagacactgcacacaaaatgatgaccaattcatgttcataagtcacatggaagggccataacaattaatgaatggagcctgg

SEQ ID NO: 234235 - DNA, 686 bp, Homo sapiens
aagacgattgtttctccgaattccttagactcacagtctatgttgttgatttatggaggcagtagtgaggccccgtaccccaatgcctcctaccttgagacctggacagaggattgccctgtgaaattcaaaccttaaatcagtaggtagcagcagagacaggcatggtgccttaaagataaagaatacagatggcctccctattcacggaggggcctgcaacctttatatagctctacatacatcccctcccgtgtgcagatgcttcttgacttaccatggggttacctcccaataaatgcatcataaagtcaaaaagttgtaatctgtctggatatatgtattggtctgttctcacattgcaataaagaaatacctgagactggataatttataaagaaaagaggtttaggctgggtgcggtggcttacaccctgaaatcccagcagtttgggaggctgagttgagcggatcacctgaggttaggagttcaagaccagcctggccaacatggcgaaaccccatcagtactaaaaatacaaaaattaaccgggcatggtggcactgcctgtcatctcagctactcaggaggctgaggcatgagaattgcttgaatctgggaggcggagattgcggctgcagtgagccgagattgcgccactgcattctagcttgggcaacagagt

SEQ ID NO: 234236 - DNA, 793 bp, Homo sapiens
ccacgcataagccaaggtgaacaggcagccgcaggaagggcgtccagatgggtgagtcgctgggaccctgtgcagactcccgaggggcggtggagcccacaggctcaagacccaccaggcgcttcctccccgctggtctacagtgcctgaaacgtgggcctccccgacgcgggcagtgggtctgttggagtggccagaagggtcctgttagggaacctgtggatggctcaggattttagaatactccgagcctggggtgcccagagagcggaccttcggaacccacatgagtgtctctgcttgtgactcccggcagctccttaatcctaaagaagccagatccgaatcttgccaaattgtagccaggagttctcgagcagccagagagcgatggatttccaccggcagaggaaagatccagctttaggagcagaatcacacctgccagctggccctagcaagctgtggtctctgggaggccagggacgagagcccactccctcctccgttcatggctcagggtcgtggccagagcctgcctgtgtagaggcgactccagcagcccccagccccgcccagctctgcccacacagctgcaaggccagcatcctgccctttgtcaagttcaccacagtcatgtcccaccccccattcgctgaaatcagccccaaattgcctggaaacccagaccccgcaccccctccccagctttccttcttcatggagtttctatttcagaacaaggaaacagatacccccaaaacaattaaagaaataaatctataattacaaa

SEQ ID NO: 234237 - DNA, 455 bp, Homo sapiens
gagtgtatgtttcacacactcatcaatggtgccaaaactagtagttgaaaatttgatggggaacagagggtttgcatactctcaaagtatctccctgcagaatatctattcatgagagaaaaaagtaactttattgcagaaaaaactggcagattccaatttacctaacccatgatcaatcatggaaaaaactcagcccacttgccttgcaatgtgatgtattggggactaaacaccacttatattcctgccaaaaatctacaaactgagtctaatcatgagaaggatcagatgaatccaattgacagaaaatgttctcaaaaaattagtattggctgggtgcagtggcttatgcctataatcccagcagtttgggagcctgagatgggaaaatcacttgggcccaggagttagagaccaacctaggcaacatagagaagccacttctctaccaa

SEQ ID NO: 234238 - DNA, 860 bp, Homo sapiens
atgcccagggttttcatgcatccttcccgtcattgcacatttgaagccagaacatttgcattttttaatgcttgctggattcaattttacattccaaggttaatccctctgctcctgagattagggaaatgccccttactccttgctcttttctttttattttgaccagagcctgcatgaaaagatgctcaccaaatggtaatcgagcatgtaaacgaatgaatgcataagataaatctggaggaaagtttgagaccagaagaacgtgtgaggacagcttgtatgggaataggctctgtgatgggaggcttctctgttgtcctgaatggcctggggagtgggatgggtgcgctgcaggctgctttaggactgagctcaagaaatcattttaaagtcaaactcgtaataatcactcttgagaataattaattagcaaggaatttgtgactgggaagctcagaagtctcaacagcaactctgatgggaggtcaatctttgttacactgaaacgccatggagcagttggcccatggagctgacccgtaaaactcacatgtgcccatgtaagttttctgtttttataccttccttgtcttcagcaaatcatgagaagcagcttgttgacaccccagtgtggcctcctgttggtgctcatgaccaccattgtgttattgaggcacccctgaacttccttccctaaacttggaagccttcctctttgagaagtagttaaaaagaaatactgggtgtggcacagtgactctaacctgtaatcccgattctttgggaggctgaggccggacaatcccttgagtccaggagtttgagacctgccttagcaacacaggaagaccccatct

SEQ ID NO: 234239 - DNA, 701 bp, Homo sapiens
agagacaattaataataatagtaactttagcaccccactttcagtaacaggtaggacaatattttatggtaacaaattaggtaatttagatgaaaggacaaattcctagagactatcagttactctgctggaagcagtagcctgaatagacctatagtgagtcaagacattgcgtttgtgttacagatctccccacaaagtcgctcaggctctgatggcttctctggcttctaccaagcacatgttattaatagacacttgttactaacacacaatcatcatccctctccttgcataattgtttccatgtgttaagctaccttgtgacatgtatttatgcacagggagaattgtaccctgtgctgagcttgtcaattagtacatcagcgtttctccacagtcttcattatcttcactgtctccattaggatcataagagtaggctttgtaatgattacttagtgactcttttttttttttttttgagacaggtctcactctgttgcccaggctggagtgcagtggcacgatctcggctcactgcaacctccgcctcccgggttcaagcgattctcctgcctcagcctcctgagtagctgggactataggcatgcgccaccatgcccggctaatttttgtatttatagtagagatggggtttcaccatattggccagtctggtctggaactcctgacacatg

SEQ ID NO: 234240 - DNA, 344 bp, Homo sapiens
caaaaggccccagccttgacccctgcctggtcctcgcttttgcttgcctgctctcccctgcagcagtgccctctcctgccctcctgggccccagctcacattcaccctgcctgcttcatggcttctccccgccaggaatgaccctcccttccaaatgggcttggggtggggggtacaatctcaaaggcagtttcctccatagagttcccaggtggaccactaagtctcctgctttggctgggggcaccctaaagggtgattaacttctctcagcctcagtttcctcatctgtgaaatgggaatatcagtgcataccttcctggctcatggggaataacagaaaa

SEQ ID NO: 234241 - DNA, 477 bp, Homo sapiens
aatttctatttagggaaatcctttttgccaaaattcttgacagttggtgaattgtgcttcctttaatttatttaacatcagttatttttcttgttttgcttgatacatgaattgagaataaactttaagaagacagaaagaacaaaatttattttctgtgacacacaaaggaaagccattctataattcttcaatgagattgcattggtcccaagttaccttctctgggttatcatacttggcggtctctgaacatctagatagatagtgcaaaccagtatacaaagctcaaggacaagaaaaaaaaaatgattcatgggacgagcagaatgatgttgagtctaagtctaaaaacaaccaaagcaaacaaacaggtgttaatgagttcatttgggcccaagtttgataaaggcctaagtacaaagacaaagaaaggttacacatattgaaagatatctaaaaatgataccaaggaag

SEQ ID NO: 234242 - DNA, 426 bp, Homo sapiens
tgcttgttaacttgatgcacatatctctctactttagaagaaagagcatccataattagactcctacttttttttcatgccctagatagttaaagcctatcatctttttaagaatacaggccgtctgctttctatacagtaactggcttttattaatgatgtgtgaattaggttttcttttagttggttttcattttaagtgttctaaaatgccctctccagccacttgagtatagtggtggacagctggggctctggacctacgtgggttgtattctggctcttcgagcttcttaactgggtgaccactggggcaaggtcctaaatagcctttctgagcctccagtttcccatctgtaaaagaggtaatactccactcttctgggagtgattgtgtgtcttaaataagaaagtatttgtttttta

SEQ ID NO: 234243 - DNA, 236 bp, Homo sapiens
tggggtggcgagcacatctttaggtggcagcaaggctatatctgattgacacagatctgaagtctctaacaccatattgctgttgtcctgaattttctaacttggagaaatttaaggatctcctgcattatctaggcagagcatatgttgaggttgttttgccagttgttatcagtgttgaagaactgctcctgtaagcaaactgttaaaagcattactaccccatatgcatctga

SEQ ID NO: 234244 - DNA, 488 bp, Homo sapiens
tgtattcctagatctcatctgttggtgaatattggtagcagtgatgaagggatgattcaacaacaaaagttctggagagaaaatagacatctccctcctcattcaacaccttcagtcctatggccataatcctcccagttagaaggcatttggggaaataaggaacataattagcatttacctatacagaatcacaactaagtgattgcttactactttctctctttttatgccttcctatttctttccctagtgggttcagcacgggaaaagtctggctttgtatcatcccagagtcatggagcagatttccatactgacctcaaagaccatctgatgaaaacatgatcccttttgttctatagggatatataaaaacattataaatcagcatcttatttgttcatttatatcttccatttctgtgatgtttgacagttgttttgtcgatggcaactaccatatgttaaaaatgagcttctggaatg

SEQ ID NO: 234245 - DNA, 361 bp, Homo sapiens
cagcctgggcctcccaggagcctggccacactctcccctgcagaaccctctcctctcctccaggcacctgcccctctgctgagcagcccaggcctctcccatcctcactgcctggctgaacccatgagcagcagatttttggacaccaagagctgtgtttccaagcatggcgctaaagaggatgggctggcccagaaccatcctgagaaccaggcccagagacagctcaagggacagaagcattcagggcccccacagcagcacatgaacgtgaacatcagtctcaggatataccccaattccggaaacacaaatgtgcgaaaatgtagcctctgactcaaaggaacatggtgcttccaga

SEQ ID NO: 234246 - DNA, 293 bp, Homo sapiens
gccccacacggtggtagaaaggatgcagagccctccccacctgtgtgtgcaggatcagaagcaagtccccagcatggccacagagctggcccatctccagggggatggccaagcctaggtgtgctggacactctcatctcatctttgtcactgttgcaggctcctgttcagaccctccatggtctgagccccctggaattgattggggacagatgatgccagtgttcattgagcagaagtactggttttgaattgttaacataaagaccatccctatttagaattaagccttt

SEQ ID NO: 234247 - DNA, 302 bp, Homo sapiens
gggcttgagaaaaaaagttctcttcctttgggttaaagtcttaaatgctgagcccgtagccagcaaccttaaagactactcgggtccagttcattctatctggaggagtcacttgggaattgaaaacacaggaaaactttttttctggtccatgaacaaacaagaacacttaactgaattagacacaaaactaagtatttatggttgtcatcttaacaggtttcaaacaggcttcattttaatttaacataatttcaaaattatagcaaaatagtcaataaaatacgaacgtgcttaaaaaa

SEQ ID NO: 234248 - DNA, 431 bp, Homo sapiens
atttaaagtggccccggctggcacagtctaggtggctggcagaggcacatgcggaccctgcctggagcctgccctagtgacgctgggtgggtcagtctccttgcaagatgtgagcagcatccctggcctctatccatgaggtgccagtagcatgcgcgggtacatacacgtgcatgcacacacagttatgacacctagaactgtctcaggatgtcacaatgtgtccctggaggcagaagtgtccctggttgagaatgagccccagaggaaacaaccacactaggcctcaggattttgtgttgatcaagttccaaggaaaatgaatatctcagtcggccgcggtggctcacgcctggaatcccagcacctgaggccaggagttcgaggccagcctggccaatgtagtgagagaccccccgcatatctacaaa

SEQ ID NO: 234249 - DNA, 466 bp, Homo sapiens
cataccttgtagatatggtgggttccgtgtcagaccatcacaataaagtaactattgcaataatgtgagtgatacattttttttggtttcccaattcatataaaagttatgtttatactacattgtagtctattaagtgtgcaataatattatgtcaaaaaagcaatatataggccgggcacggtggctcactcctgtaatcccagcactttgggaggctgaggcaggcagatcacaaggtcaggagatcgagaccatcctggctaacatggtgaaaccccgtttctactaaaaatacaaaaaaattagccgggcatggttgtgggcgcctgtagtcccatctacttgggaggctgaggcaggagaatggtgtgaacctgggaggcggagcttgcagtgagctgagatcacgccgctgcattccagcctgggtgacagagtgagactctgtctcaaaaaaaaaaaa

SEQ ID NO: 234250 - DNA, 487 bp, Homo sapiens
tttctcctcgaaggccgagactttttttttttaaatgtagaaaaccagtacaaatttacaaaacacactataaaatgctctcttatctctagtttgcttttttgtgtacaaactgttaacctgaacagttttccggtgcaaaaggtctcaccagaaactttaggaaagatgagtgtgactgcgggaagcagaagaaactaagctgagaaaacccggaaaaatactcggcgcagctgctgcggccttgggtcatctcacctccatctaccccgcgtgctcgctttcgcttggggtggaaagcggggttcaggggctcttttcagcggactgagaaatcgcagaggccgtggggaccccaagtcaggattcccctttcccgacatcaggggtaaagggagcgggggtcccttcgcttcactgtgccccagctctaccgagaggcaggcctctgggaaacgagccggggacctgggggcccgggcggccg

SEQ ID NO: 234251 - DNA, 196 bp, Homo sapiens
gtaaggattcaagcttgaggaaacactgggggccgggaggagggctattgtaaagcatttcttaattaatttcaagtcctccatttttttacagggaccccaagtcaggattcccctttcccgacatcaggggtaaagggagcgggggtcccttcgcttcactgtgccccagctctaccgagaggcaggcctctgg

SEQ ID NO: 234252 - DNA, 286 bp, Homo sapiens
tgccagactattgtctctgagttgtacctgttgaacctcaattgctctgttatttttttcgtgtctctattaaataaatttttcatttcctcttttcctactaggctgctagcagttactcttgttataggtatgcttgcctccagttagccagtctttttttttcctgatgtgctatttctaatatgatgctagttttgaagcttaaattactgtacttgtgaggactgaatgaaaaatagggtcaatagatcctggagggtttgttctaatcattaaaggaggc

SEQ ID NO: 234253 - DNA, 475 bp, Homo sapiens
tatctgctgtgaacttcctcggggctattgcaggagagcttcaggttcaggctggtgagtaggaggagcatagcagttggactgcctgggtattgaactgatttggctacacaagactattttgcatcctgggagtgtttctctacagaaatcctcagccttgtaaaatgggaaattccctcctatgaatttatgcaataggacttttttccctagtgacttgtaatcacattgtttcaatgacgtgaattcctacataaataggttttgtttctgtgataactcttactgatacatcattttcttttactacgctgactttgtaatagatagaaagtccttatatacctttgttgcctttctttttaaaacatctcttacctgtgtctattcatttactcatccaaattgcctttatcctgattttgtcccagacttgaaatgaagttgcaataggcttatatgttagtttggg

SEQ ID NO: 234254 - DNA, 166 bp, Homo sapiens
gatagcaaagttctccttttctcttcccagagcatctgtctgagtaaaggtcaacagaacacttatcatgggccatttccatcttctgggttttctggacatttcctgcggctcagaggcagacagtagcccagaaacaaagctctgacagagtcacccgaggccc

SEQ ID NO: 234255 - DNA, 296 bp, Homo sapiens
tgttccaaaccctctgtggcttccaatcttactgccttaaaatggcttataaaattatatgatgtaatctgaatcttctctgacttcatctcctacgattctcctcactcccatcatacttatttcctttctactctttgaacgcatgaaatatattcctgtctcagggcctctgcactcgttgttccctggaacattcttctctccagatatccacaggactcactccttcagttccctctggccttgactcaaataccagcttctcaattaggccttttctggctgcactatca

SEQ ID NO: 234256 - DNA, 665 bp, Homo sapiens
ctcatcctccaagaggctagcactgggtttttctcaggctagtccagtcataatatcatggcaatcacatagcagcaaaaagaaagcataaatgctcaggcatcatttcttcttgaatcgagtcagctaatatcctgttgcttaaagaaagtctatggccaagccaagagcaagcgtaggagggagctacaaagttatagggcaaacgatgtggctacatggaggctattaattggggtgctaatgaaaccaatctaccacagatggcatggatccactgcatatggaagccaccacctttcaggaagacctccccaactggacttttaaaatagcctttctctccagatgccctacctatcatctcatctgcctgttaagaatgggtacatctgggccgggtgcagtggctcacgcctgtaatcccagcattttgggaggccaaggcgggtggaccacctgaggtcaggagttcgagtccagcctggccaacatggtgaaaccttgtctctactaaaaatacaaaaattagctgggcatggtggcaggcacccataattccagctacttgggatgctgaggcaagaatcgcttgaacctgggaggcggagggtgcaatgagcctagatcgtgccattgtactccagtctgggcaacgagagcga

SEQ ID NO: 234257 - DNA, 593 bp, Homo sapiens
aatacaccctttttaaccctttataatctgtacacagttacccaagtgctggagtaatgtggattccagacatttaaattaaaaacatgtagaaataaaaacttgttcatcccagctggaagcttcatctgaatttataggctatccaagtgaaaagatatttttgggagtttataaaccaaacattaacattataatgtcttaactttttttgtatatcacatcacagattataggacactttgacatattatctcagttgatcctcacaggatccgggactgtggctcagaaaggttatgatttgcttaaagtcacacagcaagctgtattcaatacccactgcagtccatttatttacatatctgtctcccctactagattcagagctcatgacgcaaacaagaccacaatctacgccttccattcccagtccactgccgttagatgatgctggcttagaaaggagtcagggaaatgtgtcagcttcctctttcatggtcttggggaacagggaaaggggtgagtctcaccaaaaatagaaaacaagatttcaggaagctcttttaagtggtgccattgcaaaagtaaat

SEQ ID NO: 234258 - DNA, 509 bp, Homo sapiens
gttttgttttgagtcttttttgctcagctcatattgtcagatagagttgtcctgccccttgcctcaacttttgtggattaacagattgaaaacatcttctcatgactttaaaacttgttaaaaaatactttgttgctatataatctctctttgtatggctcagcaacaattcaataatttgggggaggacattttaggttgatttcaggttttgctactgtaaatgatgctgttgtgaaactctttgtgcttataaccttgttcacattttacattatttgcttagaccagattcctagaaatggggttactaagtgagagaatgactgttgttaagaattcctgtaccgtgaagcatcccgtcgtggcaatcacattcctaccggcctggctcagcacagcctgtgttgcctctatgggctgaattttaaaagacacaatttgctttctttttactatcaagaagttcatgtttattgtggaaaatttagtaaatggaaaatgtaaga

SEQ ID NO: 234259 - DNA, 1024 bp, Homo sapiens
cttggctgtgctgtgctgtcagtggcatggcggtgccttaggttcccagagcctctcgccctgggctccgtcttgtgggtgtcctgatggctgtgggctgggttctgggcgggttgctggtatggatacaggaactactgagtgaataggtgtctcagagccctaagggtctccagaaagccggggtgtctgtgtttttaaaagaaaacctatttatgttgctgtgggtctccgccgtccctgtgttatagtacataagaacctttattctcctgtggttcagagagcaccccgacatgtgcctgcagctgcatccccgtaccacagtgtgggtgcaagacgctgggtttgtcctttgtctggtgaagcctggctagaaggggtgggggtggtagcccctgccctctgcagtgtccgcatccactggtccctgagcagcatagctggccacaccctcatgacatgacaagactgtcactcagtcactattgggtctatgaagggcgtcaagtcagaggaaggtttttatttttaatcaaataccacatttagctctatgtcataaatattcagaaaactatttttttaaacaaggcagaccaaaaatgtctgctagctagttggtttctatacaaatacatattcgaatgtcttgctggatgaagaggccgctcagccggagcctcctgtttcatgcgcttctcttctgaggggcagtagaggagaaagggctgttgggaggggttcagcccgctccttggccaggggatcccagccaccttctctgcaccaggccctgccttgagggacctggacccccaggtggcttctggccaggtgtgggtgggtgggaggggccctgtctgtgctccgagtctccgtgcgtgcaatgatttctctacctcatctgtgtggcccgtcccagagggactgtggagaatgtatttatttaacagctttgtgtcacagaaccagaaacaaatggaaacattaaataaatgtattttaaattataaaaaaatct

SEQ ID NO: 234260 - DNA, 488 bp, Homo sapiens
catgctgctgccgcctgagcgacgtgtgtggggaagaacttggagtgccacccccagaatgtggcgtccacctcaccagaccgcacgggtgagccctggactgcaaggtgcatataacacaaggtttggacacacctggagagctcgggccaggcagggccacacctgtgagcctgagctcatccaacaccgcccggagctcggggaccttccccatcccagcacctcctcaccgctgtgcccgtctggccagtccctccaagcacccctcggatgaagttgcgccccacactgcagtggggctcactctccacagcgcctgctgcgttgcacggggtgtgacaggaaggaccctgctggggctggcggggccgtacccagagcctccctgtgcggtttctcctcctcctcctcctctccataagcaccgggaacaaaacagaaaaaagtctttgtatagtaataaagtctgcagttcacgcacccat

SEQ ID NO: 234261 - DNA, 386 bp, Homo sapiens
cacgcctgaaatcccagctacttggaaggctgaagcagaattgcttgaacccgggaggtggaggttgcagtgagctgagatcgtgccattgcactccagcctgagtgacagagcaagactgtctcaaaaaaacaaaaaaagaaagaaagaacgaggtagagggggcattagatcacgtgccactttgtttagatgctctcattttcataacagaaccttaaactaagttcctcctggttggtatacaaagcgtataaattaatcaacacctcaacatttctgcccttaggttttggcccgtgaaaatgaccttgaattctctaccaagtgatagttatcaagtgtgctgtaatgagaaatgttgttttggtaggactgtaaaagac

SEQ ID NO: 234262 - DNA, 414 bp, Homo sapiens
agggtgaggtggggggattgcttgagcccaggagtttgaggtcagcctgggcaatgtagcaagaccctatctcttttaaaaaaaaaaaggaatgatttgtttatactcttgcaaatggatgaatctcaaaataattacaccaagtgaaagaagcgagaaaatatagaatatataccatatgattccatttctggaaaatgcaaactaacctacagtgacaaaaagcagaatagcagttgcctagggactgggattgggggaggtcaggagagattacagtacgtaggaaaactttggaaggtgatgagtatgtttgtttcttgattgtggcaatggtttcacaggtgtatacatatgtcaaaacttatcaaacttagaacattttcttccatgaaattaaaaaaacataaaatt

SEQ ID NO: 234263 - DNA, 308 bp, Homo sapiens
agttgaagtccaatatttccttactgattttctgtctggatgacccatccattattgaaagtaggatttttgaagtcttctagtattattgtgttactatctattaatgtcttcagatctgttaatattttctctgtttatttaggtggtctgatgttgggtacatatatatatttacagatactgtatcctcttgtggaattggcccctttctcattatataattactttctctgactctttttacagtttttgatgtaaagtctgccctatctgataaaactttagcttcctctgctctcttttgg

SEQ ID NO: 234264 - DNA, 538 bp, Homo sapiens
aacatagataattcctatttctgacttgaacagttgagaatgttgacaaatgcattatttcatccaataatttcttggactggaaacaattatatcatcatgttaattgtctgttattaagaagggggttttctaggttgcttcccgcccccatttgttacttgtatgaatttttaaggcttatattgatgagattttcatgtaatggaggggagaaattttttcctttttaacatgttcatgtaaaaggaatttaggaaattattttaatcttgctgggagctaagacaaaacacaaaacaaaaacactgcagaacagtttatggtcccatggacaaatgttcagtctgaacacaagtactagagaagaccttggaaggctgaggtcagaatgggttaaagtagttgagttcatgggcaaagggggacttggcatgttttcacacagttaagtataaatgtataatatgaacagcactataaagacctgggggagatgggctttggggggtttgtttgttttcttagaacatgttac

SEQ ID NO: 234265 - DNA, 703 bp, Homo sapiens
atgtcatgcctgccacgtggtctgcactccagaagtacttgctattgctgttattgaaatgaaagatctcccttgcacatcttcccctgcccggccacattgtgcactttgaaaaggatatccttcacattcgttttccagaaaattgaggtcactgacttatttccttcttgaaccctctaccctccagtccccatggccatccccactccccccaatcccttgggttaagtcacagcagaggcatgtacagagcatccctcgcaaacatcagttgcctttctgtctgcagcaggcctgtttgattttggcttcttatctgatgtagggaagaagccgcactcctctgagccttgggtaggccagttgtgggctggcccgtaataatacaattatgaaggttaacaggaaaaagtggggtccaggagcaattccaggcagctggcaggcctgctgaattggaagcgccccaccaatgaaaactgcagcaagaagcaaattaaacctcctatctgccatctcactctcttttctcccctttcctgtttggacttgaaaggcgattggagccagggccctgacagttgacggaagtgctgcaaggagagagtatttatttacagtgagtcgtggtgatgcttgttcaggatgcggtttcttgcaggaagttctgtccccacccccgggtttgatcatttctcca

SEQ ID NO: 234266 - DNA, 386 bp, Homo sapiens
aaaaaatttttgattacctttctagtagtactaaaatgcaatggggtaaactgctggaaataattataaaaattcaaagttaagtcacaaatgattaattttacggcattaatatcaagagttcaagatttcaagattttgggagatacagtatttatattccttttttttttttttttttttaagagtctcactctgttacctaggctggagtgcagtggtgcgatctcagctcactgcagcctctgcctcccgggttcaagcgattcttgtgcctcagcctcctgacacagctgggattacaggtgtacaacaccatccccggccaatttctgtatttttagcagagatggggtttcgccatgttgcacatgctggtctcaaac

SEQ ID NO: 234267 - DNA, 813 bp, Homo sapiens
ccattctgattgttcacttgcacttcataagtgcctactgtgcacaaagcctgggcttagtctccatggggactatgaatactttcactgtgtggacttatccgagcttcccaatcatacctgctggagagatttctctccatttcttttcccatataaggaaactgacactcaaaattgacatcatttgccttctgctttacatctagtgaccaagtgtggattttaattcaggcccatctgatttcacaatctaggcctttctactgcacgtggcctgggcctaggcttaccacggtgtggagggtctggagcagaaaatgcttggtggtcctcctgagcagggaattccatcctgctgtcatcatccatgagtaggaagtttcaatagacttcctggaacagtgcaataggtactgtaggtactggacgaacctcctcctgccgaggacaggtaggagaggtaaatgtaatacacaaaagcaaaaacaaaaagcaactacctcaaaggcatcagagagctagcaaagtagaagagatttaccaggcaagatccaggagaacagaaatccagagaggttaccccaatcccatctcctctaggagtgtttgctgatttcaatagaggtgattgagagactgatcaagacttttgacagcctctctgggtccaggacacaaaaaaaactgatgttcagagccttccaaggggttgggaggagggcctcaggtaaatctcaccaactgggttaagacctcaaagagctgccctaggaataagggagagatggaagcagagcagcctcacaggga

SEQ ID NO: 234268 - DNA, 944 bp, Homo sapiens
caggcctctaagatagccattactccaaatttaagtttactttcccatatactgaatctcctacaataatggaacttaaaatgcacactggtgattggtaagcagttgtgaacagagagaggcaaagtcatattttattaatttcaagggcttagggtataatttgaattctttttcaaagtgtccggattgtttttcagctgcttttgaagaaatgaatctaactcatctcagaagtcttgtcaagtaaattcaatagatcaacgtatgtcgcagcctatggaatacttagtataaaaattgaagagaaaaccctcaggttgctataaaagtgctgctttattaaaattaccaaaatctcactatttctatctaaactgacatactacagtttctgtctaaatacattgctctgtattttattaatttgtatggcaataaatatgtgtcaggaacagttttaaaacttaatcctcaaatactgcttccttaaatctatttatttatttttatttatttattttgtttttgagatggagtttcgctcttgttgcccaggctggagtacaatgccgtgatcttggctcactgcaacctctgcctcccagattcaagtgattctcctgcctcagcctcccaagtagctgggattatgggtgcccactgccacacccggctaatttttgtatttttagtagagatggggtttcaccattttggccaggctggtctcgaactcctcaggtgatctgcccacctcgacctcccaaagtgctgggattgcaggcatgagccaccacacccagcccttaaatgtatttttgtgtgagtgtatgataaaaatcttggatctggaacaaacccaaagattactctttttagttacctttttaaataaactctttatttatctttttaataaactctttttagttatcttttgt

SEQ ID NO: 234269 - DNA, 439 bp, Homo sapiens
gagatgacatttgggaggggtgagtgactcagactctcagggtctctgacgacgtccagatcagtcacttccttgctacacatgccatggactgtgaatgagaggagtcccacgtccaggtccaacccaggctcctccatgtacctcagtccaaggctgaccccagaagcccttcaatttcaagtctaagaatgagggtgccctgataaatggcacacccaagaagggcactcaggcagtttggtggggctaggagccagtgaaggctgtgaaaggggtacagtggcccagcctgtcctaacagaagcatgaagatcaggatgagggtggggtggtgccgctctattcggtgctggcaacatctgttccttcagtgagtaggtctctgaacacttttttttttgagactctgtcaaagaaaaaacaaaaataaagaaag

SEQ ID NO: 234270 - DNA, 369 bp, Homo sapiens
catttccccataaactagaggattaatttagaaacatgaagaaccttgtcagcctttggccaattccttttgtttgtggggaaacaaaaacaaattggataggaaaaaaaaaacccagaaagaaaaaaaaaaaagaaaaaacagatttgactgttgttttgtttttacatacagatgttatatgaccatgcctgtaaaattatatgtttggaaaggacatatttaggctctaagaaatttacacaagatgaggtcttttaaataaactatttcctggatggtggagtttttaaaaacttaagtgctgctgatgatattataattaagccacccctcctacctctcttcccttttttgcaccattccctg

SEQ ID NO: 234271 - DNA, 511 bp, Homo sapiens
cagctttgaatttgatttatattgcacatatataataatgtacaccctgtcagcctttagatttacttttactggcttcctgggtttccaaatgtgcttttgttacttttgctggtctttagggtgaggcctgcttggtggtgtgatgaataagggcatttcctgcattctttgtctaccagtatattatcgcccctctatctatatgtattatattatacaaacaaatggttgaggatgagtacacttcttgcaaagccagtatcaattaaatcctatctgcacttcgtttaaattcaaaagtaattcacagagtgactgcctcagtcaatttcatcctctcagaagagaatgaagcctgaaataagatcatcatcatatattgaagatttttctaacacatgggaaaagtcacttcttcaaaaggcttcataaagtctggaaaatgaaagtctattatttaaaaattccatgctagcctttaaaaagaacccaaaatttagaaaaaaaa

SEQ ID NO: 234272 - DNA, 412 bp, Homo sapiens
ttgcccctgaccagtaggctcaaggatggctcagccctatctcccgggctccagggacacggctgactttggccaagtctgcagagcccaagaagatgctggcattcttagatctactcacaaaagaaagtgttgtaattctcgtcatcagggacatgagcgccctggactactggaagaaaattgagcatcagtttcttgagcttgagaggtgttctgtgaagacagagggaagggcaggaaagcaacagagaaaacctgggaaaggccttctatctgctgcttcttttagagtaagggtgagggagggctcccatcccctccctagaccagggtgtccctgtgatttttaaattcactatctagctgtccctatcccccctcccaaaacacaattgtgatagtgaattta

SEQ ID NO: 234273 - DNA, 393 bp, Homo sapiens
acagtgtcagagttggttgctgcagagagcacatatatttcaaattgctgctctgcatgctacgaatcacaataacatagttactgtttgtcagtatgtgtgtgtgtgtgggcaccacacatattgccctggcatcttatttatttctctcattaccagtgcatacttacctatcatgttaaaacaagaaaaggagaaaagtggactttatatgtaacactttagaggcatagtggaatgtatattattattaacaaattagatagcaaagcattatatttgttatgctagaagactatggctgtgctaaaagaatataatatatgtcaacattgccagactgggcacttctcacaatattcccaaccaacaggaataaaactaaaggtcaga

SEQ ID NO: 234274 - DNA, 1632 bp, Homo sapiens
  misc_feature (426)..(426): n is a, c, g, or t
gagtgaccacaggtgtccccgtcgtgctcacctgcaccggctgcgaggagcagggagctcctcaaagagctcaggaacggacaggacatggacacagtggtctttgaagacgtggttgtggatttcacgctggaggagtgggccttgctgaatcctgctcagagaaaactctacagagatgtcatgctggagaccttcaagcacctggcctcagtagataatgaggctcagcttaaagccagtgggtctatttctcagcaggatacttctggagaaaaattatccctcaaacagaaaatagaaaagttcacaagaaagaatatatgggcctcccttttaggaaaaaattgggaagaacatagcgttaaagacaagcacaacaccaaggagagacatttgagcagaaatccaagggtggagagaccntgtaaaagcagtaaaggtaataaacgtggaagaaccttcagaaagactcgaaattgtaatcgtcatctgcgcaagaattgttgtactagtgtaagacggtacgaatgcagtcagtgtggaaaactcttcacccattcctcatccctgataaggcacaaaagagctcactctggacaaaaattatataaatgtaaggaatgtgggaaagccttcagtcgcccttcctacctacagacgcatgagaaaactcacagtggagagaaaccctatgcctgtcaatcttgcgggaagacatttcttcgttcccactctctcactgaacatgtaaggactcacactggagagaaaccctacgaatgtgggcagtgtgggaaaggcttcagttgtcccaaatcctttcgcgcacatgtgatgatgcacgccggagggagaccgtatgagtgcaagcactgtgggaaagccttcaggtgtcagaaatcctttcgagtccatatgatcatgcacgccggagggagaccgtatgagtgcaagcagtgtgggaaagcctactgctgggcaacatcctttcaacgacacgtgagaattcacaacggggagaaaccctataagtgtggaaaatgcgggaaagcattcggttggccctcatccttacacaaacacgcgagaacgcatgctaaaaagaaacctgtgagtgggggcagcgtgggaaagtcttccgcgaggcctcgcccctccacagatgtcaaatcacaaactagagagaaagtctataaatgtgaaacgtgtgggaaaacgtatggttggtcctcatctttacacaaacatgagagaaagcacactggggagaaacctgtaaatgcagccagtgtgggaaaaccttcaggcgggctttgctcttccaaaaatgtaagaacgcagattggacagaagcccagtaaatgcgaaaaatgtgggaaagctttcagttgtcccaaagcctttcaaggtcatgtgagaagtcacacaggaaagaaatcctgtacatctaagtaatgggggaaaacctgtgcaaattaattcacatacatggttcagaaaattcacagcaggagggccgggcgcggtggctcacgcctgtaatcccagcactttgggaggccgaggcaggcggatcacgaggtcaggagatcaagaccatcctggctatggtgaaaccccgtctctact

SEQ ID NO: 234275 - DNA, 466 bp, Homo sapiens
tcgcaagctcttcattaaaggcatcagaacacgttctaacaagaaattttcagcttagagtggttgttctgccattctgccactctccatgttaaggccattccagggagggtagattctatgattaaggcgattaaggtaatcagccaggctgactcaaacactcaatctagctgctgccagtggacctgctggtaatcaccagaagagtatgcgttggaggagaatttctctctacaagtactcttgtgtttgttaaagttgaaactaagttggacaaagaactgtgcttgaaagtttccagctctataaattgtaacttccataaaatgtatccctgactaacagtcccctgaccacataccaggggttatgcttctggagtctgtacccctttctaataaactgctctggacacaatgaaccctgaattaattgttgtaacaggttaatggataaggtaaca

SEQ ID NO: 234276 - DNA, 661 bp, Homo sapiens
ggtgggaagtcagcagtaattaatgtttcatattctctgcagtgcctagaagaatgccttacaaacacaaaggaaaaacatcctgtaagaaaaaaaaaaaaaaaaagaccttcaaaattagctggacttggattcagatccacccctgtcacctctagctgtgtgaccttgaagacttaacttctctaactctcagtttcctgattggcagaatagagcttaacatacagaagacaatgtatataaagggtctctcaccaagcctaaccaacaggaggtgctcaacaaatgtttatacattagtatgtattccacaatgaagtgcagtgtttcaaccctgttcctacaccttttcctactaatgctgtttgtaccaagaaatcatctaaaaaattagatctctgtcaaattcataaaaaacaaaactgatttaagacaatgaaacaatggctaaaacaacatagaataaaatgcattaactaaaaagtggcagaaaactcacatctccttgacaaaaatttgatctgcagaatttgagctgggaaatttgggcctggtagaaataaataccacaaagcaaaagagaaaactaccatacaactataaaagttattagtaaaattaacatgtagcaaacaatgaacaatgaattctaatttac

SEQ ID NO: 234277 - DNA, 500 bp, Homo sapiens
aatgaggtctagaaaactcaaaggctactgacagcagaggggatagggcgtatgtgggtaagagcagatattcccacccccttgggcaccccattaatatgggtgaaagccgctttgacacccatggaaagcaccctgtcgtagtcaccagactcagggatacaaggacggatgaaagaaagagggatgcctcactttctcgtcctcatataccctggatattcactaggaagagaagggaaactgggatgagtcgctcccctctttctagatgagtagccattcatcttcagtctgtacccctttggaatgcaccctgcaaccctgggactcctttgaaaaaaacgtcccctgaaaagaaaagctttatagagggattaagtatatatggggggggactatgttttacaataattggttgatggttcaggaaacaaaaaaaaaactgttactgtttcaacaatgagcaatctgtaaaataaacacatttttgcatgaaa

SEQ ID NO: 234278 - DNA, 513 bp, Homo sapiens
cagagccctgtggctcccaggagcctgtgagggctgtcaacccacctggccccttccttatatgggtgtggaagctgaggcctggagggagacagcattttccaggggcacaaatgaggcgtggaagggcccaggccagcacctgagtgtccagactcctggctggtgttctttccagaactctccgctgaggggcctcgcttcctcctcctgtgaattagtaacagggcctgcccatgtgtctccaagggctcctatgaaaatggcaaaatgtgacaggaacatgggctttggagtcatagagccctgggtcccacgctgtaagtccgtgccaaccagcagcactttctgtgatgacggaaagcgcctctagctgcattgtcccatgtggtgccaccagccaccatgagatgtggccagcgcagttgaggaactggatttcatattttattattaatattttattattaaatattaataaatttaataaaataataattattttattaactt

SEQ ID NO: 234279 - DNA, 729 bp, Homo sapiens
gtaagtggatataagactgtaaaggaagtagaactgacataatttggtgtctggattgatggtgctgccaaccactcataaggatggctgggaaagagcacctttgagggtgaaaggacttggattgagatgccccagtgatattcaagcccagatgtcctctgaagtatctggaagttctcctcttgggatgagagaatatggcttttcttctttgcattgaatatgtaccactgtcagtggtttatggctcttctaaggggtgtcccatgtaatttgttccgattatgggagatgggtatggactcaagataaacaaaatcaggcactacctttgaagcctttatagttattttgagggttatattagtattttacaattacattttatcaaataccagcttgtagttcaggtaacgagtattatacatgttcagacaaggcttggtggctcatacctgtaatcccagcactttgggagcccaaggcggatggatcacttgaactcaccagttcgagaccatcctgggcaacgtggtgaaaccccgtctctactaaaagtacaaaaattaggtgggcgtggtggtgcacacctgtggttccagctacttgggaggcggaggtgggaggatggcttgagccggggaggcagaggttgcagtgagctgagagatagtgccactgcactccagcctaggagatagagtcagaccttgtctccaaaaaaaa

SEQ ID NO: 234280 - DNA, 294 bp, Homo sapiens
gtatttatgttagtggggggttggaagctgggtgttaaaacagcttattatggagactgaaagataagtaaaatatctttgatattctaaaacaaacctttcaaactgattatagaaagatatgtagcattttatactgggggaagtaacattcctgtgttaagagtccaaattaaacactttttatcttaactcaaatatcatctaatcatctataatactgtgaaagagaatagtaacaaattcaagctatgctttacagctcatatagggctttcacaattcatcccttca

SEQ ID NO: 234281 - DNA, 443 bp, Homo sapiens
aatgctgtttcctctgataataccttctcccggatatctgcatgccctgctccatcatttccttctgacccaaaggcacattatcagtgaagtccctcccaaccactcttcaagatggtactgtctcacttgcccttagtcctccttgcccattagtaagaaatgaatgcataccaatcagatgtctgtgcagtaggtctggagggaagatacagtgtctccgctgaaggaaacctatcaaatctgaaatcctgcaccgtctgacaggcgttaatgcattgtaggaaaggaagcaaaataatctctttaaaaggataccccataagcctcacttatttagcttgattgaaggataaatgttgcttatctttcatatgtttttgctatttcttttctcttattttagaattaagtactgggtatatataaaaggttacttatga

SEQ ID NO: 234282 - DNA, 447 bp, Homo sapiens
agaagatggttctatgggcattgcctggttctttctcttgcagctgtcggaggaaggggagatcgtagatttgctgctgatgaaaatactcagtttcctgggcattaagtctaagagagaggagcctggaagcagcagggagcagcctgggtctctgtcccagactcgccactctcgaccagcacaagctttgcccaaggactaagctgttcgtccacacgccaccatctaccagtggggacgcccagggcctcgggcgtacgcttaccagcgactctatagtctctctaggtcatagctttcatgtccattgaagaattaccaagcccagcaagtaaaaaaaattacaataacagagatatatgtaaaattgccaatactatgagagcttctttgttcaaatgtatttcctcttattataaataaaacaaatattacatggagttt

SEQ ID NO: 234283 - DNA, 913 bp, Homo sapiens
cccaaagtgctgggattacaggcgtgagccaccgcgcccgaccgagaattttctccgttcagagcttcacttgctatagagagcctcaagtcactggttctcagtgtgcatctattggccatcagagggtcctttagggatgacccatctgtgcttaatttactaatgacagtatagttgctgctatttattgagtgcctgccatgtgcaagatgctgtaaggtacagtgtagtttgttttgttttgttttgtttttgtagagatggaggtcttgttgtcttgaccaggttggtctcaaactcctgacttcatatgatcctccctcctggacctcccaaagttctgggattacaggtgtgagccaccagactcggccagtgtagtatttttaatcttcacaataatccttcttgggaaacatgttattgtcctcattgtccagattagaaaactgagtgtaaagtaagttaaattatagtcctaaggttgaatgctaataaagacagaatacaagtccaatatattggactcaaaagccctcacttaactatggtctccatgggcttcccttggctctctctgcctttttttattttttcttattgcttgaggccctttctggaaggtaagtctggattatctacttcacactgttttagagaagacttgtggtttccatttaccccttactccctccgctccatggcctttcagggagaacactgtgggtatcatgctgggtggcctggagggtccaagtaacaggaatctagaaggatggaccagatgtgaacaaaagaaagcctgagtaggacacaaaacagagaagtggggctgtaacatctctaagatattacagcttgctacttccactctctttgcaaatgtggtgaaacccaggctggagtcata

SEQ ID NO: 234284 - DNA, 379 bp, Homo sapiens
caagctggacaacaagagcgaaactccatgtcaaaaaaaaaaaaaaaatttatttttatctccatctggaaacttgtctgactggtctttgcttctgaagacatcaggttattaaaaagtcttggcgttccttccttgatgactgcccaaatgactaactaagtttgaggcaaattctttttctttattttttcactattttagttcactgcacagatgtatgaggcaaattcttgttacataactttgtcatataattccagagaatcaacagacatcagtcattaaagtgtttttttttttttcattacaaaggaccaccatatttattaaaatttattaaatagaataaagcaagactttattctagacttttagt

SEQ ID NO: 234285 - DNA, 436 bp, Homo sapiens
ttgctgtatttttatgtaaaagatgttctctctgaaaattatatgattctataattttgatgttgaaatgacagtgacgatcctaagaatcacaaagccgtgcagttggggaggtataagggattcaaggattgcagtaggttggtatggatatcaaaacaccagttactccctgaattcacacagtatctttggcatttggagcaatttgtacttgatcttagccaaaaggccaagaggcgatttttagagcagtttgatgggaactagaacttaacctattgcaacatttgccaaaattttgctatttgttaagtggagattttacttacacctggtctcctggtacacaataatatctaatattcttttcattgttgtcttctttttcttcattttgttgttgttattcctcacttatcctccctgcccctag

SEQ ID NO: 234286 - DNA, 644 bp, Homo sapiens
ggggtcttcctggactatgagtgtgggaccatctccttcttcaacataaatgaccagtcccttatttataccctgacatgtcggtttgaaggcttattgaggccctacattgagtatccgtcctataatgagcaaaatggaactcccatagtcatctgcccagtcacccaggaatcagagaaagaggcctcttggcaaagggcctctgcaatcccagagacaagcaacagtgagtcctcctcacaggcaaccacgcccttcctccccaggggtgaaatgtaggatgaatcacatcccacattcttctttagggatattaaggtctctctcccagatccaaagtcccgcagcagccggccaaggtggcttccagatgaagggggactggcctgtccacatgggagtcaggtgtcatggctgccctgagctgggagggaagaaggctgacattacatttagtttgctctcactccatctggctaagtgatcttgaaataccacctctcaggtgaagaaccgtcaggaattcccatctcacaggctgtggtgtagattaagtagacaaggaatgtgaataatgcttagatcttattgatgacagagtgtatcctaatggtttgttcattatattacactttcagtaa

SEQ ID NO: 234287 - DNA, 399 bp, Homo sapiens
actttgtcctgagtttacttagcatatagaaaggagttacatacacaatgaacattcgaggactgaattttagttgaagtaactgagatgagtaaacaaaaaatgccagaagctcactgcctcctccacccccaccacacctgatgcagtccagaggcaaatttctttgttaatccacttatttgtgttatttttatgtatttatacttatagtacgtagcatatctaagctcatgtctgtcttaggaattggaattttagcaggcagagagatcatcaccttaactctgtggtgttcaatcttttagcttccctgggccacatcacaagaagaaaaattgtcttgggccatacataaaatacaccaacactaatgatagctgatgagctaaaaaaaaa

SEQ ID NO: 234288 - DNA, 358 bp, Homo sapiens
atctgtttttgtgtttcagcctcaggaagagacagcatctgttctgcagagcctactctctagtctgacagctttgacttttagatgatctccctcagtagtccttcattgaaaataagaaaagtcattcatttgtgtgaatttgagcgggggatctgaatcgcatctccaggagcattttgagctgctccgtagggcaagttgcagctgtggttgggagagcagacatttctcccatgttactgcacagctgatgacacaggcaacttcttaccaccaaggataatgtagagggggtacaccctctgttaaccatgaaatgctgcacaaatgtgcaaagggacccaaagaatggcgc

SEQ ID NO: 234289 - DNA, 549 bp, Homo sapiens
ttctcaaggaacacgggtggcctagcctgtgttcaggctctccagcctcatcctccacctgttcagtgcttctgcaaccccacacccaattctagccccagctctacctcccacacacgacatgggacagtaccttcccctctctgcaccacagttcctcaggaggcctaagaacctagagattcaccctgaagacgagaccacataacctggattggaatcctggctctggagtcggttagttctgggaccatctaagttgattaaccctctgtgtgagtaaaatcgggtaaaacatctgctccaagggctgttacattaaataagatgatgagggtaaagctcttggctccacacctagcacattgttagcactctataaataaattacactcagtgcaattctcaggggagttcgtagttaagtttagcatctgcttttcttcctctttatgcatcttgaacgcctgtcccctggttctggtagagtgccaactcttgtcacccccctctttatttcctcatttacactaccttcttctgcaatta

SEQ ID NO: 234290 - DNA, 3156 bp, Homo sapiens
tgaagatatgtgtcatatttctttcaatggataattttaagtgatattaaattatgtcaatagtttgaatagcaatagcaaccattgagctaaaattatgcaacaaatagttgcttgttaacctaagatatttcaacatttttgaaagattagtaataaaacatgccatatttaaaaagccttaatgtgaatcttctctccactgtagttcaggggacactcaggatgctagagtaatgctataaaaaaagccactcagacaggtgcagtggctcacacatgtaatcccacctactcagaagactgaggccggaggatcacttgaagccaggagctcaagaacagcctgggcaaaatagcaataccctcctctctaaatatatataaatatatatatatagataattagttgggcatggtaatgtgccggtagccccagctactcgggaggctgaggtggaaagatggcccaggaatttgaggctacagtaaactatctcactgcactccagcctgagcgacagaatgagactccatcttttaaaaaaaaaggcactgaaatgaccccatcaaatccaaccagctatgccaggctctatttccatcctatttctgaggagtttttgtccttgctgggtttcctttggcttcatacccagattctgcttgccctatataacatggatggtctgtctgtcctttgttcagtacctgctcaagatgccacttgcccagagctagagcccacgaggcaaggggcatctcttctctcactggtcaaaggtaggtggttggaagtggatattctggattcatctctccaggcccttacttctaggaaaacaaacaaacaaaaacaagcagtttctctaaattaatatgttaatataattctaaaaattagcacagaaaaattacccatttaatttataatggttttttaagacatttggaaggaaatatttctttcataatactcaaacacttaaaggttgaacattataaagaagcatcagtattatcagagatttttcaagattctgttaaattctaaacatcatctagaaagttcttgtcttatatctaatacctaaccttaatgtcccctcctttgttaaaacttttcttgactctctctcttcccgtgcctgtacaaagacatgcatgtgcatgggaacacacacacacatacacaaacacacacacacactagtaatcacagcctcccttttgccagcatgtatataacataatttttagcattttcccacattaaagaaataattgaaagcttatatatttattccccaaagtagatatctaattatttaaaagaaaggcttatatttaatgcatctatgttttcagggcttgaataaaagtctgtttagcaaggttttctttgatggaattatttgattcatactggaatctctggttcatttttctgtttacagaagtaagttcagattgtagtatattgcacagattgtccaggtaaacctggttaagactttcaggggaacttatttttgctgctattgtgatgtggaaatgctgttactacttcagtaacactgatataatgtatgtacttattaacaagaaatgtgtagatagtagctccagtacttgaagcatcattaaatttgaatgaattttctatttgtaaatatactctgtcataaataccattgaatatatttcactatgtaataaattttaaaatcaaggaagtaataaatcataacatttaattttaagattaagaatattggcaaagatttgtttatttttacctgtctttattcaaatgttctaatatacattagttccaagttctctattacttctaaatagaatatacatgatcaaaagagtatgcctctttctaaatgagaaaaactttatattataaatccagtgatacggatactatccatcattttgttttgtatggcctaatgtatatcagtaaactaaatagacttaaatgtggctggattttgactgggaatatgggaagaacaaagcaggtgagatcatgtatgtgactaaatatagcgttgatgcttaacgatggcctctgagcatgttagtgtaacttatattttgcagccaaaaactgtatgtatcaagctccaaccatctataataaagtttatggttcagttctaagattgctaaccaagtgatttttttttcagagacgttaaagaaaaagtaccttcaaccaataaattcttaaacatttcatcaaatagttattgaacagcactgtgctaggcacgtgggatgtgaaaatcaaagaacacatgaccctacccatagcaactcagtgataacaatgataaaggactatgctagattccacatcgtacctggagtgggggcagaagtggtacataatccagttagggggtgaagtggaaaatccagggcaagtttcgtggaggaagtgatgcctgaaatgtatctcaaataagttagcagagctaaagaaaaaaaaaaaaaaagaaaaaaagagtagaagttaaagggaataaatggaaccgggtgtagaagggtattcagaacagaagaaattatataagcaaagacaaagaagcaagaaatagtatgcatgtttgggttcaggagaagatggtttgactagaaagtttaacattagaaataaaattattcctttacaaaaaaagaaatacttaaaagaatatgttggttttcaaaacagatatagtgatttttgcttagttgcttatacatcttgaaaccaaaactggagttcagctatttattgtgttcattttagcataagcattacaaagtccttctctagttaatcaggttcacactttgcaactaagaaaatagaagtgggccaggcacggtggctcacgcctgtaatcctagcactttgggaggccgaggcaggcggatcatgaggtcggaagatcgagaccatcctggctaacacctcatctctactaaaaatacaaaaaattagccgggcatggtggcaggcgcctatagtcccagctactcaggaggccgaggcaggagaattgcttgaacctgggaggcagaggttgcagtgagccgagatcgtgccactgcgctccagcctgggtggcagagagagactctgtctcaaac

SEQ ID NO: 234291 - DNA, 520 bp, Homo sapiens
atctagaaaatgctcctttaagccttttttgacgaggaggaggggtgcagacacttgcctgcggcaaagtgaacctggaaggagcggggcgtgtgtaggacagagcccaggagaacgggcagccgggtggccgggccaggaagcagggcctttctggccctttccgcagagggctggataattgcctctcctttctaaaaggagccgttttctgggccgggagcggtggccctcgcccataggctcacgctcgtaattccagcaatttgggaggcccaggcaggcggatcatctgaggtcaggagttcgagaccagcctggccaacatggtgaaaccccgtctgtactaaaaaaaatacaaaaattagctgggcgtggtggcgtgcgcctgtgatcccagctactcaggaggttgaggcaggagaatcgcttgaacttgggaggtggaggttgcagtgagccgagatcgcgccaccgcactccagcctgggcaacaagagtgaaactccgtcttaattta

SEQ ID NO: 234292 - DNA, 2355 bp, Homo sapiens
  misc_feature (774)..(774): n is a, c, g, or t
  misc_feature (1026)..(1026): n is a, c, g, or t
ccacacccagtcctaaatgcagaattattaacagcacaataacaaaaaaagatcttagagtcatatttgaccatgagttaaataagaacctttaaaaaaaagttcatatgaccttggcaagtataaatagaaatgtgacatgtaagaactgggagataatccatcagcaatactggatgttggaaaggaacacaatatgagaataccatgtctaattttgttctatgtgtatttagaaatactcaaaagctagacaagggaaaagaaaaagaatgattagatgtgttgattttaaaacactgaggaaacatcttaaataatttgtatttaggaaaatatatggctcatttaaagatttatcatgaaaattatttgaaatcatatgtgtaatgcaattgaaaagaaaaaataattaaaggaagtttcacaaagctgtaggatctatcatattggtaacagacttgatttatactatactagctattaaatttttctataaattatcatttgtgtatgaagattttttttttgacaaagctactaaactagcaattagagaagtctagatagagtatactgttgagttttttcctcaaactttatcagccttagagaagctaagatgctagataatggtaaattggcaaggtaggcacaatcgggtgatgtgcatagagaggaaggagaagatggggcatgagctcccagaattcagatttggttgccaagtaagtagaaaaagactaatgaacccagagacaagaaggagtaagncagcacactataaaaccagtgcagatcgaaagacaatttcagtaacaaggaaagtgttggagaggtagaatcctaagaggatgtgcccagagagggacatttctgaattaggtcttggatataaaatagtttcaatccaagagtggccgcatgtctggatgacagagatgtaggtgagtaatgaggaaactgagagtagaaaggcagttcatcatgtaaggtgttaaagtgttgcggagaaacggttcttanaggttgagccaccacacccggcctatattgttttgaaagcatactctatatatagttacgggcagaggcacaggcatcctcagcagctgattcaggagatgatggtaaagctagctaactatgaattaaacattcacatatccagtctacctggtccagtaataatacaagcaaatcttgtatttcaggaacaaatcaaggttctcttaattttttggcttatatacaatgaagtaaaaacttgataaacatggtttcaaattgaggaggagagtcttggatgtatgttttaatatgtataccttataattctgcctctagccaaatgctatgtttgcaaaatgtggcatctgttagtttttattgtctgtgtcttctttgtttactataccttgggtaattttgtgttaccaaaaaaaaaaaaaaaaaaaaaaggaagtgtaatgtcagacacacaagaaaagcaaatcagtgttgtaagcttaaagtacaatctcaaaggtcattaccaacagcagggttttttttatactttaaaaacattatgctacatatcattgccattttcatattttggggttttgctactcttatacaatggaatcaatggaaatgtcatccagccactgaattgccattattatatctaaaaagtttctaagatgacagttatcactattttgttttatctccatgctgacatttgaaagaaggtactagtatccctctagccagattgcttagtttttcgttggtaatcaaacaacagttgtactaaaggaaagtaaagctaggacctaaatcagaatcatagttgcctgcatatatggtaacaaggtcgtgtgcatttgctttcacagtgatgagtgagaggatgagaagaaattatttgacatttttctgtggttgaatagaagacacctttcttttgtctttaggtttaggaggagatactaagatactggatgtttatcctatcttagtttggttggagtaataagagagaagaagagggtggactttggcttttcagtgttttttcccctaaagagtgatattgctgacgtttctatcaattttacacataatatgtggctatgaaaccatatatctcacttaagtaacaaagtaatcactttgtctatcactaagtaatagacaaaaatcattgtctattatttaaagccaacaaaacagtgtaacagttttaagttcaataatgttaagtattgtatagaaatatattggaggcaaagttcagttgatgacaattgtgtatatgttactgatgctgtaaattattcttaataaggaaaattgtattatcac

SEQ ID NO: 234293 - DNA, 470 bp, Homo sapiens
gaggcctcgaactggatgagagagagtgcagggaagagccgcacaggggacggatctcccggaagctccgaggttttccataaaggcttaacaggaagcagctcggtgcttgctgatgactctgagcaaaggtgctcgattaccaggaaaagtctcctatgtggatagagatattctctggcggtttcataagagttaactctcaaattgctgctttattcttttatggctacactgtaaccactttaatagaatcaaatcataccattacactccatgactaaaatatttatcaagtatacggaaattgaaccgaaaaaaaaccctatgacttatacagattattttcttcttttatcataaatagaacatatacgtgaagaaacacaaaacacatatgtacagtctagtggaaacgacctgcgccaacatctgtgtagcggactccaaggccaaggctgtgacatcgc

SEQ ID NO: 234294 - DNA, 447 bp, Homo sapiens
tgcactgccacctcagtgaacccagggcctgcaggaggtgacaaacctctccattcttccacaggttccatgaccgacctcagattgaacgttgggatgagcaataaatatgtaattgcataaaataccagataaggccagcacagtggctcacgcctgtaataccagcactttgagaggccgagacaggaggatccctggaggccaggagtttgagaccagcttgggcaacatcatgcgaccccttctctacaaaaacttaagaagttagccaggtgtggtggctcatagtccttgtggtaggctcttcgcctatagtcctagacactcgggaggctgtgatgggagggctggttgagcccaggagttcaaggttacagtgagctatgatggccccaaggcattccagcctaggtggcagtgtcacagaccaagaccctgtctcta

SEQ ID NO: 234295 - DNA, 1263 bp, Homo sapiens
cccactgaggagccatcattatatcctgtacttcgttgtaatagaagaatgcaaaaggaatgaccactcctggaacacccctccccattggggaggaggtccagcctgtctcagagaatctgaagaaattttactgacctcttattccactgggatcatgaaaatgagggctatgtatcaaggccaggttgaagaagtaagctgataaaggtggtgtcatatgtcagtggtacccctggtgctgattgtgggttgcttgtatcagatttcattggtatgagttgccaaactggaaatgaaaggcattagtaaacatgcattcccaccgtatctgacaatttaacagtattgtggaagcactggccaatgtaattagcaagggagagaaatgaagtatacaatttggaaagtgggaggtcaaatgattttcagatgatgtgtattaaacaaaagagaatcaactgagaaaccatcagagataaggtaattcagtaagtggttgattacaaagtaaacataaaaaacagctttcctataggaaatatcaattaaaaattaactagaagtggtagaaaatcccatttgcaatcattgcttaacacacctatgatagaccttaacagaaataggtaggatgtatatgatggacatggtatagccctgccaagggacatgtagagacacttggagaaagcggaacatacagatggtccccaatttaccagggtttgactttacggtggtggagaagtcatatgcattcagtagaaactattgaaaaaggaaaataaatctcaggacccccaaaccactaagccaaatggaactcactaataaatcttgggaccccaaatatcactaggccacaaggaaattccttgtgaacaaagaacagacagaactcaaagtcctctctttgctcaccatgagacaaatgcttatctgattgcttcctttgccatattgtttcactaagagactaaggcctaagtgactattcctgtaaattgtgttttcagtggaaggcttatcagaaactcaaaagaatgcaacgtttgtctctcatctacctatgacctggatgcccccatccccactttgggtcatcccacctttccagatcgaaccaatgtacaccttacatatatttgttgatgtctcatgtctccctacaatgtatagaaccaccatcaggacctcctgaggctgtgtcacagacacattcttaaccttggcaaaataaactttctgaattgactgaga

SEQ ID NO: 234296 - DNA, 315 bp, Homo sapiens
gcagagtgttgactggtggtgctgcgggttgctgattctcaagagggtgatgtaagctgtgagaatttgatggctggttggcagcctggctttttccctcctggttcccatccatgaaatgaaaaaacactggaatgtaaaaggaaacaaatagtgaaacattgtatttcacaggcacagatgcacacatatcaattatactgttatgctgttccagcataatcgccttcctcatcttcctctgtctcagacatattcaaatttggtcaccacacctgggtgtctgaatgtcttgtccttctaaaggtaactaga

SEQ ID NO: 234297 - DNA, 509 bp, Homo sapiens
caaaaaaaagttgaataccattttatatttgacaatgctctctgtatgattttagtataccaaataagtcaaatacgtctcttttggacttcaggggacctaatacttaaaagttaatgaggtcaaaaatatacttaagtcagaatttgattttggaatgtttgtcaaatatctaacgtttaacacttgatatcacaaaatagaattctaggtcattgtaagtcatttatttagccaaaataataatttaaaatttcaaaaaggcaaaaatctttacttgttaatagagaggagtctcaacttgttaagaccaatacagatagcatgaagccaactgaaactgtcttttctctctcccctgtatttaaatgacaaataaattttttttatttctcaatgttatgaaaatcttatttaaaagagaaagccaaattttaattttgcattagtgtattcttaatgttatactcaatttttaatattttgtaaataaatctgtccaattttaa

SEQ ID NO: 234298 - DNA, 478 bp, Homo sapiens
attggtctcctggaactgtggtaaaggtagctactcaaagatttaatttaagattttctaagtcaaaccaaatgccactactactaaaatataggaactaaagaaaaggagcagcaatatggtaggataaagaataaaaaatgtagagttagcagatttgagatcaagtcctagctctgtaccagaagtagctgtgagatcctaggcaagtcatttagcttctgtgacttgccagtttcctcctcaatacaacagggataatagggccaccctaaagagacatactatttgtagaaatgatttgtaaacttcaagtccaatccagatgcttgtagtggtgatgatgaagatgatggtcaagatataaacattacagaagtcaattattagagagatttaaatttagactctcaatttttttcctacctactcagttcacaaaaactatatatgtaagagtatcgttcttacatgggtt

SEQ ID NO: 234299 - DNA, 522 bp, Homo sapiens
  misc_feature (71)..(71): n is a, c, g, or t
  misc_feature (77)..(77): n is a, c, g, or t
  misc_feature (85)..(85): n is a, c, g, or t
  misc_feature (93)..(93): n is a, c, g, or t
  misc_feature (230)..(230): n is a, c, g, or t
  misc_feature (258)..(258): n is a, c, g, or t
  misc_feature (276)..(276): n is a, c, g, or t
  misc_feature (356)..(356): n is a, c, g, or t
  misc_feature (510)..(510): n is a, c, g, or t
tgactttaaaaggtgaaaacactttttatatacaaccatatttctacaaagctgttatcttctatgatgcntctacnttacccangccactgnaaataaacatgatcttgtcagtcctgaaagtactgaatggattgtgtgactccttggaggaacatgggcagttgttttcttggcattttaagagtgatctgcagtggtcttaagtataatttaccatttgtcttctncccttgtgaatctggttgcacacaattnggaaaccagaggaggtgncctgatattggcatggatacacccaaataaaactttgcaagttgatactaccctttgaggacattgtggagcctacactntcagactcacacaagaccattttataagaatattatatgacatttagttgttatttacagttcagaagtcattttcatcatcatcttacaaaaagattgcctttattttgcagatgaagaattaaggttcttctaggcaaaccttgaacgcagncaaaacaattga

SEQ ID NO: 234300 - DNA, 265 bp, Homo sapiens
cacagttaacctatgttaaccacctcgactgcccttccagtttcctccacactcagccatttgcatatgcacacacatctagcacccggtcaccatgccatctaccactgtggggaccctctcaccagtttattctcatgagagtaaacacactttctgtatctcaatgttttcactgacaatactttccaatattctggaaattttgtagttattgtctttagcattcatgaaatacctgcataacaatgactgtcgttgaccc

SEQ ID NO: 234301 - DNA, 440 bp, Homo sapiens
ggtagacgggcagaaagggatttcaagcatcaccagaggcaccttttccttttgtcttgctatttccaatggcatggctctgtttctcttgaaaccgggtgtgttggaggaacatgggctagggtgtaggactgtggtcagcaacagggcccacatgcaatgcaagttgtgtgcagaaaacctagcattttctaaaatattttagttaaacagtcacttgggttttttttttgtttttttttggaaccattaaatgttatttctttgttgaacagtttccaaaatcgtgacattcatatgacctcctgcatggaaaatgaggtgtaaatagggagtaacccatgcagaatgcttggcacacaggaagtccagctgtcgtcttttcttttttttgttcttatttcttacggcaccagcagcttgtttataacattaaaaga

SEQ ID NO: 234302 - DNA, 787 bp, Homo sapiens
gagagttagaaaagaaacgtttgcgggaagaggaaaaaagaagaagaagagaagaagaaagatgcaaaaaaaaagagacagatggaggcgaagacaagagagctcattgctagaagaaccacacctcttttggaatatattaaaaatagaaaattagaaaagcagagaattcgagaagagaagcgagaagaacggaggaggagagagttagaaaagaaacgtttgcgggaagaggaaaaaagaagaagaagagaagaagaaagatgcaaaaaaaaagagacagataaacagaagaaaattgcagagaaagaagtaaggattaagcttcttaagaaaccagaaaagggagaggaaccaaccacagagaaaccaaaagaaagaggagaggagattgatactggaggtggcaagcaggaatcctgtgcccccggtgcagtcgtaaaagccaggcccatggaaggctcgctggaggagccccaggagacgtcacacagcggcagtgattaagagcacagggatgtggagagatctcaagaacagaatctgaagcacaaagataccatgtggatgacggcaggaggcacagagctcaccacgagcctgaacggctttccagaaggagtgaggatgagcagagatggaggcgaagacaagagagctcattgagaattcgagaagagaagcgagaagaacggaggaggagagagttagaaaagaaacgtttgcgggaagaggaaaaaagaagaagaagagaagaagaaagatgcaaaaaaaaagagacagataa

SEQ ID NO: 234303 - DNA, 733 bp, Homo sapiens
gagagttagaaaagaaacgtttgcgggaagaggaaaaaagaagaagaagagaagaagaaagatgcaaaaaaaaagagacagatggaggcgaagacaagagagctcattgctagaagaaccacacctcttttggaatatattaaaaatagaaaattagaaaagcagagaattcgagaagagaagcgagaagaacggaggaggagagagttagaaaagaaacgtttgcgggaagaggaaaaaagaagaagaagagaagaagaaagatgcaaaaaaaaagagacagataaacagaagaaaattgcagagaaagaagtaaggattaagcttcttaagaaaccagaaaagggagaggaaccaaccacagagaaaccaaaagaaagaggagaggagattgatactggaggtggcaagcaggaatcctgtgcccccggtgcagtcgtcggcagtgattaagagcacagggatgtggagagatctcaagaacagaatctgaagcacaaagataccatgtggatgacggcaggaggcacagagctcaccacgagcctgaacggctttccagaaggagtgaggatgagcagagatggaggcgaagacaagagagctcattgagaattcgagaagagaagcgagaagaacggaggaggagagagttagaaaagaaacgtttgcgggaagaggaaaaaagaagaagaagagaagaagaaagatgcaaaaaaaaagagacagataa

SEQ ID NO: 234304 - DNA, 2039 bp, Homo sapiens
attataagagtttgtaactgatgataattactgataggttaggtgctgcacaagtggtccacattgcacatgaatccccaaatacttatgtaatctacactgtagttgaatagcagcactattgtgttaccttcttttataacaaagtaattttcaagtggaaatgcaatacttttaaaaccatatagtagaccttctagggtgaactaggtctccatttgttggctgattagggttgtaactactaggtatgagattcttttggtggggaaaaaattagatattatagggtggtaagagaaggcaacaataccttaaataggtttccaggcttcctattttccttggcttggctgctggtctgtcaggcatgtacatgacaagtacttgccctgttgactaagggaatgtcacagtctctttgagactgcgaaggtggaactgagcagacctttccaccttccacccttggccatcgatccttggtaaaaagccaagtgtctgcttattcatgaatacactccttgtgatgattgttggcactaagtgtatattctgtaccagctgctgtttattgattgctgtcttagtagctcaggtatgctacgtgttttagttgactttattttccagttcagctgtaaattttaagatgcaaagctgtttttatttgcattatgatcaagggcattaataatttactttagaaatagaaataatattgtaattatattctaaatgatataaaatacattataaacaatttttgctcttcactctttttggtttcttaaaagatctgatgttgttcatggatggatgttttgtccttttgcattctaaagtctttaggtggctcttttggatatgattcttcttgcaataaattgccaagaaccagggtttcatttctgtacagagcactttttaaaacttttcctttttcctagttactaaactggcattttaacctctttttctccttttagctttgaatctgtctttcttaaacttgtcttttactctttttcttctcatatgtattaataactatagtcagtgttttatatttagtttttagtactcagtgggaggtcatgtaactaattgtcataccagggataaaactaataaggtgctcattttttgtaagtaaaaggaaccactgaagataaaatacggttatagagaagaataatgagttctcatatgattatttacctttttaaattgaccctgaatctgtatgtggaccattgcaaataaacaagtatacattgtatgttgagaaagtactgtgtatcaacatgttttttgtgttcatgcaggtatatatttggttataaagtcagttttataatagtttagaaattgttttatatataaacagattatatataaatgtggactagacagggagggattaatatgaatttctatactagttttcctttacctatatatttataatgacataaagctcagcttatgcagttatacaattttaatttttagattgtaaaaaatttgtcacattttgaatatatatattttgtaaaagctacattgaaagaaattaaaattctgagattttcctaaatcaaatgtaaaaacatacaatctatccattaggattttctatataaacttgatatttctgaatggtcttttactcatttatgctgaaagtactgttttatttctataaacaaattaaaaaacaaactacctggttgtgaaaattttattttaaggtatttagcatttagaattcttgccttccatggggtaaaattttatatattcttttactttttaggactcacatagaaacactctttaagtataggttgtgatgaatattggtgatgtaattgcagagatgacagtgcaaggcaaaggaaatgataagctgggtatggtggcatgtacctgtagtctgagctgtttgggaggctgaggcagggggattatcacttgagtccaggagttcaggttcagcctgggcagtgtggtgagaccccatctcaaaaaaaaaa

SEQ ID NO: 234305 - DNA, 1139 bp, Homo sapiens
tcagagacttatttaaggtacacatgtgattgtacccaataaggaagtatattggctttatataattgttatgatcacttgttcaatgagtaactatagaattttactttttaagagtatgatcatagcatctacttgtaggtttgttgagtatgtttgacaagcccaagatagatgctcatgttagacccattaagaagttggtgtagtgatggttatggaaagcagtaagatagaatttaggttctgttctccttactggagaaatgactagcttacttgtcttcactctctcttgtttctctcaaaactttgtgaaccacctcagctgactataaatttttgtactagtatctccataattttaaaaaagttgttcacaagtttgagtgtagtacttcatctttgctttttaatgcacttccaaaaaatgtaaatctgttctcgcatattaggaacattttgatttgttgtttatttttagctttgctttttataagtaatttatacagaaggtacaccatattcaaaagaagaaaaatgggctgtgaatttttgctgatgtactactctcttcaaagggaattgcctatgttcaggcatagaaatgcaggcagtctgacatttaggtatgccatacagagtattgatatttttaatttgctacttttaacattttgagatttgtcacagtttgttctgtgggtgggtaaaagtaatggtaattttaattacagttgtcgtgcctcattagccattgctaaaacctgccttaccaaatcacttattttcttgatgcagtgttaaatctagcttctatgtccaggttatacattaatgagaacattcacccatctctcaaatgggttattatagtattttctcctgaaatagatgatgcataaaaaaaagtaaaaaagcttcaatagggataatgagagccagataacatagcatggtatatgagttattcctcccgtttttcttacctgtctgcactaagaagggcacccattaaataccataattattagttgtgctgcctctgaagtagagcaccagaatgtgagagtaatacaatgagaccacacccagattctatccataacatactgttcctggtcttattaattttttta

SEQ ID NO: 234306 - DNA, 471 bp, Homo sapiens
ccacccaggctttgggcgttcgctgctcgctttcgagccctccgcagccaggcgtcctggggttggggccaggagaatggggagggccccatccaggcgctccacctctcctccaccttccgccaggcccctcccgcaatccgagatgaaacgctggctgtgtttggagggaggagggagtccctgcctctctttccaagtccgtctggttcctttgcgctgccgtctaggctccaataaggacagaatttcttaacctggtatctgatcaatggacgggccccaggaagcctgtgagtgcctccgcccatttgtggtttcacctgcagttttctgagtgccactatggggaaggggcaccaacttttgtcagattctcaagaggatccgtgacttccctgttacctctgtgtgacgataccacttgctgtcaggtgggtcctttttgtccgagatagacagtgttcttac

SEQ ID NO: 234307 - DNA, 423 bp, Homo sapiens
agttcctggtacaccacatttttttctgaccttccctttgttccagggaatgtgttctgtttttctgtccttgcttactaaagaggcagcattgcacagactctgttagcagactgcctgtagccagtctggctccacttctactagttgtgtgttcgttgacaaatgaagtaaccttatgcagctcaatttcctcgtctgtaaagtgggagtaacaatacaagcccattattccttacctacactcctcgaagttagatgtttcagaatttagaatttttgggactttaaaaaggtaatatgatgcgcatgcctttttatgtaacactcccagaggaatgtggaaacaagtgggataaaaagcctgtctccgtacaggttagaaattcccaccaggtgaatttcagcaccatgcttaagaaa

SEQ ID NO: 234308 - DNA, 491 bp, Homo sapiens
caagtgacattttgcaatatatggagacattttttgttatcactgcttggaggggagtggaatgtgttactactgatataacaggtaaaggccaggactgttgctggccatcctgaaatgcacagcctgtaaataatctcagtgctttgggaagctgaggtgggaggatcacttgagcccaggagtttgaggctacagtgagccatgattgcaccactgcactatagccagggtgacagagcaagaccatgtctcaaaaaagaaaaaaaaaattatggtgtgtgaaacctgccatttaaaaaatactggtaatttttaggctgggcacaatgcctcatgcctgtaatcccaacactttgggaggtagaggctggaagattgcttgagtccaggagttcaagactgcctgtgtaatataatgggaaccctgtgtctaaaaaaaaaaataagtaaaaataaaatactggtaatttttaatacttaggaaaaaa

SEQ ID NO: 234309 - DNA, 439 bp, Homo sapiens
tcagccttggctgattgatattctgggatgaataattctttgttgtggcaagtggccatcctgaaatgcacagcctgtaaataatctcagtgctttgggaagctgaggtgggaggatcacttgagcccaggagtttgaggctacagtgagccatgattgcaccactgcactatagccagggtgacagagcaagaccatgtctcaaaaaagaaaaaaaaaattatggtgtgtgaaacctgccatttaaaaaatactggtaatttttaggctgggcacaatgcctcatgcctgtaatcccaacactttgggaggtagaggctggaagattgcttgagtccaggagttcaagactgcctgtgtaatataatgggaaccctgtgtctaaaaaaaaaaataagtaaaaataaaatactggtaatttttaatacttaggaaaaaa

SEQ ID NO: 234310 - DNA, 390 bp, Homo sapiens
tgtccccattgggcgagacctacctagacaaaggccttaacataccgacaaaggccttaaggggcctgggaggaagtcgtacaaaataaatgtcttctggagatgatttttggaaatggagttattagacagcccctggaagcgatacatccacgtttgttcagtgggttagatgacatggagctggaagacctgagaaggaagagaagaaggttctatgacagactggtcatatttagaagacactttcatattctatccatagttttgtatgcattttattcctcactaccttatatatagttgacaatgctaagcttttttgaaatgtctgtttttttagatgttctgaagtgcctgatatatgttaaaattaaaggtaataaaaac

SEQ ID NO: 234311 - DNA, 466 bp, Homo sapiens
gctcctgagttcaatcgatcttcctgccttggtctcccaaagtgctgggcctacaggcgtgagccaccatccccagcccaatttttgtatattttgtagagacacagtcttgctatgttgtccaggctggtctcaaactcctgggctcaagggatcttcttgccttggcctcccggagcacttaattacaggaatgactgcatgtgctgttgtgcctatactttctggagatacgttgttaggaatttatgtagttggccgggcacggtggctcacgcctgtaatcccagcactctgggatgccgaggcaggtggatcacctgaggtcaggagttcgagaccagcctggtcaacatggtgaaaccctgtctctactaataatactaaaatcagaggttgcttgcagtgagccaagatcataccattgcactgcagcctgggcaacagagcgagactctgtctcaaa

SEQ ID NO: 234312 - DNA, 462 bp, Homo sapiens
ttctgtttaatataggaatttatagctataattttttctctgagcattgttttacccacatcccattgattttggtgtttgtctttattttcattcatctcatcagaaagtatattagaatatattttctcatttcccttttgatttattatttgacccattagttatttagtagtatgttttcatttccacatatgtgtgaatttataagatttctttctgttattgatgcctaattccattcccttgtggtcagacaatatactttttatgattcagtccttttctatatattgaggcttattttatggcctagtatgtggtatatcctggtggaggatgtttcatgtacactgagaaaaatgtatattcttctcttgttggagtattttctaaaagtctagttggtttatagtgttatgcaaatgcattttcgataatgtcattccccttctttttttc

SEQ ID NO: 234313 - DNA, 560 bp, Homo sapiens
tttttcttctttcggggacgtggcctgcatggctatctgctcctgccagtgtccagcagccatggccttctgcttcctggagaccctgtggtgggaattcacagcttcctatgacactacctgcattggcctagcctccaggccatacgcttttcttgagtttggcagcatcattcagaaagtgaagtggcattttaactatgtaagttcctctcagatggagtgcagcttggaaaaaattcaggaggagctcaagttgcagcctccagcggttctcactctggaggacacagatgtggcaaatggggtgatgaatggtcacacaccgatgcacttggagcctgctcctaatttccgaatggaaccagtgacagccctgggtatcctctccctcattctcaacatcatgtgtgctgccctgaatctccagccagttcagcacgtttacctaggacagctggatctgggggctcatccagaaagagctttattggaagagagaaaggaaatattttggtcttttaagttgaatgatacagtaaaccacttgattcaataaa

SEQ ID NO: 234314 - DNA, 461 bp, Homo sapiens
gggatttttaggctatgttttaccaactttgcttttcattttgagcaaaaaaggaatcccactggataattttgagccaggagaatacatgatctaactttcatttttaaaagagtaccctacctgctgtactaagaatagattgtaaagaaacagggcagggagatccatctaaataggcagtgaataggacctgggtattataagagggtattcaaaaccacatggagattaaagttctggatatgagggatgatgatctgggacacttggatgtcttatagttactcatatgaacggggaaaaatgggtcatgagattagtcttgatcgtctcatctcaaaatatttgaaaaataagctcaaagttaatttaatcatattgagtaaaatccatatggttaaatagaaaatttttactgtactaatgacaaaataagaaagactaatttgtggctgggc

SEQ ID NO: 234315 - DNA, 267 bp, Homo sapiens
agcctgggagtttgaggctacaatgagccatgattggacaactgaactccatcctgagtgacagggcaaggtcctgttcctaaagaaaaaaaggacattggaatcagggtcccctccatcctaaggtggctacaaggcatctctctctgcaaatgagtaaacatcatcctccaactcctcacagagtgaagcagcaggaaaactccctcacctcatttctgtgctacttgggaggcctggacacccaataaccagcaccttgctgat

SEQ ID NO: 234316 - DNA, 509 bp, Homo sapiens
aatagtaaatgatcaaatgctttggagtctgttgctctgtagcccattccctgaatacttccctggccatttttctcatgaaggcaccaggccatattctcatctcctgtgctgtttgcccttttgctaattttttacgtgctggaggcccccacctttgcctgtaccatggctctgtgcttatgaaggacacagcatactaatacttcaaccaacagctgtgcttcctcagtgaagctcaaaacagaaccaacttacttccttatttatagaattagccaatcttctgtgtattttcaccattgtaacatattttcttaccagactttatgctccatgaatacaagaaggtttttagtaatcttagtatttccagaaattataatcgtttcaggtatgttgtgcagacttgataattttttgcctctaaatgaattcacagaagtagcactaaacacataaacagatgttcatgtatattaaatgttctgtggttttaaagactatta

SEQ ID NO: 234317 - DNA, 532 bp, Homo sapiens
ttttgaagtgggaattcattcctaggaaggaaacctgaggcacaaatattgaatctgaagaccgaattattttcttaaattatttggcaataagattttgttctagaggaaggtgaagcaagacggctgaatagaagatttttttctaatgagatgtatttcttatatccttggtatacatgattgctaaaaagaaagaaatttatgatgtcatttgttactaatgtatctaataatatacatcagtggttggcaaacttcttttgtaaaaagccaaatggtaaatatttgcaactttgtcaatcctgtcaataactatcctgtcaataccatctatgtcacaactgctcaactgtgctgttgtagcacaaaactagccataaagaatgagtaagtgaatggacatggctgtgttctaaaaaaactacttgcaaaaacaaataatgggtcagatttgttctgcagattcagtttgccaaccctggtatataccataaattaaatggaaagagctttcagttctggatgcttt

SEQ ID NO: 234318 - DNA, 471 bp, Homo sapiens
catttccttcaaaggaacatgaatcagcttcacccacagtgtctgcatgtctctgtccatagcaaacgtttttattaccttaaaatatagatttttaccttaactagccaagacctaggaccctttttccaagctcttttagatgaagtaataaatgcaaatattagagatgtgtatatgtgtataaatatatggagaaaagatgttgcctagttgtacaaattagctttaataaaactcctgatttaaattatttaattgtgagaagggcgattctaactcaacacgccaacgaaataaaagccttatccctctgctccgccaaaatatcccatttagagcctgcgtgtgtgtgtacacacacgtgtgcactcatccccacctgaccatatcaaattattatttaaactagatatttttactttgttgcatagtagtaatggtttctggaatgaaaaaataaaaaacagg

SEQ ID NO: 234319 - DNA, 700 bp, Homo sapiens
cattatgtcgaatacagagtatagagggagtacaaagttgaataaggaaaattacgcctttccctcaaaaagcatataagtaatttaaaagtacaatagtaagaaatagaccggttcttctattcctagcattcattggctctagaatgaatagtgtttatctgaactcaagaataaaattggaagtaatttaccctttacaaagataagatggagtttaacctaggttttctttttaaaaaaaaaaatcacaacacagtacaatctgagtaatgattttgttcctctagttatgtactctcttcacatacacataaaccaaaaaggcatcttaagcattcaacaaggaatattgacgagtgtctaccatgtgccaactactggtccgtgcgctggggatacagtagtgaaaagttttttggagctttacattccataaaacttttagcccaccccttgggataaaaagtcaaaaaagattttatcttttttggaacaaacttagaagatcaagcaataaaacataattacctttgataacgaattttaaatgtcattgaagaaaggtgcttaattttgaagatacgttgaagaatcttgtctctttcagttttgtttcctgtggcgtgttgcaaaaatggatgttaaaacttttccgtagaacagaaatttcaaatggattaaaaagaaacatttaaaa

SEQ ID NO: 234320 - DNA, 556 bp, Homo sapiens
tgcagagccggccccgctgccccccatttgtgccccttccaagctacggaggctccgggtggctgttggggtggggaacagaaaagccagccaggctcacagatcagacaagccagatctgtcccagggtatatggggaaactgaggcctggagaggagcagcttgcccaggatacttgctggggctccctccactggcccaggctgctgtgggtccatctcagatggtcgttcacttgggacatatttatgtttgtggcccatcaaccagtggagggatgtcagccacgtggtcctggctgtaacagggcggtagtgctggacccctgggtggggtcccaccatgggcgccccagttttctccttgaagtatgaggaatttgcttagttctgctctgtgagtcagtctcctgacccagcatccggcgtgtattcagcggatgggcggggtggtggaagagcaaaccctgccccctccgccccctccaccctcactccctccatccctgcccttcacggaggctgattggtattaaactattcaaacccaaaagga

SEQ ID NO: 234321 - DNA, 388 bp, Homo sapiens
ttttcatgggctctttcagaatgactggtctacagtgagccggagaaaggggtgcagatgggtctgaaaacagcagggccagcggactacgcaggcctcagcagcttcatctgtgggtggggctcacgtttactctacccacccattctgggattagtagctacccagggctttgctgctctggggtgctggtgtctcgcattaggccttctcttgcatgatctctgctgatatccactggccatgcagcctcgagcaggtggggacagacttggtctactccagggcaggtgcccaaagtcacacggcaaaagggcgtggcgggaggtggtaaaaagctgggagcaacagtccatctagcacaaatacacatttgctgcaaaaagcc

SEQ ID NO: 234322 - DNA, 297 bp, Homo sapiens
ttcaaagttacgttattaagtgaaaaagcaaggttaatatcaaagtgttgtgttatcttttgcataataaaaataaaaatctatttgtatttgatttgcataaacaaaatctggaaggataaataagagactactaatgaaaatggttaagtggggagtccgatgtgcaggatgtgggaactggatgggtagggaatgagataagatcaagacttggcaacatcattttggactaaaatgttgagctatgtcaacatattatctttttataaaattaaatgaaataaaagaaaaaac

SEQ ID NO: 234323 - DNA, 412 bp, Homo sapiens
cccagtaatgggatagctaggtcaaatggtatttctagttctagatccttgagggatcgccgcattgtcttccacaatggctgaactagtttacagtcccaccaacagtgtaaaaggcatcttattttcattccagaaaagagtaaaataagtcaccccttactccatgccaagcaacgttacacatgctttccatatatttacttagtactttaaatgttctcatgagatacatagcattgctgtcccctttgacagatgaggattggatgcagagaagaaggcttcttagcttgccaaagccatgtgcctgatgagtggcagggccagactcgaaggggggtgggtccattcccagggcaggtgctcttcattctcctacctggcttttgtcacaggacagcaatgtgga

SEQ ID NO: 234324 - DNA, 750 bp, Homo sapiens
agcgtattataagatgattaaatatgcatagtacaagtatgttatggaaggctgtgttaactgatatagtgggaccacaatagtatgtgtaagtgagatttggaaaatttgatatgccagcaaggacaaagaagtgttgaatttgcaagtttatgcacataattctgagaatccaggcagctatttctccttttgaattgttctcttggctaggggataagggtgagacacaatacacatttgaatgtgtcactgtgtaagttaccactgcaatatcttctgtatgttgaaaaactggtacttatatgtactaatactatctaccatgaaaaaaacaattaaaaatttaaaatatcatgtaaattaaataaagttcaaataccactagccagaaaaaaatattttatattatagtctggggtcagaagaggaaaaccttatgtaaagtatcaaaattaatttttatttcaatttaaatgcaccatcatataacatagtttcataactgaaattacatttgtcagaatttgatcttttcattgttaaagaattgagggaaaattgatggttataatattgatatgcaatgtaaataaactttttttgattgttataggaatgaattgctcaactaattggccaatgtcaaccacatatctgtttccatggaaactgcagcaatattacttcaaatagtttcatttgtgaatgtgataaacaattttcagataaaaaatgtatacatacata

SEQ ID NO: 234325 - DNA, 514 bp, Homo sapiens
agtggaacactccttagcagatgcaaaagaactaaaatcataacaaagtgtctttcagatcgtggcacaatgaaattagaaatcaagattaagaaattaactcaaaaccacacaactattatatatagtaattcaacaaccttctcctgaatggctcttgagtaaaaaatgaaattaaggcacaaatcaagaagttctttgaagctaatgagatcaaagagacaccataccagaatctctgggatgcacttaaggcagtgttaagaggaaattttataacattaaatgcccacatcaaaaatctagaaagacctcaagttagcaacctaatatcacaaaaaaagaactagagaacctacagcaaacgaaccccaaagctagcagaatacaagaaatagccaagatcagaggtgaactgaaggaaaaagagacaaaactatattcaaaagatcaatgaatccaggagttgttttttttttaaattactaaaatagaccagtaactagctaacaaa

SEQ ID NO: 234326 - DNA, 191 bp, Homo sapiens
catgtgtttcgtgcagcattgtcttgggttcaagccagcagcttcctccaatgctcaaagacagacttcaaccaagaactagaaaaactggccgggttgggcttattgagacatgtttatccacaaaagtgctgccttcccaaaggattttcaagagtgatttttgagcttacctccttggactcttccct

SEQ ID NO: 234327 - DNA, 1571 bp, Homo sapiens
  misc_feature (547)..(547): n is a, c, g, or t
gataaatgccccatatatataaaagtgaaaacaatactgtaccaatgaggaagagagttttgtaaaagcaagcaggctggctgtcattaaaagttatcttaaataacttgtcgcagcccactcccaccagtcctgaaaatagttcattcaagtggtaaaataagacaaggcagaggacgatgtctctaacttccctgatgtgagatctaaagccccattcctaactcttggttttagaattgaggaaagtggaataaatgcatttggaaaggatctgttttcttcccaggtttcctgcctgggttgaaaataaggtttcaggggatggaagcaactttgaggaacataaagaggtattggggttcatcaattcatctttgtttcaagatggttcccccccaccctccacaatgcaagttaattaggagataatttagctaccttgtgaattagttttaagataagtatctttttaagctttgtcactttaattgccccactgattgataagaagtagttatttctaattgacacttttttgatgtcnattggaagcatttatttggaactttttgggggtggaaggaaagttaattaattttatcagtctacccccaaaaggactctgcctaattttgttgaagaagacaaaggaagtgaaggaaaccaaataaaaaatcaatctcatggaattttaattattaagggacactttggtttaaattagagggcatctactaatataatacgtcaaaacgttctatttatggcctcaaatctctaatttattgagatgcattttataggtattcattttcctatggatacactcaacggccctttatatgcttccttcattttggagcaggttcctctgctgtgtaaataatttttgtgaaaagtaaaatctgtcaaacttggtatgcccagaaaaaatgaaatcatttttgtaagagccaattgtaagaaagatttactaatagtcatccttgttctgtaattattgatggagttgggtataaaggtgaaactttacttacagtgacttgccttttcatacctaaaccttggagtaaacagtttaatcattcacatcctccagaacattttgctgtgagagagaaaggagtgaaagaataaggagaaaaagaaagacactgaaaggaggcaatgggggtggaaaggaaagaaagggagaaggtagctggagagaataaaatgaaagcattcatttcagaaatgaagatagccaggtgcatggaacctttgccattcaatataagaaaattgaaatcctgctttcaaaatacatttttgttaacaccaaatctctaccacagtctctaagcaacccctaaccaccaagggatacccccagttttctaccccttaaaaaaaaagaggagaattttaggaagctggctgatccggatcttggatatctggctgtcaaagtctttatttggggtccatgaaaaggaagtaagaaaacgcacattgtgctctgggatttataaagagattcgagtgttgtttatgtttattttattattaaagcccctgtgatcttc

SEQ ID NO: 234328 - DNA, 408 bp, Homo sapiens
ggatgaatgtatttccttcctggggtgggggttcagtaggcaaaaagtagggtatttatatcatcaaatgatatgcagttgttagaaataacagaccaaatatacaaaaactatatggacgagacttagaaaacatagttggaatcaaaaaggaagcagaaacacagtttcacttaggtaaattagaaagatacagacaaaggtttttaaggatacaagaagcatgaaccataaaattaaaaattgataaactttaccaaaattaaaaatattggccaagcacattggctcctagtgctttggggggccaagtgggaggatcacttgagcccaggattttgaggctgtagtgggctataattgcactattgtactctaacctggtagacagagtgagaaccagtctca

SEQ ID NO: 234329 - DNA, 195 bp, Homo sapiens
gcatcctgtaagttgtggggcctctgggcagagtggacttcaggttactcggggagctccttgttcctaaatgcagccagaggaccccgtcaggagcagacctcacgcagcaggcgtgggaggctgagggatcaggctaattcccgccgtgacgctgggagagccaggaagggaggaggggtcctgtggcgcctg

SEQ ID NO: 234330 - DNA, 353 bp, Homo sapiens
cttgttttgcaggctggggttgttttggagtcctcaaatgggccatggttttgcttggctggctgacctgcctaagaagacgtttagtctttagaagagtttggtgaaaatcaaggtggttgcagagttaggtggtctcatgccaccttctcaatgggaaaaatgccacagagtgcctttttcccgaaagaatgagactttcttgctctgatgaaacttgtaggactatgagttattttactccttgagttggaaaaggaacctgtgggctgaattcagcccatcccattagcaccacacaatgttttattttaaaaaattgctaacattaaaattttgatagattttgcttt

SEQ ID NO: 234331 - DNA, 213 bp, Homo sapiens
ctgaggctgggtaagatggctcgctgccgtctgtgtttactcagagctccaagctcctgagcacagagattgtcatttctgctgtttttaagtagtctttggtgtaaatgatgttttgttgtgttgatttgtttggaaaagcttgaacaggatcttgagttgggatgcccttctgtgactgatacatacagagagagtgtattccccccaccc

SEQ ID NO: 234332 - DNA, 444 bp, Homo sapiens
tcagatgcggagataaagggagatggtgtggccctcctgcctgggggtgctgagcaggttgctggaggcggtgatctcactctgaaggagacagacacagaaatgtgtgtacagttgatggtgagcatctgagttgcgtcttgttagtgaggccaggagtgcctgtgtaagctggaacagattaggtatatgatttgtgaaacggagtttcatcctagatcttcatctagtcaaaggactgtttcctgattaggcattagcttagtggttgctagtctgtgttgacctttgaaaggcatgactaggctaactctgaagtttctgcttcacaccatttacaatttaaaattacctagagccttgtgggccattggaagagactgaatgtttcactctgaaatgggagtccttggagggttttgagcagaggagagacattcaggt

SEQ ID NO: 234333 - DNA, 321 bp, Homo sapiens
agtagagatggggttttgccatgttggccaggctgatctcgaactcctggcctcaaatgatctacctgcctcggcctcccaaagtactgggattacaggtgtgagccaccgcacccggactgttcagtttttattttgtattttgttttaaaattatttttaaacttgttgatatggcagaaagttttaaagatacaaaggagtttagattatgaaaagaaagttctttcctactattggcccccagccctcagtttccatcataggggtaactactgttcccatttttctgtgtctttccaggaccttctgtgtcaatac

SEQ ID NO: 234334 - DNA, 213 bp, Homo sapiens
ctcatgtgttctgccatgtgaaaataagagaacaacaacaacaaaaaacatgtttccagactgcctgttagctagtattctatgtggcaattcgtttctacaaattgggtgcgcttatataagatttatgtggtggaaatgaatcacagcccaattttctgtgattattctttttctagcagttaagcttgtgatgatataaagttttgcatc

SEQ ID NO: 234335 - DNA, 1177 bp, Homo sapiens
  misc_feature (891)..(891): n is a, c, g, or t
  misc_feature (976)..(976): n is a, c, g, or t
  misc_feature (1002)..(1002): n is a, c, g, or t
  misc_feature (1011)..(1011): n is a, c, g, or t
  misc_feature (1015)..(1015): n is a, c, g, or t
  misc_feature (1020)..(1020): n is a, c, g, or t
  misc_feature (1036)..(1036): n is a, c, g, or t
  misc_feature (1038)..(1038): n is a, c, g, or t
  misc_feature (1049)..(1049): n is a, c, g, or t
  misc_feature (1052)..(1053): n is a, c, g, or t
  misc_feature (1061)..(1061): n is a, c, g, or t
  misc_feature (1074)..(1074): n is a, c, g, or t
  misc_feature (1086)..(1087): n is a, c, g, or t
  misc_feature (1095)..(1095): n is a, c, g, or t
  misc_feature (1098)..(1098): n is a, c, g, or t
  misc_feature (1106)..(1106): n is a, c, g, or t
  misc_feature (1118)..(1118): n is a, c, g, or t
  misc_feature (1129)..(1129): n is a, c, g, or t
  misc_feature (1131)..(1131): n is a, c, g, or t
  misc_feature (1134)..(1134): n is a, c, g, or t
  misc_feature (1136)..(1137): n is a, c, g, or t
  misc_feature (1143)..(1143): n is a, c, g, or t
  misc_feature (1156)..(1156): n is a, c, g, or t
  misc_feature (1158)..(1158): n is a, c, g, or t
  misc_feature (1167)..(1167): n is a, c, g, or t
  misc_feature (1170)..(1170): n is a, c, g, or t
ccttatttttttaatgcagtaatagatatttgaataatagctttactgagatataattcacataccatgcaattcacccatttcagtggtttgtaggatactcagacttgtacgaccatcactacaccagttttagaggctttaatcaccccaaaataaaccctgaaccccttagtcattgtctctaaattcccccacccctcaccccctggaaatcactaatgtccattgtgtctctatggatttgcctatcctgaatatttcatatacggtaaacggaatcaggtaatatgtgatcttttatcactggcatctttcactgagaataatgttttcaaggctcacacacgatgttgaatgcatcagaactttgtttctttttatgggtgaataatattccattgtatgcatagaccacactctgtttctccattcattaatggatgcatgctaggattaccttcacttgctagctcttaggaatagtgctgctgtgaacatttgtgcatgggtttttgtgtggacttacgtttcatttatcttgggcacatacctagagcggaattgctgagtaactcagtgtttaacattttgaggaacagccagactgttttccaaagcagctgtatcatttcacattcccaccagcagcatatgagggttctgatttctccacgttagttagtgtgaagtgatacctcactgtggctttggcttccatttttctgatggctaatgaggttgagcatctttttatgtgcttatttgtaaatagaaatagtttttgtaaatataagtatttgtatttgtaaatatttataatatttgtaaatataaatatttttaagttaaaaatccttgaatttacaataaggtaaatatcaataaagntaacctttggccgggcacagtggctcacacctgtaatcccagcactttgggaggccgaggtgggcggatcacctgaggtcagganttcgagaccagcctgaccaacatggngaaaccccntctntactnaaaatacaaaattagncnggcatggtggnggnngcctgtantcccagctactcnggaggctgaggnnggagaatngcntgaacccnggaggcagaggntgcagtgaccnanatngnnccactncactccagcctgngngacagagcnagnctgtctc

SEQ ID NO: 234336 - DNA, 578 bp, Homo sapiens
gaggctcaagggcataccttttttatcctcaaaggcttaaagacaactgatggcagctggagagggttaagggagatggaggaaatcttcattcaagtttgtcttgctcagtgatcttttaatgtgtctttccagtcttggggtggttgtgtggtctttcagtacagattcaggtggcaggcggttggtggtttggtttaaatcagaggtatgttaaaatattcaggatggtgagggtgtctgtgaaaactaagagaggaagtggcttaaagagctaggctgtcagctgggtgcagtggctcacacctgtcatcctggtgctttgggaggctgaggcaggaggatcacttgaggccaggagtttgagaccatcctgggaaacgtagcaagaccttgtctctacaaaaaattaaaaagaaaaaattagctggacatggtggtgtgcgcttgtggtcccagttactcagtaggctgaggtgggaggatcacttgagcccaggagtttgagattacaatgagttatgatcatgccactgaattccagctttggtgacagagtgagaccctgtctctctcta

SEQ ID NO: 234337 - DNA, 619 bp, Homo sapiens
atttacatcagacacaaacatgtcaatagtttacttttgtccaattaaaaattggaagaaataagaattttaagttaatcatagagatgtaggtcaaattttcttagaattattattctgtggttaataggtatcccataaaaacggtaagagctatgtttgggaacttacagtggcatagtaaaggttctgccaagtcatgggggaacagacttgtttaacttcaacttttaacagattcatttgaccaaccccctctcctcaactcttcttttttcatgaagagtgcctttccacatgtggcactaccggacagtaagtgtttattgagcacctactatgttgctaggcaaactaggtgctggaaatataactgtgagcacattcatcaaaaatttttccccttgcgatgcttaacaacagttatgaaaacctttgtttagatgatctgatcttatgtaagatactttaataacaacataatttttattcaaaaatgtaatctgaagagcttcataagtgaataaacctacaatttctgattgacaatgtttatttacttctcttccacttttttgggggtttgtttcatttttgttgtttagattgttaaaaactg

SEQ ID NO: 234338 - DNA, 716 bp, Homo sapiens
atttacatcagacacaaacatgtcaatagtttacttttgtccaattaaaaattggaagaaataagaattttaagttaatcatagagatgtaggtcaaattttcttagaattattattctgtggttaataggtatcccataaaaacggtaagagctatgtttgggaacttacagtggcatagtaaaggttctgccaagtcatgggggaacagacttgtttaacttcaacttttaacagattcatttgaccaaccccctctcctcaactcttcttttttcatgaagagtgcctttccacatgtggcactaccggacagtaagtgtttattgagcacctactatgttgctaggcaaactaggtgctggaaatataactgtgagcacattcatcaaaaatttttccccttgcgatgcttaacaacagttatgaaaacctttgtttagatgatctgatcttatgtaagatactttaataacaacataatttttattcaaaaatgtaatctggaccatcccggctaaaacggtgaaaccccgtctctactaaaaatacaaaaaaattagccgggcgtagtggcgggcgcctgtagtcccagctacttgggaggctgaggcaggagaatggcgtgaacccgggaggcggagcttgcagtgagccgagatcccgccactgcactccagcctggccgacagagcgagactccgtctcaaaaaaaa

SEQ ID NO: 234339 - DNA, 401 bp, Homo sapiens
caacctgaccagtgtttagcgagagatacccaatgaaatgtgatacaacttgagacgcggtgctcctctcatggagggacctgatagaggcatttccctgcgggactgagccccgctagccaattgcacgtagatgtgttttatgtctaggaacccatatttctctttgaagttttgctttcaatgttgaaatcaattgccccaactttgcaagtggcaggctgtttacatattgggatatttacatattcatacttaacacatctgagagattgctagatcattggccaatcccctagccctagcagaggtgtggtcactcctttaatcggcctgactgatgagaattgtagcttgttctttgaaagaaaactgtgacctcctttccacttatttgtgaa

SEQ ID NO: 234340 - DNA, 1632 bp, Homo sapiens
  misc_feature (949)..(949): n is a, c, g, or t
tcatcaatggatgaatggattttttaaaatgtgatacatacatatatatatacatacatacatatatatatatgcacaatggaataatattcagccataaaaaataatgaaatcttgtcatttgcaacaacatgaataaacctagagacactatgttaagtgaaataaactgagcataggacaaataccacattatctcattcatatgaggaattttaaaaaattgatgtcatagaagtagggagtagaatactggttgccagaggttggagaaagcagagcggcaggggagatagagataaacggttggtcaacaggtacaaagtaagctacacttagataggaggaacaagttctgttgttctattgcacagtaggacgactatagttagtgataatgtatatttcaaaatagctagaagagaggatttttaatgttttcaccacaatgaaatgataatgtttgaggtgaggaatttgctaattaccctgatttgatcattacacaatgtatacatgcattgaaacagtatactccttaagtacatatgattgttatgtcaattaaaaacaaaataaaactaaagaagaaattgctaagggagtaaattccaaatgttctcaccacaaaaataagtatttgaggtgatggatatgacaattagctggattccattattccacattgtattcataaatcataacatcctgtaccccataaatatatacaattataatttgtcaatttacaatttaaaataaaaattaaaaaagaattgatgtttctgtaaataaattagttaattcaaaacatttttaaaattttttctagtcatttaaatatgttaaatgttactgaaattaaaaatttaaatagagttggaagttgaggaagtttaggaaataaaaaacataaagagataaaagacaggagaaactattaacaaanagaagaggagattaagtctaagaggctcactttgtaactaatagaagatttagagaaggccacagagagaactgaggggaggaaactaccaaaaattaattgaagaaaatctcccagaatggaagaatattagtcttcagattgaaagtaccaacagagtccatgcgaaaagttgagaaaatgcccacaccaagttaccttgttgtgaaatcttggaacgctagagataaagagaatctttttttaagtttgtggagaaaaaggagagagaagcatggaagtgggtgaagggagatgaagaaaacagtacacattgaaagaagaggaaaagaagacgatcacagtgacgtcaggctttttaacattatcattgcaagctagaagaaatgagaaaatgccttcaaaattctggaaagtaatattcaatccaaaccaacatgcagtgaatgacatcccctagagcttttcggttttggttcgcatttttaaaacactttgaataaaaatgaccccctagggttttgcagtgcataatctttacaaccatatgcggcaactctactcaattcagtcaaatttgcagtcacatttgaagacagaatacagacatagaaggactcaaaatgtacacatccattcttttctcaggaaggatatgctctagaaaagtgaacagataatcc

SEQ ID NO: 234341 - DNA, 559 bp, Homo sapiens
taggacttttcatagcacagaaaagtctcatgatgtctctcagcccaatattggtttttaaattgagatgataatattttccttgaaagttaaaaaggagattaaattaggaagtatgtgtaacagcacagcatggtaactgaaacagtgggtactaaacgaattggatctttttccgaaacacaagtgtacaaagctgaacaggtaataaatatgctttaccatcattgtttataatgatgaaaatttttccaatacctaaatgacggataacaggggattggccacagaagtgatgtacatgcatagcatggaatatggcagcagccactggcaatcatgacattcactgacttgaacgaacattcacaccttattttattaaaaaaagagagcaaaatctattagcccggcgtggtggtgggtgcctgtagtcccagctactcgggagggtgaggcaggagaatggcgtgtacccaggagatggagcttgcagtgagctgagatcgcgtcactgcactccagcctgggcaacagagtgagactccatcaaaataaa

SEQ ID NO: 234342 - DNA, 392 bp, Homo sapiens
gcaacaagagcgaaactccatctcaaaaaaagaaaaaagaaatataaggtgttcaccatgattctgatttttaaaaattcttttgaaaatatgggtattaatctagaagaaagactgaaaagcacatcaatttataatttttattgtttttaagtttttatattatataatcgaaatgtttaagttcttttggttacaacattcatttttatttattttaggttttcaacaaatacttttggtctttactacagcgtctataaagcagagaagtcattgtcatatttagactgcttaccctagttttgtagagaatacagttctttctcagagagatgtttttaatacaatagctttattcttcaaaggctgagtgtagttgctgcggaagt

SEQ ID NO: 234343 - DNA, 139 bp, Homo sapiens
tctctctttctttctttctttctttctttttctttctttctttttctttctatttctttctttctttctgtctttttttctctctgtttctctctctctttctttcttgctttctttttccttccttccttccttcctt

SEQ ID NO: 234344 - DNA, 516 bp, Homo sapiens
tatccataaaggttatttttatttcctttccaatttaagagtatatttaacattccatcgtagacaatgcggtagtcatgaagtatgtgtgagagaagaaagatggaaggtaatctataatgaaaatcaacacttaaaaggaaaaaggtcttcttccctggcaccctttagtcatttgcaacattttacaagacaatgtaggtaaggaaaaggctaatctgtaatcggagaaacaaaggttacacctgctgactttacaactgtctgcttatgagatttagttcacattccctttaagctcaaaatattttaaagttccagcagcttaaattttgaattacttattttcacagctgacatattagctacaacaaagcaaacaacataaacagtattaggtccctgtttttgaattggctttgaagtttacttacatcatctaatacctctattgtagagcaaatttaggtttcatggggtccagagattacacagttttaggattctcttatgaaa

SEQ ID NO: 234345 - DNA, 389 bp, Homo sapiens
tgttttccaggcttttttcagctaactgtgtcagcttctttagctgggcccaggtcggcggccccactttcttggtggatggcaacttcatctgttcttctgatatcactattttgttcaccctgcgagtcgatgatgttcgattgcgggttctctgtctctgcggaggtgccttcccttgcacctctgatgggttcattgtagaacttcaaatgtctagtgggtaaccaaacaggaagctgattttctgctgttggaacacaagcaaaacctcacccccatgttatcaccttacctatttcccatgttttatttttgttgtctttccaccaaatcagttttccctcatgtgggctgttctttttaccagtaaaatgttgttctgcaga

SEQ ID NO: 234346 - DNA, 419 bp, Homo sapiens
gcgtcactcatctgacttctagaagtttcctggcagatttagttttgaaaggtcacttttttttcctgattgtaatagtaataataatataatgactcatgtttattgaaagcttattctttgccagacacagtcctagtattttatatatactgacacatttaatctcacaacaacccttatgaattaggggctattgatattttcattttacaaagaaggaaattaagacaaaggtgatttcaaactggcttaaatcacacaactattgagtaatgtacatttacagaaaatttgaacactgtggaaaaatacaaaattaaataaaaaatcacccatcatttcatcattaatttcttttgtatatatgtttagccatcattttattttaaaataaaaactctaacatactctacata

SEQ ID NO: 234347 - DNA, 427 bp, Homo sapiens
aaaccccgtctctactaaaatacaaaaaattagccgggggtggcggtgtgcaccttgtagtcccagctactcaggaggctgaggcaggagaattgcttgaacccaggaggcagaggttgcagtgagctgagatcgcgtcactgcactccagcctgggtggcagagcaagactccgtctcaaaaaaaaaaaaaatacgaaaaacaaaaaacataatctggattgcagggctgatcgttgctaatggagtgttatggctgttcagatgacagagggagaaaatgtactttgtaaactgttagttcaatgaggttatgattgcacaacaatgtgaacatacttaatgccactgaactttattgccattgataacttttaaatggtaaattttgtgtattattttgtcacaataaaaagtttgaaaatcga

SEQ ID NO: 234348 - DNA, 329 bp, Homo sapiens
ctcactagccaaactgacattcacttagctcccaagctctctcaattcagacaccctgcctgctgtattctcccccagctcttgcatacctgactcttaatcaccttttagatttcagttttaaaatcatcccctcagtgaggtcttccttgacttacaaatctacagtagagtattccctctcacacatcctgtttatatcctttgtaacacaaaccacaacctgtaattatgtcaacatgtgtttttttctcttaaataaaagtgccaagaacaaagggtccgtagccatcttgcttgtcactgtgttcccacagcccactactgtg

SEQ ID NO: 234349 - DNA, 504 bp, Homo sapiens
tcagtatataagctctcacctctaactatgtgaaggagtttcttcctccacttccctgtcaaagttgcatatttctctttgactattttaagcgacaggatgcttgagaccaggtaactcgtttctttttacctctaaatgtagaaagttcttccattcagtgaaacgaagtcagccaccctaccctttgatctgaggactctttgtccctttggttctctcctgcagctgtgcattttcagctttcatattcctcatagacaccagctccgggacacccatcctgggtgcctgtcttcttgcgtcaggaccacaggcaaaactagccacacctaattgaatacgttattccaggtggtatttgcctagggcgtatacacagcattcatatttcttgtgatcaggatagtcacattaattcagtttctgttagttcatcccctttcagaagctgtttgctcttggctcattaaacctgtgagcaaccgaatccctcaaatatca

SEQ ID NO: 234350 - DNA, 332 bp, Homo sapiens
atcacttgaagcacatgctgataacccataaacagtgcaaatggtcaggcaccatggcttaaatgcctgcaatctcaactgtttgggaggccaaggcaagaggatttcttgaggccaggagtttccaggcaagcctagggaacatagcaagactgcctctacagaaaaataaaaaaatgtttgctgggcgtggtggtgcacacctgtggtcccagctacttgggaggccgaggtgggagggttgcttgagcttgagaggtcaaagctgcagtgagccatgatcatgccattgtactccagactgggtgacagagtgagaccctgtctctttt

SEQ ID NO: 234351 - DNA, 445 bp, Homo sapiens
ctctttagaaatggaaaagtcctggaaatatcatgctgcgtgtagttgtgattatggagacactccaggaaaagcagacatctctactgggaatagtcaggtgcagaagttcagaggtcttagaaattatataggcattgtatcctttaaaaggccttgctgttttgagtacctgggagttatactactgctaaaataaattacataaagtacagggcttggtggacttgatgggacttcataacagaggcattctgtctgtgatccacagagagctctgtctgctgtgtattattcatataaaccaattgtaaagttgaaaaatcaggggacaggcgtggtggctcatacctttagtcccagaactttgggaggccaaggtgggaggattgcttgagcccagaagttcaagagcaatctgggcaacatagtgagactttgtctc

SEQ ID NO: 234352 - DNA, 306 bp, Homo sapiens
gagttcaaagttaggaaatgatctgagctacaagcaaaatcctataaatacgatgggaaactgtgaactaatttggctcccattttcaatggtagtgtctacattttctcctttcttttatgtactttagacagtttatcggaaagtcgcccatgtcaaatttgtaattaagtgagataagacaaaaatggtatcttttatttttgaatctctagaagcctagcagttcctggaacaaatgtttaatgtttaaatgtgttaaaaacttttcaggtcacaaactctgtaaccagtatgagactactg

SEQ ID NO: 234353 - DNA, 351 bp, Homo sapiens
ccctgaattttttttagtccgtgagataagatatttatttaatgtgtttatttggagcctgaaataaacctcacactgggagcctgggtggaatacaggaagggaaggcaaggaaaagtcacagagagctcagacagccagcacctgtgaaacgcatggtatgaggtttccaaaccagtgacaagtgtggttttcaattagccgggcgtggtggtatgtgcctgtaatcctagctactcaggaggctgaggcacgagaatcgcttcaacctgggaggtggagattgtagtgagcagagattgcgccactgcactccagcctgggcaacagagcgagactccatctcaaaaa

SEQ ID NO: 234354 - DNA, 385 bp, Homo sapiens
ctttgtcatgtatattaattcaaaatatcttttcccacattgtgacttgttattcaatcttataatatatatttttgttttaatttttatttaatagggttttagatttttagaaaaattgtgaagagattacagataattaccatagacctacacccaattcctcctgttattaacatcttgcattaatatgtattctgatattattgtatggatgattcacaaatgtcaattaaaacaaactgcttgatagtgctgttcaaataaactatattcttgttgattatctgtctgcttgatatatcaattaccaaaagaagtatgttaatgttttaaactataatagtgaatctgcctatttcttatttccattttacctcatgaa

SEQ ID NO: 234355 - DNA, 549 bp, Homo sapiens
acaaaattcaagcacttattttccttgcacaattcagggcctgctgtcttctttgaaaactcagtggcgcccctactgtgggcagcacaaatgtagcaagatcaggtttggagaggagcatccctgtactctccagggaagagtgtccagtgtctggaggcaaatcactgtgactgttttttgtccccctgccctttcctgggacacttccccagggcagcttttccatgtgtgaagagccctgcagtagcaggcacttggctggctcttttctgtggtgggcacagattggatgggagtaacctgtcctgaaccagctcctagagcagacccccagctccgggtaggcacaggtgcccagacatgagggtctgcatatgagggtgatgttgtgtgggtccagctttccaggggaagcagaattggggcccaagttcataaagaatcccacccccacaccagtgcccagggtggggatgcaggccaaggggctgaccacgggtgctgggagagttcttccatgctgaattttcagcctttgtttggata

SEQ ID NO: 234356 - DNA, 563 bp, Homo sapiens
tcagcctcccacatagctggaattaccggcatgtgccaccaggcccagctaatgttttgtacttttagtagagatggcgtttcaccatgttggcaaggctggtctcaaactcctgacctcaagtgatctcccgccttagcctcccaaagtgctggcattacaggcgtgagccactgcgcccagccctaatatgtgctgattgtataaaacctggatagccttaaaatatattacatatatggatattatttatattatgtcaatatattaacatgttttaatatatacacatatataaagatatttgtggtagccttacatacatactttacactccgttaattaaagggaaagagttttaaaatattttaaagtggactttcagaatcctggtgcaacactgtattagtagatacaaccttaagaatcgatgacaaattctgataatacttttgacttcaaagtaaaaatgatgcttttaaaaatggatgtatccatgctaggaattttcctttgacagagtatatcatgctcagaatttactctaataaagaaatgtcaga

SEQ ID NO: 234357 - DNA, 110 bp, Homo sapiens
gctctccccactgccccagcacactgtaaactcccagggcccacccggctctcaactgtggttttgagggcagtttcaacaatgctcccagtgcgggtttgtggccaggc

SEQ ID NO: 234358 - DNA, 465 bp, Homo sapiens
ccagaaataaccaaaaggcattcaagagagcctagtagctcatttggaaaggaaagctagattcagagatgacacaaaacagcccaaaaatgtggctgctgaatcaaaaacaaaaattcggatgaaataaaaacttttttgctaatgtgcttactctggtagacacataaataaaaagttcttctactggccacgtgtggtggctcacgcctataatcctagcactttgggaggccaagacgggcggatcacctgaggtcgggaatttgaccaacatggagaaaccccatctctactgaaaatacaaaattagccgggcgtggtggcaggtgcctgtaatcccagctacttgggaggctgaggcaggagaatcgcttgaacccgggaggcagaggttgcagtgagtcgagatggtgccattgcactccagcctggacaacaagagcgaaactgtctccaaaaaaa

SEQ ID NO: 234359 - DNA, 352 bp, Homo sapiens
cctcttgcttctcacctccttccccttcaaaaataaccagttttgaaataattaaatcaagtatatactaatcagcaactagtcatcttggaggagttattagaaaataattcctttcatacttggctgagtcactctattttctagtcatacattgagtcactatcttctttaagccatcttgaatgaatgcttctgtgtgttggtggcagctgccacttaaagatgcatttcttctggccatcccctttttcacagtaactgtgtaaaggctagtatccctcagtcgaaggagccattggaatgggattaagggcacagcagaggcttaggggtagtggacaagaacaag

SEQ ID NO: 234360 - DNA, 821 bp, Homo sapiens
ctgaattgttgaatgaatcaccctctttctcctcagcatttacaaatacctgaaacacgtgtctatatcctccccatcatctctgtaactcatacttgtcttttcagtctcagagtagaaatgaagtgttccctgacgcctctttccccatgcccacccaaacatgagcaagacctcttctgtcagttcccacaaaattcttaatgtacccgatttcagcacttagcccactgcattataatggctcatctactagcttatctgagtctcccactgggctctgcaaaaagcttctgcctacctctttccatgctatagtcctgtcagagaacacaatgctcagtaaataacgttctgttgagatggatccctaaagtgttaaatatttaaagtctttattaatttgaaggacctctgaagagaaaacgaactgtaaaaatcaaaataatcttaatttttaaaaacagacataagctaaaggagacccaaatatgaaatacttttataaaacaaacaacaatatctatacatgataaacagggacatgaaaagatggttgcaggagcattagtggtgattattataggatgggaagctaggatgggttcacagaaaaaaaaaatccccagtttactctgtatgtcagggtaaattccaagtggatcaaacaattacatatgaaatatgaaaccattcaagcctagaataagctaggaatcgggggaaaattttctgattcaacatccagaagcaatgatgaaaaccttgatgatttgattatgttaaaaaattttttgcatggaaaaaaaccttgagcaaaa

SEQ ID NO: 234361 - DNA, 401 bp, Homo sapiens
  misc_feature (72)..(72): n is a, c, g, or t
agggagaacagcagcagccagagagcctggaaagcgtgcatattttgtaaagggagttcaccgataaaagcntaattctccagacttggaatatgagaataaggacttaactaacattgagtattgagtgcatgctcttttgcaggctccactgtaatagctcttgtcctcttcttataagagtcacctaagaagctgacccaggaaagtagccctttgacagcatcacagcacgagacacaggtaacagcatagagtttaactctctagaatcctaatgttttttgcaatagatgtcatgcaggtttccagacaagttttgagaaaaaatatgtgttgaaccctttaaaagtttctattctttccagtattctcttcacctgcagatacattcccaacca

SEQ ID NO: 234362 - DNA, 870 bp, Homo sapiens
gcaccgagagtctgctttgtgaattgtatcaatgatgccactgacctccctgattctgcaggccgtcatcatttttcatttttaatcaccattgctattactgtgatcggcagcaagtgaggcagaagaaaagcatttctttgtcaacttcctagagatgctttgcaatggcttactggaccagggattttgttttttaaggcaaaggtaatgaaggcctagaggaagaaagtggctcattcaaagaaaccccaaaattagggagagtcccaaagctcactgctcagcccagtccaaactccagaccaccaacctagactaagccccctcaaggcaaaatgtatctagagttaagacaggccatccactgagactacacaggggagagaatccccaggcaccaggaaggctcccaggattaccgaggggttaaacccagaacctcctgctggatgctggagccaaagagagtttctattactgtgggaggcccaaatgctctgccaactgccacacccagcaacactacccagctatctcccacacgtccgcacagcccgaccacttcagctgcccattctgcccccaaccctgtgctggttactaaccccacacagaaaagccagaaggagaagaatgcaaaaaagagaacaatcgtttgggagattctgaatggagacgtctgaggattccccggcggaataaggaaaatggtgttcgtgggaaggaaggaggatgggggaaggctggagggagggtctgtgccccttgctgtcaggaagttttcctttatatttagccttctcttttcatgtattttttgaggccctcgactaaaaaattaaatttaattttaaaaaataacaatga

SEQ ID NO: 234363 - DNA, 660 bp, Homo sapiens
  misc_feature (116)..(116): n is a, c, g, or t
  misc_feature (174)..(174): n is a, c, g, or t
  misc_feature (179)..(179): n is a, c, g, or t
  misc_feature (186)..(186): n is a, c, g, or t
aaaactgggtttatgaaccaattatcaagttcttaaaggagtcttgggccttcactaaccagacaggactggtagatttaaaaaggttgtgaccaaattcaccaatcaaaacccanaagggtaccaagcaaacctcatagcaagatgcactgagagaaaattaaactatggganaaccnccttaantgagatggactctcgctctatggcccaggctagagtgcagtggcgcgatctcggctcagtgcaacctctacctcacaggttcaagcaattctcctgcctcagaaaataaaagacaggaaaaaaagagaaatggagaaacagaaaaaaataaaaaataaaaaaaaataaaagagggcatggagaaacagaccaggaggagggccatccgaaaagaaggaaacccagagagagaacagggccagaagacaggagacccaaatcgaggcaatctacagagacacattccctcttacaaaatggagaaataagtcaggcccagtggctcacacttataatcccagctctttggaaggccgaggcaggcggatcatttgaggtcaggagttcgagaccagcctggccaacgtggtgaaaccccatctccacaaaaaagtacaaaaattagccagacatggtagcacatgtctgtaatcc

SEQ ID NO: 234364 - DNA, 683 bp, Homo sapiens
  misc_feature (13)..(13): n is a, c, g, or t
aaaaaaataatanattattaaaatttaatttaaattaatatgtgtagaagttaaaatctaggatagctaactggtaagctggtcacctggaagcaacgcatcagttagccactgaaaaggggtaatatttattgacatactttggaaaagactggatgagttgctctgcgacttcccactctaacatatgtttctctgagtttctacaacttcagctaaatgttttaaggaagaaaagaacaacagaatatgtgataattttgattgattgatgctccctcctatagcagcatacaaattttagagtgggagaaaaatctattacgatttcaatgaaatgagctattttatcttgtccctatgtggtaccatcaacattttagacagatgaacaccaaaccattgactgaattgctgcatagtggatttgccttgattataaagacagttgaatgaccagggtacctctggcaattttggcaatcaataagtaacatgaatcaactatgtagtggtcagactggctacccagtgctcaatcaaaacagaaaataacagagataagttaatccttaggttgcaggactataccatgataccagcataaaactcaaatggacattcatgatgaaaaaatgttaatgctatcattatacaataaactgctaaaagtatttttatta

SEQ ID NO: 234365 - DNA, 496 bp, Homo sapiens
aaataaagtgtgaccaaaggattttatgtcagccaaactgtccttcaaaattaaagctctagagaaatagttttaaatagctaagaactcaatgaacactgtgtttccaggcccaaacccactacaaaagaatcttcctcaagccaagagaccactgggaaatttgacataaacaaaaataacaaatctgttgagcacagactaaaagagaaagtgagggtaaggatggaggtgggctgtgaaacagcttcttatcgggaagcatgctgttctgcaaaagtaaaaatacagcaaataaatcagaggtagatgaatcagaaaaaaaggaatgtagaataagctcatagactgaagcatgaaaaataggtgggagaaaagaatcccaccagacaagccaaaataaagaggtcagaggaagaaacaagggactaagggtgcaatgagaggtgttatttataacagtagccagcagaacaaaacacagaccttcctaaat

SEQ ID NO: 234366 - DNA, 631 bp, Homo sapiens
aagggatgggttggggagcgggggtgatcccagtctgaggctcccggggatgagataagagtctggagacgggcatgggttcttggagagtggcatgagctggctctgccctgggagcccggtctgagggggacgttgttggagcccctagtgttgggggtggttatgggagggggtggggtgagggaaacgggagaatgaaggagaaaactgagccctagtttcaccgtgttcatttggaaggacgagccgggtcctcagggggaggttccaggactctgcccttggcgttgagggttggggggcggggggcctcctcccttcctctcagcccccttccccaggggctgtgcttccatgctcctagcctcccaccttcgctcaggacatgttataacttaggctaaactgtgaaaattccggtggggatggcctgggccgagctctccaggcaggcggccctgcccccagccctgtccatccatttcaggggggagctgggcccttctccggctgtgtctggccacccagggcagtggctggggccagtggccttccagctttggcccctgcacctcttctcaatgcactttaataatgtaacatattactaataaacaagctatttatt

SEQ ID NO: 234367 - DNA, 1358 bp, Homo sapiens
  misc_feature (873)..(873): n is a, c, g, or t
aagggatgggttggggagcgggggtgatcccagtctgaggctcccggggatgagataagagtctggagacgggcatgggttcttggagagtggcatgagctggctctgccctgggagcccggtctgagggggacgttgttggagcccctagtgttgggggtggttatgggagggggtggggtgagggaaacgggagaatgaaggagaaaactgagccctagtttcaccgtgttcatttggaaggacgagccgggtcctcagggggaggttccaggactctgcccttggcgttgagggttggggggcggggggcctcctcccttcctctcagcccccttccccaggggctgtgcttccatgctcctagcctcccaccttcgctcaggacatgttataacttaggctaaactgtgaaaattccggtggggatggcctgggccgagctctccaggcaggcggccctgcccccagccctgtccatccatttcaggggggagctgggcccttctccggctgtgtctggccacccagggcagtggctggggccagtggccttccagctttggcccctgcacctcttctcaatgcactttaataatgtaacatattactaataaacaagctatttattcaaaaaaaaaaaaaaaaaaaaaaaaaaaaatgtgtgtgtggggcgcgcccggggccccgcggagagaagagtttttagagaaccatttgcggtggggggcgggggccccaagagaaggtatagagggaacaagtggggccaaagaggtgtgtttcccaagagagaagaactcgggggccagagtgacacagaggggcgggggaattctctctcacaccaatatataaaaacacgccgcgggngggggacacaacggagagagggttctctgtgaaaacaaatctccagagagagggagagttctcgggagaggccaaatccgaggggagactctatttcacaacgggggagagcccagagagggaaccctggaaataatcaaaatagccccccgagccgtgggggtgaaacgctaaacagagaagaaaaaataaacaaagagaaaaaaaaacagaaaacgacggagaaagaaaaaaaaagagaaaagaaaaatcaaatataacaaaaaaagaagacaaaaaaaagaagaacacaaagaacaagaacgaggcacagacagcagacgagaccagagaaaagcgaacatacacaaacagcagaagaaagaaagaaaggaaaaaagggcggaaacgcaaaaaaaaaaaaggaaagcacaagcgaacacacgacaaggaaagagaaggaagaacgaaagcgagcagaggagcgaaagggagacggaggaaaa

SEQ ID NO: 234368 - DNA, 456 bp, Homo sapiens
agaagttctgcgtgtgtttccttcagcattcagccaagcaccttacagctccatcttagccttcacttcctgcttcagcagaggctcaaggttggccagaggtgagagccagggtcttcttggatatttcctgggcacacacacagcactgggtgtccacacagccctaaacatttgtatggctttctatattcccaggaatattgttagaactttttaaagcgcccactctctccaaggacatcccattcctctgctttttcttttatgttttttggttagcacattgtctatcccacttgttatccactacctcagtcagctgtgaggttcaataattgaccctactctcaaggctgcttttatttgtgctggatgagctctaagtcagctcaaataaaaacagccttgcaagtagtgtgaccagagaggtcaaataatgacaattctccgaga

SEQ ID NO: 234369 - DNA, 424 bp, Homo sapiens
tctcgacctcctgacctcaagtgatccacccacctcggcctcccacagtgttgggattgcaggcatgagccaccttgcccgttggtctttaacttttcttaccatacagagattgggggtgattgggctacttttttattagtgatttctgactcaattgcattgtggtctgaaaacatgagtctatatgaggttgttgaaacctgctctctggcctgatacggtcagattttgtaaatgatgtatgtgtgcttgaagaaaatgtctgttccctaattgctgggtttaaggttctaactatatgcattagggctgggcatggtggctcacacctgtaatcccagcactttgggaggctgaggcaggtgaattacctgaggtcaggagttcaaggccagcctggccaacatggcgaaacccagtc

SEQ ID NO: 234370 - DNA, 166 bp, Homo sapiens
gacgatgggacagaatttttgaaatcaaggctgtccgaggaaacccaggacatatggttgccataaccaatcattactgtgcacacagggggcatggtttgatccacaaacaaccaaagccaggattcaggcagacaatttatatcaacgcttgactgcatatgtg

SEQ ID NO: 234371 - DNA, 992 bp, Homo sapiens
gcagggagaagggctatagcaggagccaatggtccctcagttgagggggtatgacatcgcgcccaccccaccgagagctctggggtctggcttgagacccagggccagtactgacacatattcggagtgaagtcttgggcaagttattttgccttctacattctaagtgctctcatttctcaaatgggtacaacccaaatagatctggggaccctaccagtctactatcaaccctgtgttgcactcaacaagacatagccattaatcaaaaataatatgagagtaatttgtctttacttgtttatatccaagagtgttaaggatttttaacccacagcaacacttcttaatgtctctttagtagcagggagtggctagggccccttgcatgttaatacattttgtcccagtcttatgggatttgtaatcgcggccttacctccttcttgcagggctgttatgagatttaagtgaagccctagggttacagggctgtcctgtaaggcactgtcccgatgaaagatgaaaggggctagtgttattatctgatgacattttttttttaaaggcagggtcttgctctatcacccaggctggagtacagtagtgcaatcatgtcttactgcagcctcaacctcctgggctcaagtgatccccccacctcagcctcccaagtagctggtactacaggcacacaccaccaagcccagctcatattttttattttttgtagagatggtagctcactatgttgttcaggctaatcttgaactcttggcctcaagctgtcctcctgcttcagcctcccaaagcactgggattgcatgagcccagcctttgatgtcgtctcttattcctcaaagattctgcacagtctgtgattttgttacatttccacaacaaccgtgtgcagagggtatgatgttttgctagatgggcagagatgtttaaaataataaaatattgacacccagcatgggctaggacgcaga

SEQ ID NO: 234372 - DNA, 464 bp, Homo sapiens
agccacaaggtcaaggtgacataacaatgcaaccttatgaccatcttaaattgtccaaacaagagatatcacatatattgtttcacctagtacatttaaatgcaaagtggtcaatgcatttgaggttggtgagttctgcaggggcagacatgaagcatttttgaagtctctgaagttccctaaaattactcatcagtatgcaaagaatgacttaaaacattgagctgtgaagcagcaatgacaaggatcattcctgatagaaaaagtccatattagacaaataatgtgtagacatgtctcccatatgctggctagaggaaccattaggggcgctacaaaaggcagatatttttctaccatgaacaatgtaacagacaagaatcatgagtccatgtcaagccttaaacaaaactccttcttggattaaatgacctaatggattcccagaataaaaacgaaacagg

SEQ ID NO: 234373 - DNA, 791 bp, Homo sapiens
gatacttctcctgaaatgtgacagatattacattaatcagtagagaaagagtgaactcattaataaatgacactgggtcatacctggttaaatggaaaaaaattcattccataacacataattcacagaaagtactcaacagattaaaaatctaaaaatgaagagtagaacttcaaaagaaaatataggagaacatatttatgactttgacataggaaggtttgttaacacatagagtaaaccagaaaggaagagattaagttttaaaacttctgttcaagaaaagacaccatagttataagggaagcacaaatgaatgaagttggaaccatgtaccatatccgaaaattaactcaaaatggatcaaagacaatgtaagatctaaagctataaaactcttggaagaaaacaggtctgaatcttcaatttggcaaaggatgcttagataatgccaaaagcacaagctataaaagaaaaagtagataatttggacttcttcaaaattaaaaactgtgtttcaaaggacaccatcaagaaagcaaaagacagcctacagaaagggaaaaaatatttgcaaatgatatttctgataagagtagtattcagtgtatataacaaaaagataacccaatttaaaaatgggcaaaggatttgaatagatatttctccaatgaagatatataaatggccaacatggtacattaaaaaatgctcaacatcattagaaattagagaaatgcaaatcaaaacctctatgaagcctgagcaacatagtgagaccctgtctttac

SEQ ID NO: 234374 - DNA, 239 bp, Homo sapiens
aatcatttactaatatatctcattttattccaacactgctgcttgcatttctttccaagcatagagaagaaatccaaatacaaagtactacacataatacagtgcaacaaaaatgaggtaggggcgtcccactcattaaacaattgctgacttgaaaatgtcccaattttataaaatgtatcaagagaccgacactttgcattgtattttattcctctatgtcagttaacaattaatta

SEQ ID NO: 234375 - DNA, 377 bp, Homo sapiens
ctttcaagttatgacagtcattcacgactgtcaaatataatggcattttagacatcatccaggaatcgttaacaggttccaagtgccttggcacaaagagtttacaaaaacattctgagctttgttaagaagacacttctgacccaccttcaataggattcactttttgtgttatctttctatcaatggtaatagaaaagccgatatccttagttgtctggtacctgaaaaacaggatatatccacaaaagcacttgagtttgctctccttcctcaagcaaaacttgccaaattttaaaatggtgaaatgagaagaagaagaaatttggttttgagttgaattttccctatcttaattacagaaggtaagtattctg

SEQ ID NO: 234376 - DNA, 479 bp, Homo sapiens
tttgttctctgtctttgctgtggcctctgcctggaatccacgctttagttggagcttgtcaggccttttctcatcctttaaggctcagtgcgagggcagcctcatcctcggagcccttcctgaagccccagagagccccagccccttcctcttggcaccgtctcagtctctgaggtttttggttttctcctgctggctctgtcctgtcagcctcacagtgagctccggaggggagctcacagtcacccaccccgaaccccaggactgtgtcttacctttccttccccctccctgcccactggatgctgggagctgctcactgcatgcatggataactgaagctatttgtactcttaaagggaggaggtgcaggccaggcacagtggctcatgcctataatcctagcactttgagaaaccttgcttgagctccagagtttgagaccagtctggacaacagagtggaaccctgtctctaca

SEQ ID NO: 234377 - DNA, 506 bp, Homo sapiens
ccattatcagtatttctcggttcttttggggacaatggtgctcacctctaagttttactgctcagtgtacatctctcactttctaagcaaatctcttcattaggctcttactacaattcatggagaaaggaataagagctagcacagaggaggtgctcagtaattatttattgattaaatgaatgaatgactagattcctgctaagccccctcctatttcagagagcaagtgtaagaaacttccattgcctctctaaggactgtccttgtcagaagctaccctaaaattgtaggcctttcctctctccacccagcactccaagtcataatttgctttccaggatggtgtgtctctgctgtagcctgggatagaatggggcggcagaggtccccctttaccccgctttgtgcattgcatgctctcaaagtctggcacattaagctatacagatatatgcaaatttatatactgaagtcctggtataaattatagctctgtaagaata

SEQ ID NO: 234378 - DNA, 420 bp, Homo sapiens
gttacagaataaatattgacagttcttagttgaaaatgacatctgaggctgggcttggtggctcacgcctataatcccagcactttgggaggccaaggcgggtggatcacaaggtcaggagatggagatcatcctggctaacacaatgaaaaatctgaaaaatacaaaatttttcagaaattctgaaaaatacaaaaaattagccagacatggtggcacgtgcctgtagtccaagctactcgggaggctgagacaggagaatcccttaaactcgggaggtggaggttgcagtgagccgagaccacaccactgcactcaggcctgggcaagagagcaagactctgcctccaaaacaaacaaacaaacaaacaaacaaaaaacccaccaaaccaggactttttgaactcagctctgaaccaa

SEQ ID NO: 234379 - DNA, 335 bp, Homo sapiens
tggtcaagacagagtatgttgctcaagtatgcccagtatgttgcctaggctggtcctgaactcttgacctcaagtgatccttccatctcagccacctaaagagttgggattacaagcatgagccactgcccccagctatatgcactcatattcgactattactcttctttcaaccttctgtcattttttccttccttgagagaacctcacaccaattaatttcattcctctgtgctccttacatcaccaacataccacaccttgctctatacctgaatcaccactctgtattctatgttatagcaaaatcccctttctgtctttatgtccttggg

SEQ ID NO: 234380 - DNA, 442 bp, Homo sapiens
  misc_feature (335)..(335): n is a, c, g, or t
  misc_feature (398)..(398): n is a, c, g, or t
  misc_feature (404)..(404): n is a, c, g, or t
tgaggcagcctttgtctggctggaacacgcattggcagcgggagctgtcggtaggacctgggacaccgcggaagtcgggaaatggcctcagtggctttagaggatgtggctgtgaacttcacccgagaagagtgggctttgctgggtccttgtcagaagaatctctacaaagatgtgatgcaggaaaccatcaggaacctggattgtgtagtaatgaaatggaaagaccagaacattgaagatcaatatagatatcccaggaaaaatctaagatgtcgtatgttagagagatttgttgaaagtaaagatggaactcaatgtggagaaacatctanccagattcaagatagtattgtgaccaagaacactcttcctggagtaggtccttgtgaaagcantatganaggagaaatcgtcatgggtcattcatcccttaattgtt

SEQ ID NO: 234381 - DNA, 232 bp, Homo sapiens
tttatgaaaagataacctgtcttctaacctgcttggatggctggtagtcaaatgtgaacgaacacctaccgtgtgcctggccatgttctatgttctaggctgcagcaatcaacaagatggccatacaacacccacccggtgaagttcaagtccagtagctgttagcttaagaaagagtattcccttatcccactacaccttaaaatgtatttgctgtcctgcagcgttggct

SEQ ID NO: 234382 - DNA, 370 bp, Homo sapiens
caattatatagggaaagtaaataatgttagaaaggtagtttaaaattttccttttttgcttatcatgttagaaagaatttaaaatagtggccaggcatggtggctcatgcctgtaatcccagcactttggggggccaaggtgggaggatcacttgagttcaggagttcaagcccagcctggccaacatggtgaaaccccgtctctactaaaaatacaaaaattagctgggcgtggtggtgcacctgtagtcccagctacttgggaggttgaggcaggagaatcgcttcaacccgggaggcagaggttgcagtgagccgagtttgtgccactgtactccagcctgggcgacagaatgagactccttcgcca

SEQ ID NO: 234383 - DNA, 439 bp, Homo sapiens
ttaaaatgaacaagtgtatgatttggtgtaaaatgaaaaatcagcccaaattgcaagccaagccgccggtggttatgaatggctgctgtgactccgccccaaggttccccaggacttctggatttatgtacttctcttccagtggggcacacagtggagagagtttgagacaacactgctgagagaattgccacatgggcgctggctgcacagacccaaacctcacagagtgaaaggggactttcctcacagagtgaaagtcgcagctttcccgagcccagggaagccccccagagaggggctgtagtgggggctgggcagttctaggagcctccactgccctgggccacccctccgccgccagagccacgacccctgcagccgcctgtggcaggtcgtcattggtgccctggtggagcagccctaggaagggcggccg

SEQ ID NO: 234384 - DNA, 366 bp, Homo sapiens
ggaggcagaggttgcagggagctgagatcatgtcattgcactccagcctgggtgacaagagcaaatctccgtctcaaaaaaaaaaaaattccagggtaatctgagatcttggtatttagagacatttggttgggatgaggggtcttggtagatttgattctgttatcatttggaaccttccaaagtagaggatgacgcatttgtttttgagctactttctagaaaccagaatttactgtcagagaatataggattttcggttttaaaactttgaacttaaaatgattgcaacagtattttagtgatattctaaaaaatatttaaaaataaagttccgttgagccgtcggatcctcgtgagcagcca

SEQ ID NO: 234385 - DNA, 334 bp, Homo sapiens
ggaggcagaggttgcagggagctgagatcatgtcattgcactccagcctgggtgacaagagcaaatctccgtctcaaaaaaaaaaaaattccagggtaatctgagatcttggtatttagagacatttggttgggatgaggggtcttggtagatttgattctgttatcatttggaaccttccaaagtagaggatgacgcatttgtttttgagctactttctagaaaccagaatttactgtcagagaatataggattttcggttttaaaactttgaacttaaaatgattgcactccagcctgggtgacaagagcaagtctccgtctcaaaaaaaaa

SEQ ID NO: 234386 - DNA, 445 bp, Homo sapiens
caaataccaatgtaagaacacaggaaacatgaaaagcaaggaactatgacacctccaaaacaacacaataattttccagcaacatatcccaatcaaaaagaaatttacaaaatcctgggaaaagaattcaaaatattgacactaaagaagcaaaatattgaggctgggtgtggtgcctcatgtctgtaatcccagcactttgggaggcagaggcaggaggataacctgaggtcaagagtttgaggccagcctggccaacatggtgaaaccctatctctactaaaaataaaaaaacttagctggttgtggtggcatgtgcctgtaatcccagctactcaaatgtctgaggcaggagaattgcttgaacccgggaggtggagaatgcagtgagccaagatcgtgccattgcactccagcatgggcaacaagagcaaaactctgtcta

SEQ ID NO: 234387 - DNA, 466 bp, Homo sapiens
gaccagccaccacttggggttgtctctgcaacccacgctccgcgccgccctgacccggtaccggcccgcgcggcggtataggcgggcgctgggtgctggtcgctgggcgcggaggctttctttgccaagggcagcgcgccccctgctgtccgagcggaagaactgcgcagcacgcgaggccgcagacgccctctggtcagggccctgcagaatggcttgggctgggactcgtcctgcgcccttgggcgaggccatttgtccctgggtcgggaggagcttaaccgtggggctcggctgtatccgcgaatggcaggggcacaggacagcggggactgtgacggaacacatgccgttattccatgcattgtgccgtgctgtgagtgcataaccaaaaaataccaactcagtccatggctaaagtaaggacatgcaataaaaatttaagcctgataagaaaaaaagtgag

SEQ ID NO: 234388 - DNA, 862 bp, Homo sapiens
ggtagataaaggtgaaaatatcacctcaatttttggtaaagctgcttgtagaacatagattaggtcggtggccaagcaaacaagaatgcatgctccttcaagcaagcagttagcaagaatgagaaaggaactcaatcgaatatgtccaatttcttcttccaagtttattggatctgataatgaggataagtgtcttaagtcagcttcttcctaaagtaggccctgagacaggatctgagttccagtggtttctttgggaggtgatttccagagcaccagtaatggagtagggaaatgaaacagggaagaaaggaatttatttaagccaatataaagtatattaatgagcaactggagctcagtcatcctgggaaccctaggaattgtgcagaacatgcctctgagttgaaaaaactggagtagccattcactaactgctatcagtcatggctaagggctcctcctaggaatgtcaactccctggaaattactaactctctagcttactctatgcccaggctgatcaagcttctggggccagagaatgcactctggcaggcagaaattgcaaataattgccataaagaattgtccatgtgcacaggagcaggcagtgccaagtggttaccagtggagtatagatggtgatacatttgtcatgggacctgaaacaacccagtggattttctaagataaactaaaactaactaaactaaacttggagcagttttcctactacttccttttctctgcaaggaattctcagcagggcctttccaacataagcatgggaggtctttttgtacaaataaaaaagattatttttccttatttcttatatttttctgtttgtaaggcaaaa

SEQ ID NO: 234389 - DNA, 463 bp, Homo sapiens
tctttgtggagtgactgcgacccctagacccacgggcctaacgactggcactcacagtgcagtagccgtggtggcatctctacacaccccatcttcctcttcaagttatatccttctggtcttttgtccctttcactgattttccataattgtattgttttattattggtagacaatactgagcagaatttttctcagggaaaccacctagctttgttgaacttttcttctctttctaaacttttcaagtggtcaaactctggctcatcgttctgaaaggtcctgtaaacatggtattcccttctgcttaagatgggattttgttcatctgctcctgttgaaggattatgactctgccacctgtatctccagttcctactaattctccagaatgaataagttctactggggaagaaaaaagctaatgaaatagttatggtcaatagttatagaaaaattaaaa

SEQ ID NO: 234390 - DNA, 467 bp, Homo sapiens
agagttgaaagcgtccagtatttttcaaaccaggatcgctggcatcccttggagaggagcttgagggcaacagtgaagcctcttcctttcaacaaactgctctgctcttatttatttagatttgaagaaagggtgttcccatttttaaataaaagtttgaaaactacaaactcttatgtaaaaaagaaaagctaagcataggctgggcatagtggctcacaccagaactttgagaggccaaggcaggagtatggtttgaggccatacttgggcaacatagaaagactccatctctaaataaaaagttttttaaattagctgggcatactggcacacacctgtagtcctagatacttgagaggctgcggcaggaggatggcttgaggtccaggagctatgatcatgccattgcactccagcctgggcaacagagcaagactgtctcaaatgtctctaatttaccaaaa

SEQ ID NO: 234391 - DNA, 439 bp, Homo sapiens
ataatgttaatgcatgtagataaaatgaggattcatgcattgttctgttgttacctcagtgagcccttcctatctgcagatgggatgcagaactggtgaataaagaggaccaacttaaggggctggggaatccaaggattttactatctgtgagagttttggaaccagtcttccacagatacccagggatgactgcccctgcacgcaaggtgggtctacagttgtgcgctctctcctttcaagatttctcattttgttcctatcaggctagccctgacatcttgaatgtgactgtttactctctctctgggcctcattttctttatttgtaaaatgaagaatttgggagaagatctcttctaattttaacacagtatgattcgactggtgtccttactgtataggataactgaagttaataaagtctttgcatcacaaa

SEQ ID NO: 234392 - DNA, 465 bp, Homo sapiens
tctttatccagtctgtcattggtggccatttgggttgattccatgtctttgctattgtgaatagtgctaccttaccttttaaaaaagtaaactcaatttttcaaatgtttgtgaacattacatgatatgtcatatatatctgtcctagagataatcttacctgcagaattggtctagtaacataatatctcgacaacaccccactttcattttaagggataatctataatcatgaattctcagtccttatgagagcgatctcatgcagatgatggtattctgaatgagcacaagtgtatacaaaagaccaacagggaataaaattatactcatatgaaaacggcttttatctaaattacaaaaattggattataaaataaagatggtggtcttagttttctaacactaaatattcccttttgtaatctcattggctcttgcgcagtgaaataaaaatttgaaact

SEQ ID NO: 234393 - DNA, 362 bp, Homo sapiens
ccaggtggaaatacatttcttactccatttttattaatttattaattatattaattaatgtaatcttattaaatttatttaatttatcaaattgtattaaacgaatgtatttaatcttttattattaaattaactagaattaactctatttaattctattattcccacttcctttattagctagaattcttctctaaagaaaaactgtcccacaccagctatttggctactttgagatatagtttgtgcagaaaaagcagtgtaaatatttaattttttccattttatttaccagttttcagagaagtactactacaaaggtgaccaataaaaggatttttggttttgtgtcattatgaact

SEQ ID NO: 234394 - DNA, 401 bp, Homo sapiens
ctcatttgcatgattgaagttggcttatactatcatgactatgttccaatgaataagaaggaaaaagccaggaatagagaatgagacatttccttttcaaaatatgacttagggctgggtgctgtggctcacgcctataatcccagcactttaggaggctgaggtgggcggatcacctgagatcaagagttcgagaccagcctggccaacatgatgaaaacccatctctactaaagatataaaaattagcctgacatggtggcatgtgcctgtgatcccagctactcaggaggctgaggtaggagaatcacttgaatccgagaggcggaggttacagtgagccgagattgcgccactgtgctccatcctgggtgggtgacaaagcgagactccatctccaa

SEQ ID NO: 234395 - DNA, 470 bp, Homo sapiens
ggtcatggggacagctccgggctgaggaattgatccagcacccctgcccccagtggtggagacgtcaagcccttcccatgggtgtcctggccctgtcttctctcctcagttttctcatctgtaaggtgggagtagcctggctgataggccgttatgagaatttacagagctaacacatgcaaagtccttagaacagaaacaaccacagtaaatagtggctacaattttaccccactcctcggttagtcctgtcaacccagaacccccgtggggcaggccctggtctcacagatgcccccaggacaaggcaggttctcaccactgctggtgccggactcccaccccttctcccctctttacatccgtctgcttaactccttcccagctactgtggatctcctagttccacaagacagaagggaagttttcaaaagaaagttgaccgtaaataaaacaaattatttaaagtg

SEQ ID NO: 234396 - DNA, 483 bp, Homo sapiens
agcgcctttataatgttttattctcccaagttcttctcaaaaaagtcaacatccaccaagtatcagctgagatttgaacttcaaccctgggctgaactcagtggcaggactctccattcccaacaagggacaaatggagaaataaatggtgagagggaggagcttgattctgcccatgctaattggacacctgttgtgtgctaggaagacacacagaggtcaatccaaattccagctccagccagagcaggacagccatggtgtagaaggcctagcccagaggagggagccttagcaagcggagcacccctccatggagtattgacactctgttatttcagttatactgaaaactaatagaaggtatgagatattgcactcaaccattatgagcaagaaaatccattcaatcttctttaatttggttaaaactaacctttactaaaaggcagcaaagaataatgcttgtctgtgagaatttaa

SEQ ID NO: 234397 - DNA, 391 bp, Homo sapiens
gtggtgcctcctttggcctgcctatggctgcccatggatcaatcagcaggcatttcctccaccccataaaagcctcgggctcaggcagagcaagagagaggatggagggacaggaagaccagttgcagagagaagctgccctctctgctaatagcaggagacgatgggacaaccagctgcacagaggaactaccctctctgctgagagcttcagagacctgcagagacttcgggactacagtgcagagaggagcaaggagcacccgctccagggcctcctctctgctgagagcagtagatgttgggaagacctgcctacggagaggagctacccactgtgggtctcctctgagctgttctaaaatttagtaaagctcatcttcatcttgtc

SEQ ID NO: 234398 - DNA, 379 bp, Homo sapiens
cctctagaagatgactccaacctagaagacccatcagagaaggtgaatgcatagcccggatgtactcagccattaagtgcgggctaggggctgcactcagcctgtctgagttcacagctcttgctctttccctcacagtgtgtttttttggggggatgggggtggcagtgataactgaaaaagtgtcatgctgtctgggtactcattacatgcattcttagtctaatgtctaaagttggaatctttacccctcccttctgttccacaacacttctgcaaaagaatgactggaatttaacgttaactaagggaaaaaatattttacccatgtccctggaggtagattttctttcttttttttcccaaagccctaccaaaa

SEQ ID NO: 234399 - DNA, 696 bp, Homo sapiens
attttcatatttcatatagcagtttgatcaatttacagatttattttacataattagtaaatgagaaattcaattgctgatatataactattttttcataatgtaaaaaagaagctaaaattctgaattataaataaaaaacaaatattttgaagacatctggtccacatctgtctgaaataagataatttaaaacagtgtaattaaatgcaagaaatactgaaatattcacaccttaggatgttaaaaaaaactcatttcattttgatgtgatttgtttaattgtagagtttttaaaaatgttagtgtcctttagcctctcattctatcatttacaaagaagactgacaagctaaacaaaaaaaaataatccatgtgttccaaagcctctactaaatgaaagaattatctttattactattcttttatatgggcataactccactcctaagttaatactcagcggacatagacccagacctacctccttttgatgtatttataattctccattcaattacttaaaatgagagattagtgagagggtctctaatctccctaaattgtgcgttccttgtgggcacaaaggagctcagtaaatgtgagaggaaggtattcagacctatggaaatgaaaagcatctttggtacattctcatgatcattggagagtcagcctttgaagattggtcttttc

SEQ ID NO: 234400 - DNA, 304 bp, Homo sapiens
tcgggaatgccacattccagggggccgtgcccctgctggacccctcaccatcaacatgagcgagtgtgcaggccggggccatcctgggccctgccagggagcgaaccggagctggcaccaggccctcatgacccagtgtttccccagcgtttaaaacgcggaccttagtgacttccctgtggtgtgtgtccttaggagtgaacacacataccatgttctctaaccatatcggaagctaaaaatcggtaacagatatcggcaaaatctctaaatatttggaaattaaataatataccgctaaata

SEQ ID NO: 234401 - DNA, 321 bp, Homo sapiens
tacccagaaggatcctgaagctcacagaggttatgtagcctgcctaaggttacccagctagcaactggcaaagctaggagttgctgcagaatagcaagcctatcactcacaatggccagaaatcagaacaaatgatcattacaaacaacccatgtagacagttttctatcgtaaggcagtgatttttgagtccatagatgggccagtaggaagtctacactgaaatcagcattgtgcctgatactgagaggaataaagttgataggaaggagcaatcagaaagctttggctgaaaagaatgatttaaaccactggagaaaa

SEQ ID NO: 234402 - DNA, 442 bp, Homo sapiens
agcatgtccttttgtacattttgaattttatactctatgaatatattacttcatttttttaagcaatggaattgaaaaaaaatttaagcattaaatagacccctagaaagaaagagtcaagtgtttcctcctctgtaagtcttctctaccttgatgctcatctccactgagctaccatcatgccctccacacagctcggtggcagcgtttatcactttatattgttaagtatctgcaaacaagcaagcagtcctaccatcctcacagcccagaggctccttgagggaagagactttgtctaactcaatttggaatctccagccccttgcacggtgccagtacagaggaagggctcatagagatttgttgaattcgtgaacaaatagagtttctgtgcagaagggaagcaaaataaatgtaagtattcacatttatttcacag

SEQ ID NO: 234403 - DNA, 283 bp, Homo sapiens
ccagtaacccatagcaaaaaatggactcagttgatcctgtgacccccttcaagaaccgattcaacacaagaagacagtttcaacagccctatgatttcatccctgacccagccaatcaccattccccattctctagcctcctgatgggcaggaggctagagaggttcaaagtttttcatccttgaaagactgtagcctccaaattctcaggaaggcagatttgagaattatctcttatacttgcttggccaccctgcaattattaaactctttttctgctgca

SEQ ID NO: 234404 - DNA, 291 bp, Homo sapiens
ctggaaatgatttaaaggcccatctgcaagagagtataaattctcatagcccttgcagcaagtgcaggaaaaatggcacaagacaacatgcattgaaacaagaaggggttcagaatctggtgagtgggggaaaaaggaggttataaagcattgcatggtacaatcccgttttatgggagaaatgcgattttccattaaggataaggctgtgagctccatgaggccaaggatgtctcctgtgtctgacgtgcttctcctacccagtggaggttagagatgcagtatatgtat

SEQ ID NO: 234405 - DNA, 372 bp, Homo sapiens
aggggggaattggctttaattattgggataattattatttttaaaaagagaaagaaactggggatggggaggaaaaaaatgaagcccaacccagtgcctctctctgtcttctttgaaagcacgcggaaatggacgcaggaagccgggcggcctgcgcgccgagcgccgcgggccccggccttagtttctaactccaggaggggtgccaaggcggcgtcagctcgggctccggcggccgctcggcgcgcggtggcggctggtggcgaggaaaaaatgggccattgcccgagcgatcagtccatataaggctgggctccactcacgaacctggggaggcggggagagggggagaaagagagggagggagggaaa

SEQ ID NO: 234406 - DNA, 477 bp, Homo sapiens
gtttttaagattggatgagttatttcctgttcttttcctcttattgctggtttgataggcagtgtcctggggcagctgtcagatgcttcttacagggaagtcccctgcatctccttttgccatgcccttaatctcccagagattcagtcacacgccgggtaccgtgttcctgtcgttgtggggacgtagtcagtagagaattcaagttcagttttctggattaaaaaaaagaatctccagaaccactttgtggatgctgcatggtgacttgatgtgtagccagagacagtgtttctcaaagtgtgctgagtttccaactaaggatccgtgagataattttagatcatgtggagatgacagttttaaagttatatttattttagtgtgtagtagaaagaaaccaaatcaaatctgtgatttcatagatattattgcttagggccagactacatttcagtgggatataagtcagttcga

SEQ ID NO: 234407 - DNA, 884 bp, Homo sapiens
  misc_feature (43)..(43): n is a, c, g, or t
  misc_feature (49)..(49): n is a, c, g, or t
  misc_feature (52)..(52): n is a, c, g, or t
  misc_feature (58)..(58): n is a, c, g, or t
  misc_feature (73)..(74): n is a, c, g, or t
  misc_feature (78)..(79): n is a, c, g, or t
  misc_feature (82)..(82): n is a, c, g, or t
  misc_feature (84)..(84): n is a, c, g, or t
  misc_feature (94)..(94): n is a, c, g, or t
  misc_feature (110)..(110): n is a, c, g, or t
  misc_feature (115)..(115): n is a, c, g, or t
  misc_feature (140)..(140): n is a, c, g, or t
gtgatgaaaaacaaaaactgtggacagttgccaagtccccagntctcanggntgggtngggtctccccacagnnagcnnggntnagacacactntccattgccgaagcgngaggnacccttgtcatcatcccacagagtntgcctggtcattgcttttaaagtgcttagagactgtcaatgaaggagcaatctcaataaactttgtggttttgtcatcctcagaaatgaccaatcttcatgaaggtggtgttgtgcaagcctgggcttctattaaaataaaaaagtgtgctttgcacctaaggcaatggtgggattaaagcaagtagcaaattgatgttctcatttaaaagtcttgcctggtctgtgagtgccctgggcctgcaaaggtaaaagaagcctgaccacaaagcaactgggcattctggaggttactgggcagacctgagactccagagaaagtaggaagagaaggcagattgtcagttaatgatggcggtgttcgtttctgtttgtatacttttaacagtctaaaaatggggcttcggacacaatacctttcctaaatgaaaccagtgcctgcttcgttacaggcacaaggtatgtactgtgggtgacatccagcccccttcagttttccagagtctttcctggggtcttgcttggctcagggccactggaacacaacccacccgatgacaccagggtgtgtcgagcctgtggtcaaggttcacacgtctgtgtgtgccacaaccactgcagaggggaaagacatcatccacacaacatcccaccctcagcagggacttggaaaatcaggaacccgatagtccatagttggggagactgaaaggttccccaaacaagcaaggctgctccattttac

SEQ ID NO: 234408 - DNA, 839 bp, Homo sapiens
tgttgaaggaaaaaacaaagccgttgaccagttgccaaagtcacccaggtttcaaggggtggggtggggttctccccacaaacagcctggttcagccacactttccattcccgaaggggaagggacccttgtcatcatcccacagagtttgccttgtcattgcttctgtcatcctcagaaatgaccaatcttcatgaaggtggtgttgtgcaagcctgggcttctattaaaataaaaaagtgtgctttgcacctaaggcaatggtgggattaaagcaagtagcaaattgatgttctcatttaaaagtcttgcctggtctgtgagtgccctgggcctgcaaaggtaaaagaagcctgaccacaaagcaactgggcattctggaggttactgggcagacctgagactccagagaaagtaggaagagaaggcagattgtcagttaatgatggcggtgttcgtttctgtttgtatacttttaacagtctaaaaatggggcttcggacacaatacctttcctaaatgaaaccagtgcctgcttcgttacaggcacaaggtatgtactgtgggtgacatccagcccccttcagttttccagagtctttcctggggtcttgcttggctcagggccactggaacacaacccacccgatgacaccagggtgtgtcgagcctgtggtcaaggttcacacgtctgtgtgtgccacaaccactgcagaggggaaagacatcatccacacaacatcccaccctcagcagggacttggaaaatcaggaacccgatagtccatagttggggagactgaaaggttccccaaacaagcaaggctgctccattttac

SEQ ID NO: 234409 - DNA, 833 bp, Homo sapiens
  misc_feature (59)..(59): n is a, c, g, or t
  misc_feature (64)..(64): n is a, c, g, or t
  misc_feature (89)..(89): n is a, c, g, or t
tgtggatgaaaaaacaagaccggtgaacaggtcccaagtcaccaccattgccgaagcgngaggnacccttgtcatcatcccacagagtntgcctggtcattgcttttaaagtgcttagagactgtcaatgaaggagcaatctcaataaactttgtggttttgtcatcctcagaaatgaccaatcttcatgaaggtggtgttgtgcaagcctgggcttctattaaaataaaaaagtgtgctttgcacctaaggcaatggtgggattaaagcaagtagcaaattgatgttctcatttaaaagtcttgcctggtctgtgagtgccctgggcctgcaaaggtaaaagaagcctgaccacaaagcaactgggcattctggaggttactgggcagacctgagactccagagaaagtaggaagagaaggcagattgtcagttaatgatggcggtgttcgtttctgtttgtatacttttaacagtctaaaaatggggcttcggacacaatacctttcctaaatgaaaccagtgcctgcttcgttacaggcacaaggtatgtactgtgggtgacatccagcccccttcagttttccagagtctttcctggggtcttgcttggctcagggccactggaacacaacccacccgatgacaccagggtgtgtcgagcctgtggtcaaggttcacacgtctgtgtgtgccacaaccactgcagaggggaaagacatcatccacacaacatcccaccctcagcagggacttggaaaatcaggaacccgatagtccatagttggggagactgaaaggttccccaaacaagcaaggctgctccattttac

SEQ ID NO: 234410 - DNA, 831 bp, Homo sapiens
  misc_feature (43)..(43): n is a, c, g, or t
  misc_feature (49)..(49): n is a, c, g, or t
  misc_feature (52)..(52): n is a, c, g, or t
  misc_feature (58)..(58): n is a, c, g, or t
  misc_feature (73)..(74): n is a, c, g, or t
  misc_feature (78)..(79): n is a, c, g, or t
  misc_feature (82)..(82): n is a, c, g, or t
  misc_feature (84)..(84): n is a, c, g, or t
  misc_feature (94)..(94): n is a, c, g, or t
  misc_feature (110)..(110): n is a, c, g, or t
  misc_feature (115)..(115): n is a, c, g, or t
  misc_feature (140)..(140): n is a, c, g, or t
gtgatgaaaaacaaaaactgtggacagttgccaagtccccagntctcanggntgggtngggtctccccacagnnagcnnggntnagacacactntccattgccgaagcgngaggnacccttgtcatcatcccacagagtntgcctggtcattgcttttaaagtgcttagagactgtcaatgaaggagcaatctcaataaactttgtggttttgtcatcctcagaaatgaccaatcttcatgaaggtggtgttgtgcaagcctgggcttctattaaaataaaaaagtgtgctttgcacctaaggcaatggtgggattaaagcaagtagcaaattgatgttctcatttaaaagtcttgcctggtctgtgagtgccctgggcctgcaaaggtaaaagaagcctgaccacaaagcaactgggcattctggaggttactgggcagacctgagactccagagaaagtaggaagagaagagtctaaaaatggggcttcggacacaatacctttcctaaatgaaaccagtgcctgcttcgttacaggcacaaggtatgtactgtgggtgacatccagcccccttcagttttccagagtctttcctggggtcttgcttggctcagggccactggaacacaacccacccgatgacaccagggtgtgtcgagcctgtggtcaaggttcacacgtctgtgtgtgccacaaccactgcagaggggaaagacatcatccacacaacatcccaccctcagcagggacttggaaaatcaggaacccgatagtccatagttggggagactgaaaggttccccaaacaagcaaggctgctccattttac

SEQ ID NO: 234411 - DNA, 400 bp, Homo sapiens
ccttatttatagttatggctcatatttaagaaaaaatgataatacatagtttgatctcttgcctaatactttgagtgataatgacttactgtaagccataccttttctcaaaagatgaggatttggcatcatttagaaaaactgtcttctggataataggcatttcttgttaaattctaaaaatactttgaatcttaaaagcatcaactaaattaatgaataaacctttcaagaccactgtaagggaagccccatatttagatatataagttgtatttcattcttaagaaagaaaattctttatagattggtgttgaaaatgtaaatgaaacatttttttaaatttttgcttatgagacttgaaatttgaatgttcaaaaataaactgtgtaactcttta

SEQ ID NO: 234412 - DNA, 662 bp, Homo sapiens
gagaaaaaaaaatgtatttccaattggatagggctgaaaccagaattttggacgagagttaagaagcatttcaaattgtcatgagaaaataaataattacataaatgcatttcacgtatatcagtgacaattaaaaaaacagtcaaactagccagtaattgttcttcgtattaaaattgcattcgttatccatccttctgcaacatgactccaagaatttacatttattatttaaatatatatcttaaaaatacttttgtaaaaatacacagttatcccttgaataaatgccttaggtcttaggaaagtatataccttgtaacagttttgatctaaagatgctagctccatagtccctaaatttaaaaaagaaaggcctatgtgcaaaacattaaaagaacaattgtttttagtataatgcatgttaatacagcataataatagtaaaatttagaagttgaatgctctagcactacaaacattgaggagttacgtggaattggaaaatagtctccttggtaatttaaccaaagtaaaccttatctataagcaaaataacacataaaacataacattttctttgcattttcttaaaaggaactttatatttttcagaacatatgttagcatttcatttagggtcttattaaaaatgccctggc

SEQ ID NO: 234413 - DNA, 1065 bp, Homo sapiens
gaggcagaggttgcagtgagccaagatcgtgccactgcactccagcctgggtgacagagccagattctgtgtcaaaaaaataaaaataaaaaattgaccaacaaaatttcagggagtaataaaggctgtatacagagttaaaataggatgatgtgttaagaaagtaatggatgggtacggtggcttacacctgtaattccagcactttgggaggcccacacagtcagttgaactcaggagttcaagaccagcctgggcaacatggtgaaaccccatctctacaaaaataaaaaaattagctggacatggttgcgtgtgcctgtggttccagctactcgggaggctgaggcgggaggatgacttgggcatgggaggttgaggctgcagtgagccatgatggaaccactgcgctccagtctgagtgacagagcaagaccccatctcaaaaaaaaaaaagaaagtgactaagtaggtatatcagattgtgtggtagggaatgctgctctgaagacatgacatttaagcagagacttgaatgacaagagggatccaaccaggcaaagaacagagagtgttctaggccgaggagacagctagagcaaagccttgtgatgggacagtctcaccatagcaagaatcaagaaggcctgcgtggctagaaagtaatgaacagggatagagaagtacagggtgtactggagggatgtaggcagaggcccaacaatgggctggcctctctgttcctctggtgcctcctgctactacaagagtttttatctgctcctcctctgtggtgcttagcattcagtcagtcagttatgggaatatagcagtggacaaaagagacaaaatccttgcccttgtggaacgtgtatcctaatagggagatagatgtgaaaaagtcataataaatagtatgttaaaaaaaaaaaggtcgtaaatgccaaaaaaaaaaaaaaagatagtcaacacaggataaactaatcaggagtgccaggtttggagggaggtaggccctattaagaaggtggcatcacacttgggagaaggtgaggaaattagcta

SEQ ID NO: 234414 - DNA, 539 bp, Homo sapiens
gaggcagaggttgcagtgagccaagatcgtgccactgcactccagcctgggtgacagagccagattctgtgtcaaaaaaataaaaataaaaaattgaccaacaaaatttcagggagtaataaaggctgtatacagagttaaaataggatgatgtgttaagaaagtaatggatgggtacggtggcttacacctgtaattccagcactttgggaggcccacacagtcagttgaactcaggagttcaagaccagcctggcttggcctcccaaagtgccgggattacaggtgtgagccatcacaactggccaaatacatttgtttttaaggcagtaccacatttttacttaatgaccatatagcatgtgtattatgctgttcttgcattattgctataaagaaataccagagactgggtaacttataaagaaaagaggtttaatcggctcacgttctgcaggattgcaagaagcatgctcggcttctcggaggcctcagaaagcttcaattatggcagaagtgaagggatcagcacatcacta

SEQ ID NO: 234415 - DNA, 381 bp, Homo sapiens
gaactgcttttgcaataagtaaagtcaatgaagaaagtaagaggattgcaaaggtttcccccgctgattctgccaacagaaatgtttttattgtgctgctttgggcgtggaaaaaaaacagtgaaacatttccaactacaatttaaaggaatgcatgtcatttatttaaaacataaatcagcaaacagagagacataaaattactagtggactgcttcaagttcagaagccactgccctggtagaggagttaccaacgatcacacatcctataggaatccaactacagtggccctgagctgaaacagcatgcgttccatgctcctttgcataatttgcctacttcttctcatattttgtaaatataaaatctacttctggt

SEQ ID NO: 234416 - DNA, 628 bp, Homo sapiens
ttcctatcccctcatgctgccatcaggaagatgaggtggaccatgtctccctagtgcctgcctcttcagttctgactctttgtgctgatgaacttcatgatttgtaagacatgtcaggactgaatgtatgttctaaaagttaggagaatcagcagtgccgctgactggtctttctggggagaggagggtcacaggccatgggtagattcaggaatcctggtggagacccagtgatggggagggagtttgatcagtcactttgtgcctgtgttctgctgaagaatgggcagagtgagagcactgggctctccaggatggtgaagaattttttttcttttttttttttgcgcgacggaatctcgttccgtcacccaggctggagtgtggtggcacagtctcggctcactgcaacctccgcctcccaggttcaagcgattctcctgcctcagcctcctcagtagttgggattacaggagtccaccaccatgcctggctaattttttatttttagtagagatggggtttcactatattggctaggctggtctcgaactcctgacctcaagtgattccccccgcctcggcttcgcaaagtgctgggattacaggcataaaccactgtgcccgg

SEQ ID NO: 234417 - DNA, 225 bp, Homo sapiens
ggcaggagaaaatttcccaaccctataaaaaacatctattaaaaacttatagctaacatcttaatgtgaaagatcaaatgttttctaagagcaggaacaaggctagaattttcaccccatcctttttttttttttttttttttttttttttttaatggtaaaaactttatttactatttataaatacattgcaagacaaacttctcaaaaatacttttcccccca

SEQ ID NO: 234418 - DNA, 359 bp, Homo sapiens
tagcaatccaatataaaaataggcattccttatttattttgcatatgagctctttgtcaggtctatgacactatattttttaaaattaacgttttactaaaaatggcagtgaatgctaaatgtccagctttacaataagtacagtaatagcaactcaaactaaaacaaaacatacttctgatagccattatttttctgtttaggacaattttaaaatcttgtttgtcacaaaaacaggaaggtacctatacaaaggctcaaaacaggccatccttttaaacaaaaaggcaatgattcacaaaagactatgaatagaacatgtaactagttgacacaaatctaataggatttgttaaaat

SEQ ID NO: 234419 - DNA, 442 bp, Homo sapiens
ggatgaagaggatataacacgtaggaggtgaagtcactaacccaaatccttgcagccggcaagtggtcagaattcttggaccaggtgtgaggccttaagagaacaagctagcccagggcttggcatgaagtaggtgcttaataaagattggttttagccaggcgcagtggctcatgcctgtaatctcagcactttgggaggctgaagcaggaggatcacttgagcccaggagttccagaccagcctgggcaacacggcgaatccctgtctctactaaaaatacaaaaagattagtcgggtgtggtggcgcgtgcctgtaatcccagctactcgggaggctgaggcaggagaatagcttgaacctgggaggtagactttgcaatgagccaagatcgcaccactgccctccagccggggcaacagagcaagactgtctcaaaaa

SEQ ID NO: 234420 - DNA, 1495 bp, Homo sapiens
taacgatgttgtgctcagggtagtaattgagaggtattttacaccagatttaagcctgtgcttttatcttcaaagatatgctacttaaaattgggggaaagtgtacagaatggaactgtatggatatggatttttagaatagtgcacacacctcaagtgtgtatttatttcattaatttcccccaaactgagtacctcctatgtgttaggcactggacaaaacagtaaacaaaatagtaaacaaaagaataaaaatccctgccatcatgaagttccactttggggatggggtgagaagacattgatacaaaaattaaggtacagtctttcctgtccctcggcatctgtgggagattggttccaggacctcccttggataccaaagtcctcaaatgctcaagtccctgatataaaatggtgtagtgtttgcagataacctatgcacatcctcctatctttagttcaactctgcattatttataatgcgcaatacaacttaaatgctgtataaatagttgttatggtgtattgtttagggaataatgacaaaaaagagtctatacatgttcagtactgacttttttttccttccccgaatattttttcatccatgattggttgaatacaaggacgaagaacccatgggtaggaagggccaactgtgtacgtcaagtggcggaaagtgctagagaaaaaaaccaaagcagtgcaggggtatagggaatgccaagagatgggagtggtggccatagaaaagatgatattaacttggaggcctacgggtgataaagaagggtgccacttggaaggagctgccactgaagccctgaagcaggcgcatactagctagtttgactggaaaataatgaacaagagggaaagaagtagtggatacttaggtggaaatggggccaagtcatttaggagcatgtgggaatttataagaaccttaatttgtactttgaatgagttgggttttgagtaagcagtgagttgatctaacttgtgttttaaaagatctgattgctatgttgactgtatgcagcaggtgcagaaataagagttgttagtaggccattgactgcatttatccaggttaaaggtcgaggtgacttgaatcagggtagtaatagtggcggtagtgcgaaatgaccagattctagacttttgagagcagtcaggtagaagaagggtcaaggacgactccaagggttacggactgagcaactaaagaatataacttggccgggcgtgatggctcatgcttgtaataccatctttgagagaatccccagcctgggcgacataacgagaccctgtctctacaaaaaaataaaaaattagctgggcatagtggcatgagcctgtagtcctggctacttgggaagctgagatgggaggggaggatcacttgacccccttgagctcaaggttacagtgacccatgatccttcactgtagtccatcctgggtgacagcaagaccctgtctcttt

SEQ ID NO: 234421 - DNA, 435 bp, Homo sapiens
aggtcagagccctggtcttgtcccagctctgcctttgccagctgttagagcctcagtttcctcagtgctaaaggggataacagtcactacctcgccaggtggttgtgaatatacagagagcacctgtaacacagttgattcgtaactgttgctcctcaccgaccccttttgcattcccatggggaagagccaaggctggggagttatgactccagtgatagactgctccatgtgagtgactgtgtgtgtgtatctctatgttggggccagggatatctgaactgtgtggtgttataggagtcggcgaacctcttagcctcagtttccctatctgtacaatgggtaaagtgatcatacctcaggatttttgcaagaattaaatgaggtcctccatgccaaactgctagcaagggacctcagtatatgctcatctta

SEQ ID NO: 234422 - DNA, 196 bp, Homo sapiens
acaaaaggaaaaaggagacttcaattttcagctatttcatgaattgataaaggacattttgatgtgtgtatgtgtgttttatatgatatgccaataaaatttaatatacagggcattccagaatggtttctgccccactgatggacttcaaatatgtctcatcaactacagtattaaatgccataattaaaggtct

SEQ ID NO: 234423 - DNA, 328 bp, Homo sapiens
tggcctggaacacttcagtggtttctgctgccacaggatggagtcagctccctcagtgtgtcttacacagccctgggggccagccgtgcccaactttgcagcggcatcattctcccttttggggtcttttgttttggccataatgaacatttggtttctcctagtgtgaaaggtgttttctctagtaagaatgctgtccccgcttagtccagtcattgaaacactcaactttttaagtcaggctgagttcaaatcttgactcagtcacctattagtttccccccacccccagaatcattccacttagtagtgaagtgaccttggatga

SEQ ID NO: 234424 - DNA, 183 bp, Homo sapiens
gtagagatgggggtctcactgtgttgctcaggtccaattatatatatactaactttgcagggttgttccagagttcactgaggctgtttatatattttttccaatcttttcctttctgttattaaattatataatttctattgctctctgttagagataattcacccatccttttgccatctc

SEQ ID NO: 234425 - DNA, 431 bp, Homo sapiens
cagcatccctggcccaacaaagattggtgcaacagaaagagttctggactgggaggaagaatgtatgggttgtggtcctggtacttcttaactagccatgtgagtctggacaagctcctcagcttttctgtcttaaaaattagggagttggctgggtgcagtggctcatgcctgtaatcccagcactttgggaggccgaggcagatggatcacttgaggccaagagctcaagaccagcctggccaacatggtgaaaccctgtctctactaaaaatacaaaaattagtcaggtgtagtggtgcgtgcctgtagtcccagctacttgggaggctgaggcaacagaatcacttgaacccgggaggcagaggttgtagtagccgagattgagccactgcactgtagcctgggcgacaaagcaagactccgtctta

SEQ ID NO: 234426 - DNA, 795 bp, Homo sapiens
tttagatcttcatataaggaatgacccagatgattatataaatctacatttaattttcattagaattgtcctaggtagtgcttgaactttaaatcctgtagagtagaagcaaatctgtgtttgcaatagaaattgccagaagaaagaacaaggaagacatttagataatttcatctgggtgtgcaaagtcatcacaagatccatctttccattatctggaagttgggagccacctgtttttcatgacggtctgacggttggaatgagaagcttttctgtgggtgaggagatcgagatcagcctagctgtgtgcttctggtttaatatgtttcatgaggctgggggtcgtgatgtagaccaaggctccagtcatctgaggacctcactggactggaagaacagtgtccaagatggcttcctcccatgacaggcaaagtgatgctggtttttggcaggagtcctcaggccttgtggacctctgcactgagctgactgaggagaggtggctggttttccccagtgtgatgagccaagagaaagatccttcgaggaggaagctgcgacaccatccatgtgcttagaagtcacgcagtcacttctgcaaattatatgatgagaattagctctgccttttgaaggaagaaatgccaaagaatggtggacatattttaaaaccacaatggctgatttttctgcagactgaaaaaaggaggggaggcatcaaaagattactaaacaggcttgggtttgaatcctgcctctgccactctgtaacttcgggaaaattattagcct

SEQ ID NO: 234427 - DNA, 343 bp, Homo sapiens
aaatatatacaatgtatattgaaatgtctataaagtggttcaatgcatttaaatgaaaagtttccaggtatacttgaactattattttcatatgaatagatacttatggtgtacatttttcctctaagaaccataattcctattttacatcgtaatacatagattgtagatgtaattatcaaagtattttataatatatatgcacatattcatatgtatgcactttaattatggttgataggttattcagtcttttagaatatcagagctgaaactgatcaactctacaatatgcagtggaattaaatttgcaacatatttcaagctctaggttcatagtttc

SEQ ID NO: 234428 - DNA, 455 bp, Homo sapiens
acacccccagccaggtgaccaacctcctggcatccccagtgtgtgtccactgatgcctggttccgcattttataaaaagaattttttcatgaaaagaaccctttggatgaaaagaaagtgaagcatcacattcctgtcgttttatttttgcaaaatattttctttgtaatatatctgaagggtgtggcttgaagacttcctgcctggctttgttctgactctccatgcagaccgatttatattccgccaccaagagaagggagctgagcttagtggctgcttccctctcctgggagaattttaagaagatggtccacagcagattcacatctattatgctttttgttccttgcaattgccctgtgaagtaagtagggtagagtttctcaccctcctgggggaaacatgttcagggaggtcaaggtcatacagctaataaaaagagcaagtcttga

SEQ ID NO: 234429 - DNA, 554 bp, Homo sapiens
aaaaaaacattaaaacaaaataagtaaaagtgactggttccctctgtagcacctggtgcagtctctttccctaagagagagagagtttcagttaccttgcagcccagggcagccgtttgtccccaccaaaactaggcaatcactgtggcagagccttgggttctggcctctgtggcagatgctggcagtggtgtgctagttagtggccctctggaatacagacaggaccaattcatagaatctgccaatttccatggtgtaaatattcccaccaaagctatttcagatcaccagcgtgacaacactgacttgcactggaacaggatactcacactctgctctcacaagcctgtgccagcgaaagatgctagcctgggaatcacatctctctccgtgggaattttgcggggtccctgcactgctctccttgcccatacaggaggccagcccaggttgtcctacagtcctagtgaagcggtgtcattgtctggggtaaatacccaagatttgttatctcacagccacggaaaactaggacacagacacacaaggag

SEQ ID NO: 234430 - DNA, 381 bp, Homo sapiens
tcatatgtgagcagaagtcaagttttctttttttccaaatgggtataaattgtctcatactgtttttacttaaaaggccatcttttcccccactgctctgcagggccgtttatgaaataaatcaagttcatctatgcatgggtctgttctagcttttctatgatatcataatgttctaattactgaatttgtgccaatatcagagcatcctaattactacctacttagagtaaggtttgatgtctggtaaagcaagcaattattccagctttatgttgagacttagtaacctcttatattgttgttctgctggagtatcttagctattcttggccctttacatttacatatcaattttgaaatcagcttgtcaagttcctc

SEQ ID NO: 234431 - DNA, 423 bp, Homo sapiens
tgaaggaaatacttgtacatttatggagggaaggaaatttattttattgcttgcatcagcatatcctactaagtaatgagtcctgaagcttttctttataggccacagtgagtggcttcttaacaatcacatatctattttcctttgaataagtaccattgcttcaatctattcccttttctccaaaggtgactgtatgtctcttttatctgggacagttcaggtctatgcttgttgttctctacatttatttacagtacccctttccatcttgaaagtatctcagtgtgggcaataaattttatggtcactatagactgttacctcaaactctctctttttttttaaatcatgacaattcaaatcccatttgtgcatatatttttgagataccttgtttaaataaacagtatctttctttga

SEQ ID NO: 234432 - DNA, 384 bp, Homo sapiens
ttcagttactttctcaaatccctaaaatgacagtaaggggcagtttcaaaggatagacccacaagggcaaagaacagaagaaacaaatattttggaagatagaaattggagaaatgagcagttactgatgtagaacagggtttgacaatttttttcaataaagggccaaatagtaaatattttaggctttgcaggccacatactccctccttcacctcctcttgcctcctccctctcctcttctccttcaacagtcctttaaaaatataaaaactattcttagctggcagaccagattggcccgtaggtcataatttgcccacctctgatttaaaagagacaagaaaattgaaaccagagccatacaacacagaatcctagaaa

SEQ ID NO: 234433 - DNA, 1074 bp, Homo sapiens
tggcacttactcctgtattttaactgcttgcttatttgtctgtttttcccatatgaccataagttccattaagggtagaaactacatcttgttcagggctattcctgtggcgcccaaaagtgataaatgtctgctggataaatgaatgagaagaattagctgacccagtgtggcccagaaaagcagccaatcctgaaggcttttcctcctgcctggaggtgacacaccaacccaaaggactgctcaaggagtggaaaggggctttctgggtggagactgccatcagccctctctggtctaagaagcctgcaaagctaaaagctcatgatttggcattagacctgggtccaccacatttagtcctgtgacctcagacaggtcttgtaacctgccctgagctttggctttctcttctattgtaaggaccagccacattcatgtaaagcactcaccccttgcctgacccacactgaccactcaataaagccatcgatactaggttctggttgccatttagcttcccaggagagctctgttctttgtacttcctcttccccccccccagcctccaccaaggtggccacccataggaggcatcagaaaatgcggcaggactgaagattttctgctgctgatcaggaatgactggagcagaaggaacattgtgcccctaggggaagggaaaccaattatttgtcaatacctaacaataaccacactcccggtttattgagcacatgctgcgtgcccggcgagctccggacttccctctctgggggaaccctgcggactgggaggcagaacgggatacaccgaaataggaagaacggagagcttggcaccctccccctcttcaccccacctgggcccctccaggagggtccaggcccttactgtgggcatcagggggccgaatctcctttccaccagctggcccatccctggaaggagctcaggcaacccctgctatctccaaaccaagagagtgggctcccggtcccttctcccttcacccccgtcctcccacacacgggacggaggtggcctcttctggagagagcagctggctcgagt

SEQ ID NO: 234434 - DNA, 455 bp, Homo sapiens
gagatggagtgtcactcttgttgcctaggattacaggcattaagccaccgtgcccggccaagctaccacttttctatgtcacccgacctttcctaaagtacttgcctcatcttttaaaattttgatggtatgtcttctgggtctgacagattaaaaataattaacaagggctgggcgcggtggctcatgcctgtattcctagcactctgggaggccaaagtgggtggatcacgagatcaggagttcgagaccagcctgaccaacatggtgaaaccccatctctactaaaaatacaaaaattagttgggtctgtggcgcgtgcctgtaatcccagctgctcaggagactgaggcaggagaatcgattgaacgtgggaggcggagattgcagtgagctgagatcatgccaccacactccagccttggcgacagaacaagactccgtctcaaaaaaaa

SEQ ID NO: 234435 - DNA, 406 bp, Homo sapiens
aggcaggactgtgaggcctagtgtagggcctcctgccagtggccggcacctacttgtggggctgggggttcccccagcaggttgggctccccacctgacacactcacagaccttgtgccttggagagccagtgttcccggggccacatagctatgccgcccaggggctgggcctgtcccagctctggtcccccggccccaggtcctggacgctggctccgcgcagcagcaggcggcctccggaggacacgatgtgactggctgccgctacgtcgcactcagatgagtctgcgccggatcgacctgctgccgagtcctgccggacaggcacaggcagggagtgaaaattatctacccctttttatttcttaataactgaatgaaaataaacattggtggtttgaaaa

SEQ ID NO: 234436 - DNA, 387 bp, Homo sapiens
ccagattccctctccagcctcctccacacttctctgtaccctaggaggcaggccttttaggatggtattcatggattccccatgctccctcacttctggttgatacggataacggcagatgtctacaggaactcagctgtctacctgccaggccaagggttggctatggctgtattcctctaccaaagtccccagctcctgccaggccaccttcacctacagctaaagccaaagcaacatcactctaagggtagtggtatctccctactttggttagccctagggtgcatcacccctttggtgggttccctgccctcatccttgtaaatggttccatctgttttctatcagttccctgactgattcaccagatcaagacttgggggt

SEQ ID NO: 234437 - DNA, 518 bp, Homo sapiens
acacatccttcctcctgccaacatcctaactcctttacactctggggaccagctcttctcaaatgctggcgcggggaacagcctatttaccgcagttgaggcgattttactgggaaattctcttaggagctccttggagagggaaagcctcacggattcggcggaggtcttaatctggagatgtccaaatttaggggaaaccctccccaccatttgtctccaggctgtattttggagttctcagattaggaccctctggactgggggcaagatttgtatgagggggtctccagcagcttgtgggctggccgcgtgccaggcctgactccgtgtcccccacccccggctgcgcctgggcctcgggggaccgggaaccagccggcgccgcgtccccgcctagcgggcgggccggggacccctcccctccgcccgtcccctcctcccctgctgccgcctcccggagggacggcctggggaggggagagaggagggacgggccggcggcggcggggctgtgg

SEQ ID NO: 234438 - DNA, 415 bp, Homo sapiens
tcccaaaaacctagtgaaataaaataaataaaatagtatatattatttaaagagaggctgtcattaactatagatgaatattgtaaattctacagtaaacgctaaaacaataatgaaaagaggtacaggttgagtaccccaacctgaacatccaaatgctgtaaaatctgaatttttttgagtgcttacatgacaactcaaaggaaatgctgatgggagtgttttggatttcagatgttcagactgcaaatactcaactgataactacaatacaaatattccacaatctgaaaaaatccgaaatctgaacactcctaatcccaaacattttgggtaagggatattcagcctgtaaaaataagctaattgtggatacgatatgaaatcatatttaaaaattagcaaaaaatgtgta

SEQ ID NO: 234439 - DNA, 668 bp, Homo sapiens
tgcatttttagtagagacggggtttcaccatgttggccaggctggtctcaaactcctgacctcaggtgatctgcccacctcgacctcccaaagtgctgggattacaggtgtgagccaccatgcctgccaggtttttttatttttatttttttgaaactggatctcactctgttgcctgggctggagtgcagtggtgagatcatgctcactgcagtctcaaactcctgggctcaagcaatcctcatgcctccgcctcctgtgagactacaggtgtacgccaccacacctgggtaattttcaaaatctttttgtagagacagggtctcattacattgccctggctggtctggaattcctgggcttcagcagtcctcccgcctcggcctcccaaagtagaaatatcagtattgttgtggttagccaccatttattgagcacctactgttgctcagccctgtgctagggatttcacatatgttattacggccttttatgaggtgggcaatattacccctatttcacaaatgaggaaagaggtttaaagggctcaagtgactggtacagaaaccaagtctgtttggctccaaagtccaggccctacccccctgccatgacccagaagcttgcagggcactgagcttgcagggcattgagaaagaggaagtgaa

SEQ ID NO: 234440 - DNA, 544 bp, Homo sapiens
tctggcttccttgaagaaagtgttcaacctttactgcttccaaagttaagacactttcccaagactagtaaacgatcttcccaaagccttttttaaatcatcagttcacatggtgtgaaaatagattaaattctacatattaaactgttaaaaaaattataaagtaatcaaaacaaatgctaaatatgtataagctgttagcattttatatatgagcaaagacttcaggaaaagtaggtattttataaactcaaattacccaacatataaaaatattcaaaacacaatacctcgtccagctcctgaagagacatgttgtccccatcagtcccatccagttggggaaagcacaaagaaagcagcatgggacagacagacagacaaggcatggtcagttgagaaaacactgagattttaagctgactaaatataaagatccactaagcaaggcattttaaaatctccttttttttttttaaattaagctacatcaatatatgctttaatttttatttactgtggttgttttgaaaatgagctagga

SEQ ID NO: 234441 - DNA, 596 bp, Homo sapiens
tgcgtcctctagcgcggggcggaagacccgcgaagtgttcaagcggccgcagagcggcccagagttcgcaggtctggggctctcttcccagagagctcgtaggggaggacagtcaagggactcaagcgtctctcttgactccccttctctcgctgtgcagtggcggcgccgaggggtcgacgctcagggctaatctctatgagtcaccctcgaggccccgggtaatattgggtggatcacaagaactaatctttcatgatttggaaaccggaaggaaagaagcacttttgtagctgacttacctcaatgacatgaccagtgtctgagcctacaactgcgctatcttccctggatttttcttcaccttttccttactcatgagccaggacccatgtgggcagagaggagagttctcacctggagttcagcatggtggacttgggctgcagccgtggccacctggtcctccagatccgccagatgggtctcatcagtgccactgtggatgcagcgggcggcatcttctagctcagtcagctgggtctccagtccatacacagtgcctgctgccaggtatacctgtagagacagtgcta

SEQ ID NO: 234442 - DNA, 814 bp, Homo sapiens
tgcgtcctctagcgcggggcggaagacccgcgaagtgttcaagcggccgcagagcggcccagagttcgcaggtctggggctctcttcccagagagctcgtaggggaggacagtcaagggactcaagcgtctctcttgactccccttctctcgctgtgcagtggcggcgccgaggggtcgacgctcagggctaatctctatgagtcaccctcgaggccccgggtaatattgggtggatcacaagaactaatctttcatgatttggaaaccggaaggaaagaagcacttttgtagctgacttacctcaatgacatgaccagtgtctgagcctacaactgcgctatcttccctggatttttcttcaccttttccttactcatgagccagggtatcccggaagcctgaagggaaaggttcaagtccaggcttccattaaaaccccactaatagacttgttctgccatcaatcagccacagacctgtactgcaagatgcctactacacacccagtgctgagctgtggaaaatccagaacacacgtgaccacagacaatcatgaaggcgctgataatagcagcttctcaaagggaaaattgtgtccgggacccgctgggtacataacagatttctctttattctcagattcaggcttctttgcttggggcagctccccaggagtataagtatgaatgggggggaagatagagcatatacttcttccttcctgatattgttgacaaaagtatgctgtttacatattgaaaatcatgggatggtgtgaactcacagggagaggacaggagggagcctccttg

SEQ ID NO: 234443 - DNA, 732 bp, Homo sapiens
tgcgtcctctagcgcggggcggaagacccgcgaagtgttcaagcggccgcagagcggcccagagttcgcaggtctggggctctcttcccagagagctcgtaggggaggacagtcaagggactcaagcgtctctcttgactccccttctctcgctgtgcagtggcggcgccgaggggtcgacgctcagggctaatctctatgagtcaccctcgaggccccgggtaatattgggtggatcacaagaactaatctttcatgatttggaaaccggaaggaaagaagcacttttgtagctgacttacctcaatgacatgaccagtgtctgagcctacaactgcgctatcttccctggatttttcttcaccttttccttactcatgagccagggacatgaacctggagcctgcccggatgcgaaaggagctgtaacactgaatccctctcaccctatgccagtgctggatggctgtcccatgtgatgggaagtggtggtggggccaggccagcccaggagccatcatgggccagagtggggcagcaggaccaaacaagctataacacaaataagctgaaacatgttcctggctggcctgccaagctgccagcagtgacatgttcccattcgccagactacaagacaagagagctgtgacccttctggggacccagacctcgggactccctgagtcagagctgtgacatgctgtaacacccccttggggctctgtggtt

SEQ ID NO: 234444 - DNA, 455 bp, Homo sapiens
tgcgtcctctagcgcggggcggaagacccgcgaagtgttcaagcggccgcagagcggcccagagttcgcaggtctggggctctcttcccagagagctcgtaggggaggacagtcaagggactcaagcgtctctcttgactccccttctctcgctgtgcagtggcggcgccgaggggtcgacgctcagggctaatctctatgagtcaccctcgaggccccgggtaatattgggtggatcacaagaactaatctttcatgatttggaaaccggaaggaaagaagcacttttgtagctgacttacctcaatgacatgaccagtgtctgagcctacaactgcgctatcttccctggatttttcttcaccttttccttactcatgagccaggcaacctgacatggttgatattttaatcccatctttagagacaagaaaactgtggctcagtgaagaaga

SEQ ID NO: 234445 - DNA, 458 bp, Homo sapiens
ctaatctttcatgatttggaaaccggaaggaaagaagcacttttgtagctgacttacctcaatgacatgaccagtgtctgagcctacaactgcgctatcttccctggatttttcttcaccttttccttactcatgagccagggtatgtgtttttagttccataaaaaagagccctggccaggcgtggtggctcacacctgtaatctcagcactttgggaggctgtggcaggcagaccacttgagctcaggagtttgataccaggatgggcaacatggtgaaaccccgatctataaaaaatacaaaaaattatccaggcatggtggcatgagccactattcccagctactcaggaggctgaggtgggaggatgtcttgagtctgggaggtggaggttgcactgagccgagataagtgccactgtgctctagcctggttgacagaaccagagcctgtctc

SEQ ID NO: 234446 - DNA, 415 bp, Homo sapiens
agagttcgcaggtctggggctctcttcccagagagctcgtaggggaggacagtcaagggactcaagcgtctctcttgactccccttctctcgctgtgcagtggcggcgccgaggggtcgacgctcagggctaatctctatgagtcaccctcgaggccccgggtaatgtaagtaaaatcggggtgcaggaacaaaacaagtccccttgctccggctttcaactcattggcccccgctcagcaactacctgcattgaaattccaaccccagttgcaggagcggtgttagtctcaaccaatactggagatgggagcctctctttccaggattggacggacctccgattccctagcacggtggatctcagactaaagcgtgtgtctctggagggcttgagaaaacactgatagacccca

SEQ ID NO: 234447 - DNA, 217 bp, Homo sapiens
acaaaacacaattcttatttgtgtacttttaaaacctcagagttatactttcacaatacattcctggctgaaagttcacactcggaattccagagcagtccatggccaggcccactgggctccacttgctctctccttggctttggtaaccactggccccagggactcagcctgctttcctatccatcccctcagtagctgtcaccatgcaggttac

SEQ ID NO: 234448 - DNA, 453 bp, Homo sapiens
actccccattatgtctccattgcctagcttagtgcctgatatatcagagtgctcaataactattgagtgaatgggtgaactataacattcctagaatattccatatgatgaaacattacctttttgttccctggtcaattttcgagagtgctaatgtcctgtctgttcatcttgcaatctgcaagtatgcaataatgcagttttagatattaaggtattgttaaattacggttcagttatgggctgaggaaaaagagaggatcaggattaagaagaaagccacaagccttgaatatatagtaaaaagtaaaaccttttttaaaatgttacaggggccaatgaaggaagatgctgagagttgagcttccaatctttgagcactttggctcaaatgatgacaaccaccattgtttacatccaccatggaaaaagacaaagaaaactgacttatgc

SEQ ID NO: 234449 - DNA, 402 bp, Homo sapiens
ttttggtaacatgaaagattcatttgcttaggaagggatagagtgagaaactgattggtctgaaattgaattgtactattaatttaaatgaatcaaaaagtgatctctggtttttgacaacagtattacaatacatttaacttttttaagatgacccttaaattacatttgaccgccttcacccaaatctgctccaccaattttttctccaaattatttagcagtcaacaaatacccaggacaacttgtttttagttatctataactgtcacacaaattatcagtatactaattgattaaaataattttactttagagtactttttctgcttgatagctatagactagtatagtcttctctcccaaatattatgttttgatatcataagtttcctcaaaaaa

SEQ ID NO: 234450 - DNA, 123 bp, Homo sapiens
aactagttatctgcaacccaagcttcatctaaaaaggaatgcttagatgacccagaaccatttcttcacttaatccctgagccttagtttccttatgaataacaagaaaaggctctggggcca

SEQ ID NO: 234451 - DNA, 450 bp, Homo sapiens
ctgagtcgtttggatgtgtatttttcacacaacccagcaggaacatctgttcaaaatatgcttcattggagtcagcttttaaattctactcatttgaaagcttatgactggggcagtcctgatctgaacttggttcattataatcagacaacgtctccattatacaacatgacaaacatgaatgtggcaactgcaatttggaatggtaaaagtgacttgttggctgaccctgaagacgttaacattttacattctgaaatcacaaaccacatttattataaaactatttcttactacaatcatatagactctttgtttggattagatgtctatgatcaagtttaccatgaaatcattgatattatccaagacaatctataaagaaccatggcgctgtgtgtttaaagatctacatcattcctaatgaaatccaattcttattttttttta

SEQ ID NO: 234452 - DNA, 726 bp, Homo sapiens
ttgaaacattttctatacatgaggcagaattctcagggtcagggtgaacttaataaaaatgttttgttgaaaaattgttcttttctctgtgctccttctagctcaactttgtgaatgttcccactgtcttcaaggcagaaatagaacagaaggtgggaaaagaagggaactaatatgtgattctaaaatctttactgtttaaaaaaataaaagtgaaatatttattgctggtagatgaagaattatgtgtagcaaatcttgctgctatgagagggaaaaagtgtagctctatacacaagtaaaaagggcatacaaacagtgaagatttattgtgtaaaagactgtagtaagtactataaatgtggcttcctgtgtttgctgcccagaaatatcctactaatcagatcaagaaagcctggctatgaaaaaatatggcatcctggccaggtgcggtggctcatgtctgtaattccagcactttgggaggcccaggtgggtggatcacctgaggtcagctgttcaagaccagcctgaccaacatggtgaaaccccgtctctactaaaaatacaaaaaattagctgggcatggtgttgcatgcctgtaatcccagctactcaggaggctgaggcaggagaatcacttgaacctgggaggtggaggttgcagtgagccgagatcagccattgcataccagcctgggcaacaagagtgaaactctgtctcaa

SEQ ID NO: 234453 - DNA, 327 bp, Homo sapiens
aaattaatacattttaaaaatcccttggggaactcacggttccggttttaagaaatactggtaaagtcattaagaacacaggcttgagaatcaggcattcctggtattcagttggttttcccactccatggctgcgtttctcaagcaagttatatatcctgtgtttaaagtgcttaatatagcactgtgtgcttactaagtgctatagtagttgatgctgctgatactgtcaataatgctattgttgattttagaccctaggcaagctcctttacctctctgaagttgtttatagtatgaataataaaacccgtcctctttacaatt

SEQ ID NO: 234454 - DNA, 406 bp, Homo sapiens
tctgaaggctctagctgagaatctacctcttggctttttgcagcttccagaggtgaccttctctcctggagattctcttcagaatgtctcttccacttttaaggacccctgtgagtacattaagcccacctggagaggcgagtattatcttcctgtcttaaggtcacgtgattagaaatctcagttccatctgcaaccttagtttgcctttgccacataacccaacatagtcccaggttctggggatgaggatgtagacatttcaaggagattgttagactacacatgacataatccgagttattcttgtgacttctttagaatcaatagaacttgaaaaaacatcatacctttggtagttgtggtaatttgactaaaaataaagagtcttcactcaaaaacactt

SEQ ID NO: 234455 - DNA, 172 bp, Homo sapiens
acaacctcacatttaattttagccaagcatagaactataactgtgaagctgtatttcagggaagatctaaaatgtatggatttccaggaggtgtttaaataatacaggttgtcagtattaaaatcagaagtgtttaaaggccaatggaaaacatatgagattttcatagaat

SEQ ID NO: 234456 - DNA, 556 bp, Homo sapiens
gaagttaggatgaggaaaaagaaagatgaaagatagtcctggctttcaagcctgcaaattctatgtttctaacttgttacttctccaggaaaactacaccataaatttggaaaataaaggtcacctcaaaatttagtaaattcacatcatatatgactgcaattagtaaggggaaaaaagtcagtggttttttatgttgatgagaccactgttcttttattctaaaagaaagaacttcagtgatacggcatagagaaaagggtagcgttaggcacaatagaggctatcaggtctgaaacttccaaaacagcacaagagaaaatgtgccctgactccttacacaaaaaacaagctctatgccaagatttaaggaagaacaaggagatggggaaagccactgcacctctaaatgaaaacaaatggatgttcacccactgccaccctccactgagacgacacacaatttgggaaatggatagttccatctcactaccagacacagaagcacaaatacatacacaggtgtacttactcatatcactacaactacagaaag

SEQ ID NO: 234457 - DNA, 742 bp, Homo sapiens
  misc_feature (664)..(664): n is a, c, g, or t
  misc_feature (680)..(680): n is a, c, g, or t
gacggttggacaggacgtagacacacagaagaaaagaagacaaagaacgggtaggaaaattaaaaaggttaccatggggaagaaagtggccatcattggagctggtgtgagtggcttggcctccatcaggagctgtctggaagaggggctggagcccacctgctttgagaagagcaatgacattgggggcctgtggaaattttcagaccatgcagaggagggcagggctagcatttacaaatcagtcttttccaactcttccaaagagatgatgtgtttcccagacttcccatttcccgatgacttccccaactttatgcacaacagcaagatccaggaatatatcattgcatttgccaaagaaaagaacctcctgaagtacatacaatttaagacatttgtatccagtgtaaataaacatcctgattttgcaactactggccagtgggatgttaccactgaaagggatggtaaaaaagaatcggctgtctttgatgctgtaatggtttgttccggacatcatgtgtatcccaacctaccggactataaagaaccaggtgtattcaatggaaagcgtgtcctggtggttggcctggggaattcgggctgtgatattgccacagaactcagccgcacagcagaacaggtcatgatcagttccaantgggtctgggtgtganccggtctggacatggtatctctggaactctgttgtactaattggacctcctaagaaattacc

SEQ ID NO: 234458 - DNA, 417 bp, Homo sapiens
gattcctgacccagagaaactggaacactaaggcccattcttcctctcaagtatccagaaataaagttgctccaagtaacaagtggacagcataaaagattgtatggaaactataatgcatctacatctgcagtaactaatcataaaatgatttgtatgatcattcttcacatgattagaattactatgggaaagaagaaaaagaaatgcaactttcttgatttaaaattttatctgtgcaagtgtggtggcacacacctgtagtcagtcccaactgctagggagggtgggtaggatgatcatgtgataccaggagtttgaggctatgtagtgtactatgattgtgttagtgaataaccagtgcattccagtctgggcaatgtagttaaaccccattaaataaataaataaataagt

SEQ ID NO: 234459 - DNA, 555 bp, Homo sapiens
gattcctgacccagagaaactggaacactaaggcccattcttcctctcaagtatccagaaataaagttgctccaagtaacaagtggacagcataaaagattgtatggaaactataatgcatctacatctgcagtaactaatcataaaatgatttgtatgatcattcttcacatgattagaattactatgggaaagaagaaaaagaaattcctctctggatggtggctataacctatagccttgcccactacgactcagggtttggtactggctgtgcctttcatgggatgctttcttatcctggtcgatggcctaaagcccaactgtccagcttacatccaggaatacactttactgaatcatgaaaagctgtaaatagctgaaaagaaaaatgtggtcttgactctgaaaaacaacaaaaaggatcagcaacatttcaagcaacaagtcataaaacgattactgtggtcttgtattagttcagtccatgcagtgaactttgtctgacattgggcctgcagtcctcataaacataccagctatctctgagagtcc

SEQ ID NO: 234460 - DNA, 526 bp, Homo sapiens
gctgttattttacctcttctttcttctatttggttcttttgagcttttcattgcagcgagggaggaaaagaggcagagaaaatagagagagaaaataaaaattggacccctttgctatttgttagcctgttctattattgttttgttttataatgttcctgttggaaaagatcaaaacaattttgctccagtggaaatctctttatctctctggcctcagtttttaggcaataaaaaagactgggcgggaagatttcagcctcaacagtcaatgaccttgattctggaggagggaaattaccatgaattccaatgacctccacacaaataacaaagtttagtaagctgtaatgtagctaattttagggcatagtctagatattctttatcctatcaatctcattctgtagtggagtattccaaacttgtgattttagtaaaaataaaatcatctaggagtaaaacgaccacttctggattatgagacatctccatggaggtaataaattgctctttatttaagtgt

SEQ ID NO: 234461 - DNA, 708 bp, Homo sapiens
caaaaagaaaaaaaagatgaaaggaatgggaatgggggaaaaaaaagaaaaaaaagggggaatgaataaaagtagttagcttggttaagtctgctaagacaatgaatgcctggatatacagttatgggtccagaggcattttaagacatggttcagagacagattcttgatctgttggctgttaacactgtactaaccttcatgtcttgttcagccttcaacgcagcctgggcctgattacctctgactccagatagtgatccacaaggacccctggctacatgtggcaaacgagcatggctcatgaggcctgtggtcagcggaggaggcatctgactggccagtgccattggtggcctctgaacaggcgctgggaaggtgttagtatgtggggctcttaccaatggagggaccaggttaggctgagagagaatctgagtgaaaaaaacaaaacatacaacattgaactgttaaaaaaaaaaaaaaaaaaaaaactgccaactagaccaggttggctcatcccagagtaaatctgtgcccatcctaccagtgaaaggaagtgtacagattgtgccattccattaacaaggacaaggaataaacaggccatgcttggagagtttaacagaaaaactaggcaaagcatgctatggcacttcagttggtcctagcatctcagttgtaaattctgaaggggggatagaaaga

SEQ ID NO: 234462 - DNA, 414 bp, Homo sapiens
tgaaagaaaaaaatttaaagttaaaagaaaacttagtaatgtgaataccctttcaaagtatttttagaaatctcattattgtatatttagaagattaaaagacaagaattagagaacaaaaacaattttattttctattttgaataataaatactatagagataggtttgctcaaaattgtaaagcttgttttgtttttggtaaacatttgagaacttaaacttattatttggaaaaaaacattttaatagaaattttactttttaaaaggtttatgtggtttttaaaaaaagcaaaaaacatttgtttatgactaatcttgaaattttatatgtaatttaaaatgccatgtaagcaggaaggtactcatttaggagaaattacaaaactacttccttttcttttaaatgatta

SEQ ID NO: 234463 - DNA, 462 bp, Homo sapiens
  misc_feature (364)..(364): n is a, c, g, or t
aaggatgccctctcttctaggagcggattaacagggcaaagtgggaaaaagagcgaaagaaatgtagagatgccaccttggtgggcaaatctgagatgcctcccgcggaaagagacgcaacttccagacccgctccagttctccacttgggcgggaagctttgcgctcccagctggaagacgcctcccgagcgctcgctgcgcccttcaagcaagatcctagcaaccagagcttcagggtgggggtgggggcggggggacgctgaccggctcccacctgcttgctcctagaaagatcctagctcagattaaagggatgaagcgctaaggtcgacttgtccagaaaagagctcacggtgagttcnaccaccccctataccaattcatcgagtggcctcctacgcatcagcagagcacccccggggattctgtcagacatgaaccccgaaactggaagcggccg

SEQ ID NO: 234464 - DNA, 296 bp, Homo sapiens
ttaatttgatagaaattaaagaagttgattgtagcttttaggcatctgtgatatggaatacacagtatgggtgaaagactggtgagctagagatgactttagaagataaacattccttttggaatcttcacaatttatgtagatgtcaagggtctggtagaaagtaactgacatctgagttataaaaagaccacgagagaaaagaggttactcttaagccacagtgtagggaggcttgatgaaaatccacagtgaattcttacctctgactcttattttccagctacttaaataat

SEQ ID NO: 234465 - DNA, 448 bp, Homo sapiens
ctttgtagaaactgattttttacctgctcatattcacccaaaaaaaggagccggatgtggctaacagaagttcagcaggactcacgagggctatctcaggtcagtgaaaacaggatatctaatgccttttcctctttctgttttgttttgacacggagtctcggtctgtcactcaggctggagtgcagtggcatgatctctgctcactgcaggcttcacctcccgggttcaagcaattctcctgctctggaggctgaggcatgcgacgcttgaacccaggaggcggaggttgcagtgatccaagatcgcaccactgcactccagcctggaagaccaaacgagactctgtatcaaaaaataataataattaataaagttttactggaaaaaagaagtctgctgacgggaatgatgtggaagctgactgccaagcgatcggtgtgctggc

SEQ ID NO: 234466 - DNA, 643 bp, Homo sapiens
gtagtgggcctgtaagttgaagatccaaaggagatacagagtgaaggggttaagcgagccagctgggtacaatggtagctaagttaacagacgtgaccttaagggcaagagacgggcacttgaggtttagaggtacttggggcagggattcaggcgtattaagctgtttgaatatgttggacattaacatgctttcaaaagttgaaactatgccaagaaagtataccccaatatccaagtctcactccctcccacatcccttccacctcactctcccttctacctcttgtaactaattttactgttttctgctttatccttcctgaacatacacattctttaattctccctttttcttgtatgacaagtagcactatgggtatttgtttctgctttttgtttcatgtaatatttcctggaaattactccatatatttataaaaacagatagcttttataaacatagtagtctattgtatgttccagagtatattcaaccaatcttctagaactggtcatttatatggtttccaatattttgcaattattaataatgctgcatgaataaccttcacaaaattatttccaaatgcaatacagactaaatttctgaattatactaactcctatgtgtgcagcattt

SEQ ID NO: 234467 - DNA, 410 bp, Homo sapiens
acccacctatgtacgcggctctcattgaactgtttcaacatagcatagtcaatatgctagtcacactactgttttctgctttatccttcctgaacatacacattctttaattctccctttttcttgtatgacaagtagcactatgggtatttgtttctgctttttgtttcatgtaatatttcctggaaattactccatatatttataaaaacagatagcttttataaacatagtagtctattgtatgttccagagtatattcaaccaatcttctagaactggtcatttatatggtttccaatattttgcaattattaataatgctgcatgaataaccttcacaaaattatttccaaatgcaatacagactaaatttctgaattatactaactcctatgtgtgcagcattt

SEQ ID NO: 234468 - DNA, 589 bp, Homo sapiens
gtagtgggcctgtaagttgaagatccaaaggagatacagagtgaaggggttaagcgagccagctgggtacaatggtagctaagttaacagacgtgaccttaagggcaagagacgggcacttgaggtttagaggtacttggggcagggattcaggcgtattaagctgtttgaatatgttggacattaacatgctttcaaaagttgaaactatgccaagaaagtataccccaatatccaagtctcactcctgttttctgctttatccttcctgaacatacacattctttaattctccctttttcttgtatgacaagtagcactatgggtatttgtttctgctttttgtttcatgtaatatttcctggaaattactccatatatttataaaaacagatagcttttataaacatagtagtctattgtatgttccagagtatattcaaccaatcttctagaactggtcatttatatggtttccaatattttgcaattattaataatgctgcatgaataaccttcacaaaattatttccaaatgcaatacagactaaatttctgaattatactaactcctatgtgtgcagcattt

SEQ ID NO: 234469 - DNA, 646 bp, Homo sapiens
gatatctgagagcaaccttctgccaggatttgccctgcccacaggcgttagcatggacttgatgactgcggtgtggcttttactttctcaattttccagagctcatactcctcaaactccagaggaataagatggccagcagtcaggaaggagatttgaatgtggagcacagcagagtgagcacgagctgaaaccctccaagcatattttcatcactgtattgcctgtgaacatcttcagagtgtgatgactcctacttcctctgaatctcatgtgagttcctcttttggcagctctaactctaaccttacaggaaaggggaatatagaaaacacagttcccagaaagaactagttccaaccagtcgattgaaccactcagcacagcttctaaaagaggactccctggactgttagggtcttggaaaccatgtcacacaaaaattgtctcatgtaactgaagataatcattctggagagcagaggattaaaaagaggcatgccattaaatattagaaacacttctgtgtcgaagacaaaaattgacttacacctataaattcttcagattttctctcctaaattctatggaaatgtatcaatattttcactgattaaaatttttttcccacctgttcaaactcttc

SEQ ID NO: 234470 - DNA, 383 bp, Homo sapiens
cagggggcagtgtggctccacagtccatcacagggcacccccccgccccaccgaccccgacagtgcccacagcccctgccatccaaccagggctgggcctcagcctgggggacagcttctgtgtagtttggttcagaatgtgtcctcataagaaaggcggcacctcccagattccttccctgccctctgccgggaagtcttactgccaaaacacccaggaatgtgtgtctgcctccagcaactttagctgcaggggctggacctggctttgatgctgcggcagctgatgggatcctggagcacagtgtgggaagctggctccttaggcctgggaacaagcccaggcaaccgggctgggactcgctctgcctggctgcctctcc

SEQ ID NO: 234471 - DNA, 474 bp, Homo sapiens
cagactgggtgatttataaggaaaacaagtttattcctgcagttctggggactggggagtccaagagcacagcaggcaccagatctggtgagggccttcttgctgcattgtaatgtggtggagggcgtcacgtggtgagagggtattagcatgcaggtcagccaccagtcctgtcatgggggccccatgctgatggccttatctaatcctaattatttcccaaaggccccacctccaatcatcatatgaattttgtgattaagtttccaacacataaaactaacatgtaggacacattggggacacattcataccatagtatatcacattgctcctgtttttgaattctggctcttctacttactggccgagtcccattgggcaattatttaatgtttcccccctcaaagttttctctgcaaaataagggttactagagtaataacaataaaaacaataattcgtgtttattgg

SEQ ID NO: 234472 - DNA, 672 bp, Homo sapiens
ttaagtcttctaccttgagttggtttttgtataaggtgagagatgaggatagctttgtcttttcaatgcagagtctatgagctctgcctgggtttcccctccctgtactgtggcctagaaattgtcctgaggcagtaagctaggacaatcacagggctcacctttgtttcccatctttcagggattactgtccattgcctgatgttcagggtcttaaaaaccattattttgtatatgttgtctattttttgtttgtttcacgtgacagggtcaacctggtccctttgtttcatctttttggaagtgaaattccctgtcttttacaattttcattctattcctatcagtttctcttcagtgtggggctccgtattggagaggaggcctggttgctcaattttccaagttcacagaggtccagactattctagccccttcatattttctttggcctccttgccttcatgcactattatactggacaaaacctcccccagtttcggtgctgttcccacattgccttgccatgctttctggtgagtatcttttggatgctttgagtttcttctgctttcaggtctgatcatctctctctgcttttttcagcacagagctgataccctgcaattcttggggctattggtggtctgtcctcatccacatatattttgg

SEQ ID NO: 234473 - DNA, 623 bp, Homo sapiens
acagagcacaggggctgactgctttgtgctcttccaggtgggatcattacttgccagccttccagctgatgccagtggcaacagcacgacaggctgaactggattctttatgactatgtattcattagggggaaaaagcacttccaatgcaaatgattgaaatggaaacaagatgtgcactctgctgcctaaatgaaagctctaccaggtaggccattcaaactcaattaagagtagcaaaacaggatctatcaggacagtggctgtaacccctgtcacagagaatggacagtgagcggtccaaatggattggggggcatgaatggcacctgacttacagcaggagctcagcacttttactctctttgccgcttcactggaaccaggagaaaaagacattaggatgaaggataatgtgtgatacacacataaagatgaaagcgagagggacacatgcaatgtcacttattggaaggaccactttaggctgctctgtcctctctcccctgaaaacatgttccacattgttttaaccatctgtggcccactctggagctcaaggaaccctggcctttctgctttattgtgagcacagccatatgaaactgcaatctggcagctga

SEQ ID NO: 234474 - DNA, 493 bp, Homo sapiens
gcaagtctgattttaaaaaaaaaaattaagttacacaaagtgcaacttctgataggagtacctgttgcttgaaagagtggaaatctgggaagatggtagagtgagattttctttcaaacaatggctctgaaattgtgcatttgtcaaagatttggttaaaataaagcattgaggaccttaccagagctctcttcttactgatagagatgaattaagaaacttcccaattgtctcatatcttatttctacttactggtaatctctactgtctttcctctttagaatcccaaactcctggcacatggcaggatatttttgtgaattaattaacacatgagacatgtttttgtgaattagacaagtactcaattacttgagacaagtactcaaacaagtctcaagaattacatgagacaagtactcaaacaaaaagaaacaattagttgtctttttaataaaaatatacacactttaaaactaacatcatgggaaa

SEQ ID NO: 234475 - DNA, 396 bp, Homo sapiens
gtcgggctgggactcgggttctttcgatttcggtgagagggaagccactgggaccaggaggcttggaaggaggtttgtctcctggggcctgaagacagtagagggaggaaagttttctgagatactccacagccccgttcttccaggaacccctagctgaagtgggcattgggcgaagagtaaactcttgaatctttccctctgagctaggaggataagaagggtccccaaccctctggaagccaatgagcttgtaaagttaacctggtccgcgaagcgtctgaacagatcagcctgctcacctcagcctatctctaggtgctggattccaatctgagacagtttctcaaattagccctaaagaggagtgaataccacggggctggtcctctggtg

SEQ ID NO: 234476 - DNA, 544 bp, Homo sapiens
ataccaatttggatagcatatctctactgtcaacaaacagtagtctgcactggtactggcaaaataaaaccgtatttgagcatggcatttaaagtggagatacttttttttctaggtcaagtattgactaaggtaagactgtaatttttcatgacacatgagatttaacgaaatttgttaaccaagaacatctttgagcaatgtctcttttgatgttgctactaactgtatttgatgttatgtaaaactttgttgggcaataaatataatgttctacttttgtatgatacagtgtgtatgagtcgggagcttcctgaactttgtgttttatgataccttttgagagaagatcatcaatacttctagaagccataataatttgctatttattcacagccaggaattggtaatactaaatgccgttagtcagtatgctggccaatatagtaagagtgacttgtgactggttattaattgaacaggtttttcagcacatacctattataagttcttgctttttccatcctagaaaattcaggactga

SEQ ID NO: 234477 - DNA, 309 bp, Homo sapiens
atatgggacagtaatgaccacataataaatgagttcgcacgcaaagaggttcttctgcagggcctgagccactgagacatctgccagtttaatccacacagaaactacacttggttatgcttttagctttcttgtgacaggctaggagcaaagtagattcttcacaaataatcactgggtggacattattaagaatgatcacctccagacacctctgacctggacaggttctgcctttagttcctccaatgacaactggctgcccacaggctaatcccccaaagctttatttagagtgaaattcaaggc

SEQ ID NO: 234478 - DNA, 1153 bp, Homo sapiens
ggctggtacaggtccggagaagtaaggatgtgcagaaggtgcaagccagagctcaggcagaacttccagagtgcatctgggatctgcatttgccactggttgcagatcaggcggacgaggagccgggaaggcagagccatgtggctgccccctgctctgctccttctcagcctctcaggctgtttctccatccaaggcccagagtctgtgagagccccagagcaggggtccctgacggttcaatgccactataagcaaggatgggagacctacattaagtggtggtgccgaggggtgcgctgggatacatgcaagatcctcattgaaaccagagggtcggagcaaggagagaagagtgaccgtgtgtccatcaaggacaatcagaaagaccgcacgttcactgtgaccatggaggggctcaggcgagatgacgcagatgtttactggtgtgggattgaaagaagaggacctgaccttgggactcaagtgaaagtgatcgttgacccagagggagcggcttccacaacagcaagctcacctaccaacagcaatatggcagtgttcatcggctcccacaagaggaaccactacatgctcctggtatttgtgaaggtgcccatcttgctcatcttggtcactgccatcctctggttgaaggggtctcagagggtccctgaggagccaggggaacagcctatctacatgaacttctccgaacctctgactaaagacatggccacttagagagatggatctgcagagccttcctgccctggccacgtttccagaaggagactcgggctgtggaacggaacatctacgagtcctcgggatgcagtgactgagataggggccctgggcctccgccctggccttggagctggtgggcacctccctgttctgcacagctcagggacttagccaggtcctctcctgagccaccatcacctcctggggtgccagcacctgttctcttggtcaggagctgtagagatggagctcaagcactggacgactctgtccccactgctggaataactcgggcacagagcatgggaccaaagtacagaaagaggttgggggagacccccccagccctagacttccatcattccggagaccaactcaacaccgtctttgcctgagaacctga

SEQ ID NO: 234479 - DNA, 481 bp, Homo sapiens
ggaagatttcctcagctttactttttaaacttctgattgaattttaaaaatcttgttacacattcagggagtatatgtgcaaattttttgcatggatatgttgtgtaatggtcaggtttgggctgctagtatacacatcacccaagcagtgaatgttgttcccaataggtaagttttcaatccttttccccctttctccttccccctttggagcccccagtgtctatgatttccatctttatgtccatgtgcatccattgtttatctctcacttataagtgagaacatgcagtatttgattttgtgtttctgagttaattcagttaggatgatggccttcagctccatccatgttgctgtaaaagacatgatttcattcttttttatggctgcatggttgaattttagatttttaaaattatgcttttaatttttgttttttgatttttagatttctctccatacattactttaaaaaaag

SEQ ID NO: 234480 - DNA, 731 bp, Homo sapiens
tgctggcattttatccagacaccagaagaacatgatcattgtaagtatatttgttatctctcctacctccaccccctacaagaattcttaaaaatactgctagtgagtgcatagggaggatccgtatctcatttcttttgtgtggttcatgtaattctgtcatctttgacttctataatgatgcctaggtagggaagagtgccaaatggtccttagccctcaaattcctgccaattgctgagttgctgatagtattctctactgcaggggatataccaggacaattagctttagctcaaaaccatttatcagagaatgtgggagactgactcctggcacttgtttgtgtcatgtgagatatgctatttgtctaaaaactatccttttcacatttaatagttactgtttgctagtcagaacttccaaaatcttttccttggagatttccttctgaaaatgtcagtatctcctgactttcagagcaaattgagggttactgttcttaacaggtatctcattctgccttcaagtgtggttacttgatacagatgtcttctttccccttcctcgtggattcgttgtggtctctgcagcagtatttctcagtgtgtgttctatgggctgcctatatccgcatcatttagagtccttgttaacgaggcaattccaggggcccaaccttacttagagtatccaggattcttcactttaaatagccatcatactctccc

SEQ ID NO: 234481 - DNA, 198 bp, Homo sapiens
tggttttactgaggtggaggtgctgatggaaggatggtggtggacattccatagacaatgctgcacagcgaactctcaaaggttttctggagaatccataaataactgaatttggatttttcagaatttggcttcttcaaggataaaaatgtgcaaattacctctttgctagttgttagctaatcagtttacctaaaa

SEQ ID NO: 234482 - DNA, 343 bp, Homo sapiens
ggtccattcacttgcccagagcacacagtcatcagagacagttgggatccaagctcacgtctgtctgactcctggcaggcactgccctgtaccttggccattttccaacctgtgttttctgcggggccctccaacagcaccatggaaaggtgtcctgtacgcagccccttcaggccagctccacctgtgtggtttcttacacactcacagctttcatttgagctgggcatggtcacgtgcgtctgtgatcttagcttctcaaaggttcaggcaggaggatggcttgagcccaggagtttgagaccaggctgggcaacatagagagacctgtttcaaaaaaaaa

SEQ ID NO: 234483 - DNA, 577 bp, Homo sapiens
cccattttcctcctttctcttttaagttgtagcttaatatgcttaaaccaaatgacaccttcctttgctaccattcaatactttccataaagcccttacagaattaatcactccctcctgttttcccaaagcactttgatttcactactataataagctcttttcactttatattataattagttatgcatgtgtctgcatcccatacaaaagtgttggctgttttgtgtctttgtttcttcagcctctaatacaatgcctgtgacattgtattgtactgatttagtttgagatgctcagacttcaaatttagacagaatttaccagagtatcctgaacatatcatgagaaaacaacatctggaacgtgaattctgtgctttccttccttttaatgactctgagcacaaagcagatggaatcaactgttaatatgttgcccaatgtgatgaatggcctcagctgtgtccatggctccgtaatcttcaggctgcttccctgaatgtcttgaatgtgttaggtgcttaacaaatatttgtgtgttaaacgagttaataaaaacagtagaaataatgtta

SEQ ID NO: 234484 - DNA, 452 bp, Homo sapiens
gcagtgggtaccgcggctgctctggcttctcctggaatctcaggtgctccctcttgtggctgttctcagcctagacaaccagaaagccgcagaaaagcaccagccaaggccgaggctgcgagggtgctggcgggcaggcccatcacggggctggctgtcctggtccgcgattccttgtcagccattttcctcagggggagcggcaaacgccaacctggactgaactcatctggggacaaccctggcttggaggagggtcatgtggctatttgcagactttacttctcttactgtgaacacccatgtgctctgctgcctaaaacataacatgtttgacaatgtgatgcggcccagacctaccatggatgccatgtcacgtacgtactatgcatccgacaacagggccaggaagcagaaggttccggaacacgactttcccagctgagctcaga

SEQ ID NO: 234485 - DNA, 389 bp, Homo sapiens
cagtcattgatttttccattttcttaacattaacaaccatatttatcattcttttggtatttgagagataaactatcagaaaggaaaatccataggatgccttaataacagacacattctcagccagacccatattagaaaagaatacatatggtaattgaaattttaaaatgaaagttttttaataatcttcatgaccatgtactcctaggaaagttttcatatattcccatgtgttcctacaaatcacatctaagactactagagtaaagtaaagaactggcctaaaggcaggagaatcacttgaacccgggaggtggagttgcagtgagccgcgatcatgctggcgcactccagcctgggtgagagagacagagactccatctcaa

SEQ ID NO: 234486 - DNA, 392 bp, Homo sapiens
gagaacttttttttgagagagagagagtataactattgttgcctaggctggagtgcaatggcacagatctcggctcactgcaatctccgcctcccaggttcaagcgattctcctgcctcagcctcccgagtagttgggaatacaggtgctacaggtgcctaccaccacgcccagctaattttttgtatttttagtagaaatggggtttcaccatgttagccaggctggtctcaaactcttgacctcaggtgatctgcctgcctcagcctcccaaagtgctgggattacaggcgtgagccaccgtgcctggtcaggagaacaatatttaagaaaaaaaattgcagcaatgaatcagatagactcaatttctgaatttttgctacagcacatgt

SEQ ID NO: 234487 - DNA, 265 bp, Homo sapiens
aatagatttgtggctcagaatgaggaagaaagggatggcccttctctctttactggtataggaccaaaatttaggcaaaatttagaactagatgaatttaatctctaggcagccttctccaaaccccttctcccctgacctctaaggtctgaattcaatgttccttctgtgtgctcccatgttctcagtcacccttgatagtattatcacactgcatggcttaagaatgccagtaaggttttggtgcctcagtcacatcctgctc

SEQ ID NO: 234488 - DNA, 454 bp, Homo sapiens
ggtaattgtgagtattgttaaactcagctcttctttgaggtagtaccaagaagttagtcaacaatttaagctctttaatcattatagtcattgttggtaaagctaacatgttgcaaaccatcaatggctacttatagccattgtttttattatacctattaccttgttcagtttcagtttttagttttaattattgcattgagtatccaactatgacagaagacacatttaagagaccaagtgtcatttattgaaagcaacttttattatggcaaaagggaaagaataattttctatatgaagagccacagtggacattttctgaaatataaactagaaagaatgcatgtgaactgaatatttttctatctcttcaaatgtcaattacatgtcacatgctgataaataagggcttaatatgagaatacattaaggactttaaaattatctatag

SEQ ID NO: 234489 - DNA, 395 bp, Homo sapiens
gaaatcaaggcttgctgctgacaaaatataaatcatgccatatgatgccaattctaaaatgccattaattctcctccattaacccctgcagagtattcactgactgctgaaactagagcatcactgagaagcaagagatagactgacctaactagagggagagctgccatccaggatgatgccaccatcacaggaggtgagaaggaacacagcatcttctgcaaatgctacagtaaatagggacggggtgcaggtaagatcactgaccccaggtcactgaccccagtattctcagagccaacagctaactttgcaggagagccctgagccaattactagatatgtaaactttaaaaaaaatgcttaagtcatcaaaatttatttttttcaatggc

SEQ ID NO: 234490 - DNA, 526 bp, Homo sapiens
tgtattaaagatctaatagtttggatttttgtttcacattttagtcttgttttggccatatggtctatacttctaacagtaatgatgggaaaatgttagagttttgggggacagactctaggtcaacagtgaaaaggtttaacagccactccccacttctgaacctccatcacccttgaatttaaaggtattatacctgacaataaagttacatgtgaaaaatacatgacttgaaagacaaactttcttaaaaatgtcactaaatttcaaatctcaaggtcaaacaagtctgagatgtttgctttcagcatattttatgattacttcatgtctcaaaaatgggaattacttgcaagttaatgggtaactttaaggtgtgacttcatttaggtttcctgttagtctttttttttttttaaataaaatcagtttgtgaacaaaatggggttttcaaacctcagtccagcctcctcactcaaaggggcaaaaaagcaaccaaaaacctcaaagcaagtaaaaaacaagc

SEQ ID NO: 234491 - DNA, 376 bp, Homo sapiens
gagtttgcagtgagccgagatagcaccactgcagtccggcctgggcgaaagagtgagactccgtctcaaaaaaaaaaaaaaaaaaaaaaagacaaaatgtaaactgtctacatctaggttaacacaatacatgttatagtaatctgtatgtatttataacaagatttgaagaaataaagaataaattcagtacttttttccctctcaaaaatgttaagaatggtcaagggtctcttaacctcatcctggttactattcaaaaattgaagagaatcagtccaccttgacccattttggccaatagagcgatacggggtctgtccatggtcctgaaatctttagcattttcatcaagtgctaaatttgcaaactttcc

SEQ ID NO: 234492 - DNA, 410 bp, Homo sapiens
gtattcaaaagattgcatttccccacacttacccccttcgaacacatttaatctttctccagttaaaaatgaaagaaggtaatgctttgatcctcatcacatttttgttctttactaataaagttattcaatatgtcatttgtagctagaagcttattgaataaaatatatgaagaaaagaatgcaacactacaatttcttccctgagatagtcttagagctctttcaggagtttccaattcttgatagcactaactttctccaagatttcgaggattaaaaaaaaaaaacactataaaagtaaatgcccaaatgcacccaccctagaacaagtttgcccctcgttgaggagcctgctgttcttaggttgtgtcatatcccctgtggatttatgctcatgcagtaggaaa

SEQ ID NO: 234493 - DNA, 377 bp, Homo sapiens
ttaggattttgacactggagaaacccatcaaagatgtcaagtttgaaaacacttgatcaaaacagaatcacaggtcactattaaaagagtattaatttaaccagagacttccaaagcaatacagaaacttacatggatataaaaaccctaacccttttaaaggtcagatttgctaagtgatcaaaaggggtacttgaaatgccgtctctactaagaatacaaaaatgagccgggcacggtggcacgcacctgtaatcccaggtactccgaaggatgaggcaggataattgtttgaactcaggaggtggaggttgcagtgagccaaaatcatgccactgcactccagcctgggtgacagagtgagtctctgtctcaaa

SEQ ID NO: 234494 - DNA, 372 bp, Homo sapiens
ggaaaggcaggggaggtggggcaaaggcatttgcagctggggcctaccagtggcttaaatgagactcaagaattctggggtggtggtggaggctgacatgatggagggaaggttctgggttgggtgagactggacagcagagtgaggctagatgatgaaggaagtccctggacccaagcaccacctccctattggacatgtgggcacacaagatccctgggaggtagacaaggggggttgagtcattcagtctctaaggctgggggaggctccttgcccacactgcctgcctgcacccccatcccttcctgctgacgtgggcccacgatgccacagtgggcaccagatgtgggttctgactctctctgagga

SEQ ID NO: 234495 - DNA, 634 bp, Homo sapiens
ttaacaataaacaaacatcagacaggaataaatgctatgcagggaattagcttcataggaagtttctttgcattttctttgggttgccctttcaaaacacatataagaagcttataaagcccatattccaatgttagagtactagacaggcttgccatcctcatcagaagttgtaccatgctccccttaatttaatgtgcaggaaaattgcagcaatatatgagtggtcccaataagtttgtttttctaaagagtagaagattagttgctttaaccagaatctatttgatagataaggtatttgaaattaaatgttttattttcttatatgtttaaatgtattcttgtctaattttataatatttatatttaagattgatacaatcaaacactcctagatatagaaagtattttagaagtaatatttactttatttttttcccactgtaagcatactttataaatcatccttgacaaatagttgaacaagacctactgaaatttatggtctgggtgatttagaggttgaaggtgtcactaacaggcaagaggacacaggaaaatgatcagatttaggccatagaggaaatacagggagggcatggtgagatttgtttcagagcagagcttctca

SEQ ID NO: 234496 - DNA, 358 bp, Homo sapiens
acctaccttagcctcccaaagtgctgggattacacgcatgagccactgcgcccactccgcattattaaatatagaacatttatttgattcatcagttaatattcttcttaaaagtactattttaatgtagcaagattgctttccaccaaaaggtggggtttccacggtggggtttccaaattattctcaatggggtgaggatgtgtgttatcacacccccgagccatcagatgctgtcagaaagtgatcactctgaagtctttgtttcaaataagcacagggtttggataaagagacgcaattaggaaaggaaaaagcagaaggctcgttccagacctggatgagatcctaaaaagca

SEQ ID NO: 234497 - DNA, 435 bp, Homo sapiens
gggtccctgttctcactccacagcggacgaggtgccactgtgcccccctctgcaaacaggaaccgggggctccacaaagtgagtgccccccagagggggactcacatctatcggtccaaactgcacctttctgtaagcccctcgctgtgtcacagacctcggccaaagtgaagcattccgcaggggtttgggccgtgaggaacagcctgcccgacacctgacttgaacactctgcggggaaaaacaccgaggaacatcacgattaccttctgcgggaacaagggccaaacaaacggcctcatcctgaagccgtgtggcccgggccgctcccacccatacctataggcaccccagcccgtaggcggcagtgggctctggcatccagctggtcccccacctctgcaggtgtttgcaatgtacccgtgttgatgtaag

SEQ ID NO: 234498 - DNA, 911 bp, Homo sapiens
aacggtatgattccgcttaagttccaatataggcagaactcaacaaaaaattgcttaggtatgtatacatatataggtggtaaaagtataaagaaaatcaagaaaataattaacaacattcagagtaataattatctctggagaataggaaggaggatttggttaaggtggggttctaaagtacctggtactattttataaaatgattttttttttttttttgagactaaatctcactctattgcctaggctggagtgcagtggcatgatcttggctcactgtaacctctgcctcctgggttctactgattctcctccctcagcctcctgtgtagctgggattacaggtgcccgccaccatgcccagctaatttttgtatttttagtagagacggggtttcaccatgttggccaggctggtttcgaactcctgacctcagtccgcccaccttggcctcccaaagtgctgggattacaggcatgagccactgcacctggcataaaatgattattgacttttaggtagatggtgtttgtttgaattaaaatttatacaatcttttacatgtgttattttattttgtaacttaaaaactatgaaaatcctcaacctcaatggaaattaacactatattgaataaagataacctacagactgggaaaaaaacatttgcaaattgtatttctgatgagagtttaataactagcttatctaagaaactcttacaactcagccccaaaagacaacctaattgaaaaatgggcctaattgaatagacatttctccataaaagatgtagaaatggacaacaagcacatgaaaagatgttcaccatcattgatcattaaggaattgcaaatcaaagccataatgagataccacttcacacctgctagggtggcttttattt

SEQ ID NO: 234499 - DNA, 416 bp, Homo sapiens
gagataagtgctgcatattaataattaagaccacatgcatattcgccaacaaaagaaaagtttcaaacccccattccgggaacagctgcccgtgtggggcccggcagggctgtggaggcccaccccacagactctctcttctaggaggaccagccaggggctcctctccaagccagtgcctcccccagcaccagggggcctggcctccagagtgggcagggggagtgtgtcaggggcgctgagcccagagtggaatggggaacgccagcaccaccgtggagtggtcctcacacacccacagagcccaaaccaccaggcagggtcccccaaccccaacaccaggcaggctctagccaccctgtcggttcccaataagccatttattgaataaagattgaatccaaaactccaggttc

SEQ ID NO: 234500 - DNA, 593 bp, Homo sapiens
taaaattttttataaaattcttttttatttttatttttagcagaggtgaggtttctgaggtttcattatgttgcccaggctggtcttgaactcctgagctcaagtgatcctcccacctcagccttccaaagtgctggaattgcagacatgagccaccgcgcccctcctgtttttctctaattaatggtgtctttctttgtctttctggtaataagcaaaaagttcttcatttgatttggttaaatttataactgttttctcatatggttaacattttttcttgcctggctaaagaaatccttttctgcccaatactataaagaggtttgcccacattttattccaaaagttttaagttttgtctttcatcttgaagtctaatgtatcaggaactggcttttgtgcctgttgggaggtagtgatccaattccatgtcttgcatgtaggtaaccactggtccctgcgccatgtattcaatacgtcgtctttctcctgcgggtctgcaatctcacctaccatccatcaagtttccatagggccatgggtctgcttctgggctccctgttctgttccattgtcaatttgtctatcct

SEQ ID NO: 234501 - DNA, 1903 bp, Homo sapiens
  misc_feature (752)..(752): n is a, c, g, or t
gatagggtgatacatcaaaatataaatggaatgtaattagtcccatgaaatatatgtatacattccccacttttgctatgctagcctttattcactttcctcatttctgcctttctacacatttacttcttgtcactctgggatgttatctttcattttcatttcattatcttatcctttattcccctccttttccaactttcctgttttaataagagcatttttccgaagtatgagattctcttttgattcattatttgatttacttagtcacattttcattttttattttttcaggttcgttcattcccacccccattccttcatccatgtccccgttgtctcttgctgtagtccacctttttccttctgggccttatttaactgtcttttgatatctccccttcctgaggaccttctgtttcttaatttttttcctcttgtctccttttttgctcgtttcttaataaaatggtgctctgagtaaaacgcatgttgtgtgcaaagttctaaatttttcttaatcatagcaagatgaataaggcatggttcttgcctgtaaagaaggcagcattcacaaagacttttatttttattttatttttatttttttgagacggagtctcgccctgtcacccaggctggagtgcagtggtgtgagctcggctcactgcaacctctgccacacgggttcaggtgattctcttgcctcagcctctgaagtagctgggattacaggcatgtgtcaccangcccggctaatttttgtatttttagtagagatggggtttgccatgtaggccaggctggtcccaaactcctgacctcatgtaatccacccacctcagcctcccaaagtgctgggattacaggcttaagccaccacgcccggcctaaggctttgttttcttattgtctagtatgccaactttaactgtgccaccgcacccaggagcattcaaaaagacttctgacgcacgcctctaaaatgtatcctgttcgtttgtcagctgggcccttaatattttgtgataatttttttactcatttctaattgtttcactttcacacttgcctcattttcttttcttccctgaagccccatctcagtcaccattgtgttagaagctggcttgcctccagattcacacacaaaaaagataccattgatcatacattttctcaacttttgatttcctcttctctcccttcaagccccacacttcacctggtaaatcgtccagtacatctcaagttgcatacattcctacctcattttctatttcacaaggagtggctcacctccttgcctgtggcatagtaatttttatatgcccagtacctggctcacgagaggaacttaaacatctgtggatccaaattaaggtacattttcccacccgtactcttgaaaccatttcctccactctttatggcccatcacttacttttgccatgttttcatttccttgacttatttttgttagtttttgagggcagaatttccatctctgattcccaacatcttagtaagtagcagaaattctcaaaacagttttgcaatgagagaataaacactgaatccatcatgttgtctgctatgaaaactggtaacaggctgggtgcaatggctcacacctataatcccagcactttgggaggctgagggaggcggatcacttgaggtcaggagttcaagaccagcctggccaacatggtgaaaccccgtctctactaaaaacagacaaaaaaaattagccaggcatggcggctggcacctataatcccagttactcgggaggatgagtcaggagaattgcttgaacccaggagatggaggttgcagtgagctgagattgtgccactgcactccagcctgggcaacagagtgggactccatctc

SEQ ID NO: 234502 - DNA, 1132 bp, Homo sapiens
gggctgggcacggtggctcatgcctgtaatcccagtactttgggagaccgagacctcatgtaatccacccacctcagcctcccaaagtgctgggattacaggcttaagccaccacgcccggcctaaggctttgttttcttattgtctagtatgccaactttaactgtgccaccgcacccaggagcattcaaaaagacttctgacgcacgcctctaaaatgtatcctgttcgtttgtcagctgggcccttaatattttgtgataatttttttactcatttctaattgtttcactttcacacttgcctcattttcttttcttccctgaagccccatctcagtcaccattgtgttagaagctggcttgcctccagattcacacacaaaaaagataccattgatcatacattttctcaacttttgatttcctcttctctcccttcaagccccacacttcacctggtaaatcgtccagtacatctcaagttgcatacattcctacctcattttctatttcacaaggagtggctcacctccttgcctgtggcatagtaatttttatatgcccagtacctggctcacgagaggaacttaaacatctgtggatccaaattaaggtacattttcccacccgtactcttgaaaccatttcctccactctttatggcccatcacttacttttgccatgttttcatttccttgacttatttttgttagtttttgagggcagaatttccatctctgattcccaacatcttagtaagtagcagaaattctcaaaacagttttgcaatgagagaataaacactgaatccatcatgttgtctgctatgaaaactggtaacaggctgggtgcaatggctcacacctataatcccagcactttgggaggctgagggaggcggatcacttgaggtcaggagttcaagaccagcctggccaacatggtgaaaccccgtctctactaaaaacagacaaaaaaaattagccaggcatggcggctggcacctataatcccagttactcgggaggatgagtcaggagaattgcttgaacccaggagatggaggttgcagtgagctgagattgtgccactgcactccagcctgggcaacagagtgggactccatctc

SEQ ID NO: 234503 - DNA, 887 bp, Homo sapiens
tgaccctggcttactttatgtaaatttaccgttagtaaatgataatggggtctcccatttctcatttgttacacaaacattatatggaaacattatagtttttaaaaagaaggaagccttccaaaggccaattccctaacttactggcacccttctgagttgcattcgagtcacgtaccaggtactgtcatttcatgtttataaaattttgtgtcctgttgtttttcgaaaagcaaacgtgtatgacagcgtttgaaccctccacccctccccttctgtgaacactgggctaagtcacaaagataaagaagagaaaactcgcggtagggggctattaatggagagagcaccaggtggttccctgcagacacagaaccagctccagctggtgacccttgagagtctctcccgcagaatctcggaggctgaccctcgaccaccagcgtggaggaatcctatgccctcacgtaagtcccaaatgaggatctgcgggctgtgctgaaaaacaccaccttccagggaggctctgactggcagtgaggagtcacatgctcatcctctgaccaattacaggacggtactgggaacaggacacaaatgctgctggggtcacgtgactgactgatcacaagcaaaagatgcccgctgccactccatggcccaagatacgaacatgtttatttcttatttttattttttgtaaagatggggtcttgctatgttgcctaaggtggtcttcaactcctggcctcccaaagtgctgagattacaggcgtgagccacggcatcccgcctccagacatgtttttttatttttccagacggagtctttctcttttgcccagggtggagtgcagtggtgtgatctcggcccactgcaacctcca

SEQ ID NO: 234504 - DNA, 544 bp, Homo sapiens
tctagggaatatgactgttaacatttgaacactttcaaatagcagtacgttttactgtggttttgataacctgacatagaataagctgctgagatgcaaggataccttggtatatagaaagagccttagacttcgtatgaaaaaaacttaggttttatcttcagcctagccatctaatgtctctgtaactttacagacatctggtgtttcacttaacctctctgagacttagtttccttttctgtaaattgatagttgtggccaggcaccatggctcatacctgtaatcccagcattttgggaggctgaggcaggaggatcacttgagcctaggatcctccaggatacttgagaccagcctgggcaacatagggaattaaaaaactttttaaaaatcagctgggcgtggtagtgtgcctctgtggtcccagctattgaggaggctgtgggaggatcacatgagcatgggagggttgaggcttcagatagccgtggccacaccactgcactacagcctggacaacagagcaagaccctgtctcaa

SEQ ID NO: 234505 - DNA, 157 bp, Homo sapiens
caaactccagaagggggaagggtaggagtggggcaagaattgaaaaattacctattgggtaccatttttgctacgtgggtgatgggtatgctaggagcccaaacctcaccattacacaaacctgcacatgaaccccctgaatctgaaacaatataaa

SEQ ID NO: 234506 - DNA, 498 bp, Homo sapiens
ataccattagtagcccttgaaatggatctccaggaagtgctgactgttaatgactctgccctgatgctcctatgtgagcagaacaaagagataatgtctaagtttgcaggtagctgagcgctctaaattgatgactagctcagggagagggaggtgctgtgccatcctaagcctagaagacatcgccaaaggaacagtgggagattaacaactctcccatgttaggaggttgacttgccaaactgatggaagagtgacaaactgatagactgtggtgctgtgtcccttctacgagctgagggagggcttcacctgaggcagtcagaagtgctaagagaagatttatgtggtaagggagagggaatctttccaacaatagctattaattgactttcattttgtagaagaatattgtattaagtgtttggagataggaaaagtatggcatgctctcaggatgtttataatttacttggggagataaggcacatgattgaa

SEQ ID NO: 234507 - DNA, 343 bp, Homo sapiens
tttctttctaccagtgtgaaaacggactaatacagctgtgaaagaaatggagatacggctgggcgcagtgactcacacctgtaatcctagcactttgggaagccaaggccggtggatcacctgaggtcaggagtttgagaccagaacggccaacatggtgaaaccccgtctctaccaaaaatagaaaaattagccgggcatggtggtgcacacctgtagtcccagctactcgagaggctgaggcaggagaattgctggaacccaggaggcggcggttgcagtgagcagagatcatgctattgcacttcagcctgggcgacagagcaagactccatctcaaaaa

SEQ ID NO: 234508 - DNA, 457 bp, Homo sapiens
agatgagattcctctaatgggtgagtgcctggagaaggaggccctggacttccttaacggggaagaggagctgactggtgacctaggccttcactgatctaagaaggcagagccctggacctgaggcacaagcagactacatgctgcagcttgcccagaacaagaccctgagcagtcctttttttttctgaaatcaggttgcgcgtcatccaagatcctcttacaaagagaagccatgaacttccttggctcatggaaccctccacttggctcagaattgccactgtaaatcataatgtcaggtttgcatttcaactcttagaccaccatgtgtcaaccctgcctagagaattagaaagtaaaactagtcctcgcccaaaggaaatccaattgaaaccctagtcccttcctttttatacaatatatccagagacatcaggcaaaacaaaacaaaaca

SEQ ID NO: 234509 - DNA, 1966 bp, Homo sapiens
  misc_feature (922)..(922): n is a, c, g, or t
attctcccaaagtgttgggattacaggcgttagccaccgtgcctggctcttcaagtttttcagtgtatcccttgtcagatggatagtttacaaatatattcttcgatactgtaggttttctcttcgctttgttgtttcatttgctatgcagaagctttttagcccattgtaattccattttcctatatttgcttttgttgcttgtgctttgtaggtcttacccaaaaaatcttgacccaggccaatgtcctataacgtttctccaatattttcttctagtagttttatagtttctttcctgactgtgcagggacttgctgggagacgcaagcctctctgagccaacaagacctggtcccccagtgttggcctgacagcaacctcctcaggggcccagtctcagctccaaccattctactgcattccatctgtgctgaaacctgctgggagacatgcaccagcctgagccaaggagaaaggggtctcctttttggttttagaaaagagagggagaggatactgttttctgagtactgactttgatgaggtgccaagcaaccttagaaagctgctcatctgtctcatcttgtgtcacatgtcaagagtttcccacttttgcactaggtgtttgtagcattaacctaagtcctttggattgcctaataacactagacctgaagcagttgaatagacttatgattatgtgtttctattaaagaacttagatacctatctgaaatgtaatagtttgcaagttcccaatttaatttactattcatactttaaattagttaggaagactggaagaagtttaaatgcaactactgacctcatttcagttttcaagtcaacttgcaaatttttcaagtgacagcacttttgagataacggagttataggtttatcagcatgggtctggatntaaggtctggcattcctatggctatttaaattgctccagacacatatttctgaaaattatgatgataggagtaaataagtttctgggacataatgacatcaattctgtagtaaattcttttttcattaatatcctgcaaattatcaaattaatggataaaatacccaagtaattactccagagaatatacaagatgcattttaagtttgctagctttgcctttaaaaaatagctaattttctttcttgatgtatgggcaagaagagattggctagagtaaaaacaaagttactttcaacataacgatttctttatcataaatacaagcctcagctcactgactgtcatgtgattttaaagaatagctttcccagtgttttccctttgggacacagattatttaagtgctgaatacagtaacttaaatatcttcttcaacatagaataaaaatcttgacttttttcattaggttagaattagtgcatagaagctaagaaatagtaaaacttatgtaatcacattatgcttgggaaactgttttcttgcaaacaaaggtatttgtctcttatttattgtgttgatcatgaaaatagtatctctaccctgaggtgttacaaaaaattaatcaagtcagcatgtatactgcatatgtgtcttctggaatatttaccatttaatcaagaacctaaaaaatatataacctagctcccaaaaagtaacatcagtggttaattgtcaggttaaagaaaagtaaaataaggctgggcatggtggctcacgcctgtaaccccagcactttgggaggtcgaggtgggtggatcatttgagatcaggagttcatgagcagcctggccaacatgaagaaaccctgtctctactgaaaatacgaaaaagttagccagtcctggtggtgtgcagttgtaatcccagctactcgggagcctgagataggaggattgcttgaactcgggaggcagaggtctcagtgagccaggatcgcaccactgtactccagtctgggctacagagtgagactcaatctc

SEQ ID NO: 234510 - DNA, 724 bp, Homo sapiens
agtgagatggcatttacacaatggaggctgcactgccagcaggcaaaaataaccagttaattcagtggcttaaagaaaccaaacctacccacaacgcttgacctcccattgatccatctgcgacaccggcagtggctaccatttattgagtgctgatggtgtcacctgggattgacttagtggtctctggcgctagttccgaagttgattctgtctggagagcttaatgcagtgttcagacctcagggtccgaacctgagggtcacccaaagatgagtgggacatagctgtgtgacctcggctgagtgctttcacctctccaacctcagtttcctcttctgcaaaatggggtggcttcatggcaccttcacgtggtgtgattgcgaggaatgaagggatcgatgccttgcaagtagaggagaaggggccggatacatcttagttgttatgttatttaatcatcttggcaaccccgggagggaggaaccactatcattttattttccattttgcagttgaggacaatgatgattccagcacagacagggcccctgacggggcagtaggaaaggagaattgctttggaaggagcataggctggactgccagcactcataggaggcttcgtgtgtgcccaggactgcgagaattaaatacaggacacccagttcagtttgaatttcagataaactatgaataatgattagtgtaagtatatctcaat

SEQ ID NO: 234511 - DNA, 491 bp, Homo sapiens
ctctttttatgcagagggtggcaaacatatatgctgttctgcatataccttttaaatgcattttggaatgtactgcctatcggtaggttaagagcttcttctttctttgttaaggctacattatactactgtatgatgacttattaactacttcctgactgatagacatttgggctgtttccagtttttcccaggatgaacagtgattcagtgaatagctctgtatcacattattttgtatatctctaggaaaaagatcctagaaatggaattgttgcagctgaaagtaagtacatttatcatttcgattgattttgtcaaattgccctccatagacgttaacagttaacaattctgctagcaatatgaatactcgtcagcttttttcatacttgtgaaaatagtaggtgaaataatgatcccagcttatggtttaatttgccctttcacttattttgagtgatgttgagtataatgagcactttaaagga

SEQ ID NO: 234512 - DNA, 232 bp, Homo sapiens
gcgaaagatttaggatgcaagatcaaagaaagagttcttgtttatttgtttgctagattttccagtactctgaggagcctgtgtataagaagaaagaatgaagctgagaggaccaaacagatgaagagatggaaatgaagattcatggtagcattcacatccccagttccagatatccctgagattccagttgcaaactatctttcccttagtttagttgttcatctcatcc

SEQ ID NO: 234513 - DNA, 456 bp, Homo sapiens
agttttgttaaagaccagataatttgtacgcatcccatggtcataggccagtactcattcactcgaatcaagactgacagtaaaggatcaagattctctttgcttggaaggggagaatcagaaggtagactctagtgggacaaaaaggatacagtgaacccaagaatgaatgtggttagtaaacatagtatttgttttatattaagagtagcattccagcaaggcacagtggctcacacctgcaatcgagagactgaggtgggaggatcgcttgaacctgggaggcggaggttgcagtaagctgggatcgtgccattgtactccagcctgggtgacagggtgagaccctatctaaaaaaaacaaaacaacaacaagaagaaaaaaaccagaattcctcaacaattcagaatcatttattaaaagaccaaaggcaatgttagctactttgaatgaga

SEQ ID NO: 234514 - DNA, 197 bp, Homo sapiens
actaacctcccctaaaatgagcaccccaaagagaaccaggcagaagctgcacagattttctaacctagccccaaatatcataaagcatcattcccactgtattttgttgattaatagggagtcactcaggccagtccagtgcaaagatggaggatataaatctgtcctcttgattggtgaggtgtccaagaatttgc

SEQ ID NO: 234515 - DNA, 1851 bp, Homo sapiens
  misc_feature (819)..(819): n is a, c, g, or t
  misc_feature (837)..(837): n is a, c, g, or t
  misc_feature (1491)..(1491): n is a, c, g, or t
  misc_feature (1800)..(1800): n is a, c, g, or t
taatgtggtaccatatattctttcttttaaggaccttaagaatctgggaagaattagccacactctaatttaggaacagagatggatgaatccacctatggacatttactggtatgagtcactggggaagttcactaagtcactatttaagatgatccagaacaggtgtctacagctgccttaagaatgagtactatggtggtgatgaaaatgttcctctcagatgtccaactgcagggggtgggtatgaaattgccagatggccccagctggtgtgctctggaatccttggcgccaaggccatgctgccaggggcttctccaggctggtgatcaaatgtagtgaggatcctaaggcaggcccattcctggaagacatgggactctcccgataggtgagtttggctcaaggactcctcatggtcctgaaagaaactctctgagacctgtacttcagtggaagcctgtctttcctttgctgtctccttcccaagggttaaacctacattgcagtctaatggtggctctcccggccttctctggctccctcgacattttctctcacaggcatttcctttaataaatctctcgcatatctgatcctgtcttggcttttgcttcttggaggacccagaataacacaagtactgtcataattatatctcctcactttaaatctctcaagtgtaattactaaaattgtgttgtagtggaagtaaaaagcaaggttactaacttgagagtatctatgaaacactcacccattaagtttcattctttagtacatttataataacttttattccaattgtagcatggnctatctccaagggcaagntcctgcctgcgtcttcattgaaaacagtggaactttgaagcaatgggggagtttgttgcttctcttgacaagcggccagccctaattcagagttataaaagttttcatattctgcttttggcatatctgtaaaatatacttgggcatacatttttttttctgtttggatcataagtgtgtgaaacatacgtggtaagagccagttatattccaatcacagaggatgtcttggaacacatcactgccactccagaggtactgaaactttcttcctctagtaaggaacatggctggggtgggggtgagaagagatattcttacatttataaactgtttctcccaccaccagaccagacataaagtttgattttgtcctgaagatttcagttgtcttggagccagtggaactgagttagcccaagaatgagagtggatgtcctttttctctttctgcctttgaaatatcaggttcattggacaggtgctcagtagatccaattttctttaattgcacctacatcagtgtaatataaatgtcttcattcacaatcccacaagggttgtagatatcaatatgccgggggatagtgtatgggaattgagggtcatagtaggtcaatactatataagaaaattcctacagagagtgagtcnaaatccctactcctatgggaccagcgactattattgtctatttatttacttatttgaaaatgtaaacaattatttcccagtggactaattacaaagttcctgtgacatcaagatcattccttctcaaggcttttcactatatattgagacgtgtagtcttaatttcattttggtttgccccaagacttccaccaagtctaggggatctgtacggaactatcctttcccaaggtacatcatgcatactttctgctattattttttttttcagtctgtcccttgtggtcaatcaagagaaatgcagacttnaatctctataagaagagcaaaggttctccctttttaaacctttgaactgag

SEQ ID NO: 234516 - DNA, 511 bp, Homo sapiens
ctttggtagggcttctactttgttgaagccaggaagaattagaatctggcctataagaattggatcagcacttttagtagctgagctgtttgtttttatatagaacatgagatcagtaaagaaattcccatgattcattataatgtgtcttcatcagagtattggcaaggttaaatagggatttgtagggattttttttctttccaagaatatataagcgtgaaatgaaggtaggcagaaaaagtctaaaaattttagaatattagatattgcttcagcaaaaagtcacatgacattgcatcaggaacaggcagtcagctgacagtcggcctcatccactctgggaatgtgccagtggaactcctgcacctctgtcattggcagattcctgtgttgccaggggattacactggccattggaacgcttgcctgagtgtaatgtaagtatggcctggagtgacggagtgacaagatgcctatccagtccatatcccaccatttccctaactat

SEQ ID NO: 234517 - DNA, 461 bp, Homo sapiens
aggacctgtgacttgctaatagaatgtgaccaaggtgatgggatatcactgccatgattatactgtgttataagtgaagggattttgcaagtgaaattaagttaaggttctaatccgcagaacctcagaacctctgtagaacttctgttctaatctcccctaatcaagtagtcctttaaaagggggcttattccttccctgagcttagagattctggatagcagactccctcttctgtcagccctaaagaagtaagccattattaattttacagatgtacagaaataaattttgccagaatccacatggacttgcaagaggaccccgagtctcagataagactgcagcctcttgaacatagtcttgtgagaccctaagcagaggagtcagataagttttgcccagactcctgatccatggaaactgtgaaataataaatgcatgttgttttaagctgctaa

SEQ ID NO: 234518 - DNA, 447 bp, Homo sapiens
ctttccaaacaaacagcagattggcacctgtgaactggaaccttagaggggattggtttaagtcttgttgaccccctctatggataatctgatgtatatttttctcagtgctaagtgaaatgtttcccagaatttcagcagcccgagattcaccctctggagctgcataaaaatgtagtcaatatttggtgctcagaaattgtacccaatattccaattacaggcttaatcactacagtgggcacagtgggagggcagtgccttccttcatcaggacagacctgtgcatctgtgtgtcctgcctgtgtgctcctgaccattcccgtgcattgcacctgtgttcaactaaaaccctttgccattgttcacctttaccaatgagtcctaccctcttcccaagtctttaacttatccccttgctaaataaaaatttctgaagttttttct

SEQ ID NO: 234519 - DNA, 378 bp, Homo sapiens
gaattgaatttaaaaaggaaattgaacagtaccagttttattatttcagtacatatttcagtcattagtcatgagaaaacatgcaaaagccttgatactatctcacatttgatccataaaacaagaaaaggaatattgagtcccacagatgcaggaagcactggcatacagtgaattcacacttctcaggcagcatgttcttgacttttattgcttttttactttgtgaaagaatctcattcagcatatgagaaaaaggaaagaggaggacttcatttgtgggacagcaactcattagttgtctcactgtaaaatactataccaatgtaagagaaaattcttgctagttttgaaattttcttactggcttctcagatt

SEQ ID NO: 234520 - DNA, 179 bp, Homo sapiens
gccataaagtagtatatgttttattgttctgtaaagtttgaagtgaccagcccaccacagttaggtcactgagtgtttcggttgcctggttattctttcaggaatgtttgaatcgaaatgctcacaatttattcccccagaagagagaattttcagaaatctcctaagaaagtctgatg

SEQ ID NO: 234521 - DNA, 533 bp, Homo sapiens
ggatagaagggaaggagataaatgaccggtgtggagcaaaaaacactagagtgggagccacgagacctattcctaagcttcaatactgtgtgacattgggcaacagattttacttctctggactccatttcttcaactctaaaagggcagggctggcccagatgacctctgaggtccttttagcaacagtagtctaggattctgcaaacgtgaatggcattaggttaagagaagggataggaagtgtagcattgattatgggggcaaggaagaccgcagagtacaagatcacacagaggaaggtgtcgtgatgtaccactaaaaaagtgtgaaagagcttgccttttttgggaaggactgaaggatgggaacggaggatggagaccggaaaggataagaagtagtgagaaaatcacgaggttgtttttaagaaagttatacagtgttagagatcattattttacacagatagcttttcaacttttttaaacccacgattcacagacggaaataaaattgacatcatggtccag

SEQ ID NO: 234522 - DNA, 339 bp, Homo sapiens
tggtctcaaactcctggactcaagtgatccttctgcttcggtctcccaaagtgctgggattacatgcatgaactaccgtgcccagcctaatgtattactctttatataggaatacctattcactgtaagattccttcaaaacaaactttgacgccataacaaaaatcataggctgtgactcctgtagccacccacacattcctttcagaacacgcatactttttccccaagatataagccctgcgtttgggggtttgccatgcagagatctgttttgcagccacccaagaccatgcttgtgtctgtaagttcctcctaataaatcatcctataccaata

SEQ ID NO: 234523 - DNA, 169 bp, Homo sapiens
agccacatcgacattccataggtatgaaggtgtacttaagatttttctttaaatcaaatctaaatcattcacttttttcttatcctgaccctaaacaatgacagccttgaaatcttggcttctgtgtgctaattcttaatgctctaattcatattcaaaaaaaacataa

SEQ ID NO: 234524 - DNA, 2205 bp, Homo sapiens
  misc_feature (1416)..(1416): n is a, c, g, or t
  misc_feature (1512)..(1512): n is a, c, g, or t
  misc_feature (1546)..(1546): n is a, c, g, or t
ttttggattacccggatgggccctaaactcgatgacaggtgtccttataaaaaatacacatagagggacacagacacaggggagaaggccatgcggagatggaggcagaatgatgcagccacagcatggaatgcctggggccaccgggagctggagaagacatggcaggattcttctcttgagccttcagaaggagcacagcccaacggacatcttgactttggacttctggcctccagaactgtgcaaggattaattgtctattgttttaagccgcccaatttatggtagtttgttacaacagctctagaaaatgagtatcatttctgagggcttcagccttaaaatgggcctagataggagaagtgcccactttactgagctttggggaggactagaagggatgcctgtaagatttgcccacacccagcacctggagagcacttgatgaaggttagccctcatacagagcatcatttattacccggcctttggctgctctgccctgaacccttgcagagcccacggaagccagcccttcacattgccatcttcttgtgtctgactcgttgccactgggacccctgagcccagcccagcgtgttcctggctcaggaatctcagaggaatcaaatctgactcccagacccaggctgcagaggcctctctgagccattattaccagggctgccagagcgagactatgaacatccacatgtggcgttttaatattttacccaagaagtcattttcttccacgattcagacacagaagactcgaagaattaaagtgagaaaggtactcagggcctgcatgatttccgccaatgggcgtggaggattttcctgtgtctgttcaggctctttctttcttatctgcgtcttacagcagacgggaagccagctgacgagagattgcatgttcataccaattattaaaaatatatggcaggcttctggaaatgcattcacatgccaaggaaatagaatgcagtcaccagcccaggcccctgcactgtgtgctttggaggaacagtgcggcatctgtaaacacaatgatacaaggttttggaccagattctgccacctcccagctgcgtgaccttgggtgagtgacttaacctctctgagccccagtgcccataggggaagttcattcctccctcacaggtttactgtgagcgtcattaactgagataacatgttcaagtacctagttctgagcctggcacatagaaggaggtcaatcagtctgatttgtttccactccctgccccagaatttcctgactccctaagaaaactgacataactaccctgccaacctcccaggtcctgaggtgcactgctgccaagagcaaacgtgcaggatagatttacaccttccagtgcacttccatggccatccactcatttnatcctgcagactctgctgcagagagtgttctgtttccattttgcaggggagcacctggagagctctgaatcacataggtagcaagtggggctcagnggtgagaagccaggcctgctaatccccaaagctnggctccttcataccccatgctgactgtcaaatgagctgatggatgggaaattgctccataggcaacagagctctatcccagcctgagggctggactgttgttatctccagcacctgtctgtgatcaaggctctttgctacctttttgtccatgtgtattgtcctcacttcccccttctaggcatgagcaggttggatcagtctcatttggctcattccaaggcagtctgtgaacttgccgcatgtgtggttaaaatgtatgcatgctcccactcccacttcccatgtgccttctcatgctccacgctctctgccccacccacactcactggctcgcacatccaggaggtgctcagcacagcctgtcctctgttatgaagaagacttcgtggagctcaggtgcaccatagagccactagagagacacgtgtcattcattcatctgccaaacccacatttactgggcacccactatgtgccagatgctggagccacaatgatgggttaggtgcagcccctgatctcaggactcccccagtccagggggacaagttaattgacaatggcagtgtaggtggcaagtgctagaatagctccgcccggggccctgtggaaacgcagaggaggtggctgctcatcctgccttgagaaatgtttcac

SEQ ID NO: 234525 - DNA, 291 bp, Homo sapiens
aagtttttgattcaaggtgactaacctgctctttgctcaggtctctttggccacctcatcttcctcaaatgcaaggaattcctcacgtatcattctccctttcgtgcttgctctcctctctcccgctggagcctctgagataaacacagacttaagcaaacaacaacaacacaaacatctcctgggaaagaagctctttcacttgttttgtctcactgaagctaatgctcctgcatgcctagtccaggacatcatatgatttttacaaaaataaataacgttaaattcaaa

SEQ ID NO: 234526 - DNA, 468 bp, Homo sapiens
tgcttaaaaaatataagaatattatttatcaggaagaatttggagagtagacgatgatagtagatggattcataggggaaatgcagagatgttgaggttgggctgaattgaattagaataaaattagaataaatagtttcaagaaggtaacaactgttttaaaattttgtaaatgtaccttgtatatatataattttgtcaattaaaaataaataaaatttgccaatttagtttggaattatccagaaatagcttagcaaaacatctggttaatgtgctattcaaaattaattttattttaatagattaaagttatataggcctcctttgggaagaaaactaatttttctcaaatgtaataattataaaatgtaataattatatgtaatacagatttttgtagatggaatcattgtaattagagtatacatatgtgtgacttttatgaacacatacagaatgtctaaa

SEQ ID NO: 234527 - DNA, 471 bp, Homo sapiens
catcatctgttatcatcattaccattttcatcattctaatggcagacactctatgtccagacattagactacagatttatcagaaaaaaatcttgcttaattctgaaaacaaccattatcatcattggtaacaggaagaaaatagaggtggagtgtttaagtaacttgcttaaatcactaaaaatgggcatatcaaggattaaaaataagtgtgtcggactaacgctgatccacctaacagatgttatcatttcccttggcattcaccaggattttgtgtaaattttcttccttattttcatttttatctgtttcttagtaaattgcaatatatcgattatattttcaacaaatgatctgagggaaatatattatctttaaccttcccaaacattgcagatctcaaaatatctttcacatgcactcgaatctaaataaatagaagttattgaataaaaaactttccttctc

SEQ ID NO: 234528 - DNA, 844 bp, Homo sapiens
aggcagatgatgaatttgaagccctgacaaagagaaggcaaaatcagtttgtgtccctgagttgctaagtggagaagaaacgtccaccaaccaggaaacacctgcctccaactgttaataggtctgtgaaatgtgctttgtttctggtcagcatggacacccgctttaatagtggcttcagatgaggcaccttgtgacagaggagctcttcccctgcagcaaccttgaagatgttgtggaagacaatagccattcttacttcactctgaggatcacgatggcgtgcaagggtgtgccaagcacattgctatctttggccattctctctcacattagtacacctggatgtgaatggcacgttatctatgtaagcagtgatggtctctatcttgtggtagaaatgacagaattacacacaatcaggacagctgagattccatttactagctcagtaatcagagaatatgtatgacatcccagcaaaaaatgttgaacatgttcagatttcatcatatcagcaccacagtatcagtcttacggggaggtgctcgcattcagttcctggctactgaagaaattttgcaggagttccagataacttacttgtcccataataatgaaaactattacaattatgctaaagaagaatacttaataacacagtaaaaatgtttatgatgtcttttaatttctaaagcatgttataaaagtattacagtatgatctcatatttgtaagtaaaatatatattaattcatttagcaaataaatattaagcccctactatgcacataccaatatagatattggtatttgtgtgggtgtgtgttacagcagattttaa

SEQ ID NO: 234529 - DNA, 425 bp, Homo sapiens
aatacaaatatgtgtaaaatggaaagtaacaccccccccccacattctccctaaaattttacacccacagatgtgcggccaatattttggtgtattttccttaagtcgtttttctagactttctttgtttggagagttttgccatacccctgcccctcaagccttgttcactcagcaaagccctcctttggagtgtgaaaggcagaggtgatgcggccctgctctgggatccgagtcctgagttgagaagggttttcctgaacctccaagctggtcctctgtgtcgttgctgtccaggaacaaaggacaggagctgagggacaggaaaccccatgggtgtccatcctacccaggacaggacaggtgatcaggagcaacagccgaatctcttgggcggcctcttgggggccaccttcaccagcgag

SEQ ID NO: 234530 - DNA, 437 bp, Homo sapiens
tacagaaataggtgttcatacctactatatattaaatatatactattatatacatatattaatatataaataaatatatcataaaacgacctctccatgttaaggtgtagaatctatagaatgaaacataaataaggagttaacagaccaagcgccgtgacttatgcctataatcccagtattttaggaggtcgaggcagatggatcacttgagggcaggagtccaagaccagccaggccaatatggcaaaactttgtttctacaaaaaatacaaaaaaaaaaaaaaatagccagatgtggtggcgcacctgtagtcccagctattcaggtggctgaggcacgagaattgctcaaacccaggaggtggaggttgaattaagccgagattgcactggtgcacttcagcctgggtgacagagtaagactctgtctccca

SEQ ID NO: 234531 - DNA, 472 bp, Homo sapiens
atagagtttgtgcgctcctatgagaatctaatgccactgctgatctgacaggaggtggagctcaggctccacccggtaatgcggtaataatgccagcccatctgctgctcacctcctgctgtgtgggctggttcctaacaggccactgaccagtagcagtccatggcctggggtttggggacccctgttttaaactataaactaagtttttcccaaagttagtttggcctgtgcccaggaatgaacaagtttggcctatgcctaggaatgaacaaggacagcttggaggttagaagcaagacagagttggttaggtcagatctctttcactgtttgagttataattttgcagtagcgatttcagtaggaaataacttgttctagaagtgaaatgagagcaccttctcttaactctgactcttttcagtgattcacagtactggaaataaataagaattacctacatagcaaa

SEQ ID NO: 234532 - DNA, 308 bp, Homo sapiens
ggtgatgggattttggctcagatcagcctggatcagggtggacctctacaagctggcttgcatgaatgtaaatgtctgctgcccatcttgaagaccatcggcaagctttggtgggttcatattcagtggcattagggattaaggcaaacttaaaatgattctgagtgtaaacagatacagatataaacttttgggggaacaatttggtaatagctaataacaatcgttaaaatgtttatatcctttgacctgatagtgttagttctaagaatttaccttaagaaaataaataaatttatatcccatga

SEQ ID NO: 234533 - DNA, 437 bp, Homo sapiens
cacccacaggattaggctcaaagcctgccccagtgccagttcagcccccatagactcaggcttcatgctggcccccaaggacacaggatccaggcccagccatgtaaacacaagctccaggcatgcccaagtggaccaaggttccaggcccacccctatggacccaggcacaaggctacactctgtggacacaggtatcagacctgcctactcaatgacccaagcactaggctaccctacccaaggactccagcagcaagctagttcatgggcctcatcagctttcctgcccagaatctctgaacaggctgactagtgaagcattttctctgccaaaaccagtttgtaaagacttgaaatggtgccgacttcttcaaatgtgcagacactaatgtaggttacaagaatcgtgaataatcagggaatgatgacaccat

SEQ ID NO: 234534 - DNA, 285 bp, Homo sapiens
tgtgccaggcacagctctgagtcccttatattgagacctcaggaaaaccctgatataggtaatgctgttgtctccattatatggttgagggaaccgaggcacagagagaggaattaacttgctcaagtcacgcagcagagccaggacttgagcccaagcagtctggctccagatcctatgcctctgaaagtaagggaagagagtcacagagagaacgcactgggagggggagaaacaggggtgggaagttggtggaaaaaggaactaaaaatttctgagagcctg

SEQ ID NO: 234535 - DNA, 461 bp, Homo sapiens
cctgtctaggggttaagaagccagactgcacacctgattagaattaggttcaaagtaagagtctgtaggttttgaacaaaagtttgaggggacagtctttgagtgcagtgctgagtacagtgcatgggcttttagctacttagtgctcctttcttatttaaatgtctaggtcattctggatagttatagttaaaatttcaacaaagtttgaaatgtctagaaatggttacttttatttgctgacagtggttatggatttgttgtaaaatccacttcctacatggggcatcgctaccatggttagtctgaaggcaaaggtagacaactgaacttgaggtccaaagacctgggtttagatcaggggtgtccaatcttttggcttccctgagccacatttgaagaagaattgtcttgagctacacataaaatacactaacagtaatgatagctaatgagctaaa

SEQ ID NO: 234536 - DNA, 96 bp, Homo sapiens
accaggaacacagaccatctgtttcctttggtgatacagtatctcagtccacaatgtggttccaaatgaataatggagattggtttttacaagcca

SEQ ID NO: 234537 - DNA, 336 bp, Homo sapiens
acatggttagacctggccctctgtctaatactgtctggtaaaaccgtccatccgctgcctgatcaccgttagaggagagagctgcctgccctgcagctcatcagtgcaaagccgcccggtctggggctctcatgcccccctcactatggcctgtgcccatccgcagcccatcagtgcaaagccgccggggtctggggctcttgtgccccaccctcgccatggcctgtgcccacccggcctcctggggccctcgagctgtagtccccgggcagatgctgtggaccccgtgctatcagcctgggcaacagagcgagactctatctcaaaaaaaaacaa

SEQ ID NO: 234538 - DNA, 232 bp, Homo sapiens
gggtcaagtattagcaatatatagaatattaggacaattatttattttctcttaatcctttaaagatattaatctattgtgtcctggcttctgttgtcactggtaagagtctgctgtcagtttaattattggtcttgtagatcatctatttttttctcagatcccttttatggtgtttctttttgactttgattttattgtatgtgcctagggataagattttaaaagtgta

SEQ ID NO: 234539 - DNA, 491 bp, Homo sapiens
ttatatgctgtgtacatttgttttgtcactatatattatgtatactgttttatatagatagatagctacctatatataaaaattatgaaagaatggtaaagttgtgatttttttttttttcccacacactccactttggggactaccattgtaagcagcagacaacacctgggtcctctgaggtattagtagactatgagcctcaaacaaaagtttctgcaataaaattccataattccttgatttgaggagacagtggataagatgcactacagcttaataatcacttctaggcacacaaagaataccatcacaacagttgtacacataaattgtaaagatttatttctatttcagaaactgtgaaattgtgtgtctttgacttatagaaatgtgataagttgaaaaaatattgacttatataaagttatacagattacttacaggacttcttagagtttttgatatttgaattggtatgctgaacattg

SEQ ID NO: 234540 - DNA, 239 bp, Homo sapiens
ttcaggcattatcagctgaacgtccctgcaaccaggagcagctacataatttgcagggtcccatgccaaatgaaaatttggagcccattgttaggaagttaataagtggggtgcagtggtgtatacctgtagtctcggctgctcaggaggcttaaggtgggaggacagcttaaacccaggagttcaaggctagcctggacaacatagtgagaccccagtctctaataaaataaacaata

SEQ ID NO: 234541 - DNA, 362 bp, Homo sapiens
tggtcaggcaagtcacttgatccttctaaattattcttctgtaatcagattatctgtgttgcacagaggtatgtcaacatgaaaaagcacattttcaaatgtttttttcagtgtggtccaaggatcccttgggaaggggtttacttttgcattaagtatttataaacacagatttgttttatatacattaattaaagtaacttaaaaacaacagattgaatgtagaagaatcgaactgtcttccattcaattagtcatgaaagagttctgcaaaagggtgaaacaataccattattctcactaggcttttgtctattttggaaagtatagatttttaaaaataaaagtgtgttgtttatgtt

SEQ ID NO: 234542 - DNA, 504 bp, Homo sapiens
ttagtttggtccctgcggcctgcagccatgggagggctcagtggagactggatgacaggagcaggcaccacttggctgacattgaaaaggccttaacagttgatgtctgagggtgaccacctgaaaagaggaccttgagctgccagaatgtggaatacaggactgcagaggggaaaataagtgtcattttcattccagagaatattaccgaggtgcctgcaaagttcaatcttcctttccaagccttttattcaaactaagggccaggttcaggcacagaaggagcacctacaagctttagctttgatttggtcttaatgcacgcgtatgtcgccgtcgagatttacatatttcttaatgaccagaaagcaacaattagaaagtccaagatcaactctcactacggtatgaatttcttcatctgagcatttttgtaagaagcatggattcctactataatcacaataaaacaataaagatagaaaaaaagatctgggaaaaaaa

SEQ ID NO: 234543 - DNA, 542 bp, Homo sapiens
agggtttaagcctatcagcatctgctttaaattgaatccatttttgaatagatcctttcaaatacaggatctaggttactttcctgagagaagaggacactagaaagtagaaagagggaagtgggtgcctagaagaggagagggcatccagagcagactgggtgatatagttgtgcctcagtctatcctgctaacaggagtgaaccgagggtatcacccagaaaactgcagaaaactggctacaaactggcctcagtcactgataactgcaggaaggggtgacattcttatttccctgactcctcagagaatccgaaacagaaggagaagttgagcatggacagagttaaccgtgttgacttataaactagaactgcctgaaaccaaatgtggagttaaagcatctgatagagttaggacccctagtgcatttacatacttgactcattaaaagaaaattctggtggagtccctggacaccatcctaggtggtcagggagatgcaggataatacagcctttgtggctggagggccaagccca

SEQ ID NO: 234544 - DNA, 516 bp, Homo sapiens
tttgtgaggtttgggattgctgcactcctttgcatcctctcaatctttggcacatactcaagacagtaaatagtgtggtggcaaaatcatgtccccagtgtttaatattttccccagccagaggcaaaatcttggctcagttcttatgaacttgagttctatgaacttggaaagttgagtggcaggtgttcctcatacatggtgtatgtgtgagatttgccatattgtcatagaggcactttacaaatacagcatggggaaaccctgctgcagcatgaatttgggtatcatgctattggccatcagaccccgtcctccacaggagagcccttggtcagctcatccacctcatgataatgcaagtctgccttttgtgcagtgtcttaaatcccacttgtggttggcatcatttcctccagaaaatacttcctggtccctttccaggtgctcttcaccccagcccacggcagttgcccctcctaagtgttccccataacaccctgatatcggcctgtc

SEQ ID NO: 234545 - DNA, 1996 bp, Homo sapiens
agcgtgtgggccaccgcacccggccagaactcaatttttatctgttggtgagataatataggtcaagtatatagccttttggtgttttaacttgatccaattgtagaactttaggaattcagaccccgagatgttaaatgactgtcccctgttttaataggtttcctgagtttcagcataattgtcttagttcactgactagtttcttataagcataaccactggggggttacgtgcaaggatttcttcaggccgggtgcagtggctcacaccttgaatctcggcactttgggaggccaaggcaggaggatcacttgagttcaggagtttgagaccagccttggcaacatagcaagatctcatctttacaaaaaatttttaaattagccaggcatggaggtgcatacctggagtcccagctacttgagagtctgaggcaagaggatcactggagcccatgaattcgaggttgcagtgagtcctgattgtgccactgcactccagcctgggcaacagagccttgtctcttataaaaaaaaaaaaaaaaaaaaaaagccatttcttctgagttgtgcttgctgaactcaaaatactaggtgatttggtaatgcgcctaaagagcatggggctcctcctgccaattataagcaaagacatcacatttggagtttggcaagatcagaatatctcaggttgagcacctgctgaatgctaggattgtgtctatgcattttaaatctatttttaatctttattacagtcttataatagggattatgacaccagaacagagacagctgtcttaagatttcaaggggtgctagctgaagaaaacagagaggaaagttgggaagaagctggatccttgataacagctgagccatggacttaaccagtcttagatgagcgatacctcaccttcagatttcatgtcataccacctgaaataatatattttcattattgttgaagccattttgatttgggttgtctactatgctacctgcagccaaagggaaactaataaatgtgaactaagaagcaaacctacattcttcttcccaaagtccatgtttctccccctcgccatcctcttcaccaaaaactacattcattgtattcagctcctgcaaagagcacacattaagaaacaggtttaaggaagtgttagacactgaatgtattcgacccccaaaattcatgtgttgaaatcctgactcctaggactaactgttaggaggtagggcctttgggagatgattgggttttgagggtggagcccctcatgaatgggattagtgcccttataaaagaggccctggggagctgtctcccttttccaccatgtgaggacacggcaagaaaatggctgtctacaaagcaggaagcaggccctcaccacacactaatataccagcaccttgaccttgacctccccccatctccagaactgtgaggagtaagtgttgtttaagccacctagtctgtggtatttttgttataatagcccaaatggactaagaaatgaagagaaattaagatggggagggctattttcataataaggagcagaaaactaggaagagtagatatatttagaagggttaagaggagaggggagaatgtatatgtttggatagggagggacaagatgcccaactcatcttaaaagtgctgttgattcctgtgaaatttgtaacactcatttacattatttaaaaataaactaaattcgaacttgtcttggaggcatgaaagaaaaaaaaagacatgtttttagttattgtatgttactctgagctacacattatttaacatctctgaaactggaatatattttacaattgatagactcattttaattagcaggttattgttttcttagcagtacataagaaatggtgaatcttattgattcagtggcatttagattctattaaatataatttttaactgaagttgtacatagttaaataaaagtttactatgaaataaa

SEQ ID NO: 234546 - DNA, 1641 bp, Homo sapiens
aggtgaggctgcgcggggcggagcctgtggccctggcgcggctctgggtccgtctcgtcgcgtccgggttgtcactctctcgggttgttactctgtagcttcccggctcgcgaaagggaggacctgtctgggtcatggattttgagaatcttttctcaaaaccccccaacccggccctcggcaaaacggccacggactctgacgaaagaatcgatgatgaaatagatacagaagttgaagaaacacaagaagagaaaattaaactggagtgcgagcaaattcccaaaaaatttagacactctgcaatatcaccaaaaagttcgctgcatagaaaatcaagaagtaaggactatgatgtatatagtgataatgatatctgcagtcaggaatcagaagataattttgccaaagagcttcaacagtacatacaagccagagaaatggcaaatgctgctcaacctgaagaatctacaaagaaagaaggagtaaaagataccccacaggctgctaaacaaaaaaataaaaatcttaaagctggtcacaagaatggcaaacagaagaaaatgaagcgaaaatggcctggccctggaaacaaaggatcaaatgctttgctgaggaacagcggctcacaggaagaggatggtaaacctaaagagaagcagcagcatttgagtcaggcattcatcaaccaacatacagtggaacgcaagggaaaacaaatttgtaaatattttcttgaaaggaaatgtattaagggagaccagtgtaaatttgatcatgatgcagagatagaaaagaaaaaggaaatgtgtaagttttatgtacaaggatattgtaccagaggtgaaaactgtctgtatttgcataatgaatatccttgtaagttttaccatacaggaacaaaatgttatcagggagaatactgcaagttttctcatgctccactgactcctgaaacacaagaattgttggctaaagttttggatactgaaaagaagtcatgtaaataaaatagacataaaaaggtagcaatgtacagataaagagtactttaacgcccatgcgtgttcaagactgttcaagactggtgatttggagtagtttacaagattcctcattcagagtgccctcttgtgtgactggggtgatgtgcagcttccataatggatgggacagagagctgggatctaatgtacaagtgaagggcttggtcttccctgagacattccagccattggaataggagaggagcatatatggcagaggtgatggctggtgggtaaatgtgatagtaaattgtagaaacctcttctgattgattggatttccttaataaaatcggaagcaaggttaggctgagtgagggtgagtaaagaggtagaggaggtttgaggagagagaactgctcggaagacattggtagatggaccataaaaacagagttagttctctttatgacattaaatagttttacaacatatttttaatggttcacaatttcattttagggcttaaaataaattatggttctatgatttttttaaaccagtttcctattgttagacatttgtttccagtttcttactattataaataaagtgaaacaatatctcttactataccatttctaaaaaaaaagtt

SEQ ID NO: 234547 - DNA, 792 bp, Homo sapiens
aggtgaggctgcgcggggcggagcctgtggccctggcgcggctctgggtccgtctcgtcgcgtccgggttgtcactctctcgggttgttactctgtagcttcccggctcgcgaaagggaggacctgtctgggtcatggattttgagaatcttttctcaaaaccccccaacccggccctcggcaaaacggccacggactctgacgaaagaatcgatgatgaaatagatacagaagttgaagaaacacaagaagagaaaattaaactggagtgcgagcaaattcccaaaaaatttagacactctgcaatatcaccaaaaagttcgctgcatagaaaatcaagaagtaaggactatgatgtatatagtgataatgatatctgcagtcaggaatcagaagataattttgccaaagagcttcaacagtacatacaagccagagaaatggcaaatgctgctcaacctgaagaatctacaaagaaagaaggagtaaaagataccccacaggctgctaaacaaaaaaataaaaatcttaaagctggtcacaagaatggcaaacagaagaaaatgaagcgaaaatggcctggccctggaaacaaaggatcaaatgctttgctgaggaacagcggctcacaggaagaggatggtaaacctaaagagaagcagcagcatttgagtcaggcattcatcaaccaacatacagtggaacgcaagggaaaacaaatttgtaaatattttcttgaaaggaaatgtattaaggtataaaaatgtgtaagcaaaaatctactaaaatgta

SEQ ID NO: 234548 - DNA, 640 bp, Homo sapiens
agcgtgtgggccaccgcacccggccagaactcaatttttatctgttggtgagataatataggtcaagtatatagccttttggtgttttaacttgatccaattgtagaactttaggaattcagaccccgagatgttaaatgactgtcccctgttttaataggtttcctgagtttcagcataattgtcttagttcactgactagtttcttataagcataaccactggggggttacgtgcaaggatttcttcaggccgggtgcagtggctcacaccttgaatctcggcactttgggaggccaaggcaggaggatcacttgagttcaggagtttgagaccagccttggcaacatagcaagatctcatctttacaaaaaatttttaaattagccaggcatggaggtgcatacctggagtcccagctacttgagagtctgaggcaagaggatcactggagcccatgaattcgaggttgcagtgagtcctgattgtgccactgcactccagcctgggcaacagagccttgtctcttataaaaaaaaaaaaaaaaaaaaaaagccatttcttctgagttgtgcttgctgaactcagaaagccgagggggcatcgggataagtggcccgtaaaacagctgggggcccca

SEQ ID NO: 234549 - DNA, 740 bp, Homo sapiens
aggtgaggctgcgcggggcggagcctgtggccctggcgcggctctgggtccgtctcgtcgcgtccgggttgtcactctctcgggttgttactctgtagcttcccggctcgcgaaagggaggacctgtctgggtcatggattttgagaatcttttctcaaaaccccccaacccggccctcggcaaaacggccacggactctgacgaaagaatcgatgatgaaatagatacagaagttgaagaaacacaagaagagaaaattaaactggagtgcgagcaaattcccaaaaaaatggatatggcccaatactgatatcagttcaccagaatatgatcttaattgagcatatacattgcctggaagacatttatggaactttgttcgattcttctcttagatttgtcttttagcatgttactacattgcagatgagtcactgccaatcaaaggttaggcggaagctcctcagttgcatagttaaatggattttgaagcacttaaagtctgaaaaaacacttctggaactgtttgagtgtgcaaaatatatctgtgcaaattaatgtaggtatggagatcttgtccctattttaactttgaacagcacagtgataccaagcagtgtcagtaacacctgtgaactcattaaaagccaaggaaaaccactggaaagtatttacctggttttaaattgtctgatgaagctccagtttcctcatatctttgagcagctgttcttgccaa

SEQ ID NO: 234550 - DNA, 361 bp, Homo sapiens
aggtgaggctgcgcggggcggagcctgtggccctggcgcggctctgggtccgtctcgtcgcgtccgggttgtcactctctcgggttgttactctgtagcttcccggctcgcgaaagggaggacctgtctgggtcatggattttgagaatcttttctcaaaaccccccaacccggccctcggcaaaacggccacggactctgacgaaagaatcgatgatgaaatagatacagaagttgaagaaacacaagaagagaaaattaaactggagtgcgagcaaattcccaaaaaagtaagattaagttgaccactgtttaagttgaaaacgcagatttttttttctcagtttcacatggaacaaca

SEQ ID NO: 234551 - DNA, 1771 bp, Homo sapiens
aggtgaggctgcgcggggcggagcctgtggccctggcgcggctctgggtccgtctcgtcgcgtccgggttgtcactctctcgggttgttactctgtagcttcccggctcgcgaaagggaggacctgtctgggtcatggattttgagaatcttttctcaaaaccccccaacccggccctcggcaaaacggccacggactctgacgaaagcttgtgctttacatgaaataaatcacttaatcctcaaaacaaacttaaagagaagatgatgccgtcctcgttttacagatgggaaaactgaggcacggagaggctaaataacctgccgagattgcacagtaatcgatgatgaaatagatacagaagttgaagaaacacaagaagagaaaattaaactggagtgcgagcaaattcccaaaaaatttagacactctgcaatatcaccaaaaagttcgctgcatagaaaatcaagaagtaaggactatgatgtatatagtgataatgatatctgcagtcaggaatcagaagataattttgccaaagagcttcaacagtacatacaagccagagaaatggcaaatgctgctcaacctgaagaatctacaaagaaagaaggagtaaaagataccccacaggctgctaaacaaaaaaataaaaatcttaaagctggtcacaagaatggcaaacagaagaaaatgaagcgaaaatggcctggccctggaaacaaaggatcaaatgctttgctgaggaacagcggctcacaggaagaggatggtaaacctaaagagaagcagcagcatttgagtcaggcattcatcaaccaacatacagtggaacgcaagggaaaacaaatttgtaaatattttcttgaaaggaaatgtattaagggagaccagtgtaaatttgatcatgatgcagagatagaaaagaaaaaggaaatgtgtaagttttatgtacaaggatattgtaccagaggtgaaaactgtctgtatttgcataatgaatatccttgtaagttttaccatacaggaacaaaatgttatcagggagaatactgcaagttttctcatgctccactgactcctgaaacacaagaattgttggctaaagttttggatactgaaaagaagtcatgtaaataaaatagacataaaaaggtagcaatgtacagataaagagtactttaacgcccatgcgtgttcaagactgttcaagactggtgatttggagtagtttacaagattcctcattcagagtgccctcttgtgtgactggggtgatgtgcagcttccataatggatgggacagagagctgggatctaatgtacaagtgaagggcttggtcttccctgagacattccagccattggaataggagaggagcatatatggcagaggtgatggctggtgggtaaatgtgatagtaaattgtagaaacctcttctgattgattggatttccttaataaaatcggaagcaaggttaggctgagtgagggtgagtaaagaggtagaggaggtttgaggagagagaactgctcggaagacattggtagatggaccataaaaacagagttagttctctttatgacattaaatagttttacaacatatttttaatggttcacaatttcattttagggcttaaaataaattatggttctatgatttttttaaaccagtttcctattgttagacatttgtttccagtttcttactattataaataaagtgaaacaatatctcttactataccatttctaaaaaaaaagtt

SEQ ID NO: 234552 - DNA, 2501 bp, Homo sapiens
aggtgaggctgcgcggggcggagcctgtggccctggcgcggctctgggtccgtctcgtcgcgtccgggttgtcactctctcgggttgttactctgtagcttcccggctcgcgaaagggaggacctgtctgggtcatggattttgagaatcttttctcaaaaccccccaacccggccctcggcaaaacggccacggactctgacgaaagaatcgatgatgaaatagatacagaagttgaagaaacacaagaagagaaaattaaactggagtgcgagcaaattcccaaaaaatttagacactctgcaatatcaccaaaaagttcgctgcatagaaaatcaagaagtaaggactatgatgtatatagtgataatgatatctgcagtcaggaatcagaagataattttgccaaagagcttcaacagtacatacaagccagagaaatggcaaatgctgctcaacctgaagaatctacaaagaaagaaggagtaaaagataccccacaggctgctaaacaaaaaaataaaaatcttaaagctggtcacaagaatggcaaacagaagaaaatgaagcgaaaatggcctggccctggaaacaaaggatcaaatgctttgctgaggaacagcggctcacaggaagaggatggtaaacctaaagagaagcagcagcatttgagtcaggcattcatcaaccaacatacagtggaacgcaagggaaaacaaatttgtaaatattttcttgaaaggaaatgtattaagggagaccagtgtaaatttgatcatgatgcagagatagaaaagaaaaaggaaatgtgtaagttttatgtacaaggatattgtaccagaggtgaaaactgtctgtatttgcataatgaatatccttgtaagttttaccatacaggaacaaaatgttatcagggagaatactgcaagttttctcatgctccactgactcctgaaacacaagaattgttggctaaagttttggatactgaaaagaagtcatgtaaataaaatagacataaaaaggtagcaatgtacagataaagagtactttaacgcccatgcgtgttcaagactgttcaagactggtgatttggagtagtttacaagattcctcattcagagtgccctcttgtgtgactggggtgatgtgcagcttccataatggatgggacagagagctgggatctaatgtacaagtgaagggcttggtcttccctgagacattccagccattggaataggagaggagcatatatggcagagtcttataatagggattatgacaccagaacagagacagctgtcttaagatttcaaggggtgctagctgaagaaaacagagaggaaagttgggaagaagctggatccttgataacagctgagccatggacttaaccagtcttagatgagcgatacctcaccttcagatttcatgtcataccacctgaaataatatattttcattattgttgaagccattttgatttgggttgtctactatgctacctgcagccaaagggaaactaataaatgtgaactaagaagcaaacctacattcttcttcccaaagtccatgtttctccccctcgccatcctcttcaccaaaaactacattcattgtattcagctcctgcaaagagcacacattaagaaacaggtttaaggaagtgttagacactgaatgtattcgacccccaaaattcatgtgttgaaatcctgactcctaggactaactgttaggaggtagggcctttgggagatgattgggttttgagggtggagcccctcatgaatgggattagtgcccttataaaagaggccctggggagctgtctcccttttccaccatgtgaggacacggcaagaaaatggctgtctacaaagcaggaagcaggccctcaccacacactaatataccagcaccttgaccttgacctccccccatctccagaactgtgaggagtaagtgttgtttaagccacctagtctgtggtatttttgttataatagcccaaatggactaagaaatgaagagaaattaagatggggagggctattttcataataaggagcagaaaactaggaagagtagatatatttagaagggttaagaggagaggggagaatgtatatgtttggatagggagggacaagatgcccaactcatcttaaaagtgctgttgattcctgtgaaatttgtaacactcatttacattatttaaaaataaactaaattcgaacttgtcttggaggcatgaaagaaaaaaaaagacatgtttttagttattgtatgttactctgagctacacattatttaacatctctgaaactggaatatattttacaattgatagactcattttaattagcaggttattgttttcttagcagtacataagaaatggtgaatcttattgattcagtggcatttagattctattaaatataatttttaactgaagttgtacatagttaaataaaagtttactatgaaataaa

SEQ ID NO: 234553 - DNA, 328 bp, Homo sapiens
tgtcctcatcaatgtaggtgagcatcagctaacccaggaagggcctgaacagaacaaaaaggcagaggaagactgaatttgctctctcttcttgagctgggacacccaccttctcctgccctcagacattggcgctcctggttctcaggccttcagatgcagactgagacttacaccattgattcttctggttcttaggcctttgcgctggagttacaatgacaccaccagttttctggttctccagcttccagacaacagattgtagacttagcctccataattgtgtgagccggtccctcatagtaaatctcttcctatatatcca

SEQ ID NO: 234554 - DNA, 404 bp, Homo sapiens
ctctgggtgaaaggggaagagaaacaagtgagagaaaatcgatttttactttcttttcaggcccgtccccagttggtgagttttccagtggccggaagaccgagccctagagtaacagctgtggactcactgcccactctgtgtttattgggctggaaccccctctctgtcctggaacttctggttggagagccctctgagctcatggggcctgtgaatggtgggtcttggagtgatttccagccccagtgatcaggtgtcctgtcagtgcccctcaactccctgcagtcccctacttcccatcaagccaactcccaaattccaggatgtgacagttcccaggtctactgccttccaggcactgagctcatgttggggacccagaaataaatgagatacataca

SEQ ID NO: 234555 - DNA, 461 bp, Homo sapiens
ttcgagaggtctgaaactgctgtggcatcactggtgtccaggttttcttctctcagttattccatactggaatggcctctgccatagcccttctccccagatgtgtcacacatgccctgggttctccttggtctcttgatcagggtccagatctcctcatggtagaatggcaggatcagccaggcatggtggttcatacctgtaatcccagcactttgggaggccgaagcaggtggatcacttgaggtcagttcgagaccagcctagccaacatggtaaaactccatctctgctaaaaatacaaaaattagctgtgcatggttgtgcatgcctatagtcccagctactcgggaggctgaggcaggagaatcgcctgaacccaggaagcggaggctgtagtgagccaagattgtgccacttcattccagcctgggtgatagagcaagactccatctcaaaaa

SEQ ID NO: 234556 - DNA, 452 bp, Homo sapiens
gcagcaaacagaaagaaagaaacacagaagccataaaaaaatctctgccacatgaagaaaaacacaacaacacagcagaaggtagaagaatgcatgttcagaaatatgcacaaaaagaaacaggttattttagtcaatggcctgctatgtgctttcagagacaagaaggaaaagaaaaactcaatgaaacaagagattaaaaattgtaaaacgatagtctaaaaagaaaaggaaatatgaataaaaaattatatttggcttcaaaatagctttagataaagtctagaggaactgtaatcatgagaagaaatgatcaaaatttcatttactttccatattcttaatcttctgttcgctaatttgacttcaggggagaggaggcgccccttcggcggagttcaggggcgccgttcagacggacacaaggagggaggccgggtcgccgtcgatta

SEQ ID NO: 234557 - DNA, 667 bp, Homo sapiens
attttttaatccattctgtggcttgttccatgcctgagaacttttgacatcctgtgcccagacttaaactcaccccttcagtgtgtgggtttagggggagaagtgaaggttgacacattcatatcaacaacatagtctactttaccatccaacgatgtattttgatatcagccaagtatttctctctacaactgtgagcaatgctaatccactccagccttcttacactgtaatgataccttttctttgtcctctctgaaagtttctagtagcatatctccaaataattattgaatttgaaagcctcagctggacaagtcttctctgtggttgaattgtgacaatgtctgtgttccttaaaaaaataaaaaataacataaaaccaagtaaggttagacaaaacagttgaaagtttaaaatcccttggcctcatctagttcagtggagacaaactttctaaatgggaggagggccatgtaatgagaggagaggagaggagagaagtatttgatgcactcatggcctcagggtcagggagacctggaggagcagtggagatggtggagagccagagaacaggtgccacctcccaagaggcagcctttactcacctctggctgattggtggggttggggatgtgggtacaggcatatcagacctttagat

SEQ ID NO: 234558 - DNA, 312 bp, Homo sapiens
gtgcttgtggtccgtgaaataactcattcagcctccttgcacaaagtctagcacttactgagcatttgataaatgctagttctacccttaatcactgttctacagtagaaatcatcaagtattttagggcatggtactttcttaggtgtatttagagaaaaaaagcaaagttattaaaatctgacccctctcttcccaagtagcataagagatacgaagctgatggtaattaacttgtaccccttgaagtgagaaattatactttaataaatgtcattattattttaaatctttttctaattgtaaaatgta

SEQ ID NO: 234559 - DNA, 480 bp, Homo sapiens
gacagggtgctgggcccctccctgctggcctgagaagagaaagccaagttgaatacacttgctaaattgcaggcctttgccactcagcctctgcacctgccagcagccttgcagtaagattgccttttgtcaataaaacgatacttcattaggaagtcagaagatttccttgtatgttactgaggtaattcaaacttggtacagcagagaataggtttttataccaaatactgtattaattacatgagagctactgaaatgaacaccatcagacacattacattcactagcttccattccctggttaagaaaaatctggagctcaaaatggatttttattctcctagtataggaataaagggtttataaaataattcatccaagcgttagctgaatttttgtgtttaagttttgggtttatcaatcttcagccataaagaacctacatacatagtagcatttatttgttaccagtcagca

SEQ ID NO: 234560 - DNA, 233 bp, Homo sapiens
tggttgttaggagagatgaagaaggggtgggagttggaggaaaacaaaggaatggaaatatagtgggaatattctgtttcttgactgttatcaatgacagtaatctggttgtgatacttgaaagatgttactgttggaggaaactgggtaaagggtacatggaatctcttatgttttacaaatgcatgtgaatctacagttgtctcaaaataaagttcaaaagaaagaataac

SEQ ID NO: 234561 - DNA, 1538 bp, Homo sapiens
aaaacatgataatctgcaaaagttcatgtatctacttcattgtgcataggaagtgtttacaggtaaaattaaaatcaaaaattgaaaaaacactcttcattttggctctcctttctgaattttttcagtttcctgtctctacccgccatcctttgagtgatactatatctgtattggaccaaatgtatttactggtttcattttgtttattgaatgactttaaatgtatttattatcattgtttaatttaatgttggatatatttgtatcattacaggaatctggtaataatgggcaaatttagattgatgaggcttagggatcggggatgctccaggattcaacatttcttccaattgttcatggtttgttctaaattaggacagattaagaactaataaaacattattacatttgaacttgactcaataaaaatattctgatctcctttatgaatattaggaatattctttgtgattagtgtaagtagtttggatcaaaacataaaaagaagacctatggtttatgctacttctagttatttgtagttcacagtaaaacatgcacagacatacacacaaacattttcatcaatttcgaatttgaattgtgaaaaatatataagaaaataaaaacaatttatacatttgagcaaattgagcaatcacatttattgcatttatttccctttttcccttttttcactcattgaaagtgtgggttttctaaataatattagacactaacactcaacagatttattcacaaatgacacaagtacacattttaagacttctttgtatttcttgcaattataaccaatcactagtcatgaaatatacctacataaaccaagtcctacactttcagtgaggaagaatgtaaggaaggtatgttgactgttttcaagtttcagaaaagatattttcatatgataggattgagtatcatgggtatagtttgatcttgacatatagtttgaaaatcatactcaaaagatttgcattcatgaaaccagtgaacaatagggtggaatggatgaaccatctccttggaagacagggcccaattttcaattttttctttggctatcaagttgctagtcacttattcaggattttcatccaaactgtgtttggactgactgtataagtcttactgccttttcagaaatctgctttcctttgtgtgatttttcttgtactgtatagcacggtttatgcacctctctttagatggtgtactttaaaaacaaaagtaaaatttagaaaatggttttaacactgcatacctaaaattagtagtgtgcagcattgactgcctttgatttgtagtagacaagtaaaaatgaatacgttcttgtagaatgctgtaaaagttattcaggaatgaatacggttttagtgccgtaatcatgaatctttttatatgaatgcactgtctaaaagtgctaaatgcattttcaaatttttaaaaattcctcagatgatatatttgaaatgtctaaaataatgctgtgcttgaaacattagtgtaaa

SEQ ID NO: 234562 - DNA, 585 bp, Homo sapiens
aagaaatgcattttctatcttaacttatttacttaactctccattctttgtttcttccactttgacatgtgtccgtcacagagcaaagtccatctcccacttcttggtttcgctaacttcctacttttgttgactacttgcttcttaccctaccctgtcattgcctaattatattcaggctcagtgagtagtagaccattatggggcctctctgctcagatgttactgggatgttgactgtttcctgcaccctatgagaccctaataagagagtaatttcataaggacattctaaaagttgatggagatccaaagatgaccttcaggtagtccatgggaaagcgctaatgtttattaagcccagttgttgccttcaggcattgtaagcttaggataaatgaaaatgtacacaattcttaacttattaatttgacagaggcaagcattctgaataccatcaccatcaaaagttcctttgtgactgcatttagtccccactcctgccccctaaaccagcaaccactggtctggtttctgactatactttcgctttttctataaattttatataaaaggagtcataca

SEQ ID NO: 234563 - DNA, 281 bp, Homo sapiens
gccttctagagaagttttaatgaaaatagtgcagagagaaaacatgcttagcaacatgatcttagagacctgagattgccatttgtacattacgggttttcaggacacagagagaaaaccatgttgtgttgggataactgaaggaactaccctacacccgttcttctccagggcccttctgggagccagttttatggtgaatttattggatgttacttctcagagtgtatcagagattcttcacattcatggactttaatcttccccttgtcagctgcagc

SEQ ID NO: 234564 - DNA, 341 bp, Homo sapiens
cagtatttgtagcagatgttacaaatgtcataacacgaagctttgggatcagactgaaaactaaaaaatcaagataccagatgtggacgtcttccttttaccagcaactgcaactgacactgcactatttcagtggtaatctccacccccttcctactgggtggaatcatgccataactgtttgcttgctgctgaggtcagaggaggtgacaacagtaaagcggcactcattggaaaggcttttaagacagtttgcaaaatgaaagtgtaatcatcctttcccctcttgagagagtgtaccaaatctaacccttattaaaaatttaactgctcaaaaaaaa

SEQ ID NO: 234565 - DNA, 356 bp, Homo sapiens
aggtacccataaacatttatgaagtacatgagatgttttgatagagacatgctatgtgaaataagcacatcaaggagaagaaattttgatttttttctaacacattatcttatgtttgctttgcatgcattcgttcatatctttctgacctcaagactacatggtccttgagggtagagaccagcctattcatctttattaatttcaattgtttattcagtatagatttatttagcatgttctccatgccaggccttgtgttcacaatgtagttagggaacgagtattcagcaatggtgagttcttgtagaggaggagacatgcctcagtcactttcctgcctctctcagtactta

SEQ ID NO: 234566 - DNA, 440 bp, Homo sapiens
ctataatcccagctactccggtggctgaggcaggagaatcgcttgaacttgggaggtgaaggtacagagtgagactccatcacaaattaaaaaaaaaagtgaatttaatgtgaacacagttttgtaataataagagagaaaatgatagatcggtgatgaaattaatgtaaaaattggaaacttcaaaggcataatcgaaattttagaagatttgtctcctctattattaggtcagtcaaaagacatggattaaacataacaataaaataactctaccaagtacattatcttggagaatgttaaactcagagtcttgtatttttcttatttcccaaagaattccaagttcacgattactccaaatccaaaaacattcagagtgtggactattatattgaaatgaaccaaatataaaacgaaccatcctgtctacacaattt

SEQ ID NO: 234567 - DNA, 274 bp, Homo sapiens
attttttttttttttttttttttagattcagggagtacaagcacaggtttcttaacatgtccatattgtgtagtggtgaagactgggcttttagtgtacccatcaggtgtacccaaaactacctattatgtccaatgttcactgaactgtgaactcactgccactcactgaacagtgaacattgtacctaataaataatttttcaaccctcaccctcttcccatcctcccacccttctgagtctccaatgactcttattccattctgtatatcc

SEQ ID NO: 234568 - DNA, 512 bp, Homo sapiens
tacaccttcaccgtctttgcttcctgtgcccagctatcttcaaggacaagaggggatttttttgtacctgtgtgtgaacaccgcagcccacaaaaccaagttctgttcacactttctaacagccaccctctgtctgcgtctggatctgaggtgtgcctataccagttgttgggtccttcattgggaggacagttctcagaagaagctagctcagggccaagaagtggctttggtaataccagtcagggaattccagggtcctgggtcttggggacatagtgggtacccaggctttgggtgctggcctggagatttttcaccccataagaagagtcaggttggtgtcctctaaaatggagggcctagaacacggtttttcttgctggggtctaaggacactactgcctctggcccctacaaaatttatcttagggaccaatttgcaggaatctgtttatctggctagagctttctcaatgggaagtaaataaatggtctccatttatcattta

SEQ ID NO: 234569 - DNA, 212 bp, Homo sapiens
tctaaagcattttaggtagagctaaaacttcacctcttcacccatctcctgctctccctgtctgttttttcctttgtcaaggaacctgctttctaatgtgtttttgtccttttactacatatgataagatctatagatactgatttttggtatctattgagacttgctttttgacccattacatgaccacttttataaatgttctgtataag

SEQ ID NO: 234570 - DNA, 93 bp, Homo sapiens
tcattattgagtatatgcacacattgctacttatttgattatgtatcttttaaattgattcagtgcatagaaaactatctcttacaaacttta

SEQ ID NO: 234571 - DNA, 468 bp, Homo sapiens
aaagatcctgcctaagccgcagaaagtggaggcggcaatccctggggccggcctcggccaggaggggtccaggtcctcccacaaataacccaacctcccgtccttcagaggcacagcccttggaggtgcctggtggaactgagcatggctgctctccgtgggaaccgctcagcaactcagctgcacagactcctttcttcccacctctccatcccactgctccctcctgtcccctcgggcttcctgggtcacctccaggtaatccacctgcacccaagcccctgcctcggctctgccttcaggggaacccaaaccaagacacatctcttttacatcaaatgcagtgtgtttttctgctgatagacatggaaaggccctcaggggaaacacaagaatctggcgacaatgaccgcctttggagagacaccagtaggagacaccagtaggacgtttactactcactcttcc

SEQ ID NO: 234572 - DNA, 274 bp, Homo sapiens
ggtctgggtacaacaagggtttgtcagtatttacctttgcctagaaatttacatgcattaggagacttgacaatgtcttcgtgtattttaattttttttattttattaaaagacattttgaaaacatgcaaataaaggaaatgatcctagatacatatttttcttagcttttctcagtattgtttcaacttgatgatattgttccaagtattgttccaacttgcaaatttaagttcactaataagggttccatgaaaaagccacagctttaaag

SEQ ID NO: 234573 - DNA, 509 bp, Homo sapiens
ttctgttctagagacatgctgatctagattttatcaggtacccttctctccttgcctcaaggcctaaacctttctgttactgcttttaggatctgttggtttcaccttttgtatgtgacctcttttgagttttgacttgtggttcagatctgagattttgtattataagagaagggtggtgaatgagtgaactgaaattcaaggactggaggtggtgtgtggtgctctgcttgatgaatacatatggtacaggcagcccctaccttccagtgagactaggagcaccctgctggtttctcctgtgatacatgacaccttcaacaaatgggccagccaggcgttgctcagactggatgcaggcctcacatgatgttcttcttggcctttcactcatttctctgtccacactactccaaggtccttgtgctcctgtgtagcctcagagccttttaacccactctgtgcaactctgctcttgtgttaataaatgaaatgtgatttgttactga

SEQ ID NO: 234574 - DNA, 490 bp, Homo sapiens
caggacagagagtggggtggacacacagcacaatcacagcttaacccttgtgctaataaagatcatggggcaaggaggaaatggaagcacattgccttcagaaggacgtggaatgagaggcaatcaggaatgagatgctctgaattgacacagaccaaattcaagttatggttctgctacttagtaacaggaatttaaggaaattatttaagctctccaagtcttattcttctcaacagcaacatgggggataatgccatctactttacagggctattgtgaggaacagagaaaatggtatgggaacaaaacctcctttgtggctggtttggactgaattctcaatgaatggcaacaattattatggagacctggcatctgtgggtagcttctgattttgaattgtcttaaaacaacaacaacaacaccaccaacaaaaaccctcttatttatacttaacatattcacacaaaaaactaacaagctacct

SEQ ID NO: 234575 - DNA, 218 bp, Homo sapiens
tagtagttttggctcaattgtgttctgcctgcaatatatacaagtgccaaggtccctgcacccttcccagaaaggcgtgccctcacccaccttgatcttccataatctaggtgaaaagtggcatgagcatttgagttgactatttatatagatatgaacaatttttaattcttttcctgaaaaaggttaaaatccttttttatgtttctgtttgctgg

SEQ ID NO: 234576 - DNA, 429 bp, Homo sapiens
caggcttggcaaatcaaacgcaagagtgagcattttcattagtcttagatttttaggagacaggtacaggaaaaaaaaataagcacttaaaatcaggttgttatatattgagtgaaaaaagccaggttaaaaagaagaagatgccaaaacattgattagaagggcatcaaacgttatttgatgcaaaggtgtctctgcatatttacatggcatggataagacagtaccttatggcacccaagtgtacagtctacagctacaattactttattgatcacagaaatcaaaatccattcaacacagaggacttgttttattatttgttatacctcaaattactttgaaataacttaaatgaaagcaaaattggaaatgattatttcattgattttttgaagaaataaattttctaattaccgaatgatctgg

SEQ ID NO: 234577 - DNA, 171 bp, Homo sapiens
tttataacctagcatgtttgagttcggctttgagactgaaatcctctattttgtggactaaatgcatttttaaaaatatttttgtctcaatgattaacataacttgaacttagtaccaatttggacttctctgttgatattttctgtctttgataaattggaattaatata

SEQ ID NO: 234578 - DNA, 456 bp, Homo sapiens
cacacaaatttattttgtgtgtaacccttgactttcagaaggtttgggttattctatgcataattttttaaaaaaccatttggtttaaaataatttcaaacttaaagaatttgcaagaagagtataaagcattcccatatattctttacccagattctccaaatattaacatcttatcacattatttaaccctccttttgtgtgtgtgcgtgtgtggttttccccccacatgaaccatttgagagtaagttgcggacctgttgcccctttattcctaaaaatgcaccttaaaaagtaaaaaagttgcattactgctttcttctcttgaaaatattaatctgactggggacagcatcatgcctataatcttagcacttctggaggccaaggagggaggatcggttgagcccaggagttcgagaccagtctgggcaacatcgtgagaccctgtctcta

SEQ ID NO: 234579 - DNA, 532 bp, Homo sapiens
ttaaagtttgacttgccaaccaacaagctaaagcatgacctgtcccacggccatgcttcaaagttccgacagatatattcctccctaaacactgcatctatttcaaaatcctttttataaaaaagggagtaatgtccacaaaggatcaaagggcatcctacagtctggcaattgcttaagaaaaatggcagcacttccatgaaatatgccctaaaataattttgcggcttggtatgtcctaatttcaaattggatgtttatcttggaaaggcttctatctaacttgtccataaaacagctccacttagctctatgagctctgtgaaaatggaatccaaagctggttattaagggggcctagagatcggttccatatggcggaacagcatgggagggcaaggctgaggactgtagcaggcgcgacttggctggagctcctgatctatccatggacactcgctgcattacaccataacatctggattattgcttgtaatgtccctgggaaatatccactttccatcaaagcttt

SEQ ID NO: 234580 - DNA, 162 bp, Homo sapiens
cctcccatttttattagggtataacatgcatgccctagagtgcacaaatctcaagtaaacagcttgatgagttcttacaaatgtatacatctgtgaaccccccaccagatcaagctattacacatttccagcccccacccccatcccagaaggctccttcct

SEQ ID NO: 234581 - DNA, 874 bp, Homo sapiens
actattattggttggatgattagataattgtgtttcctcggcagaatcaaactcaagtcaaatgtgtggttaccgggattaagaacagaaagaatagaggggactcctgagtgagtttcactttctctctctttttgttattgttgttcatttgttttgttaatagaaagatcaatatagctatagagcatttaaaataaaaggatttgggccatggtggtggtggcgaatgctgtaatcccaacactttgaaagactgaggtgagaggattgcttaaagccaggagttcaagaccagcctgggcaacaaagcgagatgccatctctacaaaaaatgatttaaaaattagtggggtgccttggagcacgcctgtggtcccagctattcaggaggctgaggcaggaggattgcttgaggctgagaggtcaagactacagtgaactatgatcaggcccctgcacttgctccagcctggtgacagagtgagaccctgcctctctagaaaaaaaaaaaagaattggggggggggggattaataaaagttcagtgccatccggttcagagtgattcaagggtggcataagtcaaataccacatttagaaattttggtcagggacggatgattatggatgtctcacgggccatgcccaaatcagagtcaaggctaggggtggctttctaggcagcaagggtcattgggatactgaaaatgtaaaaggagtgggcttcaatcacagaaacacagagaagtctcttgctttcagaggaacaggcctcacagccccttcctgccctcccttgttgccctgaggatgaagtgggagggagaaaagggccccactcatcaacccaagatcatagctagcaccttc

SEQ ID NO: 234582 - DNA, 590 bp, Homo sapiens
ttactctctgcagtatctattcaactgcaaggaagtattgcagggcagaagcaagctcttcaatacaaagcagctcatttcaaagcatccaggcttacttttgttgtctgtgcctattcatcctataaactgctcttcatcaaaatagttaactctcccctgttctgcccccatccactcttgagaatgaggggatggcaggaaaccatcaatacaaaaatctatgtggcaacaacaaccatttggcctgttgagaggtgcttatgcagaaagaaacacaagaaaacaaagaggaagtgtgtgaacttctgaccctctttgccacatgccatttggtgggtgggtggcatgagcaagcatcctgcagtgggtgtttttatgggaccaagtgacaaagagccaaacagggtgagaactcatgagtagcaagtggaaaactaccaagagctgtcccatcactcctgcaacaaacttcacctcgctcaagggagggtagctgaggctcccttctccaaatcctgcaagacacaggcactctgatggggccagctcttcactgcatgggagggcttttgttgaacagtgagttt

SEQ ID NO: 234583 - DNA, 273 bp, Homo sapiens
ggtaggaccactggtagaaagaggctctctttccactgggattgatgtgctgtgaggaggtgaaattgggactgtcccagctatcttgttcccacagggagcagtctgtctggaataaatcaagacacaaaaagtcagagctgtgagatgggatgaggtcaattcctcacactgttggtggaattcgcaaacccaaagccagactatcccatccctccatggacttctccagttatacgtggcaataaattcctttcttgcttaagccaaaca

SEQ ID NO: 234584 - DNA, 230 bp, Homo sapiens
tactagaaaagcaacccaacaaattttataagaacataacataaagtgaatacaatgcattttctacaatatccagtctttggccaaaaattagtagatatgaaaattaaaagaaaaatgtgacccactcacaggaggaaaaaatgcaattaatagaaaatgattctgaggtgttgttgttaatatttcaaatcaggcagtttataaatatgttaaaataactaaagaaa

SEQ ID NO: 234585 - DNA, 499 bp, Homo sapiens
agtcatatccatttttggctagaggagtcaattgaagaaaagataccatctttctatcttttcatctataattttaatgggatacaaacaaacataccaacaggattattttggatcttgacaagctgattccaaagatcatgcagggaaatcaagaaaagttctgaaaaagaaagagaaatgcgggagacaaactctgccagatcttaaagtgtattataaagtgacaataataaactgttcattgcaaattcagaaatagaaagatgaatggagcagaagagcaagtctggaagtagaccacaatatttaaggtcatttaataaataataaaagtggcatttacattagtggagaaaagacggattactcactaaatattgttggtgcaactggctagtcgcctgaaaagaaattcagctggagacttactgcaaatctttgccaggataaattccaactggataaataaattatggtacatgcatacaataaaata

SEQ ID NO: 234586 - DNA, 417 bp, Homo sapiens
acagtaacctgtgttaaataaatgtaaaggttcagttttgaagctgtaaatattttgtatgatgtttattagtacatgtggtcttaaaacaaagtttgaatatttggaattgcaaaatataatttaagactagacacagtaattttcctataaatttatcaataatttttgaaggtttttctgtttggctaattgatttgtttaatataggtcaggttaaaatagaagttttggtttcttctaagacgggatgaactttgcctgctgctaaaatatgtatcttcttccacttttcatatttaaaaagatagcctataaactaatgaatacaataaagatattatatataatgtaatgaaaactaatgtatataaaaagtaatttcataactagtccgagtctcaaattccaaatgaa

SEQ ID NO: 234587 - DNA, 412 bp, Homo sapiens
caggaccaacagttatgagctgtgtgacttcaaactgtatttcttaggtcgccaaggttcagttctatcacatttaaaatagaaaatgacagtagtcattccaaagctatcttgagttaaataagataatccacataaggggtttagcacagtgcctggcacataacaacagcttgccatcaccactacagcaaccctgggcagtccaactttttggctgtttccttaaatgtaaaatacagggtttggactagataatttctaatgtctttactcatctaaaattaaaattctacaatgtatcaacaatatacaagccaactctatttccaaagaacataaatttggattttcaccccagcatgatttaagtactgtaaaagaaacttatttttaagatatccttttattt

SEQ ID NO: 234588 - DNA, 481 bp, Homo sapiens
acggtttcatgccatatcaccttttgaacatgagacagccagcactagccaagaagggtttaacgttttcctgaccctgtgtaaagagaccatgaatttctttggctttcagcttcacaacattgctgttcaccacacttactgtttaattgatcgtcatcccatgaatccacaaagttagccacttttctataacttcatcacatgctatagatgttactgtagcacttttgggaatggcctcatacacagattagcacattttctcttcatttttctggatgtatcatattgttgaatcattgacattgaactcaaggccagtagcactataattcatacctgaacaaaagctcgtctaatacatacacatgtatggtgttatagtgtctctgtaaggcacatcacagccttcttgcacttaggaacactagcacttcagcattacacttgggggccaccataaacggcaaaatcacaa

SEQ ID NO: 234589 - DNA, 455 bp, Homo sapiens
gccagtaggactaagctggcagcacatttggagtatatttagagagtagagctgatgggctttgttagtgggctgaatgtgaagtgtgagacgaagaagggagtcaaggatgaccccaaggttttgacccaaacaattgaaagaatggtgtcgccattaactgagttggggaagactgcaggaggagcaggttgggaaggggtgaatatcaggaaagttttttttttttttttgatatgttaaatttgagatacttattattattattatttattttttttctgtcctcacaatctgttcccatgagatgcttattagatattcaagtggatgttgagaaggcagtacatcctggttacttcaattaaggtatttgcctgtataaatgtactatagaaattctaaataataattaagtgtaaccttattctcatgcaattagggaaagatatggt

SEQ ID NO: 234590 - DNA, 390 bp, Homo sapiens
ctttgatgagctcttctgagtctgtttctgccttagcaacatgatgggttaggttcatgtttctaaggtcctctcctgccccgatattcagtgattagaggaagcctggtgtttggatactgctgaggtgtgagggcaagggctgcctgatatggagtttagaatggtcgcatcctctcctgggctagggttagccttgcccatcaccctgttcagttctcgtctcctcctccaagaagcctgcctgagcaagcccacatccatcgtatttgctttgtactttatattttattaggtgcctttgatatattacttcctttaattctcacagcaacctagtgctatatctttgtgttatattgatgctatatccgatagatgagggaaaag

SEQ ID NO: 234591 - DNA, 236 bp, Homo sapiens
cgtcagtggctgggggcaggtggttttccaactctattacatttaactggatccagagcacgtccaggctctgagtctcattaatatcctgccaccgctcactgagccagccaccagccctgtgccttggccataaactcctttttagtggcctctagcggccttgagtgttaagtaatttattatttgcaaagtggtctattgaaacacctgtatggtgaaacctacccaaagca

SEQ ID NO: 234592 - DNA, 520 bp, Homo sapiens
gaattaaaattatgggcaacttttttggaaacataagtattccatataattgcataaaatatgtattcttttaagctgtatagataaaaatgaatcacttgtatcagagtcatggaatactttatactagggctaaatgaggaataagagaatgatagtttccattgtagctgacagtatttccaaatgtggttaatcttattcaaagtaaaagaactaaaagaacattgaagacatatgttaagtgaaataaaccaggcactaaaggacaaatattatatggttccacttaaataaggtacctagagtagtcaaattcatagagatagaaagtaaaatggtggttactgggagctggggaagcagggaatggggagctactgtttaatacgtacagtttccatttagcatgatgaaaaagttctggagatggatagtgaatgtatttagtattactaaactgtacacttaaaaatggtttaaatggtaaattttatactaggtatattttaccacattg

SEQ ID NO: 234593 - DNA, 511 bp, Homo sapiens
ctgtttttttttttaatttttgattttaatttttgtgggtacatagtaggtatatgtatttatggggtatacgagatgttttgatataggcatgcaatgtatataatcacatcaggtaaattggggtatccatcccctcgagcatttagcctttgtgttacaaataattcaattatactcttttagttattttaaatgtatgattaaattattgttgattatagtcaccctattgtgatatgaaatactaggtctaattgactggttttgatagtgtacttgagttggttaagaagttacctttgggggaaactaaatgaagggtgagggtcctctatgtactattttagcaacttcctaggaatctataatcatttcaaaatcattttccactgtttccatgttaagaaatttctccaactacggattatattttcacaaatatctatttttgtaaacttatagaattcttcaaaaacaaaaaaattgtaagaaaaatgtaaaactagcg

SEQ ID NO: 234594 - DNA, 449 bp, Homo sapiens
ccacgtgctgtgtgccagattcctccatgttcttgatctcattttatccattcaaccctgtattccaggcccattttacagagagaaggttgaggcttggaaaggcatgggggcttacccagggacaagcatttgaagaacaaacaaagggagtgatatgtgtcaaccccaaggcttagttactttctctctctgtctctctctcatctctctgatggggggctgtcaggcaccgtgacagactggtgtgggagatatttggatcaagcacatccttgtgtcctctaatctcaccacccaggcagcggccaactctagcataaggctggtgatgggccagacagacggattccttggaggctggatgcagaacagctgcctgcactacttctgctgcttctagaggccacagtggccctgactgcacacattttcccaggctgcggccg

SEQ ID NO: 234595 - DNA, 335 bp, Homo sapiens
aatacaaatattttgcagtcgtctcaaattgtcttcagaatcaaattacaagctatttttctcattatgacaaaataaagtcttcactttaaccaaaaacatgatttcccagctaataatctaattagacatacttagttataaagatacattttaatcaaaatcaaattaaccttcaaaaggcaaaattctgtcacttctaaagatagtcacaaaataaaatataggctacaaaggtgatttcaaaggaagtatgagttttaagcaacaactactgagctactacctataaaatgctacaagtatttacaatactagtctcaaaatgcatctag

SEQ ID NO: 234596 - DNA, 635 bp, Homo sapiens
atcagactctggctacctaaacttaaggaccacatattactcttcttgaaattcttgggctttaatacagtgcttcatgcatagtgaggatgatataactatttgctgaaagtaatatatgagctctatacaaacatacagtggtttttttagctgctgtggctttttaagctaggttcacattctcttaattacacgtgttatttcaattgcattttagatatcctatatgaatttctaaattttaattacttattgttgcaagattaatagggatggtagtatcttaaggtgaactgttttttacacaaaccccactttagaaacagattccttttggctctcggaaggtgcttgttgaggtacctaatggagcagtggtaataattaacatttccaatcatcctaaattagaaccaactcaaaagagagaaagtgaactttaaaaagatgttttccagagaatcatctggtaagccatttctggaaaataatctgtgctaatgaggaaaaaaacaagtgaagtaaaagtgggatgtgggctttgctattttcggctctttgttttgctttcaacaaggtgtctctaaaccttgctgtgaattttgtacattctgtctgagtctcataatctg

SEQ ID NO: 234597 - DNA, 287 bp, Homo sapiens
gcatattcttcgtattcttaatttcagccctatccaaatgtttacagaatagtttgaagagatttgcagtttcttgttatcagtcttattaagccttggcaaacctttaataacaagtctatcaacaacccaccagggatttgattttagtcttggagtgcctgaatttttacgctattgaacaatttttaattggaagcaccgggaccttttctgatcagttgtccacgttgcctcatgaatgggtggcattcatgctcagcttgaaaaggcaatggcagctgggg

SEQ ID NO: 234598 - DNA, 548 bp, Homo sapiens
tgtgttcattcttctttaaatatttggtagaatttaccagtcatctagtcctgggatttccttcttgagagctttttgattatgctttaatctcttaccttgttataagcctattcagattttctatttctttttgagtcagtttggtagtttgtgtgtttctaggaatttgtccatttcatatagatgaatttattggtgtacaacacttcttagtaagaagtgggtatacaaactcatctctgctgtataagataaatactaaaataaagcttgacaacagtgtaacagaagcctgaagaaaggaaggcttagttgtgtttgaagttggggagatgaaatagattcacaggagaggtgattgaaactcattgggtgccatagaatgagtaaaagttggttaggtgaagatgtaggaatggataagcatgtagggcattccatgtagggaaatgatgtgagtaaaggcagagaggaataaaaatttctagcatgttctgaggccatgaggtgggaagaacataaaagagtttctagaaaaaaaaaga

SEQ ID NO: 234599 - DNA, 180 bp, Homo sapiens
cacactgttcctctgagtgaggaatcaggtttcaggaccctcaatgttgacaactaacattttacccttgagattttacctagagataccgaaagaaaagataacatctgaatacaagaatcgcgttgcatatttgctgcctccatagggttgttgtggtagcgactgattttccacccc

SEQ ID NO: 234600 - DNA, 693 bp, Homo sapiens
gaagcattttattttgatgtaatccctttgtctatttttgcttttgttacctttgcttttgaagtcatatccaaaaaatcattgcccagatcagcagtccccaacctttttggtaccaaggactggtttcatcgaagacaatttttccatccacaggagggaggggatggtttcaggatatttcaagcgcattacatttattgtgcactttgtttctattattattacattgtaatatatagtgaaataattatacaattcaccataatgtagaatcactgggagccctgagcttgttttcctgaaacttgagggtcctatctgggagtgatgggagacagtgacagttcataaggcattaggttcttctaaggagcatacaacctagatcccttgcatgcgcaattcacagtaggttttgcgctgctatgagaatctaatgccaccgttgatgtgtcaggaggtggagctcaggtggtaacgtgaggaatggggagcagctgtaaagaaaaatgaagcttcgcttgcttgcctgctgctcacctactgctttgtggcctggttcctaacaggccatggactggtaataatctgtggccctggggttgggaacctctagccctgaccaatgttagggagcttttttcctgtgttttcttcaagtggtttcatggtttggggtcttacatttaa

SEQ ID NO: 234601 - DNA, 357 bp, Homo sapiens
cagtttcggtaaagcattaaaacctttaacccgtgcttcccccttttgtcagttcttccaattggcagtaggagcctgggaaataatgtttgtagcctccctaccctgcttacagatcaggatagggaacggctggtatgaggcaggctgagggacaagagataaacaactagatcaccattgtatcctcagcatctagcagagttcctgataaatgaatgattctgaaaattgactggttctatttgttcttttgtattattaacataacataaaatctcctgacactgagtgccagagaccaaagtattcatattcatatttccagacataaaagtcttcccttatttctaaaga

SEQ ID NO: 234602 - DNA, 969 bp, Homo sapiens
tggagagagggctatgatatttttggtcctctgaaaatgaatccaaaacaataaaacaagctgaatgttttcctctagtggaaagaaagaaagcaaacctactacaggtaaattgaaatcttcaaacagacccataacacactgctgagacattcttgagatgatggctttagttagactggggccacacatctttacatttcttcattcacctggcaggactaatgagattttatggcgggcaagctgtttatcccttgggtgacattggcaagcacatctatatctttatcaatcaagggttttctgcactgcaactcccacccccaacctaaagattgccccagcctggatcacaacatttacaacacgtaagaacctcattccttttcatcaacactccacccatcactttctgttacctagatctaatcatgtgtgtcctaacatcacattgctccataacaaggggcaggaagaagaaatgaataaaaggaaaagaaaaaaaggtttcgatggtacctgcaagttgatgcagagctgacagctccatggctagaatattatatttgcccaatagaacaataggtctgctggcaagctgttacctacagtactgtatctgctgaacaggtggaaaaagctctcttcccctctgcagtggtttaggaacatgaggaggtgaccaccactccagtttggaaacaaggatttggttcccctttgtagctttcatattgcctgaattcacctgcaatgtctattttcagtacttaataaatactcatatacacatgaacatacaaactcacatatttaacaattgccatcataaactctcaggatgatgtatccattctacctttgcaacctggaaaatgtccccagatctcagaccaaggagatactggggaaatggctctgcaaaaatccaggaacaggttttggttctggttctcccatagaata

SEQ ID NO: 234603 - DNA, 238 bp, Homo sapiens
gcttgtttgttttgtttttaaactaagcagaaattcataaacatgtattataaagttgtcactcattctagtggctctctgttttttcttttcaagcttgtggaaattgtacatatttttaatgctttcaaataaaacatacatcaaaggaaaaaattcttttcctctgaacaatttaaaatcccattaaaacgctttatacaggccgggtgcagtggctcacgcctgtaatcccagc

SEQ ID NO: 234604 - DNA, 437 bp, Homo sapiens
tcttagctccaatgagaaatgttgaggatgctgtttttcagggcagggcagctctctggacacaggtaactaggtatcccccctgcccaaggggctaaaacactcgtagtctctggggcttttcccaggagtgggagtcttggaaaactcagaggaaacaggaaggagaacagctcctgtctcagccctgggctcccagtttaggctgctcctccccaaggcctgtcaaaagccattttccttcacctcccagcagattctcagcatccccaggacatgcagtaagtggggtcctcaaaggctctttgatctccaatccacgggagtgccaggccataaatattatgttactacccccgtcaccagccctccaatgcgacaatgtctgtgcttttaattcggacttagattaacaatggttacgttctgtttaatga

SEQ ID NO: 234605 - DNA, 528 bp, Homo sapiens
cactataacaatacaaaatcacctaaatatgtgtttatgtagcctacatgcagaaaagcttctggcacaaacttcttaggcctcttctcaagagccttaagcctgagcccctgaagtgacagagctcaagtcaaatcaggaaggatgaagaccagaaaggaataagaagaacaatactttgtggtcacttgtttgttctacctttctaaactggtcctagttcaggttctcttatatatgccattatccattaattcagctattatgataaaatgtttccagtctgtctaatgtaggcaagtactgacacagtgctatttttcctacatgacccagatgaaatcttttgacagccctggaactctcatttatttcctcctctagattcctattctgtggccccagaattactatggaggagacacactgtgaatggtcctgtagaaataggtgggtagagtaagagaattccagcaatgggctcccctcctccaatatcaatttttctttcttctctatagtatttaa

SEQ ID NO: 234606 - DNA, 413 bp, Homo sapiens
tttatttagaaagacttatgcaatgtgtataaaattacaagatttgtgaagagagcaacaaaataaaatgctgtatctcctccctccccaaattgagaaactaatattatcttcattttaccaatgggaaagctaatagcaaagaaaatagcatcgttattagaaaggatggccaccaagccctttttttgtttatttagctgtgacacattcattcttttttccctttctattttgagagctcaggattgatgtcatttaaaacaatacatgtcaaaatctcagattagatctatttgtatatttactctgctttgtcggcaagtgtcaagtatatgaattaagtagattacaaaaatgttaaatggcttttgtaaacgacaaattaaagtcacttgtcatccactgtcaat

SEQ ID NO: 234607 - DNA, 500 bp, Homo sapiens
actgtacattacatcctcctcatgctcagggcccctctgacttcctcttcagctactagtcagagaaaactatttgcttttaaagggctcatacgaatgtagcaagtctactcagacaatctacttatcttaaggtcaacttagtaatcttaattgtatctgcaaaatcctattttgccatataacataatataatcatgagagtaacatcagggagtggggatcataaggcccatcttagaattctgtctaccacagtgatgatatagaagatctgaacaacataatcaacatggcttaactggtgtttccagaacagtcattcataaagttaagcatagacctacactatcatccagctattcctctcctaaataataaagacttttatatgaatattaataagattgcataattaacaaaatagaagattctaatgatacaattaaagcatgtgtcttttcagaatgagaaaaataaaggcaatgagaaactccaga

SEQ ID NO: 234608 - DNA, 326 bp, Homo sapiens
taaactgacagtgatatttaatactcctaacaggggctagatgttctgatctgttaaactgcttggcagttcatgcagagaagacaaaagtgcactgacatcctattgagaggccaggacaaaatatatctcttgaatcacaaataacatgaaaaggacttaggactgaccatatatgcatgactttcatgttattttaaaataaaatgttctaaacaacttatacctctttactatttcatgtccaataattgcactctgattttgtttaaggaaatttttgaattgcctttgagttcagggtgaggatctcttaactaccttta

SEQ ID NO: 234609 - DNA, 214 bp, Homo sapiens
gggcgcccgcggccctacaccacctccgcacacaacgcggccggtgttaagtctccaaacgccccgagagctccaaggaccgcgcgcgcgaaggcgccgtagcaagtgggcacacaccagacaccaccccggcgtgttccgcgggagaagccagtgcacacatcctcccgcaaggcggggttgccagtgcaacacaggaatcctgccctttttc

SEQ ID NO: 234610 - DNA, 446 bp, Homo sapiens
cagattataagacagtaaagatgaaaattcttccaaattaatttataatttttataattttacaaaattttgttttataatttctatcaaaattccagaaaatatttttgtagatatagacacaataattataaaatgctcatgaaatggtaaaggaactataatagctagaacagttttgaaaaaaaaaaagtaggaggaatcagtctacctgattataaaacctaatttatagctatagtaattaggatatgttattagaggaggtatagacacatagatcaatggaatagaatgaagatcccagaatagactcacacaaatatgcccaattgctaaccaaggtgcaaaaaaaaaaattaagatatacagccttttcaacaaatgaacctggaaaaattggatattgataggtgaaaactatagaacttgacctcaacttcata

SEQ ID NO: 234611 - DNA, 218 bp, Homo sapiens
attttaccagattgctctggttagagacaactgattaataatcagcatatgcgttatgagaggaccagatcaactcccagtaagtcctgatcactcctcaattagtaccctgaagcctaggctaggaaggaaaatgactgccaggctgaagaggataaaggctgtccaaggccctaaagaaatgtcacatgaattgaaataataaaacaaatatggtg

SEQ ID NO: 234612 - DNA, 409 bp, Homo sapiens
tctgtctcatcttcactctctcatgtagtctctatgtttatcttacccttcttcaatgaataatttcctttcatcccccttcatctaatttattattatacaaatatggtggtatccattagatttttttttaaccaaaataacctaggacaaaaatttaccattacatagattatagaattgtagaaataattaaaatgttaaattacatgttatattttgaaatatctcttcacaatttacagttgtattaattacctcttgtatggaaaagtgtgagagcttagtttttaatagtaccttatttaactgggtttgcattgaaatagcataggttgtttctattctgtgtggcaaaaagctaagtataaataattgtataaattctgcttcttccaagaaacagaga

SEQ ID NO: 234613 - DNA, 511 bp, Homo sapiens
aggtctcagggcggttatttttcgccagcagaccgatgctgtggcattctcacggtgtgctccagggagccaggctttcggggagggcccctttggccttttgagctcccagtctctgcctctgctgtgaaagaaccaagagttacaggtggttaaaggtggaggggacttgggacccgtttgctcagcatcttccactggtagatgaggccagaggtcaaacagcctactcaaggtcaaacagcctgttcaaggtcaaacagtcagcgacaaagccactgtccccttcagctcgcccctgcactgctctttgtttattacagtgatcctcaaacaaggtagtctcaggactcactttgtactctgaaaaaccactgaggctcccgaggagctcttgtttatatggccgcatctatcaatgtatgttgcattaacaattacagctgagaaacttaaaaaatatgcatgtattaatctatcagtcgattaataaacctgttgcacaccaaca

SEQ ID NO: 234614 - DNA, 479 bp, Homo sapiens
catataagtggaattatatagtatttgtctttttgtaactggcttatttcacttagcataaagtcctcaaggttcatctatgttgtagcatgtgtcagaatttctcttaagactgaacagtattccattggtgtatatacaacacattttgttatctgttgttagagatttgggctgcttccacctttgagctattgtgcataatgctactatgaacattgatatacaaatatctctttgagactatgctttcaattcttttggatatatatccagaagtgaaattgctggatcaaatggtaattctatttttaacttttgaggaaccaccatactatttctgtagcagctgaaccattttatgttcccacaaagagtacataggctttcaacttcttcactctgttattttctttctttttaaatttgttttattgtttgtttttaataacagccattaaaatgagtataagttgcta

SEQ ID NO: 234615 - DNA, 1421 bp, Homo sapiens
tggtttcttgaaatggaatttattcctagtgaagacgctgtgcacattgtggaaatgacaacaaaacatttggaatatcacatcaacttagtggatagcagtggcagagtttgagaatagcctccaactttgaaagaattttcactgtggttaaaatgctatcaaaacagcatcacatgctacaaagaagtctttcatgaaaggaggagtccatcaatgcagtaaatttcactgttgtcttattttaagtaactgacacagccaccaccaccctgatcagtcagcagccatccacactgaggccagattgtcaaagtataaaacaagcaggactcactaaaggctcagatgatcattagtatttttagcactaaaatattttttaattaacgtaagcacatttttatagatataatgcttgctattgcacactttaagtagtatactgtaattacaactttcatatgcactgaaaaacctaaaactgttgcgtcacttgctttactgcaatacttattttactgcggtggtctggattagaactcgaattatctgaggtacgcctgtgtacaaggacaggattcacaaatcactctaagtaaattaagcagagtgatgaaaggctcattggggtcagcctgccatcttccaaattatgactaaatgcaagagcatcaccaataactatactggcagaggttcacatttcacctcgattcttccttatgtttagagaaagcctatttttcagtatgccaggaaaaatcatgaaagtagacctaactaaagctgggggtttctttcatcctgaagaggaaccacttcctaaggaaaaatcatctactgttttaaaaagcaaactctcgtagagttggaagagaaccccacacacaggtggaacaccccccagggctgcggccccgccgtggcgctcagcctggcctgccctgggcccgacctcaggacgccaccattcccggaccctcgggcctcccgtcaggaatccgccatcggaacggaggccctaactggtccggtcgcagagccactgtccaaataaggcatttcgagagccacgaggatgacataaagcagactccgcgtttcttcatttttcgttaagtgacacgatttccctcacaaggaaggtgcaaacccacagggcgcccagaccctgcccggcacttcctgtcatccattaccacgacccgtgtgacagaagcggctcttcccaccaattcccgggacgccggaaccgcttccccagcacccggccccaaacactgccgtcagcgagcggccctgggctgctcccgcgccggcgcccggctgagggccacgagccccatcacgcccaccgcccccaggaccccgacccacccgctcgccacggccgaggccggggccggggtcgcggccgc

SEQ ID NO: 234616 - DNA, 449 bp, Homo sapiens
aaggtgagacggtaggatcgcttgagcccaggaggagttccaggctgcagcaagttatgattgtaccattgcactctagcctgagcaacagggcaaggccctgtctctgaaaaatataataaaaataaagaaaaggacaggtgtggtctctttcagcagaatgaacccaggagttcaagactgtgggcaacatggcaaaaccccatctctacaaaataatacaaaaacattagctgtgggtggtggtgcctgcctgtggtcccagctactcaggaggctgaggcgggaggatggcttgagccagagaggtagaggctgcagtgagccatgaccttgccactgcactccagcctgggtaacagagtgaaaccctatctcaagaaaaaaagaagccaggcgcagtggctcccgtctctaatcccaacactttgggaggctgaggcaggcag

SEQ ID NO: 234617 - DNA, 297 bp, Homo sapiens
tcacgcctgtaataccagcactttgagaggccgagacaggaggatccctggaggccaggagtttgagaccagcttgggcaacatcatgcgaccccttctctacaaaaacttaagaagttagccaggtgtggtggctcatagtccttgtggtaggctcttcgcctatagtcctagacactcgggaggctgtgatgggagggctggttgagcccaggagttcaaggttacagtgagctatgatggccccaaggcattccagcctaggtggcagtgtcacagaccaagaccctgtctcta

SEQ ID NO: 234618 - DNA, 963 bp, Homo sapiens
ttcttttttacatgaaaggttagcatactatatttttcatggtagtattttttaaaagcatggtagaattctgtcctttaaaatttgatagaagtcatctatgtaactaccaagacatggagactttcaagagagatgttctttgataatttatacaattccatggttattggtctattcagagtgtatctcttcttaagtcaatttttggtaattcatgtcttaccaggaaagttaagatattgagtagaagatgcaaatctttctttagttcagagaaaatttcttctgccatatattttattttctcatctctctccttgtggaattactgttatacacatattagacctctatagtctagctatcacagatcatcttttctcttctgaattccaggataaattttcaagcttgagttctgggtcacacattcagctttcttcggttcccaatcttctgttcattgtttccattgaggtttaaatttagcaagctaaaaatgtttcctaatttcagtttgtaatttcttaatgattccttgtaatttcagtttgtaattacataatccactacacttgcaaatacaatatcctcccaaatattattaaaaacataaaagagaaagatgtttaattttttttcctcttcttcttgtggaaatttcatttcaaaggaaactaattttctctgaccatgttccgttctgttgaaagtctgaatctttttgtgttttcatatcattactttttctctctctgtttatttttaccaggagggagtctatatttattctggaatagaagttgaggtggttctcctgattatcatgaatagtcagtaagcattcagtcaaataaataagtggagagaggtattttaagcagagaggacagagagaggaagggcatgaagatataaaagcccaatgtcagctcgtgccgaatcctgcagcccggggga

SEQ ID NO: 234619 - DNA, 517 bp, Homo sapiens
tagatttttaagtatttttaatattatcctaggagaaaatattgcaaacttaacacgagaaagatattggtttgaaatattaaaagctattggcatccttcaactctccaaaaattgtcattttaccaagactcaggcatatgattaggttgttctcagttgacaatcatcatgatgctgagccccagatttaatattgtgtaacatctggattgtcctgccgatatagcagggtgacagcttcacacattccttgaaaagaggtgtccacacactgacagttactcatcattcagaaaatgaaaaaaataataaaatggaaaaaagatgttcttcctgatcttaatttaggctaatctatgtaaaatacattatctaatagcagccagctattaggtaataccagaacagttttctggcacaattgcaaattgcagctgtctgaattatagcaagaaatgtttacctgtgatacaaaaggcaaaaagtttttactaaaggccaaacttcctacaaa

SEQ ID NO: 234620 - DNA, 463 bp, Homo sapiens
agttgtggcagtgggtcaacctttagcagtccagcctcaagggacagtaatgctgacttccaaaaatatccagtgtatgaggactttacttaacttggcgcattgccatggggctgttcttggaacatcatggcaacttgtcttggcaactcttcagcatcttgtgtggattctgggattaaagcctagtagtggcggtgccttgaaacctgggagagctgtagaaggacccagtacagttctaacaacagcagtgatgacagatttaccagtgatttccaatatactttcaagattgtttgaaagctcacagtatcttgatgatgtatcactgcatcatttaataaatgcactttgctccttgtctctagaagcaatggatatggcctatggaaataataaggaaccatctctttttgctgttgccaaattgttagaaactggtttagttaatatgcaccga

SEQ ID NO: 234621 - DNA, 575 bp, Homo sapiens
catgcatcacatgcatccagggttgtgggatgggagaaggcagatgggagaaggcagtctctcccctgggcctccacagaccatgcccagcccaggaggtctaggctgaggggcaggaactcaggaaagagcctgggggagccgctcagggttgagtccaaagaactgaatggtgtaacaccgaggcatcaggagaggagggaaggggaggagagcgtgagacgtggcagaaccagtgaacaccccgagtgaggaggctgagcaaagacaggcagccaagcaagggggcctggggaagggagtaaggacaggtgctggggtctggctctctctaatggacccgccaacccggcccgggcaagtcatttaaactctcggagcttctgattctcccctggaacccgaccatcatgagaagggttacccagcagggccactggcagagggagatgccacagtggattcccgagggctttgcgggccactccatttacgaggtgagaggctggaggtgaggataataaagtgaaagattctaagacaaggtgaagaggaaagactccagaaaatactta

SEQ ID NO: 234622 - DNA, 468 bp, Homo sapiens
atggacgagcttctaagagaaagggacatactaaataagaacatgcttaaggcggtcaatgcgacccagaagcagacagacttggtaaagctccatgaacaagccaagaggaacctggagggagaaatccagaactacaaggatgaggctcagaagcagagaaagatcatctttcatctggaaaaggagcgtgaccggtacatcaaccaagccagtgaccttacgcaaaaggctgactctgtcaggatgccctggcctctggacaaagggaaatggtgaaacagtggaccctcagggagcttctgagcctctgctgacaagggaagggcacagatcctacccactcatattccaccggccaaccaagtcacagggctgtgccggacatcctgggcaggagtgtggtcctccttagggaggggccctgtagggtgaggcagcaaatatatttgaacataaaatgtcaaa

SEQ ID NO: 234623 - DNA, 500 bp, Homo sapiens
cagctgtttatttagcaactgattattgagtgcctcttccatgaggggacaggcatgtactaattttgggaataaagagatgtatattgtgatcctaaggagaagcaaaatgtcctggcacatagtaagcactcaataaatatatattgaataaataataattcctgctctctctgggcatcatagtctagtagggggaagaggcatgtaaacaaataaagttgttttagtacaatagtaaaggaatcgatcaagtactatacatgtagaataccatatctacctggaagttagggatgatttgatagaagaggtaacatttgcttgatgttgaagaacaaatatgagttttccaggaatggaaagtaggaaaggtctttgcaggcagaccaaaattattatactcataggtcttattgtccacgggattggttttgtcactcctgtctaatcctaacttgcaaatataaatatttatcaatatttccctggattttaat

SEQ ID NO: 234624 - DNA, 1937 bp, Homo sapiens
ctacaaagggacgcctccaccatcattaaggagaggagtgtggaggccgaggagaggtttccggtaaaggctgggattgggaagatgattactcacacctggtgatttctgctcaatcctgcatgtgcaggaggtcatgagctagaacaaggaggaaggagatggggaagccagttttgcaaaccatggactgagcggttttggagatcttgctggcctgagcagcgtctgggagatgtgtcctttctggaatagttggccacactgctgctatgaaaagtgtggtgggaatacccacaaagccagcatggccttccctgccatgccccagacagtcacatctgacactcacctgccattcccagctgtagcagagacccacagagctttatctgacccattcttttttttttcctttgagacggagtctcactgtgtcacccaggctggagtacaatggcgtgggctcactgcaacctctgcctcctggattcatgggactataggcacgtgccaccacacccagctaattttttgtatttttattagaggtggggtttcgctatgttggccaggctggtcttgaactcctgacctcatgacctgcccaccttggcttcccaaagtgctgggattacaggcgtgagccactgtgcctggcctatctgatccattcttacagcaacatggagtggcttgagagagcctcagagacacgaaatgcaaaacaggtctattttattctcctttattaaaaaataaaaaattcaatatagacagccccaactcataaaagggttgtattgtaaccagtggtttaccttcctggctagcacctagaaccataattgccaagcatataactgaattgtagtgcagactgcaagcctaatgtatggactgtgggaacaaaaaacagtataggaaggaggaaaagaaaaaagctgagagtttcttatctttttcctggacctgaagctgccacagataaaattgtaagtggaagagcttgccctttgtcttcccctgacttctatagccctctgtgtcggtccccagtgctgcactcccaccctgggctccactctgcagcctctgtgtgtgtttacagggcaatgggcaggtcagggtgagattgaacagaagagggagttggtgtccaagctctcctagttctcaacatgatcttgagcaaaccactttacattcctgagccctgctgttcttatctgtaaagtcaaggtaatactaaaacccacctcacaagcttgtaataaaaatccaaagagataaagtttgtaaaacttcgaaaaatactgggtaagctgtaaagaactctgttacccaggaaagatgtcttattaggaccagactaccaaggattagtcgggacattttggctggaaatgagaaccccactcagactagcttaggtcatcaaaggggagatactggaaggagcctcagattgctcacagaattgaaagaagaacttgaaaccagagtgacacaaaacggggctgatcctgacaacgtcccagaacgggggccctaccctctgtttctcctagttctcagagtttgccatgtcaggtatgtgactgagtaagtctacactcttaagtcggtatgaacaaatctcaagaaaggatcgaccgggcatagtggctcatgcctgtaatcccagcactttgggaggccaaggcgggcggatcacttgaggtcaggagtttcggaccagcctggccaacgtggtgaaacctcgtctgtactaaaagtaggaaaattagctgggtgtggtggcgcatgcctgtagttccagctactcaggaggcagaggtgagagaatcgtgcttgaacaggggagatggaggttgcagtgagctgagattgtgccattgcactccagcctgggcgacagaggaagactccatctc

SEQ ID NO: 234625 - DNA, 432 bp, Homo sapiens
tacaatcagacaagccaagagtgtgtaagatgagttagatgcgagggtctggctccagaaccctaaactctgattgactgataagctttgtccttgatctggaatgacttgatcactgggaataaatatgaattctcaagcaggagtatctgctcatggggattataaagcagattagtgtaagacaagacaggaagatttttcagtgtccgggaagactctggccccacccactactgatccaaaaccttttagctgaagtctaccgttcgctcctcagcagcagcagttcccagtgcagttattgggcccttttgtttgggtgtggtcttttctgatgtgtggaatatgaatgagaggggtttggcacttttggtttactcttttgatatctatctaagtaataaacgctaaatctaaaagtgtcttctt

SEQ ID NO: 234626 - DNA, 493 bp, Homo sapiens
agcaaagcccaatttacgttgttttttttgttggcttttcagcccattttccctctggtctcccacgctgccccctcgcctccctactccggaatccgcgctctcccgggccttgcaggctcttcactcccgctcttggcaactggctgacaacgagcataaagaagggtatgggtgcgtggtcccgagtgctgtcacccagggctcagccacccacactcggcaacgggtgcagacgccagtgaactgagacgggaagttgaaatacataacgttgaaactgttggaaaactggtcaaaaccagggccatgtggacctttgaaactatgtggagtaaaaggggaaaatggaaagagcgagactgtaacaccgcccgcccttgcagactcctaacttgtgcagtgtagatttctgcacaaggaggttattgatagacatgagaggaaattcgagaaagactggtgaggggcgctggtgtgtgtggtggggacg

SEQ ID NO: 234627 - DNA, 342 bp, Homo sapiens
taatacatttagtaggtatatttgggcatatttaattcatttagatgtcttggatttgtacctcagatgctgtcttggtgagggtatcaaatatgccagcaagagtttgacgttgagacagtgaaaaaaagagtaagaggaaatcagcctataaatggaaaggagcgaaatataaagagcattaataagttacacagtttcagaactggttggctatctaatcaacataatgtacacatgttttgttattattgacttcacccctcatagagatcattgaatgttgatttttctcagacctacctttttcatggtaatgaataaagagcatagcttcttttc

SEQ ID NO: 234628 - DNA, 595 bp, Homo sapiens
cacaagttaattcactttttaaaaaacttcatgtcatctgaatacttaagctgctttgtttggaaagtgtctttttaaagaaaatagttaataaaattacagtaagataattgtcacaaaataaaaatcttaggtggccagttgtgtattacagagatttggttttaacagttatacaagttatttaagtgggaaacattaatattaaattttattaagaaaaattttgacaccaaaaaatctgtccttcacttagaatataaaatgtatagctgaacaccagcaggtgtcactgtgataacatgttttccccccctgaacagttttatgtggatgggtgcataccaactatggacaaagatatttaggagataataaatgtaagttatatagctgaataaaaataccaaaatgtaggaaaagcctatgagttccatgttggttaggaatgctgtatttttttttttaggattgctgtatttttaggagaattgtatttttttctcgctttcttcatgtcgtaaacatacagtcttccattatgtaagtgatgtgctgttttattagcaataaaagtagagtaaaaatcccttta

SEQ ID NO: 234629 - DNA, 850 bp, Homo sapiens
agtttttacagaaaatatttgggggtggccagcatacccagttggtgttaatccttgcttattatatccagtgccttgtagagtgcagtaatttcgttgaaaatctgcttgtgaatctttgatgtatacattatccaaaaataacctgactttaaggtcattgctatctggtttaggagtcacatgtttgagaattctgggactattagcaccacacactttgtaattttatatcagatgttctaaattattaatattttttaagagatgaggtcacactgttgcccaggctggtcttgaacccttgagctcaagtgatgctcccactttggcttcccaaagtgctgggattatgggcgtgagccaccacacccagcccaaaattattttttggcttacaaaagaagttgctttaaacttctgtttcatctgtaggatatggataacaatagttaagagttgtgagaattagaagttagagaccttactcagaatactagggagcaggtgttagggattttggagctttaccttttaagaacttttgtccatatagtagacaacatactcaccagtgaggacctcaaatagcaatatttctgtggtgaaatttggggatatttatgttaaataaacagcatgtcagtcaaggttgggttttcctgacaaaatttgaaagaatttctctggattttggttttcaggactggtgtgacttaacatacatggcatagatagtatacgtctgttaagtcagtaattacacttacttgagcacaggtactgttcaaggtgctgagaatacagtatagacaaattcctacccttatgaagctgatgttgcaaaaaa

SEQ ID NO: 234630 - DNA, 449 bp, Homo sapiens
caggaagagaagccaccagaagcccctaccctcattagtccgcaaaatcctgtctccttgtgttagaggaatgagaccaagattttctcccatctttccccacagttttaaagaggaacaatctgaaaccatggggctgggaaaagctgccagaaaatcaggatggatttggggacagtggccctttctgtccactcagctgtcctgtcggactgatgacttggagcccgcagttcagaagactcctcatgggatgccccaccccacagagtgggggtgtggtgggcggccggatgcgtagtccagggacgtttgtgatttggagtgtgctagactatgtgtataagtcacatgggtgtgtgtcactgtgtgtgctggcgtgccttataggtgtgcgtgtttccctgtcagttttgacacggattatatgaaattaataagggttttta

SEQ ID NO: 234631 - DNA, 538 bp, Homo sapiens
tattccagaacttacagtaaaaataaataaatagttaaaacttagcattacagttaaatacatgaatttgcacttttgggggaaattattgttgtagacattaaatttcctggtctatgatgtatagggtacatgtcttattcctaaaatgttgagttgtatatagagtgaatttatgttttatctatctactagttatctttgcttgcagtcttatgagtaagtcaggaagatttctgtatcacatgagcagatttctaatttttattgctcagttaattttttttcttacattatagaattttagagttaaggaaatggaggcccgaagagcttaagttatttgctggaaaatgcatagtttttccagacagtgcctagaactgaaatcttctgaattctaatccatcctctcaactggtatgtagactttgggccatttttttttttctccagtgcatttccctcttgcccagtactatcaagaagtaagttaattctaatactagcttaccccaaaaaaataaaaataaaaacc

SEQ ID NO: 234632 - DNA, 2601 bp, Homo sapiens
ggccatggatgggcttggataaagcaccataagttcttcctctaggccatggactccccctggaactggcagcctggcccccaggcttcaggctgtccctgggttgaaggtggtgtttcacctgggacctgcccctttctgcccaggagcctgtctgcctcctgctaccatcaacatggcatccacagcacccaggctgtgcatgctgagggacgcctgcaggcctgcactgagctgccctcagtctcctcttggcttccctcctgtgcctgtcggtgaccaaagtctggagggggccaagatgacaggggtcttgcatgtcaacaccacccagagtacatacacacccagctgggttgcgacagcacccaggctcagtttcaactttgctccaaaaatcagagtggacactgggagtggtgagatgccagggagcgggagcaggcaattacaagcctgcatgacaggggggcttcctgggtccccaagagcagagggatgcctgggtccagagctgtggctaggtagctgcagctgtgcctgggagctcagggctcctgccctgccaacttgatagaaggcagggttcccacctgttcctggtccctgccagctctgtggagcatgcagccccagctatgcctcccctgctgcagctggcatccccacagcagctgctccagataggccactgctgccatcactgacaattctttcagctcacaaaggtagccatgaattaggaaagttgggtcaggctccaggcagcctgcgttcaggcaagctcaagagctgaggatgcccacctttgcaaacatggcaactctacccatccctgtgtctcctagacactagagcccccaccctctgctattattctaccatactcattccccagccagagtctgggacctgggctcctgcagataattctacatcaaaaacaggggaagtagaaaagttcatgaaggctcctaagtctctccaaccacccagggccacaaaatccatgtagaggcctcatgaagggttttgtctaatcaaatagtttgctccaaccagccagcatctttcttttgatctagatgtctgtctccatagaaaaggacatctattgagggtcagggacctaatggcttgtgggttcctgagatacaattatgtgttacggagaaacaaagaaaattttgagacttttaggcaacagagaaaccactgcaaaaccctgtaattacagggcaagaagaaaaaagtgagctgccacagtgcctggggtagaaatagcctgacgttgcttcctggatggacctagaatgttgcacaaggtgacgtcagagtggttgcttagaagagaggtcattggatgcagttttccagctgagtacagtgggtggggtgcactgttgttcctggggcagagtgggcgagggagctgtggggagagatgaggaagcaggacaggaaaccacatttgctgaaggccaagggctgtgacaggcagacactgagacatatcgctgcactcagttctcagaacaactcagcgaagtcaggccttgtacccctagtcactagacaagaaaacagagggtcagagaggtgaggagacttgcccaagctcacctgatccctgacctgactgattgaaggcccagggcacccatccatgctaactaaggtgcaagttcgtactgtcacttctttgtgaaggggctgctctttaacaaaggataaaatgagaggttgttctactctgaggggaggggaggcagagagaaagaggggagagacttgcctctgtttgcctacaggtgccaagccaaaagaggggcttgagcttgtggagaaagcattgagttggaaatcgaatcacccagcttcaaattctgcctctactaatgccatgtggtctggggccaattactttagttctctgtgcaacaatgtcggcatcgggagtaaaggggttgaggtggtggggtgagaagtgtccactcttggtccctgcaagtctgaatcctttacactgcatgtcagcttagaataatgacggttatgagcaaggagcctggaatcagattgccaggttcaaatcccaactttgccctaagctacagtgtgacgtcaggcaagccacagatctgtgactcagtttaccctgtgtaaaatgaggataatgataatattcacaacctaggttgtcatgacaattaaatgacatcatgtgcgtgcaaccaaaatagcatttggctcatcctaggcacgggagaactatatgccaggactcagcccatggctcacgcagagctggagaagatctgggggaaggaaaaacagcttgcttgctgggcggtcccagactgcaaggtctccacctaccccagctcgcatcataactccttgaagtcaatccagatgggctctggccaccccaggggactgagcccattcccatcgagagctcattaaaattacccagaaatgggctgggcgtggtggctcacgcctataatcccaccactttgggaggccaaagtgggcagatcgaagtcaagagattgagagtatcctggccaacatggtgaaacctcatctctactg

SEQ ID NO: 234633 - DNA, 867 bp, Homo sapiens
aatgagtgaggctggggaatgggctgggggtattagcagtccttttgcagtgtgtgtggtggggtcacaccactatggctaagcctaagacactcccagagagaagtactgcagaaggaactggtttccggactgcagagggatctgcatttttgtttttgaccacccccaccaaaaaaataggttagatctgaagggcaaagggaatacccaagcctctgatgcctatgagaagtccctggacttcgacccttctgatgtgtgatgttagccccgtggggagctgctcacctgagcacctttgggggtgagaagggagcagggaggtagggtgggatattggagtcagcatctgtagtgggcagccctgagcctggaatagatactttttggtcttttggttgtagatgttatttgagtacatttatgcccctggctgattgagagcttctcagtacttcttgccatccccctcactgccctgacccaaccccactggaccttaatacagtgaggggtggtatcctggacagggactctgcactcccagctgtttggatcacagaagagtgtttgcccctctgcctttgccagaagagggtttgtttctccaaccctacaaggccaggcagacgtggacaggagccaggggagcagggtaatgaactttttttcctttggcaagtggggcgctcctcgcctctctctttgccccatagcccgctcacggacgcccggcctcaccaggtagtgttgcttgatttgtatgcaaaatgttgttcttcctttatctgaaattcaaatttaattgggtattttgtatcttatctggcaatcctaccgccaacctgacttcaggccggagga

SEQ ID NO: 234634 - DNA, 213 bp, Homo sapiens
atgaagtcttcaaaatccagcatatactttacacttaaagtgtatctcagttttaagtgtttgagggtcccatgtggctggtggcccacttattgggaagcacagcaccatctcttctgaacagaagacttcaatccttgctatttatacaaacccattctctagttatggcctcacacctcattttcacaatggatgatctttcttctgatt

SEQ ID NO: 234635 - DNA, 393 bp, Homo sapiens
cgggaatgaatttcaagtcataataatcagaatttttagttttacttttttcttttacaatatggattttgttgttatttggatagtggttcaataaatcttaagctcagataattaaacactattttgaatcttaacaagatactgaggctttttttgtatgggatgatatcaacctatgtacaatgaatttaataaacttaagtattgtcagattttttgcacattttagctcaataaaatcttaatgttcaagatttttttatctgcatttggaaatacaattttgtaaaatcaatgtcttacctttttgatacaatagatcatgttttgtttttaataaagcaagaagcccttttatctgttgtttttcagggaagggattaacattta

SEQ ID NO: 234636 - DNA, 472 bp, Homo sapiens
ccacaaggagccatagaaggttatagagcaggggagtgcagcaccatcagagctgcaattgagctccaggcctcaggtgtgtagcagacaaaggcacccctaattcaaggggtgaatcaggcatggtctctacccttgcagagagtttgggtacctgagcccatgggggactgggaagctgcttccccaccccagtttcctcatcagcaaaatggacccaggtatgtgatgtagcatttcctgacccaagggacccaacaaacagctgcgataggattttggagggacctgtacccgcacctccaccttcacaagttgtgcatttatttcatggtttaatgacttcaccttcttttggacttttatattatgaaaaatttcaaacctatagaaaagtagacagaatagtatcatgaatacccacatacctatcacccagatttaataaatcttaacattttgtcatgcttca

SEQ ID NO: 234637 - DNA, 413 bp, Homo sapiens
tacaatgattattacttttacaattaaattcaaaaaggaagtcaccctcccttgtaccctactgtcttatcttgcagccacggtgtgaaaccactacttacacgtgtgtattttaagagctggcacaaacagctctgctaatcatagacagaacatatgctgcgttatatttgaaaaccctgaagattcaggttttactgctgataatacgactttggcaacgacacagcacctacttgtccatcaccctgtgggttaatttaaggaataagtgacttcatagcaagtacccttaatatcacaccacaggctcttctgaagaatcaactttcaaaaatttccaaagcttttgagtgttatttctgttgcctcagtaaatgtgcatttctgtgaaacacagattttataggatg

SEQ ID NO: 234638 - DNA, 1111 bp, Homo sapiens
tgaacaatcatctgatgctcttcagaatgaagaccagtatattcaggtacatttacctgtgaaataaagaaacacataaccattaaaaacaacattcaaaatgcacactaaagattctatcctgaaataaatcattaacagcaggtctcagagatttcttcatcgagcaaccagtttgtttcagttacaaccaggtgtactgagaaaccccaacacattgccagttggctggggcctgggaggcagagcttgcaggcagctaaagaaacaatgctcctctggcaacttccatttatcctcccagctttcccaaggctagaagctgcaaagaatgggctccgtgcgcgtactctcagggaggagccttcaaggcttgtgcgcttttcaaagaaaccgggtaacagtcctttctgggagactaggtttacctgggaggaggctcgaatggcactgcgtggttaggcttccctcagacaaatggctttgccggcagtggggcggggatgtatgtggtgccacagatacagatgaacacctttctatgttttgagatgatgctcttcccttagtaacctaaggctgctatgactcttccagaacaccctgtggcaagtataatgaagccataactatcattttcaggggactcaaaccgtttctgaggatttttctacccccatcctcaacccatatatttgttagcaaatagttttcatagtctttttctaactataatttctcttcctcactttttttttttttttttgccttggattagggacacacctagaatcagtgttttcctttctatttaaccagaatactagtaccagattagcaaatgaaactacaggttgaaaactcacccagttcaacagattcaattactgtaatttggatttttaaaatatgatttgggaaattaagaccatataactcattcttaaacaccttcaaatatatcctcactatgctttatttttggtgtagaataaatagaaatattttctaaagatgctcaagagattattagcaaaggcaatatcatttatttttcccagatagctgcattctctcattaaacacacacacacacacccctaaggctttt

SEQ ID NO: 234639 - DNA, 453 bp, Homo sapiens
ctggaagatggtgtgttttgctgctgcaggaattgtcaaggggctgggcagagggcatgtgaagtaacctgggacctgttggtcaccctgggtgatgtgatggcctcattctactggtacttgctgttgctgctgctgtactcccacttggagagtttggcccagcagttcctgaaccatatttgttacctgttctcactcaggttgagttctgtggccagtttatattctcaaagtatttctcttactccagttgttgtactttgttgacattgtattcctggtgctgcctcaactgagaggaaagggtggatgttaattcccgaggttcttgtatcttttattccagtactgttctcttcatgggtatttgctgatgctttattagttcgaaatgcaagaatttagggaaaatcatacttatttgattaaaaaaaatggcgtgtactgaac

SEQ ID NO: 234640 - DNA, 222 bp, Homo sapiens
cactctctcagaggacaacaacccaggagggtgggaaagagctacggagacaaggtgcccaggcacctgctcgagggctgccgctgtttttaggatccagcccccacagccccactccttggtgccaggaaagcaaccggaccttgtgatggggctggggttcctgggctgctgtgttgtcactggggtctcccttttgcttcgaggtgggatttccaatca

SEQ ID NO: 234641 - DNA, 1116 bp, Homo sapiens
acactgtcttcaatgggtggttcctgctctccaggtttatcataaaggaatatccaggcatttgtttctgacatggaatgaatggtcatctgtggtattatttcttttatttgcatcagttttcctacttttgttggtttttaatgaaggtccagcacaggtcctaaaggagccacagacactgaatcaagggctaggagcttggcgggcagggaaatcccacacaacccttgtgccagcctccaagtggatgccaccagccctgctttacaaacgagggtgctgtgtcagcgtccatccatccacagaacctggaagagctttcatccaaaagcatctagaggaagctaacccatttggtgttgatttttcttctcaagctctgagcatttcgagccaccgaataaagacttcacaaagtgcctgcattccgcatttagcactcacacagcatggggctctccagaagtcagtggctccaccaaaggccaaggtgcagtgtgagatgtgcttggggaaaggggcagcctccactctgcttggcacagctcctgctgcctgtaccgcaccctcgtatccatccttctcacccggaggctggcccatggtagcacccacctcaccccttcatggcttctcatgatagggtcaggagctcaaggcaactcagccatgctcccttgctggctaaacacagagagaggacaccttttctgttccctcaattacaaatacttaaatcatggataatccaggctcctctcttccttcagttgcccctcatggcaaagcacacacagatttgtttccctcaactagtctgcctattttcaagactagctgttctctcctgcctttctttttgggttttagttttgttttggttttgactttgaattccagatgaaacactctcaggtaacatttgaagatttgcaggacttaggataacaaagaaagtctcaggaaagagccttctatcccaggggcatagctttttcttgccttctttgaaagcttttgcatgtgtgtttgtgtagttgtttttttctttttttttcttttttcattttgccactgaacatagatgtcccagaaatagacaaccagaagcta

SEQ ID NO: 234642 - DNA, 370 bp, Homo sapiens
atacccctcgctgtgaaaaagagtcaggggaggtcaagacaggcctgggatgccaggtgaggccagaaaccaaggagacagtcaaagagcaaaggccctgtccaaaaggcagagcctgcacaagggttccccccatcccactcggggctatcactggtaacagcacattggaagaatattcctattgtggaatcagaaaaccccaagccccttattctttaattgagccttatctttaaaaagcatcagaagccagaggctacagatttcaattagctatgtaataagaaatcttggaagaatgagatactgttgacacaggggctctggaaagacaagagaccatgccagccaattaccttgtgagaga

SEQ ID NO: 234643 - DNA, 360 bp, Homo sapiens
gttcattcatccgaagtgaatgtggattaattggtttctcaggtagattatagagattaagagaaacagggcctcaaatcagaaacctatatactaacaatatttttcagtatacaatttttataatagacagaagggatacccccatgtagttattcattttttaaacattaacttatctcttactgtttacttggatggtattacagatgtaagtttgtgtataatacttcagcatcatatttgagttaaagcatcatcattaccttgttttgaaacttgctatctaggcgcgctggacatatgctacctattttttcccttgaaggttatattgctggcttaagcattccctgggtg

SEQ ID NO: 234644 - DNA, 311 bp, Homo sapiens
gttccaagtctttgctattgtgaatagtgccacaataaacacatgtgtgcatgtgtctttatagcagcatgatttataatcctttgggtatatacccagtaatgggatggctgggtcaaatggtatttctagttctccatgctcacgggtaggaagaatcaatatcgtgaaaatggccttacttcactctttgaacacaaacagagtgtgttgttcctgagtttatacttcctttaactacataaagtgaatattatgcttgctttgattgctgaaaggtaaactcaagtgtattcacttagaaaattaaa

SEQ ID NO: 234645 - DNA, 457 bp, Homo sapiens
gagtatttgcaggtgtcattccacttttttaggggctcatttttaattatgtcttgcttcttacatgatgttgatgtagttgggatttttttatatttgtctatgagttcatatgtcttggaactttaggtacagtaatactttgaggtttatgttaaagttgcatttttgttggcctggtgtggtggctcacgcctgtaatctgagcactttgagaggctgaggcaggtggatcacctgagatcaggagttcgagatcagcctggccaacatggtgaaaccccatctctactaaaaataccaaaagtagccaggcgtggtggtgcatgcctgtaatcccagctacttgggaggctgaggcaggagaatcacttgaacctgggaggtgaaggttgcagtgggccaagattgcgccattgcactccagcctgggtgacacaagaaaaacgccatctca

SEQ ID NO: 234646 - DNA, 517 bp, Homo sapiens
ttagacaaaatgtggttgataatttaagaaacgtgatttccgtacacatgctactattggtatccctaggctgaaatcatgttgccatgagccaggatggatatactagttgttctatagccagcatctgttctgattggatggcatccagattgtgcagattgataaatattttgaacatcgttcccagttatcatgggcttgtggttgagaaataccaccataaacacaagaagaaaggtcgttgtgttctctgccttggaaaacacagttgctttctggagagactggctgctccgttgatattattttcttctgctcaccagtgactgttgaaaaatattctgtgtgattagaatctagaacgctattgatttttgtctggtctttcatgatatttataatttcctcatttatgtttgagattaaaaaatctttagctaacatcaataaaatacattattgctattaaaatactactgtgaaaatcttgaaataaaaataactttgaaactct

SEQ ID NO: 234647 - DNA, 219 bp, Homo sapiens
gaaaggaggctggggaaagaggttctgttgccaagggtccatggggccactggggtgacatcaggagctggcactgcagcatcagaaggatccagaacagtaatggcagtggtgacaccgagtgcacctgggtgcaggggttgtgcatgctttagggggtgtgccctgggatggagcctgtttgtaggtgaggtcggatacagcttggttcctccttca

SEQ ID NO: 234648 - DNA, 489 bp, Homo sapiens
ctctaaacttatatattaaagtcctttatttagagcagaaaagccggccttgacctccactgtctcagaaccgcgagaaggagccccggacgccgcagcggaggcagcacgagcacccctcccgccgagcgcaagagcgggccctttcggcttccggggtcactggaaggcaaaatgtgtcacaaatacggccagtacaaaccaacgcaacaaactattccacaaaaaaactgaaaaccagcgcggggaggtaaggacacactcttcagaaaagcgaatccgggctcttcgcgcttcctgcagcgccagccgcccctgcagtgccggaatcccccgaaggcacgccagaagctaagccggccaccccgaccgcacccaaggcccgggaggaagcgccgaggtccccgagaatgcctagggaaaccagctgcgcttacaagccagctacgcagcccccgagccccgggccgcactcgcccaggccagccc

SEQ ID NO: 234649 - DNA, 371 bp, Homo sapiens
tatgtattttcctgagcatgctcataattgcaattgtgcaataatttattttctcatcattcttcagacattactaaatccttttacatactcaaataacagaacttagacatcacttcatgtggcttctgcaaagggaaaaatgggaataaaatgcacttacatcattttgtttgagaattaattctcaacatctaaaccttttagtaaggtgtttaaatacattttttctttttctatatatgcatttgtaaataaagaatcctagtgctgagtaacattaaaacaaaagtaataatcctttatacacaggtctgtttcaccaacaacaaagtaatgtcgaataaattgtcctttatatttactttacc

SEQ ID NO: 234650 - DNA, 405 bp, Homo sapiens
tcaggtctgttcgcccttcaccaggcctggggatgaggtcatgctggtgcttgggccatctctgaccaggccagtttcctatttctagggcccaagagccaacagaacatctgtaggaaccagagccggaatcaagctctctgtggagtctgctaatgtggatgtgttggctcaaagtatctggactaaacacagtcttaaaaacctcctgcttagggcaaggttttgaaagaagcagtcgggggaaaagatacccacgcccacaatacggatgtgaggaataagtaaatgtacacagatgtggccaggcagggcgggatctgaaagataaaccagagttggctcagtgggaagggatgagctaacttcctacatcagctccccctggttcctttctccggagca

SEQ ID NO: 234651 - DNA, 373 bp, Homo sapiens
aggttgcagtagctgagatcgcaccactgccactccagctgggtaatagagccagaccttgtctcaaaaaatgaaataataaagtgttcaggctgggcacggtggctcacgcctgtaatcccagcactttgggaggctgaggcaggtggatcacctgaggtctggatttggagaccagcctgaccaacatggagaaaccctgtctctactaaaaatacaaaattatccggacgtggtggcacatgcctgtaatcccagccactcgggaagctgaggcaggaaaattgcttgaatccaggaggtggaggttgccgtgagctgagattccaccattgcactccagcctgggcaacaagagcaaaactctgtctca

SEQ ID NO: 234652 - DNA, 555 bp, Homo sapiens
  misc_feature (23)..(23): n is a, c, g, or t
  misc_feature (430)..(431): n is a, c, g, or t
tacggagaggaagtatggggctnctaaaaaaaaaaaataccttttaggcagacgtggctggagtgaatgaacggcaacacttgctggcaaccggcagaagctgagagacagggaacaggctctcctccagagcctccaggagccaggcctttggacaccttgaatgtgggcttctgggagaccatgcgtttctgttataagcagcccagtctctggcagtttttacggctgccccggaacactcatctatacctgtctgacaaggtcaagctccaaggaagggactctctacatatctacattgtttgcagattttacaataatcatttattcttgcatggctgatcattgttaaccaatacaaataaaataataaagaaatgacccacaaaaaaaaatggacttattggcctcgttcggctaactgtgnnagctctgccgctcgagtacctggtaaagaggggatattcattatctgagttcatggactcggttggctgggtggtgcgagcgcgactagcggaatcaaatgcctcaatggggggtattcccgtg

SEQ ID NO: 234653 - DNA, 796 bp, Homo sapiens
  misc_feature (671)..(672): n is a, c, g, or t
atttgattgtggagagcatatctgatgatggggatttgtaggactttaaaaagcactcatgtttccatcctcactgttgactcctggcttaaagggatctcccggggtgagtgaggaggcgggatcggaccctggcagtctgacggcagcacctgtgttcctctgcactgggccgtggatgacattacacaccttgccactcccacggtcctgtgtgttccggatattttaaaataatggctataaggttgagcacttcaggatacgctgttttgctgtgtgcagatggaggcagtggctggagtgaatgaacggcaacacttgctggcaaccggcagaagctgagagacagggaacaggctctcctccagagcctccaggagccaggcctttggacaccttgaatgtgggcttctgggagaccatgcgtttctgttataagcagcccagtctctggcagtttttacggctgccccggaacactcatctatacctgtctgacaaggtcaagctccaaggaagggactctctacatatctacattgtttgcagattttacaataatcatttattcttgcatggctgatcattgttaaccaatacaaataaaataataaagaaatgacccacaaaaaaaaatggacttattggcctcgttcggctaactgtgnnagctctgccgctcgagtacctggtaaagaggggatattcattatctgagttcatggactcggttggctgggtggtgcgagcgcgactagcggaatcaaatgcctcaatggggggtattcccgtg

SEQ ID NO: 234654 - DNA, 631 bp, Homo sapiens
tgattttcatgtgggaactctggaagtccgtccgccttagtgatttcacatgtggctaaattgagctaatgacaagctgttcgaagtatggcaaaatggaactttaaaacagtatcttgtcaacaaccaagaggacctttttcacataaagcccacgcattcatctgcctgtccatcattctgtctgtccacacgggcatcattcgttagtggaactgagtgcccactgtcgagctgacaagcccataacctccctgttcctagtcacacattaattcttcaacaagtcccttttgatagattgtgattaagcttagctactatttccaattgcttccccaaacgtacttctcactgttctcccatcacacccttcagcccatccatgcggggttcctttgcttttcccaccttacaccaaactccctatttttactcccactttgacctcctctccaagacaaaacaaacaaaattagcattttaaaacttagttgtaatctttcttccttcatgaaaatttctccaacagccactcccacggtcctgtgtgttccggatattttaaaataatggctataaggttgagcacttcaggatacgctgttttgctgtgtgcagatggaggcag

SEQ ID NO: 234655 - DNA, 278 bp, Homo sapiens
gtgttttctttctttctttctttttttttcctggcactgcaaagacatcagagttggtagaaagcaaaatgtgcctgagtttaatgggatcaactttaaaaacaaaaacaaaaaacctttgagttagccatctgaggtagatgctggcaggtttgctgtaggcccaatggcacagtaagaagtacgacgtggaaatatgtcaactgtagcatagcgagaaattgccttttgtaaaatagtccttcgatatcttaaataaacgtgatgtttgatcaaat

SEQ ID NO: 234656 - DNA, 587 bp, Homo sapiens
ttagggctgtctttttctccccatctcctacttattacaccccttggcactttgcttcttagagttctgggtaaggtcctcaaatgccttctacatgacaaaatcgagaggcttcttctcagtgtttctcacacccaaacatccagctgcttttactgttaaaattctccccctctggactttttttcagcatttcccttgatgtaacctttctgggtcttttccactttctcttctttttcctcttcttactggacattctctcctaatttcactaaaactcatgccttacacttccatttctatttgaatgacttccaaattttcacctgtagtctcttacctttctctcaggcaacaaaccagatttcaagtgcttatcagatgcctccatataattggctcattattaccctaaacacaatatgttgacctgaaatttaagttgcataacctccatttggccttcaaaactcaagtcatattgctctttcccctggcatcctctgggtcctcaggctgcatggagtggtttggagttggggcggggggaagtttttctctgggatccctgtgttcctccatca

SEQ ID NO: 234657 - DNA, 367 bp, Homo sapiens
acttatcagagagtagttagtgggagcgggcttaactaggagcctgtacatctgtccacattttaatgttttaaaggagtgtctttttttcttgaacactgtgtttacagataagagagcggatctcactctgagcatgggaacatgatggcaattaggaggctttcctcctcagaggcctcttgtggctttccacaacttattgtcccatatttttagggcaagtttatacaggcaccccacagtcctttttcccaacaatgtcctaacctatttaaaattatagtggtatcctaacacaccagtacctcagaggactaaacttttaattcaagtaatataaaatgcattttattttgcacatgtt

SEQ ID NO: 234658 - DNA, 300 bp, Homo sapiens
ctgatgaaaatagcaccacataaaagcaggggaatattagaaataaaaataattgtctctaaagacccatacaaccctttttcccataaaaaaaaagatgcactgtaatacatgaaaagataagatctcttgtcaaaagtgtgagagaatgtccggtggttccaaatgacagttacctcttgccccccttctctgccagagttcctttttatctttgcaatcttccagttcttccgatcagcctgcctttagagggctacaaagcatttctttcaagccaccatagctaacacggtgaca

SEQ ID NO: 234659 - DNA, 137 bp, Homo sapiens
atttttggagataaatttttacataaaatgaatcatccaaaattaaatgtttaatgtactttcaagggatcttaagtagctttgctactatatatgtgaccctggtttataaaatatgtctgagcagcaaaatggtt

SEQ ID NO: 234660 - DNA, 1923 bp, Homo sapiens
  misc_feature (792)..(792): n is a, c, g, or t
tcaccaatttggctggtctcgactcctggctggtctcgactcctgacctcaggtgatccacctacctcggcctctcaaagtgttggagttacaagcatgggccaccgcacccggcctatttataattttttgaggaaactttgtactttttcccatagctgtaccattttgcatttccacctacagtgttcaagagttccagtttctccacatccttaccaatacttgtctttttttttttttaatggccatcctggcagatgtaaggtgatatttcatcacagttttgatttgcatttccctgataactaatgacattggacttttttttatatatctgctggccacctgtatgtcttctttggagaaacatctattcaagtttctagttcatttttaaattggattatttgctttttgctattgagttgtttgagttccttatctattttgaagcttaaccctatatcaaatgggattcttatatttttgtttcatattttgtagtatatcaggtccatgaaattagctatcttaagtaagttgcttttgtgttgtttcttatgacaattctgattagaatattaatacaaacgtgaaatgcagcttttaccaacaaatgggctagtttttattgaatcaataaaacccatattttgagagttttactcaaaagaacctaaaattcagttgaatataaagaaatggggttgtttgtttttttcttgtaaatttgtttgagttcattgtagattctggatattagccctttgtcagatgagtaggttgcgnaaattttctcccattttgtaggttgcctgttcactctgatggtagtttcttttgctgtgcagaagctctttagtttaattagatcccatttgtcaattttggcttttgtttccattgcttttggtgttttagacatgaagtccttgcccatgcctatgtcctgaatggtaatgcctaggttttcttctagggtttttatggttttaggtctaacgtttaagtctttaatccattttgaattaatttttgtataaggtgggcgaaggacatgaacagacacttctcaaaagaagacatttatgcagccaaaaaatacatgaaaaaatgcttaccatcactggccatcagagaaatgcaaatcaaaaccacaatgagataccatcccacaccagttagaatggcaatcattaaaaagtcaggaaacaacaggtgctggagaggatgtggagaactaggaacacttttacactgttggtgggactgtaaactagttcaaccattgtggaagtcagtgtggcgattcctcagggatctagaactagaaataccatttgacccagccatcccattactgggtatatacccaaaggactataaatcatgctgctataaagacacatgcacatgtatgtttattgtggcactattcacaatagcaaagacttggaaccaacccacatgtccaacaatgatagactggattaagaaaatgtggcacatatacaccatggaatactatgcagccataacaaaggatgagttcatgtcctttgtagggacatggatgaaattggaaatcatcattctcagtaaactatcgcaaggacaaaaaaccaaacaccgcatgttctcactcgtaagtgggaattgaacaatgagaacacatggacacaggaaggggaacatcacactctggggactgttgtgggggggggagatgggggagggatagcattaggagatatacctaatgctaaatgacgagttaatgggtgcagcacaccagcatggcacaggtatacatatgtcactaacctgcacattctgcacatgtaccctaaaacttaaagtataataataataaaataaataattttaaaaaaaaggccaacttgtgaagctaaaaccagc

SEQ ID NO: 234661 - DNA, 659 bp, Homo sapiens
gaataacactactcacttcacagaattaagattattgtggccaggtgaggtggttcaagtctgtaaccacagtactttgggaggacaaggcaggaggatcccctgagccgaggagttcgagatcaaatgatcagcaagaccctgactctacaaaaaaaattttttttcatttggccaagtatggtggtgtgtgcctacagtcccagctactcggaagctgagatggcaggatagcttgagtccaggaggtggaagctgcagtgggccatgcttacacccttgtactccagccagggcaacaaagcaagaccctgtctccaaaaaaaaaaaaaaaaatactctgattgtatctgtattgatcctaatatgatgcctaacacactgtggttggttgctcaatatacggtgggtggttattttgattgccttctcatttccacaaagcaaacacccttgttttttaggaataaattacatgttcaaacacgattaccaaaacctctttcagccaagaagtacaatgaaaggaattcctgaatatcatttatagatcctgaagttgcgtccctaaaattaatataagcagatcaaatccaaagagtttaaaggtcatccctccttcatcctgtcccttattacctgctaatatgtacagttac

SEQ ID NO: 234662 - DNA, 254 bp, Homo sapiens
cattcatcctctggctctttatgtggctggtttctaatatttgaggtctcagctcaaacgttatctcctcacagaagaatctgagctgtttgatcacattatgtgtaaaaatgctcaattacatactgatttcctcttaagtagcttctttccagaactgctgcatggctgtgctccagcaaaataaaaaaggacccaggaaagaggaacatgcaacatttaagatacgcaaaactaaaccaaaagtatcgtat

SEQ ID NO: 234663 - DNA, 318 bp, Homo sapiens
agagaaaactcccataaatagtgaacataccaataaacatagagcagcactgcctgatcctttcccagttttactcctcaaggatgctctgaaagatgagttagctgttgctttttcttagaagggttctttctatgtaaacttatttccagagtgtagaatgggtggttcagcctgtcttcagctgtctgctgtaatggagaggagagggagagcataaataataaaaacccaaagttaatcccaaagatcccattttagtcacttgtgtcaatctcacactccagcagacctctttagaaacaaccacatcataga

SEQ ID NO: 234664 - DNA, 540 bp, Homo sapiens
agaggtttaactacactagtatagagcatcgtttagtaaaggtttgttgaggtttgttgttgatttgtttctacttacacgagatgtcttcatttttaccctcggtcttgaaataaaattttggtgcatgttcaaaaaaaaaaaaaaaaaactcgagtttttttttttttttttttttttttttttttttttttttttttttttccaattttaaaaaatttattttcccatttgtagagaaacatttttgtaaaatttacagttttcgcaatacctgctttgtttaaaaaaattcctaaaaattttgttaaagcattttttttttaaaaaactgacccaaaataatgtccattttatctttaaacattgggtcattaaagcccatataacattttccgtaaaatcaaggggaggttacaattatatacatgacctgatttttctcctaaaggcttttttgaccatgtttgatttccaagatagatccaatgcctttaatatcagactgtagagacaattttgatcctaaacaaaagaggg

SEQ ID NO: 234665 - DNA, 514 bp, Homo sapiens
gggaggaagagagaggggagagagatattgatttattattgattcttcctaaaggtcatctgaacaatcctcttcaggccctcctaggctaccatcaacttcccagagagaggcagcttcaaacctgttgtgtcacatcagttttaaggaaaaagggagacttccaaatgatgactccctttagaagctctaaagagagagtcaaaacagactggtcccaaggagaaacaaccccttgtgacaccagagttcagtccttttccttaaaggtcaccatctctatcaagccctctttcacctagaaagaagtaaggaggagcaaagaagagtcttttctccccagagatcagccattatctggatgattcagaaaaatggaaaagtgcgtagatgaaattctccctctataggtaaaagacctgtttgtctgaaatgtgtggaacctgtcttatccaaattaatatttatggaatccaaataatcttaacttctaaaaattataataatgattgaa

SEQ ID NO: 234666 - DNA, 996 bp, Homo sapiens
caaatattttttcaacacccaccaggtaaaaaggagtgtgccttcatggcgcaaacacaaggggtgacccttcctcctgcaataatctctgagcttatgcctctcgaggtaaaaatgaactttttacaagagaactttttactagtcttaacaagagaactaggtgtagacattgacagaaatccttaactttctggcatggtttgaagtataaataaatttggacagctaccataaacaccactgctataccagggaaaatcctccaaagtactgggatacctgaagtatgcgtaaaaaatcttgactataatcaagtaagcttttttcataaccagtttctttgaaatgatcttctgcagcttaaaaccttaacacatgaaactttagttctggtctcacatttttaaaagtctacttgaaaacaatattatcctaaagtaactgatcaagacatgagaaattaaacaacacaaaagctaaaggtaattcccctgagttattaaaacacctcaaaatcaaaatgctaaatatattcattaatactttggacacataaactataaaagggtcacagaggaacccttaagcattcaaagaataactaaaaataactttacacaaaactttcttatgactcatcaatactcaaaaaatgactataatcaaaattgtttgaagtacaaaacacatcaaggaatatctttaattcctttcattcaaaaattgactacatagttttcttggggggggaaaggcctgaaaagtttattaacaggcctcatcaccattaccttaccttttggcctcggcaagccacaaaggtaattccacgctaaaaaccttacggggacacatctctaggttagaaccctgagtcattaaacacgaatcactccaaaatttgccagtatttctaataatgagttacaccctaatgattcacaactccagactggctacagccttctggctcctggagtcccagctgtatga

SEQ ID NO: 234667 - DNA, 341 bp, Homo sapiens
atgccatggcttacacctgtaatcccagctactctggagttgggggcagagggcccaggacgggagtgtgtgtggggggtgttgcttgagcccaagatgttgagactgtagtgagccatgatcgtaccactgcactgcagcctaggtgacagagcaagaacctatcctaaaataaataattaagatccactcagtgttcagatttcctcaatttactttgttcaaattaggcaaaataaggagtatgtgtttaaaaaactttttttaaagcggaagaagaggccgaggcaagtttcagagcaggagtgaaagtttatcagaatgctttagaacaggaagga

SEQ ID NO: 234668 - DNA, 986 bp, Homo sapiens
ggagtgtggagtgtagagcacctgctgggccagtctctgtagtagcaatcattgaacatgtgggcagggggtggtggggacagtgtccaaagattcctgggaccagaattggcaggaagaactgcctgatttccgtttgccagggtaagcaaagcaccctcggggaggccagaaacccagccctgactggtgctgctgcaagccgggaggatgagttgtgcctggttccctgggcaacctcacccgggctgggctggacctcactatggacttcctgtgggttttcttcaggcatctctcccttcaggcttgttagccaagggaggccttcagtgggggaactgtgggccacagctggaggacctctaccccagggtctttattggacctggctctggtggatgaggggacaaggactccggcaaaaaggagggcaagtgccactctcaagaaccaaaggctcgaggccagcattgtatctgaggagcatgggcacccgctggggcccagctctgtgtgaccttgtgtgggtcacacacatcccataagagagagggtctcactgggttatctccaaggtcttccccaacacgggcattccatgtctaatcgcctaatattctcccaaatggtctattggccatttggctactgatggaaaatcgaattgtttactgtgacttgctcttacaagccaggttgtaggcaggaatagaaaaaacaggcaactgactctaatcccagcactttgggaagccgaggcgggcagatcacctgaggtcagaagttcaagaccagcctgaccaacatggcgaaaccccctctctactaaaaatacaaaaattagccggcgtggtgatgggcgcctgtaatcccagctacttgagaggctgaggcaggagaatcgcttgaatccgggaggcggaagctgcagtgagccaagatcgcaccactgcacttcagcctgggtgatggagtgagactca

SEQ ID NO: 234669 - DNA, 440 bp, Homo sapiens
agcattaattttaacaaagtttgtgagagaagaatgtaagctaagacatacttttaagtataagctgtgcacctaaatacaaatcacactcctaaatcccctcccaaattggagaataaaaaaaggccaagttctccattttaaaagttacaaagacgcccgggcgtggtgactcatgcctgtaatcccagcactttggaagcctgaggcaggcagatcacttgaggtcaggagttcaagaccagcctggctaatatggtgaaaccctgtctctactaaaaatataaaaattagccaggcatggtggcatgtgcctgtagtcccagctaatcgggaggctgaggcaggagaatcacttgaatctgggaggcagaggctgcagtgagcctagattgtgccattgcactgcagcctgggcatcacagcgagactccacctca

SEQ ID NO: 234670 - DNA, 1583 bp, Homo sapiens
  misc_feature (733)..(733): n is a, c, g, or t
  misc_feature (932)..(932): n is a, c, g, or t
agtgctccctatgaattgctgagggagagatacagcatagaaaaaaacaaggtgatgcgatggcgaggaagctcagtgtattggaagtccttctgatcatcttctgcttaattgtggtgaccatagatatcctcttgctgcttcttgtgttggaggaaacttcagatacttcatttactccagagtgcccagagattccccagtcggaaaggatagactgcacacctgaccaggaggtgaccgaggatatctgcagatggcaatataagtgctgctggtcgcctgtggcagatgccaatgtccctaggtgcttcttcccctggaactggggctatgaagccagcaatggccatacaaatacaagcacaggatttactgcccagttgaaaaggttgccatcaccatctctgtttggaaatgatgtcgccaccacccttttcacagctgaatatcagacatccaatcggtttcattttaagatcactgactttaataacatacgctatgaagtttcccatgaaaatattaacctggttgatgggattgctgatgcctccaatttgagctattacgtggaggttactgataaacctttcagcatcaaaataatgaggacaagcaacagaagagtcttgttggacacgagcatcgggcccctccagtttgcccagcagtacctgcaactgtctttccgactgcccagtgccaatgtgtatgggctgggagagcatgngcaccagcagtaccgccacaatatgacctggaagacttggcccatcttcacccgggacgctacccccaccgagggcatgattaatctgtatggagctcatacattcttcttgtgccttgaagatgccaggggctcctcttttggagtatttctgatgaacagtaatgccatggaggttacccttcagccagctcctgcnatcacttatcgcacgattggaggcattcttgacttttacgtattcctaggaaacactccagaacaagtggttcaggaatacttggagcttgttggacggccattcttccctccctattggagtcttgggttccagcttagtcgcagggactatggtggcatcaataaattgaaagaagttgtaagccgaaatcgtttagctgagataccatatgatgtccagtactctgacatagactacatggatggaaagaaggatttcactgttgatgaagtcgcttactctggtctcccagattttgtcaaggagttacatgacaatggacagaaatatcttattattatgaatcctggcatctccaaaaactctaactacgagccctataataatggaagcctaaagagagtgtggatcttggggagcaatggctttgctgttggggagggatatccgggaccgacagtctttcccgattataccaatccagtatgcactgagtggtggacagatcaggtcgctaaatttcatgatcatctggagtttgatggagtgtggattgtaagttattattcctgactcaaatttcctttggaaacagataacgccaaattttcagatgagttttgaccttgatgtcaaataaatgtcaat

SEQ ID NO: 234671 - DNA, 560 bp, Homo sapiens
tgcaatatagcactttaattctggaggaaaggtggattattcagtaaatgattctgggacattggggacaaattagatacctacttcacactgataaataaaaccaaatagattaatgagaaaactgtgattaaacaaaacaacacccagactacactggagcaaatctgtgaatttgtttaattttgagtggagaaggactttataagcatgactaccagagcaaaaaaatcatgaagtaaaagatcgatacctttgattataaagagattaaagatttaggccgggtgtggtgctcacgcttgtaatcccagcactttgggaggccaaagcgggtggatcacttgaggtcaggagtttgagaccaacctggtcaacctggtgaaaccccatctctactaaaaatacaaaaaaattagtcaggcatggtagcacatgcctgtaatcccagctactcaggaggctaaggcaggagaattgcttgaatttgggaagtggaggttgcagtgagccgagattgtgccacatcactccagcttgggcgacagagtgactccatc

SEQ ID NO: 234672 - DNA, 602 bp, Homo sapiens
taggtctctgaggaatcgccacactgtcttccacaatgactgaactaatttacattcccaccaatagtgtataagtgttcctttttctctgcaacctcaccagcatctgttattttttgactttttaataatagcctgtaaggaacatggctgtggtttgttcaaggataggccaaggtaagatgtttgcattctgcatgacttgtgagtttagagtgcacacatataactccacttgttatcacagccatgtagccataacatgggaaggccatgccttgctctaagccagtattgtttgcaaaaggtataattgtcctgctgacactgtacaggtgcgctggcacccaaagagagagagagagccagaggggtctgtctttgtagatagacaggagggagccaggacacagctcagctcacttgtgcccagagagagagagttaagctgctgaccctgaaggcaagggagggctgtcggtgcagctgtgtgtttgggagctgctgaactaagcaactgagacagggcagacagtgtgagatagctagtgtgagaaagctgttaatgaaaactgctgctgaataaagccatgtctcatcta

SEQ ID NO: 234673 - DNA, 547 bp, Homo sapiens
tttttaaccacaaatggataatgtgcctcaacatgaagccccctttacactgcagtctaaatcctcttggaaagggtctgggacagccacaacataggcactttgtctccatggcagagaatgacagccgggctccaggtatgggtgcaatacaagttgcatctcacaccatctagtgacaaatccagtccaggtggattcattgagcagtccctatggggctccctgcatggtgccccattctgtccacgagcggagggtgtgtcttcaggctgtgctggtgcttgcctggccttgcccacgcgtactttattctctactcacctatgtcccaagcacagttgcttcaggctgtgctacgggcaaacacccggcttcctcgaagtgatgccagtgctacttccttctgccccctctgagcaaagatgccctcgagaccagctagaaggaagtttgcatacctgtggctgttaccccacctgtcacctgaaaatgaccccatgccccagctcagaagttagaaattgacctatactgcctaaaatta

SEQ ID NO: 234674 - DNA, 420 bp, Homo sapiens
  misc_feature (340)..(340): n is a, c, g, or t
  misc_feature (388)..(388): n is a, c, g, or t
  misc_feature (390)..(390): n is a, c, g, or t
tagtagagatggggtttcaccatgttggccaggctggtctcaaactcctgacctcaggtgatccacctacctcggcctcccaaagtgttgggattacaggcgtgagctactgcgcccagccaactatacatttttgaagccctcctgatcacttccttggttactctcatctttgtttgaagttcaatatattactttttttttttttttttttttttttttggagacagagtctcactctgtcccccaggctggagtgcaatggcatgattccggctcactgcacgccagcctgggcaacagagtgagcccctgtttcaggaaaagaaactgagagggnaggagtaaaggaatttcctaagctactgccatgtgtcaggcccactgntnggcaatttatatcatttagctcttgaatga

SEQ ID NO: 234675 - DNA, 339 bp, Homo sapiens
acagagaagaggatctctgcgtcctcccaggactgtaccctgtaacagaatccagagccatggccttctgtgcctcacgggcctcccgttcagtgctgctccaggtctcccgtggtatttacctttgcctgttgactttgagtgttcacagtcacttttttgaccataaccacatttaaagggcatctctaaagatcaaagttaaattctcctcccacagagaatgcttttactgctgaaaagcaaaaagtgctgaatatggaaactcacaggatgggagatagaacattcatctgaaccccacgaagagaacattttacagtgtgttttactttctgt

SEQ ID NO: 234676 - DNA, 466 bp, Homo sapiens
acaggtagtataaatttgaatcccaaactggtgaaaaggtaggtctatggtgacaaattcccaggaatgacttttattctctgtaccatgagtccaagctaacacaagcactagagggtggattttgttttttaatccttccattgagggtgaatgtctttaaaggtcctggctttgtatgtggatctcaatccaacttctcaccttgtaggggggcctaagactttacctcgagtgtccttgcgtgacctttaaaacccgagcatactggttacagaaactagggactgtctttacgcccaggcagtcacaaagcataaaccacacaccatactgttgttaaatttcctgtttagggctccgcccaggctggaatgcaatggcatgatctcagctcactgcaacctccatctcccaggttcaaatgattctgcctcagcctcccaagtagctgggattaccggca

SEQ ID NO: 234677 - DNA, 443 bp, Homo sapiens
  misc_feature (316)..(316): n is a, c, g, or t
  misc_feature (376)..(376): n is a, c, g, or t
  misc_feature (394)..(394): n is a, c, g, or t
  misc_feature (407)..(407): n is a, c, g, or t
  misc_feature (421)..(421): n is a, c, g, or t
  misc_feature (439)..(439): n is a, c, g, or t
catcttgtttttataatttctgcctcttcgtttttatggtctacactctgggaagttttttttcagatatagtcaccagttcactaacgttgcttaaatttatacatacacctggttttaaagtgaattgatacagtctctttttaaactcagtgatttcctatttgtaaaatttttctaacttctttttcaagtctgtcattttagtagcatcttactctttgcccacatttttattttttagcatttatgtatttatgtatttatttattcagccaataacaaccgagtgaggttgagtaacattttatatacnatccaagtgtcaatgatggggatgtgttctgacgaaaatgtaacactgggtggatttccncattgtgcaaacatcatnaagtggacctggnccaaacctagatgnggaaggtccactggcacngcta

SEQ ID NO: 234678 - DNA, 418 bp, Homo sapiens
gagcatactgagatttctttgcaaaaggagaaacagcaccagcaactaagcattttatcccattttattttacttcttctatgattctttgccacttagcaatgccaattaattgatttgggactggaaatacatttcttatacaatcttcaagttttctttcataagaacataactttcatctgatattgttccccacttctctcttttcaaatgtaatatttgggccagtccttgaaagtgaactgagttgagttctcatggcccataaaagaacatattcaaaatgtatcattttctttatgtcacagataaaagatcattaattgtatataaaatttccatataatttttaaaatttttattttgcaataatttattttagatttacattaaagttgcaaggaaggtacaaaga

SEQ ID NO: 234679 - DNA, 314 bp, Homo sapiens
ccacttgtagtacttaatttggggagaattctcttccagaagccttgttttctgcaattaatttctcacattattactaaaagaatcagccaatacaagatttgatccacattttgtccaattaaaaaattcttgtagcttatgattctgtagctcaagttcaaatcctacctacctcagacatttcacactatctccctgctggtgtcatcaatttcagtctatcttctcatgatttcctggatgaagtttttcagtgggaaatcctaagcctttgcctgaacctaaattggttccttcccatcccttaggta

SEQ ID NO: 234680 - DNA, 373 bp, Homo sapiens
cttgaagcaagtcagaggtgggagaaaaggacccttacagtattggacagcagaagcaaaacctgggagatgggaaggcatggggccgcgttcagggaactagagggcccagtcccgtgggcagggaggctccacaaggttacacacagggttggtaggggctgctgctgaattggcagggctcctttctcaagccctgctcacacatatcatagggtaaagaattttcttctaactcttgctgcaagggatactgtagtaacatatatgctagagcatcttgtagtatatacagtccagaacctgggctgctgaagatgctgtggttgttgtgtgtgcactctagcctgggcgacagagcgagactccatct

SEQ ID NO: 234681 - DNA, 555 bp, Homo sapiens
gtatttagctggggaataagatgtccatagggctttgaaaaacgctaacatattcctgagactgtagaaggtgcttagggtgtgcatatgtctagggttatgtgaacactcaagataggcctgagaaggccctgagctctaacctctgggtgaccttgaggcactacagaagcaagaagtgaaggctaaggcagaattatttggttggttggtgcaaaaaattgcggttttgtcatttcaacgaaattactttggtaccaacctaatgtaaagtgcttggctgattgttgaaggcttgtcccaacgtaagtactaaacccctcaggaaagactgggagattttttggttgaaggtgtttaagaaaacctgtctctctaatcattagttgaccactaagctaactgagcagaaacctgagtggtcacacacaataaacaatgcagactttaaagaattcattcataagctaggtgcggtggcacacgtgtagtcccagctactcggtaaactaaggccagaggatcccttgagtcaccaactcagaccctatctct

SEQ ID NO: 234682 - DNA, 440 bp, Homo sapiens
gcatagaccttgctggttcagtggcagtggctagatcatgagtgagcatctcttttagagcaagtctacacagagggagtggtttgtatgtcaataactctccagattgtgttgcaaacaccatcttcaactcagccatttttctcttggttttgaaaaaaccagagaataagcaagaggaggacaaagaaaatcacttagtgacactgtccaacaatcctgagagtgtttctggagaaaaaaagacaaaggttcctgatgaaagtggaattatacctccagattgccttggaagttgagctgcaacatcaacttttccctgaagctccagcctgctagcctaccagcacatgctgcagattttggacttgccagcccccacaattatgtgagcccattccttaaaaataaattcagttcaatctctctctctctctctc

SEQ ID NO: 234683 - DNA, 202 bp, Homo sapiens
gttttggcagatttttgacacctgtaaatattgtgcctatctgtccctcttttgggaatagtgtgttgtttgggtcttactattattcatttatctttttttaagaaaggcatttttggtgttttatcccagattttaaaatactacatttcactgaatccaggaaatcatcagttttaagacatatcatttgatgtgtcac

SEQ ID NO: 234684 - DNA, 541 bp, Homo sapiens
cttggtaccaagcctgctcattgttacattgtgttattgcttctaagccttcaacacacagaggccaaacctctagctctatctctacaaatgtatatgaagttatgggtttatactgatgcctctaacaccagttccacccatctaagattcctttgtattccctaattcatatttaaatctacttttttcctacagtgagaactctagcttccacattcttttatatgtcatttgcttaattctataatatgcacaatataatgtcataattgctattcccataccacttctccttcagtacagttttgttgttcatttgtaacatgagttaatttctgttttcattcagtttagggtctcctccaatcttggggatttcatttattgaatttatcattttatttccaaatattctattttcaggccaggcatggtggctcacacctgtaatcccagcgatttgggaggctgggtcaggaagatcacttgagctcaagattttgagaccagcctgggacacatagttcctgtttctgca

SEQ ID NO: 234685 - DNA, 430 bp, Homo sapiens
agggaagaggttggagcacctcagcagacacaggcaccagccaggatgctaaggacctttagccaagtctgccaactattctcctccatggggagaggaaacatccatttccagtggtagaaaggcagacccgaatgtaccagggagcttccaaatggagggtggtatgttgggttcttaggagctgtacccttcatgaacacccttctgagaagaggagcatgctgatcactgctgcaaaatatgcaaaacaaagggaaggggcaatgtcctgtgcaccctttattatcaggccacccccctccccagccccccaggtcagagtagacacagtgaaggactatgtggggactgttgttctagagacctggcagccaactcagggagggggctggtttccaccctcaagattaagacagcagcctaatta

SEQ ID NO: 234686 - DNA, 437 bp, Homo sapiens
atttttttcctatagatttcattttctgtctgatattttttttcacctgaagaacttttccttagcttttttttttaaacttttagtttccagaatacattattggttagatgttatatgggtaaattgcgtgttgagggggtttggtatacagattatttcgtcatccgggtaataagcatagtaccctataggtagttttaagatcctcacctttctcccaccctccaccctcaaaatacactctcagtgtatactctctaaagtacagtgtgtactcaaatgtgtactcaatgtgtacacaaagtacaccctcagcgtgttcttgaaacatcgagtatacattgtccatgtgtactcagtgtttacctcccatttacacgtgagaacatgtaatatttggttttctactccttcattagtttacttaggtaata

SEQ ID NO: 234687 - DNA, 368 bp, Homo sapiens
tttcctaaaaactcaaaggttttttttgtttgtttgttttgtttttttttttggtgtgtgttttgttttgttttctttttgggtggggtcggggagacagagtctcagtttgtcacactggctggtcttgaactcctggcctcaagcagttctcctgcctcagccttgcagagggttgagattacaggtgtgagccaccatccccagcctaaattagagatataattagaaattaccatctccctttttttttttcctgttaagcaggggacatttgtaacaatcattgctacctcgtctgcagtaaccataggttgtttttttgttttgttttattttgttttgagacagagtctcgctctgtcgcc

SEQ ID NO: 234688 - DNA, 483 bp, Homo sapiens
ctggggactcttgctgctttcgggataaggcccaaatcttcacactcctttgccggcctatgaagcgccttgtggtgttgccctcccacgcctctgcttttgtctcccacatgtatccacagccacactggtttgttgtctcacacctctgcttctcccagggtgctgaaattcctgcctggaatgccctcccccttgcctgacttcctaatccacccaccattcagtgtggctcaaatatcacctcctccaggaagatttggacttgtccaggctgggctaaaggtcgtccctcttttgtgttcctagcacgcttttatgtacattctggctgtctaatctatgcacttgttattacccgcttctaattgtgttagtttcaactcttagtctgaattcttactacttgaccttggccaagttacttaacctctcaatatactgatcaaaaaggggattaaaaacaatatcttcttcctaaat

SEQ ID NO: 234689 - DNA, 390 bp, Homo sapiens
ctaatttatataaaaattgcgtatgtcatacaatgaacaaaactaaacacatagaaactgaaaaaatgttcagaatcaatatggcaaatgctatctcttctcaaaacatcaggaatacacgaaaactgagaacactcaaatttcagctttaatgtagaaaggacagcttcctaaagaaagataaatggtaataaatacaaacaaatgtttaatctaactagaaaagtaatttttaagttaataagtctgaaagttacttttaagctggggcctgaaagataaattacatcaggcaaaaagcagggagcagtatttgagggcaaagatacacagagtaaaggccctgagatgggaagaaaattgctgcattcaaagaactgaaaggaggta

SEQ ID NO: 234690 - DNA, 303 bp, Homo sapiens
atttttcttccatcattctaggtttcctgtctggcccacacttcgagagtcctccctgctgcagggagcacatctgtgagccatgtgtttcctttctttcctcctgtacaatggtaatttttttcttagctactacaggaagcccagcagattcagatgtacaagaagccacaccaagacctaagatgatattcactgatgttatcagcaggttgatgccaacatctgcctagagagtggttaccctgagaagtttaccccagttctaagtttggttggtctgttctgaggtgatagcctcgt

SEQ ID NO: 234691 - DNA, 722 bp, Homo sapiens
ggcatttgtagaagtggtgtcctatagaaagtggaaagagaagacagcatctgatttctacattcattcaataactgtctagtgtcctgactatgatgtgggagaaataaagatgaatataactcccaccttgttcttgaagaccctataatctggtgggagaagcagaatataaaccagattcaaataaatattgtgataaaatatacaggctaagaatgcatgggaagaagtgattaacacactagttgtggagtacaaagggttttatggaggactggatattttaactgcaccttgaagattgagtacaattttgatagggaaggaaagagcatgtagctgaagaaaaaacacaaaagtacattgtatggcttggggaaataaagtagtctagagtggctctattaataaggtttgtaaagaggtgtagtggtatatgatgcaggaaaagtaggttagggcaaaaagaaaacagatcagtgcctgatatgaattatacactgggccaaaagtttttcatatttgctatttcatttaatttccatatagccatgcaaaataggtgttttgacatggggggaaaacagtctcagagagttttactaatttgttcaaagtctcacagataataagtaatggagctgaaatttcaaaccaggttgttacttaactccaaagctgaagctatttgtaatttggtaactatctctaaattaaaa

SEQ ID NO: 234692 - DNA, 367 bp, Homo sapiens
gcccgtggagcctcactgtaccttctgtctctgtgaatttgcctgttccagatgctgcgtagaagtggaatcactgagtatccttgtccgtctggcctgtttcccacagcctcgtgtttttatcatccacattgcagcgcttatccaaacttcattcattttcatggctggatactattccatcgtatgaatagaccacatttgtgtacccatttacttgtcgaagtttttaaaaatataaataatgggttgggcgcagtggctcacgtctgtcatcccagcactttgagaggccaaagtgggaggatggtttgagccttgggagtttgagaccagcctgggcaatatagcgagacctgttctctac

SEQ ID NO: 234693 - DNA, 630 bp, Homo sapiens
gtgtgtattttcttcacttatagcacatctcaattccatgcaacattcaagtgctcaatagtcacgtgtggctagtgattacagcattggaaaaagacagatacggttgaggaaacttaaaaaaatgtagcaaatgtagttgtagagacgtgctcaagatcactcaattatcatagctaggacgtgagtctccagcgaccttccaattgcctggttgaaccaaagccctggttcattctgctgcgcattaaaagcaggctttactcccctccaaacagtagaatcgcagttaaacttagtcaaacaaacttaatgtatccaatacaaaactcatctttctaaccctaacacctcctcttcctctctattttctatttcagttgatggtaccattatgtttctgctcactcaaattattattattttatccataaacgagcactttatctagaagatcatttaaattctaaatgatcttcaaaaacgcactttactctccaccctaactagctgaatcatctcccacatgggtcactatgagagccttctgatttgttcccttgcctcagtctctccccacccagcttcagcagtattccctaagactcttcatggctctccgtcctctac

SEQ ID NO: 234694 - DNA, 418 bp, Homo sapiens
aaaaaagaaaaaaaaaagaggatgaacagaactgctttggtttagggagacaatgacaggggtctaggcttgttaggggctgctgagtgctggtggttgtgggtagaagggaggtgctcagatatagaaggcaaaaggtgatcaagataaacctaacttaaggctgacttctcatggcatggagatctgagtagcagaatcaaaggcttttcccagtccaaataaggagttgggggtgtcctctcttcaccagtgggactttgctgaagatctaccagcgaacagccaccacacaagaaatgcacacagacccaaagtggaagtcgggctggtgaggtggggtgagaatgtgcctctaagctttttgtaagactttatgtttgattacacaataaaaagccctctgaataattaacag

SEQ ID NO: 234695 - DNA, 1095 bp, Homo sapiens
tttacaccttatctaaccatcgagacacgcccctgtggttcggtactcattatctcagtgtttgagcagggaaacgtcacttccctagaggacccacagccagtactcggcagagctggaaatcaaacccggtccatccaaagctaaagccatatgtctcttcactggacctctctggaaatgcttctcaactttgatgatggctccagtgacaggcagcagccaccaggactgtgatctccctgggatttaaagtgggaggttaaaccaggctccacgccactgcggaattgtgcaattgtaagtcaagtctcaattgtgagccaagcttctcccagggtcagaggtggagttagaaaggccccatgtgaccctgagcaagtctctctccttccctggtcctcagtttccccatctctattggggaagggttaggtatctattctagttgattaattgccagggcctgagctctgatggtccaggattctgtaagtctaacgttaggtcccacggcttgccctgctcagcacctaataaggccattagctctggctccttctctctggggtggcagcagggacagaaaacaacagagatacattctcttggcagcacagaactcagctcaagggttctggggatggggccttccctcctgccagggaggccatctcgagaggctgactgctcacacctgggcagcactctgtctcctcccctcctgcctgggtcccagctctgttcaccaccccaaagcacatcaccacaaggtcagttgcaaaggcccggtatcacaggcttaaatacagagggctaggagggaggtgggaggtgggagaggaaggtggagtactaacaaaggtgttgaattatcactgcccatcaggacacggttatttccccttactctgggacaccaaagattctacacaatcttcctataatcctgaaccacaaaagggaggcacagcctccaaaaaaaaaagtaggagaggggaggggggaagtacttttattttgaaatgtgttcatttttctttgttttattttctatcttgatgaaaagaatatatttttaaacctaaatacaaa

SEQ ID NO: 234696 - DNA, 452 bp, Homo sapiens
caaatgagagaattactaaaaatggactgttgtaatgttttgcgttatcaaaatgaaaactgccaaatgagattttgtttactttcttttcttgtgtgcttatgtcttttataaagttcttcatctaaaattatagagatagtgcatttgcacccaaattaatgaaacaataccattaaagagaaagaaaaggggctgggcacagtggcttacgcctgtaatcccagtgctttgggaggccaaggcagggggcagcctggccaatatggtgaaaccccatctctactaaaaatacaaaaattagctgggcgtggtggcatgtgcctgtagtcccggctgctcggaaggctgaggcaggagaatcgcttgaacccgggaggcggaggttgcagtgagctgagatcctgactgcactccagcctgcatgacagagtctcaaaaaatctgtctca

SEQ ID NO: 234697 - DNA, 338 bp, Homo sapiens
aagaaaagagaatactcagactacatatattctgggaaagttaaatactgtttatagtaaggatactgttcagtgaaaatacttgttttcagttgcatgtatagtatctcaggttatgattgaaaatatatttcatactatggattatattaaaaaatttgaagtggggtaagaaataaaaatgttctttattacagactcataattaaattttctgtcccttggatagaggttgattctagaccgtaaataatagtaaatcaataatatttaaactcatgattcagcagagtcaggtggtgtgctgtctttcatatttccttctcaatagtttgatg

SEQ ID NO: 234698 - DNA, 301 bp, Homo sapiens
tacaaactgaatccgcaagttctatttgtgtaataggcaatctatctacgacaagatttgatcgatggagtcgtatgatgcccttgccttgttttatattggctgtcagcgcttaactgggactgaagtatctgggtaacaaaaattgatataatgacttaatgcgccttattctctttgagctacatcagtttagagcacttctgagagaaaaatgtctggaaaatatcagggagtcatttatcaacctgttttcattagcatactgcctagctctggcaaggatttgaataaaaaaaag

SEQ ID NO: 234699 - DNA, 498 bp, Homo sapiens
gagaagggcattgggagaagggcattgctgggagaagggcattgctgggagaagaagggcattgctaggagaagggcattgctgggagaagaagggcattgtggggagaagggcattgcggggagaaaggcattgctgggagaagaagcgcactgtggggagaagggcattgctgggagaagggcattgctgggagaagggcattgcggggagaagggtattgctgggagaagaagggcattgcagagagaagggcattgtggggagaagggcattgcagggaaaagggcgttgctgggagaagggtgttgctggcagaagggtgttgctgggagaagggcattgctgggagaagggtgttgctgggagaatggcattgctgggagaggggacagccagcgagagggctggcgagtgggagggaagaggaagctgcggtagtaggtgtgtgcacactggcgaagctgagaggcttggaccttatcccaacagaaggat

SEQ ID NO: 234700 - DNA, 780 bp, Homo sapiens
ctcattaaataaattaattgtattaggtttatgaaagaataatggtagaaagggaaatatttagcagaagcatttttttgcttcattattttgaattattaagcacttgaaaatgagattatgataattaatgtaacatggatattctaattatacttttttttaaatcaggaaaatgagaacatatatgtatataaaataggctgtatgtggaaacattttatgttgaatattattgtccatctctaacaacaataactttgttcgaaactgtcttatgttgacttgacagaaatgaaagtcacatggtgtttggtgacctaaggtctagtttgaaatatttctgtgtctaattagttgtctacttgtattactatttatagaagagactagaggtaatatggtaatgagtaacatgaagcaaataaacaagtatctgctacttgaaaactagaaacaggatgtggtgcagatgtagaatttttttctaacagctttagtagtgattatacttgaagtcaatcttaccagttacatagcaggctcactatatctggaatatgtcactcttcacatacttttttctattttgaaagaagctgtttatcaaagcagcatactagttttacctgtaaaagctctacagaaacattactaggaaaataatgactacatgtatgtatagaatgagaatcacttgaacccctgaggcagagattgtagtgagccaagactgtgccactgtactccagcctggccacacagtgagactccatctca

SEQ ID NO: 234701 - DNA, 205 bp, Homo sapiens
gtattttactagagacaggatttcaccatgttgcccagagtggtctcgaactcctgagctcaggcgatccgcctgccttggcctcccacagtgctgggattataggcgtgagccaccacgcccagccaaattctatttttttaagaaacaactcaacccagaaatctacttttgtgtcccttctgtcgtcttctgtttcctttga

SEQ ID NO: 234702 - DNA, 283 bp, Homo sapiens
agcttttgggggaaggatttgaggcactgttgagcttgctcggccgaccctgttcccaaggatgccggggcatcattgttcaggacagagcaggggagcagcgtgctggaccctgcccacgtctctgcgttggggatagaggggaacctgctctccccagggctctgggcacagccacgcctgccagaggagagcttgaccaggcctaaggctggggtgccacttgcacctcagggtcttcagagcagctgctgaaagtggctccgacatctttactgacttt

SEQ ID NO: 234703 - DNA, 296 bp, Homo sapiens
ttttttatataacagagacctgtagaaaaaataaactaactttcatattaactcaacagttcattacaagaatcaagaaatcaaaggaaaaaaagtagtcaagagaacaagttaaaaacgaaacatttaaatgtacgctattgatttgactcataacattaatgatttatgattaatataattcaaagataaaagacaaaatgctgggtgcagtggtgtttgggtggctgaggtgaggggaatcacttgagcccagaagttagaaagcagccaacataacaagaccccattctcct

SEQ ID NO: 234704 - DNA, 474 bp, Homo sapiens
agttagccctccagagtttcccccaaagttttctccagtgaattacagtgccatatattctcattgctaccagcgctgctcccaaaatctatctgctgtttaatagtttttacctttcaaaaatgcaagctggctgggcgtggatttttgaaagcattcctcctgccttggcctctcaaagtgctgggattagagggtgccttctaatcccagcaatccagcacttggaaaggtcaaggcgggaggaatgcttgaagccaggagtgtgagaccagcctgggcaacatagtgagaccttgtctctacaaaaataaagtataaaaaaacagctaggtgtggtgatgtgtgcttgtagttgcgctactggggaggctgaagcaggaagacctcttgagcccagaaggttgaggctgcagtgagctaggatcgcaccacagcgctccagcctggtgacagagcaagaccctgtctcaa

SEQ ID NO: 234705 - DNA, 406 bp, Homo sapiens
gcatggatctgatgaaactgagaggaccctgcttcggcttcaggatctaaaccctcaagagttatttgtacaaaatgataagcagctaacctctgcaacacataaagcacttgtttaagaaaaggatcaaaactgccccaaacatacagacagaccgaaagaatcagcacacacggagaaaacagttcaaaccctgttggtcaccaaagcccaagttcctgtggcttcagcgtggctgccaggacgcagagcagttcttgcagagctgcggagacatgatgcagcccaggggcaaaaccacagctgtaatctactctggggaatcgccccaagaaacagccaggggcatcccttgctcaaggacattgtcaggtacaggttagctggaaagctgctgagacctcgg

SEQ ID NO: 234706 - DNA, 471 bp, Homo sapiens
ccagtaaccacattagtcccagagccaagcaagaaagcacgtggggtatttgggtacctgaaatgggccggtttggccaaattaagtgatgtaggtatgatccaggcctcaaagccacaataacggttttgtttttgtttttgatgaggtcccaactccagcctgggcaacagagcaagactctgtctcaaaaaaaaaaaaaaaaaaaaaaaaaaaaaaaaaaaaaataagaagcagaggaagattagaccggcacatacagaaaaggccacgtgaagacggaggcagagattggaatgatgcggccacagggccaggaaacaccagggcatggcagccaccacctgaagctgaagaggaaaggggcaggttttccccgacagtctccagagggagcgcggccttgccgtcatcgtgatcttggacatctggccttcagaaccatgagagattaaatttgtttgaagccac

SEQ ID NO: 234707 - DNA, 464 bp, Homo sapiens
tttaagaaaaacgtgattttaacatttatattatgtttataatctagatgggtatacttctttacactgctctagctgtgttcattgcaagataggaaattcttctgaaaacctttactgaactactgttgtcttagatcatttgtgtcatgatgaaattagcctcagagctatatttttgtgtattattcctccatttcccctgtagcatttgtactaagaaagatgttgaaaataagagttctggttctcatgttaatattatggccctgagacacagtgtcaaagtcatacaacgtccccaagctccatcctgtttccccaaacattaaatagggaagttaattcttaccttatcacacacggatgtttagagaatgaatgaaaaaaagtatttgaagcacgttgggggcaggtgtgtgtgtggaaaggctgcataaaaccaagatactgattttttcctg

SEQ ID NO: 234708 - DNA, 738 bp, Homo sapiens
ctgtctgttcacctaagtctaatgacactccacagcgtcagtccatcactgcttgaattaaataactttccctctatgcactcaaatacattcatgctccctgtgatttgtacaaaggcagggttaagaaataaacttttagcttggtgacataaatgcaagctaacattttctccctctttgaaggtggtaggaagtaaggagaaagtgagagaaaattgcttgacaagtaaataaatccccacctccttcataacttcctctctgtgctgtactcactctgaatgccaatttaattggtcagtttttctgcctcatctagacttacatacaagccgaaagtgatgctttttacatttttagctttttctaaataaaattatttctttacatttttgaggggctgggttgtgaatctcacctaagggagttcaaataaacatattttttcaaacccagtatattattaaaagttgtattagtgatccttgattaaactagaaggtaaaaacgataataaaaaggccctgcattatagcaaacacaatggttaatgtggcataaatcatggttatgagactctggcctaataatattcattttttttttcctccagccacattctcagcctcagctccttcatctccctctgacttcaaaggaatctctgcatgaagaaggagggcgcacaatagaagaattggcctcgttgacctcagcggtggagctcaaagaccg

SEQ ID NO: 234709 - DNA, 1237 bp, Homo sapiens
ctgtctgttcacctaagtctaatgacactccacagcgtcagtccatcactgcttgaattaaataactttccctctatgcactcaaatacattcatgctccctgtgatttgtacaaaggcagggttaagaaataaacttttagcttggtgacataaatgcaagctaacattttctccctctttgaaggtggtaggaagtaaggagaaagtgagagaaaattgcttgacaagtaaataaatccccacctccttcataacttcctctctgtgctgtactcactctgaatgccaatttaattggtcagtttttctgcctcatctagacttacatacaagccgaaagtgatgctttttacatttttagctttttctaaataaaattatttctttacatttttgaggggctgggttgtgaatctcacctaagggagttcaaataaacatattttttcaaacccagtatattattaaaagttgtattagtgatccttgattaaactagaaggtaaaaacgataataaaaaggccctgcattatagcaaacacaatggttaatgtggcataaatcatggttatgagactctggcctaataatattcattttttttttcctccagccacattctcagcctcagctccttcatctccctctgacttcaaaggaatctctgcatgaagaaggagggcgcacaatagaagaattggcccgattatccccttctgtttggaaatgggtgaagattacagatatgttttacttcttcctgtgctttggactatatgatgtcaactaccttaagcaaaaccctctaccctggctaatatatagatttggattataccaaaattgcctaaaattggaaacaagacattaataataatctgtaatggtgtaacataatagaatacatgtttattttcattggctttagctggtattaaaaaaaggtaaattagtttggagatgtaaattttatatttattatatcctgacctttttgctcatcctctaccactttatattatgaatgagataattaaaaagagtccacttattttttgttctgctatagcacatttttgcttccttaaatgtgtttgtgtgtatgtgaatgtgtgtgtgtgtgtgttgtgtgcatttattattttaaccaaagtgtgaaaatgaagttgtaatgctaaaggccaaaggaataaaacctggcctcgttgacctcagcggtggagctcaaagaccg

SEQ ID NO: 234710 - DNA, 812 bp, Homo sapiens
cgccccccgattggcttgtatagatacaacttctccgggatttccagggacccagccctgtgcataaccagaatcctgaagttgttgtgcctgaatggagtaaactaaatgtcagaagcaagtggttctgaggagtgcaaggggtggcctgcagtggctgctattggcatccttcttgttccccagcggctccacattctcagcctcagctccttcatctccctctgacttcaaaggaatctctgcatgaagaaggagggcgcacaatagaagaattggcccgattatccccttctgtttggaaatgggtgaagattacagatatgttttacttcttcctgtgctttggactatatgatgtcaactaccttaagcaaaaccctctaccctggctaatatatagatttggattataccaaaattgcctaaaattggaaacaagacattaataataatctgtaatggtgtaacataatagaatacatgtttattttcattggctttagctggtattaaaaaaaggtaaattagtttggagatgtaaattttatatttattatatcctgacctttttgctcatcctctaccactttatattatgaatgagataattaaaaagagtccacttattttttgttctgctatagcacatttttgcttccttaaatgtgtttgtgtgtatgtgaatgtgtgtgtgtgtgtgttgtgtgcatttattattttaaccaaagtgtgaaaatgaagttgtaatgctaaaggccaaaggaataaaacctggcctcgttgacctcagcggtggagctcaaagaccg

SEQ ID NO: 234711 - DNA, 396 bp, Homo sapiens
atgctggctaatacccacaggaacactgaactccactgtgtgggagcttgaggggcctgtgctgcccatgccgagtgtccaccatctcacactgcttctaacaccttcaagccatctcctgaatctggaatagtcatcatgagctggaggcttcctcagaagaaccctaaaatcaagggggattctggtgccaagaaaaatagcccaacccagcttcacagctgtgagcctccaatgcgccccaggaagctgccatcaccatgggtagcgcgacctggcttgattttgccaaaacaaaggaaaattcctccagcaatttctgtgaatttgttttgcaaaactgaattgtctgcttttaattcccctataccaattaaataaaaattggaatttaaa

SEQ ID NO: 234712 - DNA, 317 bp, Homo sapiens
aagaaaaccaaagataaatttctcatagttcttgctgcctactttagcaaaatctgagggagaatgttacacatttgttaacagatgaaaaataactcagattgtaaatttcccccatcacaccccttttttacatcttacaccatataccaagtttctgatccaaattgtagaggaaaagttatgttaaattgaactctattaaccaatgaatgtatttctgtaataagtatactgagaaagttttaaaaagaacaaaaggatctcattgcaatcagatgggcctgggcttcgctttgttttgcaattagtttata

SEQ ID NO: 234713 - DNA, 426 bp, Homo sapiens
gcagaatgaaatttctaatttgaagtgacattttcattaaatgtcatttcaaattccttgcctatatagtgggagaatgctataagaggatcataagtatttgtaatattatttgccataatttaataaattaatgaaattacaatgaattttagtgttactcatacttgtaaaattataaatattatacattgtatagaatagttactttagtaagtttcatcagggtactaataagcaggtggcaattgcttacacagggaattttataaattaaattgtaaaattacaacccttatcttagtaagttacttcacaagtgtactttattggaaaaaatatgatatggatgcttctctgtaatacatcgccatttctggaaaatgtaactcaaatttatacctagctaattgtaagtcatcattg

SEQ ID NO: 234714 - DNA, 570 bp, Homo sapiens
gacaaacaaatatgcacaaactgagagacattttacttattggagtttctcacgtagttgggtaagaaaagttatagctagataaggaggaacagtgttcaagtcaagaaagagttgctacatcttctgaaaaaaattctatgaattagaaagagaacattgttttaagataatttttaacattaaggtttaagaaattcatttaatctaaaagtagagaatttaaatgaaaatgagtttgagatattgttaaaatctctataaaaattacataaacatgggctgggtgcagtggcttacgcctgtaatcccagcactttgggaggccaaggcgggtggatcagctgacttcaggagttcaagaccagcctggccaacatagtgaaaccccatctctactaaaaatacaagagattagctgagtgtggtggtgggtgcctgtaatcccagctactcaagaggctgaggcaggagaatcacttgaacctgggaggcggaggttgcagtgagttatgatctcaccattgtactccagccagggcaacaagagcaaaactgtctccaacaaaa

SEQ ID NO: 234715 - DNA, 752 bp, Homo sapiens
tcatcttgctctgtggtctaaaaatggggcagcagtttggagcatgacagagtacagggctcattctctttttcgttcaacgagtaaaaataaatcttgaaatttgggcagaggagaggccgcggtgccaggagtcccagaaaccttcccttttcaagtagtgtctggagcaccgagccacgcccacacctactggccaagagaagtcaccagcgtgctcccagtgcctcccaaggtgccggcagctgcctggctgcggctggggaaatgcagactgcgcttgagggctcgcttgccgccgtcctggaggggctgttattaagccttgttctcaggtttcatattgcatagaaatgttaccttacagcttaggaattcggcgtttccctctaaaggtggcactgtcaagtcttcttaacataatcatcatttagtccattttcagtcatgcagtccacggggaagctttagaaacaaccgaggcacacgtgtttggactgcaggtaagaagagcaggcaggagggaaaacacaccctcaacgcagttaaagctctgcttctttaacacacaccgaactgtcccaaacccaggcacagccaagccagggcaggtcagagctccgcagaggtggaggccgaggtggctctgagcagctgcagcagctgggcgggaggggcctggggagaaggaagcctcagaatcgccttaaaagaggaaaccgtgatgtcactcccaaggctgcctacttggc

SEQ ID NO: 234716 - DNA, 338 bp, Homo sapiens
cctcagcctcccaagcagctgggactacaggtgcgtgccaccacgcctgcctaattttttgtatgtttagtagagacaagatttcactgtgttagccaggatggtctctatctcctggctcacacctgtaatgtcagcactttgagaggctaaggcaggagaactgcttgagcccgggagttcaagaccagcctgggtaacacagtgagaccctgtctctaaataaataaataaatgaataaataaatatgaatgacttgggaagaatagttgtagagtttatttaaacctctgaaagcaactcaacaaatttttaaattagatttttttaacaagat

SEQ ID NO: 234717 - DNA, 365 bp, Homo sapiens
caacatggagaaaccccatctctattaaaatgcaaaaagtagccaggcatggtgatggtgcacacctgtagtcccagccactctggaggctgagacaggagaatcacttgaacccagggaggcagagattgcagtgagggagatcgcgccactgcactccagcctgggcaacagagggagactccgtttcaaaaaataaaaaactatggtgactagaggcatctggcgttttatttttctccagtcccagttctataagtcaagcaagaagatgggcagtccctggaagagtattttgatgggacaggagtgggagagctcgtgggtttacattgctctcaactgtcacattgagcatgcttggc

SEQ ID NO: 234718 - DNA, 910 bp, Homo sapiens
gcgggagcgcggcccggggtcgctggggaggccgggtcaacggccactgacatcctcccggcgggctgccgagtcctcagttccgagaggaaacgagagggatgagggccttgagttgttccaccgactgcgagagggcagggagcgcacagtgtttgctccattactgcagatcgccctcgccctgttaaaagatgccctgcagagacagccgaagagcaagaaaggacttctgggcctgttctgcggctgaagttgtgccttcgctgcctttcatttatccagcatactacttgctaggtgttgagagcacatagtggaatgggacgctaaaattgcttgcagtctccgactgcttaaagctgggaaggtcgttaccactggttcaaacctattttacagatcaggcagctggggcttacagtgattagtgaggcgaccttcccacgatggcacagctcagtagtggaagagcggggactaggtcgaggttttgtggcttttagtcctgcatgtgtttggggtgactttctgctgacttatactgaactctgtagactgtaagctccaggtgagccaggagtatttctatctagaagactatatgactttactaccttacattctgtaaatgctcaataaaggtgctcaaaaaataaacacaaacaacacaacacaaaacacacacccacgcgggacaaccatgctgcaggatcgacaataaaaacagcgaatgcgcagcgaccaaacggggaccagacggtcgctacaagtccgctggatctacagtgcacgaccggacttttctcggagtacacaaagtggttacaacattggcgccggacccccacaccatagaggagagccgatcatagaagacaagacaaacacagagttaaccgcgctccag

SEQ ID NO: 234719 - DNA, 530 bp, Homo sapiens
tctattaaagcattagtggataacactgaaaccatgatatttaaggaaatattggctcctaaagacatccgtgtcaaatactgtacaatttgcatttgattcttacacacccaacattatttgaagtgaacaccataataagatcaggaatgctgatgaagtgtaaaacagtagctgtaaagtttacaagatgtctcagtaacatgaagcctctcaagtgatgtctatgcactaaaagaaagcaatctaagatatcagttcctcggaatatccttttcatggctgaaagtgaactctgctcatttcaggactgacccctaagcatactacagagatggcataatgctcttgaccccctagctggtccagtagtataatgtgataccacatcagacctcaacaggcataagaatagtatttcatgggagccagcctgcagaagaaaggacgctgttcatttctggaccctacctcttgctaactttgtaatgttggacaagttattaaactcatcaaatctgttaaaaaaa

SEQ ID NO: 234720 - DNA, 910 bp, Homo sapiens
tctgaagaatattatagaaaacttggaattcatccataatacaaatatgaagctaaactattaagagtagatggaatcaacaatgaaactagtattttgaaggcagagatcggacataagatatcctaaattcagcctacaaaagcggtactctagaaacatctcagataaggaaatacacagggcctttgtaattttttaaaataaaagtttaaaaggcttcattactactttggtactgtgagttgaatatccccgtttcaaaaatccaaaatgcagctgggtgctacttgagggactgaggcgggaggatcagttgagccatggaggtcacagctgtagtgagccctgatggcgccactgcactccagcctgggtgacagaacgagaccctgtctcaaaaaaaaaaagaaagaaaagaaaatctgaaatgcttcaaaatcccaaactttttgagtatcaatgtgacactcaaaggaactgctcactggggcacttcagattttcagatatgggatactcagctatgtaagtataatgcaaatattgcaaaatctgaaatctgaaacactgctggtaccaagcatttaagataagggatactcaaccagtaatagcattgctcgatggagaatctcgttttgaatcagagctctttattaattactctgtaaactagaataaatcacttaatttccattttttgtctagagagctttgagatatgtgataagtacaaaaggaatataaatctgaaaaacattataatgctttgtgtttgttggttaagctggattttagatgttcctgctaatggtatagtcccatgtgaataccacatcgataaatctaaatatacattaggtaaatatgttttttcttgtgggaaaaaatgggaatgtttccattc

SEQ ID NO: 234721 - DNA, 590 bp, Homo sapiens
gggttatctcttgaatgaacatacaggtatcccaatttctgtttttaagagcctgggtgacagaacgagaccctgtctcaaaaaaaaaaagaaagaaaagaaaatctgaaatgcttcaaaatcccaaactttttgagtatcaatgtgacactcaaaggaactgctcactggggcacttcagattttcagatatgggatactcagctatgtaagtataatgcaaatattgcaaaatctgaaatctgaaacactgctggtaccaagcatttaagataagggatactcaaccagtaatagcattgctcgatggagaatctcgttttgaatcagagctctttattaattactctgtaaactagaataaatcacttaatttccattttttgtctagagagctttgagatatgtgataagtacaaaaggaatataaatctgaaaaacattataatgctttgtgtttgttggttaagctggattttagatgttcctgctaatggtatagtcccatgtgaataccacatcgataaatctaaatatacattaggtaaatatgttttttcttgtgggaaaaaatgggaatgtttccattc

SEQ ID NO: 234722 - DNA, 973 bp, Homo sapiens
accaaaatgtaatttagtcaggagaataaagaagttacccctaattttcataatcatttaagaaaaaaataaaaggtctgtaacttaccctcccaggactacttttaactcatcatttttacatatattttatctcaagtatactgggaaaaactcttaggttttctttacagaatatttcccaacactcgctggaaatgactctagaacattcttctacactgtcaagacccaatcagaattacaaaccctaaaataaactaaaaagagggtgagtggtaaaattaaaataaaagcataaaaatgtgaaaaaaaagaaatcagtattagataaaatgaatttatggtatctctcattattggtaggaatttttggatccaccttctggctgtatgcaaacttcataagcaggtcttccatgggtggatccaagctattttctttcaatgttggaaagagtatgctctgacccagtcctgggaaaaatcccaagaaatttccttttgggtttatccgctaccccccaaccctgacacaatccactgctcagcagccttggtgtgtggttgctcagctatcatccatcgtgtaactgcagcactatttagtccctatttttctctctcatctacaaggacagtcaacgattcattcaagaatcatccactgaacacttacatgccaggccctgaaagtgctggaacaaatggcatttgaccctgacttccaggaaatccctctgaacccatccacaggccagcacacaattagtatagaaatgtgatgaatgcagcatgatgcgtcatcacgcagcccgatttcacctgtgccgccttttgctggaaattcaatataactgcatgcccattatttttctggatttagcaatctaattagcaggtaaaaaagcaaaagcctgcggccttttctttctttttttttttttttattctgagaaagggtctcactctg

SEQ ID NO: 234723 - DNA, 374 bp, Homo sapiens
aatgaatgtatacatttattgagtatttactatacagtaggcacctggggataccacatcaaatatattatagtccccatccacttggagctaacgcaagtgatgaaattatgcctttttgcccccttaacaattcagtccaaaagctcttatgtcgggccaagcaaagtaggcaacggtgaggaggaacggctacaggtggagagacacccgtacaggggctgggagccaccaaaagggcctgctcttcggagaaatgctgaattcagagcagggacaagaagtacaaaatgaacttgacatatctttttatagaaaaaggttaaaaagtatgcaaagaaaccaggttaaaggggctcccactggccaagtca

SEQ ID NO: 234724 - DNA, 575 bp, Homo sapiens
gtggtacatgcttatatttaagatcatggaaggcctgcaatagaaataactggagaagcccagggctcaattcttagaccgtctttttcctccttcctttgctaggtgatctcatccagccttgaggccctgcaaatcatcaataggcaggtgtatttcaaatttataactccagcctggacctctatcctgaaatacagcccccttctcaacatcttgataaaattggatatctaagaggcatgagactttcaaaaaactctggacttttcccacagacctggtacttccatggtttcacccatcttaatagatggcagccctgctcttttggtatctcaagccaaaaccttcagagccatcctttaggcttccatttcaaatgtaatatctaattaatcagcaaatcctacaccatcagaatatacccctctctccatgtccattactatttactttggattactgtagcaccttccaatttgtctccctgtgcccatgcttgtcctcacaaatagttcctcaatatggtagccctggtgtgctttttaaaatttaacccaatttattttctc

SEQ ID NO: 234725 - DNA, 355 bp, Homo sapiens
ggtccagactcctgtcaccagcatgagactttcaaaaaactctggacttttcccacagacctggtacttccatggtttcacccatcttaatagatggcagccctgctcttttggtatctcaagccaaaaccttcagagccatcctttaggcttccatttcaaatgtaatatctaattaatcagcaaatcctacaccatcagaatatacccctctctccatgtccattactatttactttggattactgtagcaccttccaatttgtctccctgtgcccatgcttgtcctcacaaatagttcctcaatatggtagccctggtgtgctttttaaaatttaacccaatttattttctc

SEQ ID NO: 234726 - DNA, 1249 bp, Homo sapiens
ccaagctcttcgcgcccgcctactgcctctcggtggcctgtacaggccagctctggcggtagaacagcctctgcaggtcccgctcttgcctcccaggggcctctccaggccaagctctcgcccccacggcggcctcccggcagcccgcgtgcggcccagttcctccctcacggtggcctgttgatgcccaactcatgccgctggcaccctgcgcagaggcgtgagtccctgcctcacactggctcctcccacgctgagagaggtcggcgtgagccctttgcctcacaccggcccctcccacactgaccccttggctcacaccggcccctcccacgcagagagaggtcagcgtgagccccttgcctcacaccggcccctctcacgccgagagaggtcagcgtgagccccttgcctcacaccggcccctcccacgccgagagaggtcagcgtgagcccttgcctcacaccggcccctcccacgccgagagaggtcagcgtgagccctgcctcaacaggccaccgtgagggaggagcagggccgtacgcaggctgccgggagcaggcagggacttggccgcgggaggcgtggtggggcgagagctgggcctggagacgcccctgggaggcaacagcggggcctgctgacgctcttctgctgccagagctgggactgtacaggccaccgggaggcaggatgtgggcctgaagagcttggctgcagaaacttcggggtctacaaaacgctggagggagctgagccaaaagagcttgcctgctgggaggcaggagctgggccgagagatgcagccaggaggaacagctgggcctgcagaggccgccatgagggaggcagaggccgggcctcctcaagtcggcctctccagacccacatgcagcctcccggcgtcctctccgggcccagctcttcctcccggctgcgtctccaggcccgactgctgcctcccaacaacctctttggactcagcgcctgcccatctcctggcggccttggtcggcccacagcttcctcaagccaagctccccaggcccaggtcaggcctcacggtggcctctccaggatcagctcctgccctccgatggcgtctccaggccccaaacggtctccggtcggtgggctcctccgcgcccagcttgggcctcctggcgacctctgcaggcccaagtcgtcctgaagtcggcgtctcccggccctgcctcccagcaagtaagcaagctctttgggctcaag

SEQ ID NO: 234727 - DNA, 949 bp, Homo sapiens
ggcaccctgcgcagaggcgtgagtccctgcctcacactggctcctcccacgctgagagaggtcggcgtgagccccttgcctcacaccggcccctcccacactgaccccttggctcacaccggcccctcccacgcagagagaggtcagcgtgagcccttgcctcacaccggcccctcccacgccgagagaggtcagcgtgagccctgcctcaacaggccaccgtgagggaggagcagggccgtacgcaggctgccgggagcaggcagggacttggccgcgggaggcgtggtggggcgagagctgggcctggagacgcccctgggaggcaacagcggggcctgctgacgctcttctgctgccagagctgggactgtacaggccaccgggaggcaggatgtgggcctgaagagcttggctgcagaaacttcggggtctacaaaacgctggagggagctgagccaaaagagcttgcctgctgggaggcaggagctgggccgagagatgcagccaggaggaacagctgggcctgcagaggccgccatgagggaggcagaggccgggcctcctcaagtcggcctctccagacccacatgcagcctcccggcgtcctctccgggcccagctcttcctcccggctgcgtctccaggcccgactgctgcctcccaacaacctctttggactcagcgcctgcccatctcctggcggccttggtcggcccacagcttcctcaagccaagctccccaggcccaggtcaggcctcacggtggcctctccaggatcagctcctgccctccgatggcgtctccaggccccaaacggtctccggtcggtgggctcctccgcgcccagcttgggcctcctggcgacctctgcaggcccaagtcgtcctgaagtcggcgtctcccggccctgcctcccagcaagtaagcaagctctttgggctcaag

SEQ ID NO: 234728 - DNA, 209 bp, Homo sapiens
aggcaaaagatttctcatctttattgggtgttctcaccccaacctgggttgtttctgctatggaacgagtccaagaaggtgaaggtttctgagccttcaggatgttgacaagggtttcctctatgttgtctctctgacatttagtgaagttgggattctggtaaaagctttcattatattcatagggttgctcccttgtgtgtgttctc

SEQ ID NO: 234729 - DNA, 670 bp, Homo sapiens
tgagactgagttgctcactttatatttatgttcagtgttcttcctgtaaataatactactttacatttaaaagtatgtaaattatggttttttgtttttgagacaaggtcttgctctgttgcccaggctggagtgcagtggcataatcatggctcactgcaacctccaccttctggactcaggcgattctctcacctcagcttcctagctgaggcttacaggcgctagctaccatgaccgactaatttttttttgtatttttggtagaggcggggtttcaccatattgcccagggtggtcttgaactcatggggtggtcttgaactcatgggctcaagtgttctgtctgcctcggcctcccaaagtgcttggattacagttgtgagccactgcggctggcctgtaaattatgtatcttttaagaaaagaaaaaatacccagaagatagctgtgaatggaataccctccacctggtggattccattcctcacttaaaactcttattactttctgtgggaaaaatgaccagatctgtttctaccccactcccattttcccaacctagttcatcatccctctctgctcccaaagtactgtgtaacttcctctattaaaacattttcaggttgcattatgttttggttccatatctgcccattagtctatctaa

SEQ ID NO: 234730 - DNA, 350 bp, Homo sapiens
gccaggtcataggagaggaggctaatattgtggacaaaagcaaggggctaatatttggagtctaggaaaaggaaaacaaagaaccagcttcagtccctaaaaagttattctttatggtaaaaggacttgtatctcctctgacagacattctggctcctggaatgggtgagagcagtaggccatggattttttgataaaggggatttggaacccgaagggagatcctcacctgcccagctgaagtgggcagtggctctccctgcctggaggatgcattgatgagataacttcctgagctttgatttcataatccgcagccccctgcatagactggacacaggaaggactgc

SEQ ID NO: 234731 - DNA, 470 bp, Homo sapiens
cgctttgttttttgaacagatcaattactcacagaaacagcaaccttgagttgatggtggttttttcattaaatcacctacatcttgacccttaaacaggcttctctatgtgtgatctaatatatatagtgtttatcagtcagcaggagaagatatggctgtgttcctggaataaattttggaagcaaaaaaaaaaacattctacaaattaagcatagtttattaaccggtgaataattgaaatgagtgaaactttttttcattttaagcctgactgataaatgtagacttaaattggtttatttttgagcacagtgttggacaagattcaaaactttaattatatccctgtaacatgaagacatttgagagtaatcagataattttctctagattttatgttctttacccaaagtggtttggaatgctatttgagagacatgaaaaatatgacaaagaccatcaaaaat

SEQ ID NO: 234732 - DNA, 572 bp, Homo sapiens
aggtgaggagattttcaaacataaaacaaattgcagtggacaagaaagagatggagataatggtacttggacaatgataaggaagcttactggaaattttgagagaaacattttagtacagtaaactgggtggatgctaaaccacatggaatcgtgtgtgaagtaggtggaaagaatatggaaataccaggtaaagctgattagaatgtggtaactgtatgtggaaggggcagagaggtagtcaggaatgctttccagaagtttctaaaacttcagggaagaatgagtggacataaaaagagaatgaaatccaatatgatcttactaggttggttgattttaaattttttttctcttatctgcatttttcatgttttctacagtaaagatgagtccttggttatgagacaaaaaatattgttttgacatgaatatgtcacacgtttaacataaatacaaattatagcatttggttcatgttttacaaagtaaaaaggtcttaccctatctcatgtaagtaaaacaattggctgttaatatgtttctgaatcaaataataactctgaagtatg

SEQ ID NO: 234733 - DNA, 295 bp, Homo sapiens
cagcaaccatgtcatttctatgaacatatggacccaaggctcagaaggaccgagtcataaagtgtgaatggcatagaggccttttagtgctttcatactcaatatggccttttagctcccctttttctccctcttttttcaacccaagacctagtggagtactagagctgcttgtattctggttgttaatctttcaggaattttgcaagctgattgttaattaagtacagtcagtattaaaaatgatatacatttacaattaaataaattatatttaaagcaaaggtcaaaagta

SEQ ID NO: 234734 - DNA, 404 bp, Homo sapiens
atccagtattattattatatgtctgctacatttcagatattgtcaaagattgagggattggtgggtcaaagaaatgaggtgattaagacccaatccctgttttatatgaagtcaagctctacaagttgcatgttcttggtaatctcttactgactaccaattgactttctaaatatttgctgagtactttctccgtgtcaggcactgctgttaacagtggaatacaaagtgaataagattcatgcagagtacttcctgtaataccagctactcgggtggctgaggcacgagaatcacttgaaccggggttgggggcgggggggcgcggaggttgcagtgagcggagattgtgccactaccctccagcctgggcaacagagagagactcactctctctcaaaaaa

SEQ ID NO: 234735 - DNA, 521 bp, Homo sapiens
caaggccctgccaacatgggcctcattcgcaccaaaaccgtgaagaaggcggcctggggcatcatagaaaagtactacatgtgcctgggcaacgacttccacacgaacaagcgcgtgtgtgaggagatcgccattatccccagcaagaagctctgcaacaagatagcaggctatgtcacacatctgatgaagcggattcagagaggcccaggaagaggtatctccatcaatctgcaggaggaggagagagaaaggagagacagttatgtttctgaggtctcagccttggatcaggagataattgaagtagatcctgacactaaggaaatgctgaagcttttggacttcggcagtctgtccaacccgcaggtcactcagcctacagttgggatgaattataaaatgcctcggggacctgtttgaattttttctgcaatgctgtattattttcaataaatctgggatgcgcgccagccctaccaatactataatcgatcaaaagaaaatgagatatacgagaa

SEQ ID NO: 234736 - DNA, 107 bp, Homo sapiens
ctaaaccaggtcctctttctgtgcccccagcccggttgacaatgtgtgccttcactcacccaattagaaaccttggaggtatcctgtactcttctgtcacttaccct

SEQ ID NO: 234737 - DNA, 413 bp, Homo sapiens
cagtgaagcctgctggggaggtttttgggaggagtcttgtatccttagtctgcttctaagcatttgaaactactgataaccaaatgaatctgataattttgactggcaaaattgagttaggttaattcataacagtcaaggcctgagaaaattatcttgggccactggagccagtactgattaacattaagtaggcagtaggctgctatggatgggcgcttcttaccagttgctagtatgaaagactattgatgtcattctttggcacaagcgacatgattctcacttgaatggatccagaagttttagagtttctgacttagtatccgtggtgttcccatgggctgacagtataaagtgccactccagtgggggctggctgttccctggatgatgacttaccttcattctgc

SEQ ID NO: 234738 - DNA, 356 bp, Homo sapiens
aagtatgcttttgtgataaattttaattgtataggctgaggctcaggacatttagcttgtgtatctccacttttatattttatagattttctttagagccaaatatgagatcaatttttacaaagattctgaggacaaaataaaatgatgtttatttttcattggtaagacactgaattctacgtatgtacgaaatcaagctcgttaattgtaatattgagattctctatgtcgtttatttttgttttactagatctccgaaattcagaagtaattaagcccaggagggcgagactgcagtgagctgtgattgagccgctgcactccagcctgggtgacagagcaagaccctgtct

SEQ ID NO: 234739 - DNA, 687 bp, Homo sapiens
attgaaaaaacatatatttcaaagtttttttttttaatttaaggaattgaaagagcagaaaatatatactaatcattcttcttaagccctgtgctctgtttcattttccaaaggcgtctactctcagtggtttgtttttgctctttttgtggttatggttataactaaatatggtaatcatttacctcgctttgttgctgcatttacctgctatgaagtatgaggaatttagtttacttgcacttctactttcaaaattattgtttatagcctcaatattagttctccttgaatgatgcatttgaactccctatttgtattgaaatagctactatcttctactctgaaagatgaataaattaatgcacttactttggacttctttccatctctgttcttgattgtcttttagttatataattgttttacactgtcaagaattataattcttatatttttgctgaaactatttttcatatctcaaattataagtattgagtatttgacttcaatttgtataatcaacttatgtacaaagcatggaaggattaatccactgtagaattcatggtgtcatgtgattgatgtcaaagaaaagagaaaatatgataccatgtcatttaaactttaccacttgaagaaaaatttcacaagtgcctgaatataataaattttattttaataaat

SEQ ID NO: 234740 - DNA, 834 bp, Homo sapiens
tgaggtctttgagtccattggtataattttttattcctatagcaataccatactgtttcagtcactaaaaacttagtaagttttgatatccccccttccaatttgttttgctgcaagagtgtcttggccattttttggccctttgctcttccatataaatttttaaatcacctggtcaagctgcatgaaaaactatgttctacttgggaaatggggtcctattaaatgtataaatcaatttggggagtattgataccttagagtaaaagtacttctatcagtgttgtttatctcttcatttgtttagatctcctttgatgtcctataataaagttttataatgtttttataaatatctcgcacatcttttggctagatttattcccatgtacttgctatgttgtcctcttctctccttttttgaaacttcagtgcagaaaaattgtcctagtcacacttaatttatggcataccatcatcactgttccacatactcatttgttttctttttatccccatatccttctttctacttcactctcatcccatagccaaccattatattgggtttacttaatgtgtgtcattttgtgttcttatagaatgtatattgtttctgcacatatatttttaatttgtgaaaatggtcttatatattgcattgtttctctttcacctagcactgccctttagatccatccaagtggttatgcgtacctctaatctgtgacttctaattaatgctctactaaggtgtgcatttaccatattttgtctatctattcactttctagaatacttccaactctctgccacaataaaaacactctaatg

SEQ ID NO: 234741 - DNA, 384 bp, Homo sapiens
ggcatttcttcttgtgtttgttttcaaatttgttgacaaagcttatcacatcctcttataatccttttaacctctgaagcatttatagtcatgtttctccttttcattcccataaatgcagtatttaattgcctggtgatttttaaattttttttgtagagtggggtcttgctctgttgtccaggctggtcttgaactcctggcctcaagcaatcctcctgccttgggcctcccaaagtgctgggattatagacatgagccactgtgcctggccctatcccttgtttgtttttctctctttctttttttcttttttttaatgatgattcttgccagagatttgtcagttttattagtcttttctttctgtctttttctatcttt

SEQ ID NO: 234742 - DNA, 388 bp, Homo sapiens
gcggccgcggcagcatcacacacttacacactcacagggggcggagcctggacagctagaagccgcgacatggagcagcaggaggaccaagcagaagcagaaggagccagcaagaggcagcactatgaacagaagtgcctgcgggaaggagagaagagacaagtggtgccggctgctgcttcaaaagaggggcaggggctttcccttcctgagatcaaaaccaagcaggaaggttgggttgggtggaaggagcccccacttcctagccactctcctcaaacagagatgaggttaagacaggcaacactgaaggggccaggctgtccctgaggcctctttggccgggcctggcacctgctcactgagcatcagctactgagcaagatag

SEQ ID NO: 234743 - DNA, 2187 bp, Homo sapiens
acttgagtggcagaaaatcaccagtgcaggcttcccaggccgccatgctgcaggagcagatggcagcagccggaggagctggtgagcagagttggggactcctgtttctatgctccccgtgaaatgcggggctttctcgtggatacgcgtgagcagaacatcttactatggcaaggacatgtccttcctggagctgcctaatttgtggccactttttgtctgattccctcgttgggtcctcacctgtgagacttgccaacacccccagccctccaccccacacacagcccacatgccggtctccaggggccgtgactggagattccgaatcctagcggtcacttccctctgagcacactcccagcagaaggcgtgtggctggggctagatgcacttgggtgctttgttcccctttctccatttgccagcccatggcattgctgccaccctgatggagcgccctctcatctggcaccttcctggcctctttcccaggccccagttctgtccatgcagctgtgggtgcttcctgcattgcgggtctcacggggaggagacgagagtgcccctggttgagtcaggaaagaattctatcttcacgtcgctgccagcaaatgaccacagcagcttcacgacctctgcaggaacctatcttggtaaagaaacggggcctatgtggtggccgagcctcaggtgtggccgagcttcaggtgtggcccttatgcacagcacagcccaagcctgtgggcaccactcgccctgggctgcctggcacctggactccttcccatccttggccgaggtctgcgtggcccttcagggccgaatctgacactgtcttcctcctgagtctgccccccgggcttcctgcccacccccaggctgtttcatggcctctgcagggagcttcgtagaggtgaggctggtgccatctgtctgcttcagaccacctcaggctctgcgtgccctcacagtcccctctgcacttctctgtggggcagggaagcccttcccatcaggtctgctccagcctggctaccttgttcctgctgtcccctccccttcaggcccccggacaagacttcagtgtacttgctggtgccgggcagaatgggggaccttgcctctcacacacacctgctagtatctccgcaacctccaggcatcatctcagctgacagtgacgccatcctggggaagctcccctgactcctggctctcctggaagcctgtggtgctccttcacaatggcccgtggcccttcataggtcccgtaagccagtgtcacagggattcggcttttctcttctgtgtttgcctgctgcgggactgtgagcagcttcagggccaagacagtgcctttccatccgtgaatctcctgatccatcagaatactcgaaagagaaataccgactgagtgtattcattaaagaattaatgttccttacaggatcattgttgttgaactgacctgacatgtgtatagtaatctcatgaacaagaaagaatgtgttcacacgtttgcttaaattgaatttagcaatcgcattaggatactgatatttccacaatgtatatacactatccttttaaatttaacttatttgctttttagacggaagctcctcagtcttagagagttctgaaggtggatttctcagccacgttcaacctgatgagttcactgcttcttccccaaacattgcagagctgcaggaaatttgggctgtgaacttacgtgtgatgtttactattatgcaaatgctcagacgacacacacgacctaccctgatggtttggaagttgtgcagtttcttaacaagcagacagatcagaccctctagttgcaggaaaaaaagctcagggcggtcgagtgcagtggctcgcgcctgtaatcccagcactttgggaggccaaggtgggcagatcacgaggtgaggagttcgagaccaacctggtaaacatagggaaaccctatctcttctaaaaaaaaaaaaatacaaaaaattagttgggcgtggtggatggcacctgtagtcttagctactcaggaggctgaggcaggagaatcgtttgaacctgggaggtggaggttgcagtgagccaagatcatgccattgcactccagcccgggttacagtgtgaggctttctaaaaacaaaaacaaaacaacaacaacaacaaaac

SEQ ID NO: 234744 - DNA, 443 bp, Homo sapiens
tttttcacctaccctccaagcaacaatcagcgaggctatcgaggtcaactggacttgccccaagaacacttcatggtcaatgtctgggtcaggaattgactttagccaactgtgccctctgttgtgaagccatcctagaaaccagtgcctcccatctgtgtgtgctttctagctctgaaaactaccaaaaagtccctgtatctactggaatatagctttgggaaaccaagaatgcctgcagcccctcgttcagcaggtacttcaatgcagaggaccaatgtgggcagaactgcactaccagcttgtgaatgaatgttcagatgggaagtgagcatcttttcccttatgttttgtgctaagaatactgtgatgttgaagcccagatactttaagatacatagacatttggaaaataaagaaaaggataaatgagaaaataaaaa

SEQ ID NO: 234745 - DNA, 1745 bp, Homo sapiens
  misc_feature (737)..(737): n is a, c, g, or t
tgtaaaatgtggacaataataataatgctaacagtaaaaactacctcataggattgatgtgaggattaaatgagctatgaaaacctcttagaaggtacctgttagctagtactcagctcagtgagtattaactgttttgttattaagacgtgtgtgtctctgccatttgtatttaacacgtgtccttgtgcctggcttacctccctgttatactgtaacctccgtaaggacaggcatagtgcccccttcttccttatctctttactgcttgtattagtccatcttgcgctgctacaaaggtacacctgaagctaggtaatttataaagacatgagatttaattggcttatggttctgcaggctgtgcaggaagcatattgctggcatctgcttctggtgaagacctcaggaagttgccttatggcagaaggcacaggggaagcaggcagtcacatggtgagagagaaggagcaatagagagaaacaggaggttctttcaaccaaccagatctcacgtgagctcattaccacggggagttcaccaagacaaggatgaaggatccgcccctatgacccaatacctcccactaggccccacctccaacactggggatcacatttcaacacaaggatttggaggggagaaacatccgaacagtatcactgcttttcggtgctgtatatacaatttgggccccatggttttggcatcctggatattccagtactgttcaganttcagagattcagctgtactttctaagctcagttattatgacctcagttcataattacttttgcaccaacataatatcagatcacgtatcccaatatggggttcagaaaaaaagtccctatcaataggtatcattggcagcctctagcagctttgctttctcttggcagagtgctctagcaatgcccaggagcccttctgcagaggctggacaactctcctggtgtttggcagccagctctgttctgcatgccttcggcacaatatgctttcacctgtccccaccctaaccccacccacagaatcctttccttggttttaataaacttccagctgtcttcgtccattttctgctgctataacagaataccacagattgggtcattgataaagaacagaaatgtaattctcacagttccagaggctggtaaatccaagatcaaggcacgggcaggttggtgtctggtgagcatctggtctcttctgccaagatgacacctagaatgctgcatcctctggagaagaagaacacgtgtcctcacatggcagaaggcaggagggcaaaaaggagccaaactccccacctctcaatactgttgcattggggattaagtctccaacacatgaatttgggggaaacattcagaccatagcatcaggcatggccaagttaagtaacttgccacctactgccaagcaacccaaactcaaaggtctgcgacctgcaagttcagataaggaaactgtctcaagcttccaagataataactggtgaagacagagtcagactgacccaagcaaaggggtgacagagctgcatgaacagaaattctctaaagatcagggatggaaaatgaaaaatcaaaatgaactataaaaacatgaacctgggttgggtacagtggcatgtgcctgtaatcccagcactttgggaggttgaggcaggaagactgcttgagcccagtagttcaagaccagccctggcaacagagtgagaccctgtccctac

SEQ ID NO: 234746 - DNA, 622 bp, Homo sapiens
cgaggttatatcatgttgtctagactgggagcacccttttttaatacccgaataatgattattgcacatatgtcccatgtatatttagccagtctccaggaggtgacttggagctttctataatcatgtagagtcattgatatcaagtcagaaaaattgctatggatttagaaacagaatagtcttatttacatattccctcgacttatcacaaaatagtttaaagttgtttctaacaattgtgcgtacaacacaatattataaacacatgagtagtgaaggggctgggatggtggtggcaggaggctcaaggaacagaatcccaaaggcttggtggcctggatctaatttgaactgctgctctgatctgtggtcttacaagtgatgtctttcatagcccattgccacggcaggccatgcaggctctttccacctcactctcagcggtcttatacttctgtggtcagctggtatttaagaactcaccttggcctccattctcacctgactgtgcactctctctggctatacatagagagatggactatataggtagagatatatattcttcacatctgtatctacttcctctgtctgtgtggatatagccatgcaattgtgt

SEQ ID NO: 234747 - DNA, 623 bp, Homo sapiens
cgaggttatatcatgttgtctagactgggagcacccttttttaatacccgaataatgattattgcacatatgtcccatgtatatttagccagtctccaggaggtgacttggagctttctataatcatgtagagtcattgatatcaagtcagattatcacaaaatagtttaaagttgtttctaacaattgtgcgtacaacacaatattataaacacatgagtagaaaaccaggagcagtgaaagtgaggcgccagtcctgcgacagagattaagcagatgaaggggctgggatggtggtggcaggaggctcaaggaacagaatcccaaaggcttggtggcctggatctaatttgaactgctgctctgatctgtggtcttacaagtgatgtctttcatagcccattgccacggcaggccatgcaggctctttccacctcactctcagcggtcttatacttctgtggtcagctggtatttaagaactcaccttggcctccattctcacctgactgtgcactctctctggctatacatagagagatggactatataggtagagatatatattcttcacatctgtatctacttcctctgtctgtgtggatatagccatgcaattgtgt

SEQ ID NO: 234748 - DNA, 1513 bp, Homo sapiens
aaggatatggaaaaactgaacaatgccatcagacttgctaattgacatttataaagtgttcctccctcaaatagcagaatatacattcctttaaaatcctcagggagcattcagaaaaatagatgacagccagagacataaaacaaacctaaaaatgattaaaagaattgaaataatcaaaagtagttatcttaccataatgagatttaactagaaatcaacaaaagaaagataattgataaatctctaaatactaggaaattaaacaacctacttctaagtgatctgtgaatcaaagtctcagagaaagcagaaaatattttgaagtgaacaaaattgaaaatgcaatatatcataattcatatgaagtagctaaatcagggcttagagggaaatatggaggattaaaccctcatattagaaaagaaaaaaagaactgcaatgagcaatctaagcttctacctaaagaaactagaaaaagaagagcaaaacaagtctaaagcaagcagaaagaaggaattttataaagataagagtagatatcaatgaatttgaaaacaatagtggagaaaaccaataaaattaaaaatctggttttttaagtatatcaagagctgataaacctctagccagattgacaaggaaatatgacataaattaccattgtaaggcatgaaagagggcatatcactatagtccccacaaaaatataataagcaaacaccatcaagagctctgtgcacataaattcaacaatatagatgaaatggaccaaatcctagaaagaagaggctgccaaaactcaccccaaaatatccctttatatctcaataaattcaatgtataattagatctttaccaaaaactcaaaaatcaaaacctaaaaaactacaggtttggatggtttcactggtagaattctctgccaaacatttgtggaagaaatgacatcaattctgtaagatctttttcaaaaaacaaaagaggaggcaacatttcccaactcgttttgtgaagccagcattatcctggttaccaaaccagacaaagttagtacagtaaaagaaaactgcagaccaatgtctcttaggaacatagatgcagaaatccttcacaaaatattagtacattgaattaggcaataataaaaataataacaagtcatgaccgagtggatttaggcttggaatataaggcagcatttgaaaatcagtcaatgtagggctgggcacagtggctcacagctgtaatcccagcactttgggaggccaaggcaggcagatcatgaagtcaagaaatcgagaacatcctggccaacatggtgaaaccttgtctctactaaaaaatacaaaaattagctgagcgtggtggcacatgcctgtagtcccagctacgcaggaggctgaggcaggagaattgttttaacccaggaggtggaggttgcagtgagccaagattgcgccactgcactccagcctgggcaacagagcgagactgcgtctcaaaaacaaac

SEQ ID NO: 234749 - DNA, 633 bp, Homo sapiens
gatccggcaacatctacctcattctctccaggcctctccacttgcccgagctctcagccaccaggagacagaaggaagggacttctgggctgcgttgggagcgggcactgtcccctatctactcctgctcggtttcccaaagtccagcgacatccgaccctcctggggggaaaaataccagtacccagacacctctgcaccctgttatatgactgggcttgcttcaggaatatcttacaaagaagaagaagaagaagaagaaagaacagcttggagtcatgtttacatctagttctactgaccggttcccatctggagagtttatttataactccctctataactctctgtttggaggcactggtggctctattgacagactgatgtctaggaaatattgctctatgtctaaccgtacctaaatgtgctgtggttgtatttacagatttatgtttgagggaaatataattatttccattgtatttgtgcatatacagtagttataggagcagatttatatatgggaaaatatacgactctcttacagccatccggctttatgtacatgtgatatcctgacagatttatatctctgaacagctatatagataaaaacgtatattgttagaatta

SEQ ID NO: 234750 - DNA, 588 bp, Homo sapiens
ttaaaccgtatcactcatcctgtcttagcttcaaacttctgcagcttcctcatctctcacccttcatagcattgaagagttaggtccctgctcaggcaggattagactttggcttaaggagatgttatggctggtttgatcttttctccagatcattaaactttcttcatatcagcaataagtctgttttgcctcattgctgtttgagtgttcactggagtgaacttctaatttatttcaagaactttactttgcaatcacagctttgactgtttggtgtaagaggcctagctttcagcctgtctgtagctttctacttggtttctttactaagcttaatcattttagatttgtaggaccttttctttcacttgaacacttagaggccattgtagggttactaagtggcctgattaacaccaaagatcacttgtcacagatcagcacaccagataaaataataatgaaaagtttgaaatactgcaaaaattatcaaagtgtgacacagagacagtatgggcttttggaaaaatgacaccagtagatttggttgatgcagtattgccacaaatcttcaatttcttaaaa

SEQ ID NO: 234751 - DNA, 1206 bp, Homo sapiens
cttgcaggaggttgacccgaaacagccctccgtcttcctgcccatgaggatgaggacaggaagccagacccgggagagaaagcccagatcagacagatgggggttgggagggcctagtggctgaaactgccctgcttggggacaatgctcaggcaggaccaatccaaacgagggcactgcttatgtggtccttccggagcatcctccaaggcagagcctggcttcgggccctccctgcaaggacacctgcctccactccctgccagaccaggcctggctgcagaggcggaggggcggcagggctgcctgtctccactgtttggcggtgtttacacgtgtcgctgtcagggtgtctggacagtgggggtcgggggcctcccgggcccagacttccccaggcctattctcacactggtgggagggccctaggggaagggtgtgggctgggtggcggggccaggccagctgagacctacaggaccgtggagcatttaggtctcccacccaactccacccggtcctctgagcatcagttacagagcccaggcagcaggagggcagggcccagccccttatcacccatcctcaaggcaggcaggaaccctgaaggcagcttccaccaggggttcccttagcccccaccctccaaaagccccagaccctgccaggcctcaccctgccagcatcgtggccccagctgacggctcccaagggcaggtgctggcaacacaagcaggagccctcggggcatcccgcagggcacacaccaggtcgccctgggctccccaagcacctcccagacccagcccttgggtgggtcctggcccacaaacccccacgccctgcccctgagatgagccccaccgcccacctgccctccagccctggagacctttctcccccttggccatggctcccatggggaggctgcaggccctccctgggctggaccagaggggacagactgtctctcccctgcgacttctgggggcactggagtccttggcctggttaccttcagcatttatagccctccagtgagttattcctcggagttctcacagagcagcatgcgcctgcggcaaagccctcacctccagcccctggaccacctgactgctgcctcccgcctggcgccaaacacggccaccgcctcttttgttaacaggacagttgatccattaaattaaaaatcattcaatagat

SEQ ID NO: 234752 - DNA, 846 bp, Homo sapiens
attatggaatgtatcctaatcatgggaagggcaccttgggagaagttgcagatggctgacgtgctttctctagcattcagctaaaaaatgggatggtccatgattctgcgttctctgtgttctgcaaaacaacattaagtagaaaacaaacagaagcagaggcacatttccttcttttgccacagaaacaatgccactgttgagtgcaagtcacactttgtctcatagataagaggtggccccaaagaagctgggatgaatgagtcactacctgtcttgtggctgtactgcacttcatgttcttaccttcggcttctccaggtctcgccctagtgagccaagaactttctctcacatgctgcctttatttaagcctggccttcaagaccttccatgatttatcaccaacctaccttttcagctttgtttcctagcacacctcattgatcagctgctcaggctgttgcatgaagaacatggactttgcacacagatcctgggttgagttctgagtcagctgtgtattagccatgtaaccttggccttggtatgcccttgctggacctacattttctcacgtaacagcatctatgtcatagaattcctgtgaaaattaaattggccaaggatgtcagggcttctcagatcttttccttcgttgccctaatgaccacaagagaacacatacactgaaggcctcctggggggcagttgcaatttcactgaagttgtatttttttatcttaaatgaaatctatgtgtattttccattctgttctttttttcatgtttattaatatagaaatgtgtttttgcaaaaggattaagaatacttaaaacaaggaa

SEQ ID NO: 234753 - DNA, 230 bp, Homo sapiens
gcaagtggtaaagtcaccaagcctaattggaatgaattgatttatcctctttggcagccctgatcagtaccctctcaagagactggactacatatgggaggtaatcatgatgatatacatatttctttggatgctgcttggctcatccagtccattttccatagatattatcacttaagacagctgctattctatcactggtcttggattttttatttaatcccgtactt

SEQ ID NO: 234754 - DNA, 465 bp, Homo sapiens
cttcctttgttcctttctgcctgtcttccttctctctgctagtatgttctaatttgttgctttttgttttgaatgaagctattataggtttttgtattgtgattatttacttatttattgagacgggatctcattctgtgacctagactgaagtacagtggcaagatcacagctcactgcagcttcgacctcctaggctcaatcaaccttccctcatcagcctcccaagtagctagctgggactacaggtgggcatgggcaccactgtacccagctgattggttttgtttgggtttttttttgtagagatgaggtctatgttgctcaaactggtctcaaactcccagactcaagcaatcttcccacctcagcctcccaaagtgctgggattataggcataagccccagcacccagccctaaaacaagttattttaaagagataacaacttaccttagaatacaaa

SEQ ID NO: 234755 - DNA, 268 bp, Homo sapiens
ctctctccctttttgcctcaagctgaatgtctatgcctccatccaatctcactcaatttcagaaacactaggtccggccttccctcccctcccttcctgtcctggcttcccctctgccccccatctccctatctgtcattctcactccctactcaccccctccagcaaacaactggaatcaagatgaggatcagagctgggcgtggtggcatgtgcctgtagtcttagctactctggttatcaaggcaggaggatcgcttgaactcag

SEQ ID NO: 234756 - DNA, 1722 bp, Homo sapiens
  misc_feature (92)..(92): n is a, c, g, or t
  misc_feature (226)..(226): n is a, c, g, or t
  misc_feature (306)..(306): n is a, c, g, or t
  misc_feature (356)..(356): n is a, c, g, or t
  misc_feature (412)..(412): n is a, c, g, or t
  misc_feature (536)..(536): n is a, c, g, or t
  misc_feature (629)..(629): n is a, c, g, or t
  misc_feature (640)..(640): n is a, c, g, or t
  misc_feature (653)..(653): n is a, c, g, or t
  misc_feature (711)..(711): n is a, c, g, or t
  misc_feature (713)..(713): n is a, c, g, or t
  misc_feature (769)..(769): n is a, c, g, or t
  misc_feature (881)..(881): n is a, c, g, or t
  misc_feature (915)..(915): n is a, c, g, or t
  misc_feature (917)..(917): n is a, c, g, or t
  misc_feature (969)..(969): n is a, c, g, or t
  misc_feature (985)..(985): n is a, c, g, or t
  misc_feature (1021)..(1021): n is a, c, g, or t
  misc_feature (1042)..(1042): n is a, c, g, or t
  misc_feature (1049)..(1049): n is a, c, g, or t
  misc_feature (1068)..(1068): n is a, c, g, or t
  misc_feature (1229)..(1229): n is a, c, g, or t
tttattaaatagggtatcctttcccattgcttgtttttgtcaggtttgtcaaagatcagatgcttttagatgtgtggtgtcatttctgaggnctctgttctgttccattggtctatagatctgatttgttaccagccccatgctgttttggttactgtagccttgtagaataatttgaagtcaggtactgtgatgcctctagctttgctgtttttgcttaggattntcttggctatgtgggctcttttttggttccatatgaaatttaaagtagtttttctaattctgtgaagaaagtaatggtancttgatggggacagcaatgagtctataaattactttgggtggtatagcantcaggcacagaaatgtccttgtgttaggcaataccattcaggacatagccatgggnagagtcttcatcactagaacaccaaaagcaatggctacaaaaaccaaaatttacaaatgggatctaactaaacttaagagtatctgcagcgcaaaagaaactattatcagagtgaacaggcaanccacagaatgggagaacattgttgcaatctatccatctgacaaagggctaatatgcagaatctacaaagaacaaatttacaagaaaaaaaaancatcaaaaagngagcaaagggtangaacagacacttaccaaagaagacatttatacagccaacgaacatgtgaagcaaagcncntcatcactggtcattagagaaatggaaatcaaaaccacaatgagatacaatctcanaccacttagaatggtcatcgttaaaaaatcaggaaagaacagatgctagagaggatgtggagaaataggaaagcttttacacagttggtgggaatataaattacttcaaccnttgtggaagacagtgtgacaattcctcaaggatntncaaccagaaatatcatttgacccagcaatcccattactgggtatataccccnaaaattataaatcatnctaatataaagacacatgcacctgtctgtttattgnggcactgttcacaacagcaangacttgnaaccaacccaaatgcccancaatgatagactggataaagaaaatgtggcatatatacaccacgaaatactatgcagccatagaattcacgtcatttgctgggacatgaatgaagctggaaaccatcattttcagctaactaacagaagaacagaaaaccaaacaccacatgttctcactnataactgggagttgaacaatgggaacacatggacacaggaaggggaacatcacacactagggcctgtcagggtggggggctaggagagggatggcattaggagaaataactaatgtagatcatgggttgatggatgcagcaagccaccatggcatgtgtatacctatgtaacctgcatgttctgcacatgtaccccagaacttaaagtacaattaaaaaaaaaaagaaatttgcttttaattaagcttttaatcatagaacttgtgaagaaaatccttttgaatcttttattaccacatcatagctgggacaaactgctgacgctttaaaagtaacacaaatatcaaacaggaagaactagacttaggaaccaaactcaggtttctgtagtgaacagggcacaatcttcacattgggtcaccaccactactccttcagtttagccttggctagcaaaagggtggccttgttatgtagatgagaccacttatgt

SEQ ID NO: 234757 - DNA, 514 bp, Homo sapiens
aagaaaggcataattcttcctcatgctaaatcttagtaaggtgcaatacccggttatgcaaaaacctccaggacaccaaagaaaggcacaattgactggtgaataagaatggggtaacacatcctttcacaagtcaggtggttttcagttgcttgctttcaacaagttgaaagagaacctaatcagagttgtcagctgacagatcattaaaagtattttttctttgttagatctttatgcgatttttgggcatataatgcgaaaggcattcaaagaattgtgtggcattactataacaaaactccattcattctcatctgctttttttatgcgaacaagttttctcaacacttatatccatggaattgaaaacttggaatagaactgatgctgaactatttctcaaaaaaatccatccactgaaggtcataatgtatattagaaaaaagtccacccaagttcatttctgcaagatgcattgccaataaaattttgcttttgtgtttagtactta

SEQ ID NO: 234758 - DNA, 509 bp, Homo sapiens
atatacgtgtattccatggtgaggtttaataaattttaacattttccaaatttggttgacttgaaatacatatccactcacacatccatgtccatctgaagcttgtatctccctgaacccaccccaaaataattactatatctaaagcatgttaccttcatttgtatttacactatgaccttatatttaccatttatagagagtacagcatattgttttgcagacttttaaatttgacgtaaagaatatcacataagttttgctttggcttttgtttgtacacaattttagatttattcatgttgtatcaaatggctctaatttaatcaactatcttgttatactgtgcaaatatgcaacttatttatcctttctcctatggtcatttagattgttgccaatctttcaactgtaaaaatttttttcttttttgagacaggatctccctgtgttgcccaggctggagtgcagtggcgagatcttggctcactgcaaccttcacttcctgg

SEQ ID NO: 234759 - DNA, 640 bp, Homo sapiens
tagatctgatactcattcatttattcaaccaactttggcagttgaatacctacaatgggccaactgcttgtcttgagtgtaaggaatataaatccaagtaagatatggttcttattcctaagatatttacagtctagtctagtaagtgtcagacggtctcactctgtcacccaggctagagtgtggtggcatgatcatggctcactgcagcctcaaactacttgggtcaagtgaccttcccaccctaaccttccaagcagctgagactacaagtcagtaccacaatgcccagctaatttttttttctttcctagagacaggatctcactattcttaccaggatacaggaattcacttttaatgttatacagcagcactaatagaaatagaacatgagcaacagatgcaagtcacgtaggtaactttaaaatttctaaccactttaaaaaaagtaaaaagaaacaaaattccaaaaatttattttactttacctatatatgtaaaatattataatatctcaacatgtaactaacaaaaaaatgagagttcttttttcttttttcttttttcttttttgagacagagtctccctctgtcacccaggctggagtccagtggcatgatcttggcttactgcaac

SEQ ID NO: 234760 - DNA, 694 bp, Homo sapiens
tagatctgatactcattcatttattcaaccaactttggcagttgaatacctacaatgggccaactgcttgtcttgagtgtaaggaatataaatccaagtaagatatggttcttattcctaagatatttacagtctagtctagtaagtgagatatctagacttccacaatgtgttctgtaaaaacaggagctcactattcttttcagacggtctcactctgtcacccaggctagagtgtggtggcatgatcatggctcactgcagcctcaaactacttgggtcaagtgaccttcccaccctaaccttccaagcagctgagactacaagtcagtaccacaatgcccagctaatttttttttctttcctagagacaggatctcactattcttaccaggatacaggaattcacttttaatgttatacagcagcactaatagaaatagaacatgagcaacagatgcaagtcacgtaggtaactttaaaatttctaaccactttaaaaaaagtaaaaagaaacaaaattccaaaaatttattttactttacctatatatgtaaaatattataatatctcaacatgtaactaacaaaaaaatgagagttcttttttcttttttcttttttcttttttgagacagagtctccctctgtcacccaggctggagtccagtggcatgatcttggcttactgcaac

SEQ ID NO: 234761 - DNA, 622 bp, Homo sapiens
gctggatggtaagtacataggagttctttatattctattatatacatttgtgaatgtttgaaatttcccataataaaatgttaaacaaaaatttaagaagcatatggaagaggaaaaaaatattctcctctaccctcacaggttctgtaactggagactgccaatgaaactgccaaaaggcagattaacaggagaaaagacatacagacttcatctgatgttaacagtttaatttttacatgcatggaggccttcatagaaaagaagtgaaggcctaaagaagtgattataacctgggacttatatatcattttaacaaagagtaataaattgtgaaaaggggtttgtcttctaagagctgttaattgtgagaaggaaaatatatgggggaaactaatggaggataagggttattttagtaaagtttgtgcagatccatttcagtgctttctatctccagtgatgttattctcctgctggtatggaaaaagggagggagaataccttcacaaagggaaatttatgccctattttaggaagataggaggacaaagaactctttttgtgtttgctgcttcttaattgccttcagctcaaaataaatccttatgccaaagtagca

SEQ ID NO: 234762 - DNA, 466 bp, Homo sapiens
ttacactgcataacctaatagtgcatttaagggcttggccaccacaaggtaaactgacaacaacgctgaccaaagtagcagcaaaagacattcaggagactaacccgggacccacgcagttgttggactcaacaaaccgctaagcaaagtggcaagcacgtagtgtttctggtgagtcactgcagttttgatattggtacctgttactttcatctgttctctgggcggattcctgcaaacccaagaaccatcagtttcctgattcgtgtgctggaccttgggcttaccgctgagccactacggagaggaacaagaaatgaagctcccggaaggagagaagctgcgggcggggcaatcacctcggaggtccaagaggcctcagcggcccaaagaaaggggaggtgtgtgcgggagaatctcaatggagatgaggagagcagcggtgactggtccttgcgcagagtgg

SEQ ID NO: 234763 - DNA, 336 bp, Homo sapiens
tcatcatggggcctccatgtagtactgtaggtgctgacctactggacaattccccaaggacacagaaagcaccttgagctgtgtctttcgtctccatattcccagcaccttgtacagcacctctcacatttaaagcacctaagtgtttaatgaccaactgactgaacaaataaatcaattcagaaatgaactatctctgtccactttgaatagaattgagtgacggaatgctaaggagagatgatgatggttaaggctccaaaaacaaacacgaaaaaaactgtcttaaaagtgcgtaatcaaaaggtgtttatttgaatgtgatttaaactaaaa

SEQ ID NO: 234764 - DNA, 438 bp, Homo sapiens
cacaagtagaaacatattcaccaacaggaagtcctggaacacagccagtgcaacagcagtgaagttattctttgctacaatactgctccactggactaaacaagtataaaaaatggatgacagcaggaggacacctggccagctgttgtatggtgagctgaactgaggagatctcaaatagggcaggctgaaggaacatgccacagacacattgaagaacaatttcaagtaatggaagcatggctgcagaagactgggaaataatatcaggaggaagactgacccaatgtggagcaattggagcagcaaaggtgtgcagccaggtgaagctgcagcatttcagcttgcaacagcttttgtaaagagcagtccctctcccaatcaaagagccccatccacctgtattatctgagtaaacatggcagatttcttaccata

SEQ ID NO: 234765 - DNA, 399 bp, Homo sapiens
tcaggtgttcttccagctccctgccctgtgtccacccattgtcctgtgggctggggatgcaaaaggacacaagatcatgaacatgtgggaaggacctgggactgggagctaaacaaactggactcaaattctggattcaccaattcctagcagtgtgatctctctgagcatctgtttcctcatctgtgaaatgagaagcaaaataccatccttcaggattgtcaatgaggcattgtatgtatatcactcagcacagcctgaaagtagtagcttaagcccctctacttgggagaacactggattaggtccacgtgactgacagctaggaacacagagtgagaaaaatcaagactgaggggtgagccaagggataacagaagagaccgaagcatcatgagg

SEQ ID NO: 234766 - DNA, 555 bp, Homo sapiens
caggtctgggagcttaccgcactggttggcagcagagcagaattggaaacagggcacgtctttctgggatgtaagtcctgatgtttccccattaagaaaaaaggccaggcatcccaacactttggaaggctgaggcggacagatcatgaggtcaggatattgagaccatcctggctaacaggtgaaacccggtctctactaaaaatacgaaaaattagctgggcatggtggccggcacctgtagtcccagctactcaggaggctgaggctggagaatcgcttgaacttgggaggcagaggctgcagtgagccgagttcacgccactgcactgcagcctgggcaacagagtgagactctgtctcaaaaaaaaaaaaaagtgtagaaaaacttgactttaacttcaaagtttaatttgaaagtttaaacaggccaggcgcggtggctcacacctgtaatcccagcactttgggaggctgaggcaggtggatcacaaggtcaggagatcgagaccatcctggctaacatggtgaaaccccgactctactaaaaataca

SEQ ID NO: 234767 - DNA, 2134 bp, Homo sapiens
  misc_feature (711)..(711): n is a, c, g, or t
  misc_feature (718)..(718): n is a, c, g, or t
  misc_feature (775)..(775): n is a, c, g, or t
  misc_feature (798)..(799): n is a, c, g, or t
  misc_feature (840)..(841): n is a, c, g, or t
  misc_feature (1077)..(1077): n is a, c, g, or t
  misc_feature (1086)..(1086): n is a, c, g, or t
  misc_feature (1089)..(1089): n is a, c, g, or t
  misc_feature (1222)..(1222): n is a, c, g, or t
atggctcggtgcagccttgaactcctggggctcggggaatccttccacctcagcctcccgagtagctgggactgcaggcgtgcactaccatgcctggctaatgacattgcttttatgaagcaaaacataggatgttgtcgggcatggtggctcacgcatgtgatcccagtgctttgggagcctggggcgggcagatcacctaaggtcaggagttcaagaccagcctgagcaacatggtgaaaccccgtctctactaaaaatacacaagttagccgggcgtcgtggtgtgcacctgtagtcccaactactcgggaggctgagacagaaaaatcgcttgaacccaggaggcggaggttgcagtaagccaagattgtaccgctacactccagtctgggtgacagagctagactccctctcaaaagaaaaaaaaaagatgctgtttatgtacattccaagaacaaaagaaacctggccattccaacaagtgatcccaacgatcagatgctgtcctccccaagtccagagtccttacacctaccttctcagggacctgccaagctttcagcctgggggctaaaattccaataaaattgtttcagtttacattattttaaaaaattatttatttgagacagggagtctctctgtcgccaggctggagtgaagtggcgcgatctcagctcactgcaaccgccgcctcccgggtagctnggattanaggcgtgtgccaccacggccaggtaatttttgtatttttggtagagatggggtttcnccatgttggccaggatggtctcnntctcttgaccttgtgatccacccaccttggcttggcctccnnagtgctgggattacaggtgtgagccaccgtggttacattaatggagagttcaggattggaaggaaactaatgtcaagggctagatgtactttaaagttctttgaagtgggtggcggtgcctccatgtcaaaggtaaggaaacacagccgggtgtagtggtgtgcacctgtggtcccagctactcaggagaccgaggtggaagaatcgtttgaggccaggagtttgagaccagcctnggcatcatngcnagatcccatctctacaaatttaaaaaaattagctggatggggcagtccctagctgcttgggagcctgaggtgggaggatcacttgagcccaggaggttgaggcagctgtgagccatgatcctgccaccacacnccagcctgggggacagagccagaccctatctcttaaaaaagaaaaaataaggaaacaagtcccaaagcggtaaagatgaacaccaagtaagagcagggccaggatttacccttctggtctggaagcacatgttttgtgtatgtgggaggggaggggggttttgctctgttggggatactaacccccctattcccacatccctcagagtgctggctatggccacttgtctgagaaccatccaacaacatggcaaaaatgcagaattcttgcacttcaaacagactctggggggtaggacctaagtatcaatgtgtttaaccagcttcccaggggcatttgagaggcaaatgctaaagcagatgaagttcctgccctcaagaggtttagattctagttagggaaacagacaataaaccaatgtaaggtaagtcaagttccaggaagaaaaagcaggataagaaaacatgccaagagtgttgttttagacttggtgccaaggcagtggttcccttttggacaccacggactggttttgtggaaggcaatttttctacggatagaggggtgcgggggtggggggaatggtttggggataattcaagcacattccacttattgtgtactttattatcgcattgtaatggataatgaaacaattctataactcaccatcatgtagaatcagtgggagccctgagcttgttttcctgcaactaggtggtcccatctggaggtgatgggagacagtgacagatcatcaggcattagattctcataaggaggccaggcacggtggctcatgactgtagtcctagcactttgggaggccaaggtgggcggatcacctgaggtcaggaattcgagaccagcctggccggcatggtggaaccctgtctctactaaaaatgcaac

SEQ ID NO: 234768 - DNA, 316 bp, Homo sapiens
tagggcaatattgagtagtaaaacatttatgtaactggagtcccagaaaaggaggagaaaagggagaaaaaaatatttgaagcaataataactgaaaattttccttaaattttatgaaaatgataaacctaaaggtccaagaagctacatgaagcccaagcgggaaaagcatgaagaaaaccatcccaaacacatcataatcacatttctggctgagtgcctataatcccagcattttgggaggctgagatgggaggatcacttgagccaggagtttcagactaccctgggaaacatagtgagaccttgtttctac

SEQ ID NO: 234769 - DNA, 551 bp, Homo sapiens
ggaaagtcatctgtactagattttcaagtgtctttaacgttaccaggtgaaaaagggggagaaaaatattccagacaaaggaaacagtatttgcagaggtaccaagatatgaaaaagcttggcatgttagaaaaactacaagcatttagtgttcttagagggtgaagcgtaagggaggataaatggatacttaagtacagtgtataacctcttgctgaggcctgaaaaatccagtcaaagttggcttgaagaacattaagaggaagggctagtggccagccatagtaagtcttttcttccctttctaccccatttgctttccaatgcagttgtacttatgagtcaagattgaatgttgtcccctaatgaaatgtaatgacaaacagtttgaacgtgttaatagagtatggataggcataatgcatttgagatcatgaggaaacatcagtaaagaatattcagtgtttttttttgttgttgttgttgttccaagtgttttctgacatattcaaaaagaaaaagagtaaaaattatttgaaaagcaagttgga

SEQ ID NO: 234770 - DNA, 327 bp, Homo sapiens
tggtacttaaatattcttggcactacaggtaccatcatcaccctgcaacctctagtaaaaatctctctctctctctctctctctctttctctctctctctttctcacacacacacacgcacacgcacatgcaccccctacctgagaaatattagaagtagtgtaggcaaagacctagttaaatatttaaataatcataatattaattgattgccaactcttaagattgaggcaaatgtgttcaaggcaattaatgaggcaaaggttgtggtgagccaagatcgcaccaatgcactccagcctgtgggatagggcgagactacgtcca

SEQ ID NO: 234771 - DNA, 361 bp, Homo sapiens
ccccacccgtgccagctcagcttcctcttcctcatcctctcccagggaggtcacacggtgcctcctcctctccccggacagaagaacgtgtttttctgcacagccctggccgtggcgccagggtcccccccgcggagatcccactcgcgtaaatggggaacgtgccacaggtgcccgggaggcgctgctggagcaggcaagcacccccagatccgaacctcagtcagagcgcgcgagtccaacacaaaactcggcgtgcttcgggaaggaaaaagggccctgcaggaatcgtttatcccaacagataatacccatcccataaaaacaccaggccaggcctctcctggatcgtgggccaccc

SEQ ID NO: 234772 - DNA, 251 bp, Homo sapiens
agaagggtgggcaggtgggccagcccagaggaagtgtcactcatgccaccatctgcagaggaggaggagtttcctgggaagggaagagaatcaaaggggacaaaggagtgcacagccaggagcaggtgggggtcagcacctccagggacaggaggaggccaggggaccacatcccgggagaaggggaccagttctaggtcatgagagcctcaggagcctggtgaggagttggacctttatcctgtgtaggg

SEQ ID NO: 234773 - DNA, 466 bp, Homo sapiens
ggagtttggagtatgtgtaattttagagacatgtgacatgatcagatgtactcttaaagagggtctttggggcttcgcccatgactctctttggttcttcttccttacagtctgcaacagtgaaagactgtttcctacatgaagtctgtgagagagagaacaggtttgcatgttgccaagttatcaaagaaaatacatttccttcaaaaccaacttatcccctgaagctgctagtaagaaaaatatgagcaaaatataccacagaataaacttaagctgcattttaaaaagactattatcttgtatgaaaataattcataagttaaaatgttaaaaggccagggaccacacctgtaataccagcactttgggaggaaggggtgggcagatcacttgaggtcaggggtttgagaccagtctggctaacatggcaaaaccccatctccacaaaaaataaaaaaaaaat

SEQ ID NO: 234774 - DNA, 415 bp, Homo sapiens
catgggttgacctgcctgagccctgacattaattaaattgggtcagatgaacttcagatgagagacttccaggtaatcattatgataataattatgaataataagaatggtttgggctcttttcatgataaggaaaagactccctgggttacttcaaccctgaggtgacagtggaggtgagagccacgtgaatagtctccagagtattgagaggagccaggcataggctttctagctcgagtctggatcaagatgggccacgactgtcacagatgctgtgccaaggggtcccggatgcaggaagccatctgccctctgcgcaaacctctcctgcccccactgccaccttctgcccaagtcctcctctcctccgtggctctttcttacggctcccagatgccacttgtagctcttc

SEQ ID NO: 234775 - DNA, 370 bp, Homo sapiens
aagattctcctgctgatcctggacagagctcccttccctcagccctcaaccaacattgcgagcccctaggtcactgttccctgtggtttcctataacctgtccacaccttcattcctaatacctcctcaggtttcccagttgaagtgtatcctctaaagtggtgtgctggcaaaacagctctccaaaaagacaaaagccctgatgtcagctcctgatggttgaacacttggcttgcaaaggctctcacggtgccagtgtgagccagctgcagcacacctagggacaccgattcacacaggagtctacctttgctgcagctattttagatgataatgatggccattatctgtcagggccactgcccaaggc

SEQ ID NO: 234776 - DNA, 422 bp, Homo sapiens
ggaaagacttgctggccctggggccttctttgccttggcagcgacccagtgtggcagaatgcaatgttctggtttggggtctcaagctaagggctggtgaggaaggctgcggaagtataaatcttcaaagtgaatatgtcccaaaggggctggagagttgcaccaacctttagggtcttgatttccctcagtggttcctacatttcatgtaactgttttctataattttttttgcacttttaagagactttttatgtaaatgaatttataggttaatgaaaaatttttgtcataacatatatcccaacttttggttcagaaaatgtggccaccatgcccactgggaaatgttgggatctccatgaaagaggtggctggatgaaaaagctcatggcttgaaggtgggaaagaaaaaaaaagaa

SEQ ID NO: 234777 - DNA, 480 bp, Homo sapiens
aaatttgaacttctgagctataaatctgagaaattgcaaaaggaaaactttatctcaagaaatgaaattattattgtaaaaaaaaagggcagcattttaaatttgaaactaaaaaaattaaatacatctcagcaaaaaatgtggcaaaaataaaaactgtctgcagtttaaaaaatggctttaaaaaaacagattttaaaataaaaaatcaaaacctgttggcaaatttattaaaagcaggtcaatacttcaagaaaactttgtttgcagtatatacgaacaggccctggtactataacagtgcttccttgccaccaatgtttaatttttagaaaaacacataaataatttctttttagtctcagcttatcgaagcacacataaaacttcctttataaggcccatcctttacaaatcctctttgacttgtttagactgtttatattttcttaacctctaagtcattcatttaaaaaaaat

SEQ ID NO: 234778 - DNA, 354 bp, Homo sapiens
aataacttataaatatgtaaataaatggtatctgtttttatcagaaaaatccctgacgagaagacaggaaggagttctagggattactgtgcatgaacacagcaatattctcagatagcagaggattactgtaaaataatcaaatgctacagagaatgtgaaagcttcccaatcttgctcttcagagctaatgcacccaggaacaagagacaaatatatcatggacatcaatcaatgatgtcatctttctttgaaaggttgtgagttatttaaccaattcccaatttctaaaaattataaacaatgtaaccttatatgtaacttttgtattttttctagaataaattctgagaa

SEQ ID NO: 234779 - DNA, 434 bp, Homo sapiens
cactgctagagccagggggctcttcaccaggctccacgcagaaaccagggtgtactaaccagatggagcctggaaactccagctgggaacaggaggggctgggaggggctcacgtgagaaacactagatgttgacagagacttgccctgggcctggggtgaggatggatgaggggtgggtggccccacagttcccagcaaatgttacccgggactccctggggtcagcggaggccaggatcaggggtcagtcagagcccccagttgatagagactcgccctgggcctggggtgaggatggatgaggggtgggtggtcccacagttcccagcaaatggcacctggggctccctggagtcagcagaggccaggatcaggggtcagccagagcccccagctgagtcagattcagtcccaaggacgtttctccatggg

SEQ ID NO: 234780 - DNA, 220 bp, Homo sapiens
acacaggtttatctcatccacttctcggaatgaaaacaagtgtccggctgacccagggccaccaggatccacgtgcccccggagactgtgcccaccggctcttatgcgaagggtgacttcgggctggggctggtggataggtcagtcaacctcatcatcattggccacttgccaactttttaccagtcagctcatgccatgaccccttgcagctctcgta

SEQ ID NO: 234781 - DNA, 585 bp, Homo sapiens
gacaaggtcttgttctgcactccagtctgggcaatagaacgagatgatagatagatagatagatagatagatagatagatagatagatagataaaagaaaaatagccaactaaaagttctattcttcctatgcattttagataatttagccaaataaggaagccccttgtcccaggtaaatacttataccatcactatcatgatttttattcttcctatcaatagccaattagtaactcctcctatttatagctactttattgaggaattagtaaatgccagcactgatcttcgtgctttccatgcagcatctcatccatttgtcactgtaatactatgaggtatatactattattagttccaactttaacaaatgagaaaacagcttcagagaggttaagtaagctatccaaggtaatacaaccagtaaatgggcaaagccagaattcactaccaagtctttctgggtctacagccaggaagcttaaccatcaagctaggctagatttacacacaatgcctggctggtcatacatttgctaaaatatgtcacttatcaaaagcctgggcatcagcctgttgttc

SEQ ID NO: 234782 - DNA, 431 bp, Homo sapiens
atgctggactctgtgccaatgcaaacttcttggctctaagaaaaagagttcatagtgtccttttgctaggacctagaaaggaaaggcaagctgagagagacgacattgcagggagagcttggaacactatagatcttgatactagacctaaattaaagtcaaagcatagcagaaagctacgcagtgagattttcagtgaaattgaattactgtgaacacccaacgaagtcacgatgtcttgctccttagaaatttctgttcttaaagttgaaagtcttttaacatttactattttattgatgcgtctgcacaaggcctttcttttctgttctatacatgcagacatacactacatgcaatttgatcgcagctctaggcaaagattaaattgggccgaggaataatgaaacctcatacttcctggtgtcata

SEQ ID NO: 234783 - DNA, 908 bp, Homo sapiens
ccttggagaatccggaccaatacagtgcacctagaagaagagaaaacagaagtctcactctgtccccgcgtgtgcaaaaagacgaggccgtgctgagagcagctagaagttggccgtctacgagccaggaagaactctcactgggagcctgattgtaccgcaccttgatcttggacgcccagtccccagaatgtgagcacacacacatttctgctgtcatagccgcagccgtggtattctgtgatggcggcagagctgactaatgcaccccctgccagcgacatcaggaatccctggaggacgaggaccatcgcatttcctaaagctctcgtgatttgatatgcatgaaggtctgacccttgtcctgggagaaatagctgcttcctcctggcacctgggagcgtcccagctccttgcctctttggagacccctttgagcgtgggctctgccgtgaccttggaggtcgggaacaggcaacacatccctcagtgcccacctcttgccagccggtccctactatttggggtctgggcaaggagcaccagcggaagcccacatgacgtgtttcctatttgaaagttaggtacacacccagctagcacattagatcatagtttcttctgctttcacagacatcccttcatgatggcaaaatgtaaatcatgtgggaattgactatttcatgagattgaaagctggtgatacaccagacacggctgagtttaattgttctgttacacacttaggcatctcattgatgcatagtgacatttggataagtgattgttccccgctagcggggaaacaatcacttgaacaatcacttgaacaatcacttgaacaatcagattgaacaatcacattgaacaatcacattgaacaatcacattgaacaatcatgaacgta

SEQ ID NO: 234784 - DNA, 1132 bp, Homo sapiens
ccttggagaatccggaccaatacagtgcacctagaagaagagaaaacagaagtctcactctgtccccgcgtgtgcaaaaagacgaggccgtgctgagagcagctagaagttggccgtctacgagccaggaagaactctcactgggagcctgattgtaccgcaccttgatcttggacgcccagtccccagaatgtgagcacacacacatttctgctgtcatagccgcagccgtggtattctgtgatggcggcagagctgactaatgcaccccctgccagcgacatcaggaatccctggaggacgaggaccatcgcatttcctaaagctctcgtgatttgatatgcatgaaggtctgacccttgtcctgggagaaatagctgcttcctcctggcacctgggagcgtcccagctccttgcctctttggagacccctttgagcgtgggctctgccgtgaccttggaggtcgggaacaggcaacacatccctcagtgcccacctcttgccagccggtccctactatttggggtctgggcaaggagcaccagcggaagcccacatgacgtgtttcctatttgaaagttaggtacacacccagctagcacattagatcatagtttcttctgctttcacagacatcccttcatgatggcaaaatgtaaatcatgtgggaattgactatttcatgagattgaaagctggtgatacaccagacacggctgagtttaattgttctgttacacacttaggcatctcattgatgcatagtgacatttggataagtgataaatataaatgtcattcattattatatatgccagaaaatatatttgtcctgctagtctgttcagcaaaattaccactacgttgttctagtctagcattttgcacaatctgtgttccattgagagtaatattctaaatgattagaaatttaatatattcaatgtatacaaaatttggatgtctatgaaaatggactaatacagaaaaaaaatttggatgtattttgataaaagtattaattgaaataaatttagcattaaacatttttcatgattccaaaaatgatatctgctaaaatattccaaattaactgctcaaaggcaaaatacaagttaaaattaatgaata

SEQ ID NO: 234785 - DNA, 591 bp, Homo sapiens
atcttaataatattttttctcaggggcggttcgaagatggccgaataggaacagctccagtctgcagctcccagcttgagcgacacagaagacgggtgattcctgcatttccaactgaggactgccgaagctgagagtaactacccctggtttcatttccaactcatgaatttttcgccatccttctctgcccgcctttcctttactacacagtgagccgcactcctggaacaagcttcccttgaagttcaccctctgagcgccacggcccctctccagcctgcattccacttgttcctgtttggcaaaaccagcaacatctgggcccacactacaaaaggacccagaaaatatagtttatagcttcctagcccctttgatacagaaaagcatgcaagaaaggtggaccagtcatctgcatctgtcacaaaattgctctaagaaccagcttgtcagccatagaagaaaactgtatctcattattttatgttcacattttgctttttgagagaaagcactgtgagtagatttgatcagatactttatttgtgttgttggttctgaaaatctttttaatccccaaaaaataaa

SEQ ID NO: 234786 - DNA, 795 bp, Homo sapiens
gatcccgcacccagcttgaattcagcaagaatcggaaaacaggtgtgcccccgtgggcggttcgaagatggccgaataggaacagctccagtctgcagctcccagcttgagcgacacagaagacgggtgattcctgcatttccaactgaggactgccgaagctgagagtaactacccctggtttcatttccaactcatgaatttttcgccatccttctctgcccgcctttcctttactacacagtgagccgcactcctggaacaagcttcccttgaagttcaccctctgagcgccacggcccctctccagcctgcattccactgtaaggttgagaaatatctgattgttagtgatgagagagaaaacctagcctcattctctggtggcctgtcttgcaaaagagagatgaaatcaaacctggcttcctgagattccaaatcacaaacatcacatactagtttttttttttaataaaatcatggggccagatgtggtagctcacacctgtaataccagcactttgggaggctgaggcagaacaatcacttgaggccaggagttcaagaccagcctggaaaacaaagggaaacgcacttctacaaaaaatttaaaaattagtcacatgtggtagcatgaacttgtagttccagctacttgggaggctggggcaggaggatcgcttgagcccaggagctggaggctacaatgagccaggattgcactactgcactccagcctgggtgacagagggagaccttgtctaaataaatatcatagaaaggtggggaactcac

SEQ ID NO: 234787 - DNA, 102 bp, Homo sapiens
gggcaaagaattatggaatctttacctcttcgttgtattttacctttcacttacaaacaagctcatgccactgttctaaaaatccacacactggatgatata

SEQ ID NO: 234788 - DNA, 358 bp, Homo sapiens
aagtttaaccttaattactttttaaaggcagttttcattttgtgattacttttttttttcttccggtgcctagcatagttgaggattttatcttcttgtctattttaggatactctaatgaataacggaattttgacgtgctctttcaaaggaagagtctagttgcatcctcccagccatcggctggttgagctgtcctacccacttcgtttcagctcatggaggccaccgtgaggggctggggcatgtcagtggcccacagctattctgaatggtagttatatctatgtgggggctcagaagggaaccgactttccattcattaatgttcagtacccacgaaagaaaccgatattta

SEQ ID NO: 234789 - DNA, 900 bp, Homo sapiens
agctttcaatcaaaatccctggagcgctgtttgcaggaaaggtataatccagtggcagactaaaccaaattaaaatggcagtctagccccacccagctcaatcgctaattagattaaggggagcttctctctatctacctggtaaaggtaggaaaggtcaaatactctggggagagcattatttgcaagatctttatgagtgaattttacataatgtacaaaacatatggcatacaataaaagctgtatgacatgaaaatgcaggaaaatttgagaaagaaaagaatggacaataacagaagcagaccaacagatgatccagacattagaactgccacacagaagactttaaagtaactattataaatatattaaggaaatagacaaaatggagaatttcaacagatttggggtctataatatcaaaggaacatactataactgaaggatatatttgaaattaagaacttacgtaggcttaacagactgaatacagcacaaaaacaggatcagtaaactcaaaagtagatcaacagaaaatatctaaattgaaaaagagaaaaagaaaaaaaaggaaatgaaaacaacagaactgtaagagacgttctgattttagcccaagtacaacagaagatttaaagcaagatatcctaaactgctgttttactattatctcacctctctccatagtccatgtgtgggtattgtctatctcaggcactttggatagtgatacatttacttatattgccagtgaggaccacacaggcctggaaggactctactacaagacaggaaggggaaggagtaaacagtatggtttttcccagaatgtagtcacataagaatgtcctgggtatgacattttgggctggatggtaaatactttaaaaaaaaaaa

SEQ ID NO: 234790 - DNA, 308 bp, Homo sapiens
agaatcacttgaacctgggaggcggaggttgcggtgagctaagattgtgccatggtactccagcctgggcaacaagagcagaactccatctcaaaaaaaaaaaaaatatggacactaaaggccattacaatgaggtttcagatggaactgagaaacaaggtattggaaacatgtgtaaaggcccttcttgttataaactgacaacttggctgcattgtgtccatgtctaaggatattatggaatgtagaacttaatacacctactgtatatccacaaaaattaaaaattttaaaaattaaaatgaaaa

SEQ ID NO: 234791 - DNA, 556 bp, Homo sapiens
ctcagcaggtacaacctatccaacagcatgcaatggccctggcccctgaaagaggggaactctgctctgctcaggaccaagtttgtcacccaggggtatggacccagtgttgctgcagcttctggtttttggttttgtttttcaaaagaaactgaacatttgatttcatgtgtgtaaaatatcccaattttgagtgctgggattacaggcatgagccaccgtgcccagccacagtcagctcttctcaagaagggcctggaatcggtattcctcaaagctccttggagatttggatacccagccaggtgcagcagccagtgctcaatctgattctcggaaagacccttgccccagctcatggttttggtgtaattatcagtctctccatactgcattcctctgaccagtcttgctcactcctggactagttgtaaatccctggctcagaaatgccgttgctatggaaagggttttatgctgtgattctctttgggtttgctattcttatgccaattgtttttgttgtcattgttattgtcgctgttgttgtggcaaa

SEQ ID NO: 234792 - DNA, 367 bp, Homo sapiens
tagtgcttatccctcaaaatgtgattcatacttaaagtaggtcaggaatgatgtgggtcatagcagttagacagtaaatccataataggttatttttaaaaataggggtgcgtgtgtgtatgcatgtgcatgtgtgtgcatctgtggtggaataatgtgcgaggatggctattcatatccacagcattttgaagatggtgacgtagaagatacctctgcattttcattgtggccttttgtgttggtaccattcagatcattgagcctttcaagttcattactatattaatataaaacattcatctataaagttgtgtttttaaagattcttgtggttgtctaagcattttattcaaactaaaactgt

SEQ ID NO: 234793 - DNA, 532 bp, Homo sapiens
aagatgacctggacatggactccagtgaaggcagcagccccaatgcatctccacatgacagggaggaagcttgttccccacaacaggaacctcagggctgcaggtgcccgctggaccgcttccaagactttgccctgattgatgccccaacgttggaggatgagccccaagaggggcagcagtgggaaatagccctgcccaacaactggcagcggtacccaaggacaaaggtggaggagaaggaggcttcggacacaggtggggaggaacctgagaaggaagaggaagacctgtactatgggctgccagatggagccggggacctcctcccggacaaggagctgggttttgagcctgacacccaaggctgagatgtttgtgctccgtagcttctagtctggaactgctgctgacccctgtgtgacatcacagggcctcagtttccctatctgcaaaatgggatgatatggaggttcaatgagatggtggcattttgagaatggtaaagaaatacacaagaaagggatgatga

SEQ ID NO: 234794 - DNA, 484 bp, Homo sapiens
acaattactgtgcagtgttctgagtcctgttagggaatgatgtaagagtacactgacagcaaagatgtttgaagtggggggaaattccatataagagatgatacttcaaaagcagtttgtagtgcacagcagagtcaggaaagacattggaataatatatgtagaagcacagactgaaagaacaaggtatgttagaggaagtctagtggtttgctgagtctacagggatggttagtagggagtgatgaaagataagaccgaattataaatggcatggtgtggtcaagcaaaatgaggagcttaagtatttgctttgcagtttggaaactacaagaataatttcagcattattggagtaaaaaagccagattgcttgcaattgcaagcagttctctctagaagtatagtagtaaggtagcttgagggaggagtctgaggaaaggatttttttttttttttagaatagagaaacttgagtattgga

SEQ ID NO: 234795 - DNA, 506 bp, Homo sapiens
gtgaagactgtgattgatgatctcatccagaagttatttgatctgcttgttctttctttgaagaagtccatacaggctcatttacatgaaattgatacatttgttactgaggctatggaagtcttaacaattatgccccagtctgtggaagaaattggtgatgcaaatctacaatatagtaagttacaagaacggaagccagagattttgcccttatttcaagaagctgaagacaaaaacagacttttacgaactgtggctggtggaggtttagaaacaattagtaatttgaaagccaagtgggataaatttgagttaatgatggaaagtcaccaacttatgattaaagaccagattgaagtgatgaaaggaaatgtgaaatcacgtcttcagatctattatcaagaactggaaaaatttaaagctcgttgggaccaactaaagcctggtgatgatgttattgaaactggccaacataatactcttgataaaagtgcaaagttaat

SEQ ID NO: 234796 - DNA, 552 bp, Homo sapiens
ttttttacacagaactatatatatttttaaattagtaatccacataagttatacacaaaattaagtgactagattgttcagtaaaactctacattgctttcttattatggactaatgagcttataattcactgtcacttttaagaaattctagtctatagacatgttcgaattgtttggtcttattagtttcagtagcaaaaaccaccacttcttttatatttaattcttttgaatatcatctttaaagagcctgacttgaattttgtcaaaataaatcacaccttaaccctccagtctctagtctgtgtgttcttcatgagcttcagttcagtgtaagctagcacacggacctccccatgaattttctacaactttaacactttccacaaagtgtcatgtccttctctaggcttttggtagaatgtgaagttaataatggcatgtgatgttccttagcataatctatcaaaaagtaatgatctccttgtaaaaaaagccatgggctgcaatcacacatctgagttgacagacatccacatcaactcttcat

SEQ ID NO: 234797 - DNA, 518 bp, Homo sapiens
gcatgtgggcacccaggagaagggatggaaagaaacccaggctgcacaacagcgggggtgcaggcatgacccggagctggggacggctggggctggggaggcagggaggccgggcctgtcagaggacttatccttgcctaccaggcaggggaggtcaggaacaagagggagctcgtgcaggggcgtgcacagcaggcatggttttgcatgcacctggatctgtgggtacacaggccagcatatgccatggtggctttgctgattgataccttctgtcttcctcatccatctgtcctctgcctcacgtggctgtggtcatcctcccttcaggcacttagccacttctgctgggaaaagatctataagaagtctccagggatggctggctggctggcaatcgttgccttcttttctctatggttttaggacagagtgaagttttttcctaaaactcccctttctctaagcctgggtccggggtcaggggggtggccacttaagttgcatttttatttcaa

SEQ ID NO: 234798 - DNA, 361 bp, Homo sapiens
ggttctcagggacaggtggcttcataagataatcctttcctagctcaagaacctttctttagagtgttagagaaagaaaaattcttagtcctttgtttctcaccacctagagatgctagaattctacttcttggcactaaaagctatatcatcctgcacgcttgtgttctgaagcaggtgctaactctcttctgggccttaatacctctcgttttttctcttttcctctcaacaactgtcctcactacacaacttggccagggcctcccgtccaagtgagagctcttctctaaggcaacagtctgcaaactttatcacaaattccattaataaagttaagcatgtatcctctttagatgta

SEQ ID NO: 234799 - DNA, 361 bp, Homo sapiens
aatttacactgtgtattagttaatagtaccgtatgtgaaattccctggatgtgattatggtattatggttatacaggataatgtccctgttgctagagataaaggctaaagtattaacggataaaaggacctgatgtctttaacttaattgtcaaatgactcaaatgatttaaccttaattgtcgaataaaataaaacatctgtgtatgaagagaagctacaagcaaatgaggcgaaatgttaacaacttgtgaagctgggtgaatggtatttggttattcattgtatcattcttttaacttttctgtaggattggaaattttcaaaataaaataaaagttgtggctgtttgttgagtata

SEQ ID NO: 234800 - DNA, 610 bp, Homo sapiens
  misc_feature (13)..(13): n is a, c, g, or t
agagaaaaaaagngaccaaaagcccaaacactgccagtggctcctgttactcctgacaagctccccagggggatgctgccttggcctcacagctcctcacacagtgacagggctggggtgccggcctgctgatgaatgcagcccacacgggagtcgggagctgcctctcctggcccattcacaggggttcagttcccaggaactgtgggacctttatcaggggacctctgctagacaaggctctgttctgcagtttccaaaggagttttctgccttatgctcccagtgcaggcactcagcatgtgtgtgtgcgcgcatgtctgtgcgtgtgcgtgtgtgcatatgggggatggctgcgaggccagccagggctccttgtctgtgaaatgcccaaggtcctcgggggcagagatgcacctccatggagcagaaaaatttcaaggagggcagagtcattcaaggatggagcccatcctcactgcagcctcattgtcctgctcctgacaacccaatctgtcagccctggggtcgccacagctgctccgacccgccgtcggggggcagcatcgtgttgcaggtggagtgcgcaggctggtttgccagcggccgc

SEQ ID NO: 234801 - DNA, 342 bp, Homo sapiens
taaaagcatttggtgaaagaaactgcagaaataggatagtaacctctcctccaccaaactagaagaaacaagtcaacacttcaatattatgatctttttcagtgttgttaaaagttctcttcatgtctacatttttaaacattttgtttttttctggagaagtcctacctcacccagtagcttcccacttagtgatctccacctctcctctcctgcagtgtcaaaggaagaagcaaccctcctccttcctgtccaagcacaattccctctcctctcctctgagcctccatcttgtcctaaaactcctggagcccctttagttcatccccgagtgtctgacat

SEQ ID NO: 234802 - DNA, 534 bp, Homo sapiens
ttttattttgctcctcctgttattgggagggattagcagcagagcgaatgtttggatctttgctgagcagtcccatcggatttttctttattaaataggattgtgttttattgtaagaaggtttccctaagacaaataacgaaggaaattctgggtccaggagtacagactgtagcttctgtcatctcttgccaagttcgtagccctcagatggtgtctgtctttcccctttgcttgcggggccttttaccacagcactttggtgttcttttagctgctgcgataggactagctgttaaaatctgagattttacatttttgccagtcgcaataaattttgttagttctttcttgatgtgttctttaaaataataatgctttttttttttgggtgggggacagagtcttgtgctgtcgcccaggctggagtgcagtgacgcgatctcggctcactgcaagctccgcctcccgggttcacgccattcccctgcctcagcctcccgagtagctgggactacaggcgcccgccaccac

SEQ ID NO: 234803 - DNA, 739 bp, Homo sapiens
cggcttaaaataccgaaactttattttggtcacgttgcccatgtgacccgcggagcggatgactcatggttgcctgtcccaggatgaggccgccggccgaaagcagagaagcgccagccccggccgcccgggtggagcgctgggcagccgagtttcccaccctcctcaatccggagagtccgcgcggggcttttcctaataaatagccaggcacccgctgccctcgcgctgcgtacgggagcacgtgccccccgggaggtgggcgcccgccaggtgccccgggaacgagcctaggaaccgggtccgccgagtgcggctctcggggcggctaggcgtgcgggtggctgggcagcgctcccagggaccggcctctctccggagaaagtaaggaattctgctcctgggcaggtaataccggaaacaaaaggagaggctgcaatcgcaaattgtttaaaaagaagaaaaaggaaagaaaagttgaatgtaagagctccagcccctcaatgtgatcttgtacggtttgcagtaagaacatttcattcttccgcattttatttttccttttgctactgttggtgacaactagcaaaataagtgaaaaatcctcgttcaagtgttctggcattaagattgactgtcacactgaattctgtgccaatcctaacaacatgtgttctttttctggtcttcacaagtaagaatgtcttaggttttccagaaataaagatgtcccaaaaga

SEQ ID NO: 234804 - DNA, 421 bp, Homo sapiens
ggtactgcacatttgccaaactacagtgtattgtaaacataactttaacttttatatgtactaggaaatgaaaaaagtttgcgactagctttgagatattcactttgttttggtggtctggaactgaacctgcagtatctctgagtgtgcctgtacatatacatataaaaaattgtatcataaggaattaactcatgagattatggaggctgacaagtccaaatctgcagtggggttggcaggcacaagacccaggacagccaatgatgcaaaacaagtccaaaggccatttgctggggaatttgctcttgcttgggaggctggtctctgttctgttcaggcctttaactgattggatgaggaccactcaccttatggagggcagtctgctttgctcaaagctcactgatttaatgttatc

SEQ ID NO: 234805 - DNA, 297 bp, Homo sapiens
ggtattgcacatttgcaactacagtgatttcaatatacatataaaaaattgtatcataaggaattaactcatgagattatggaggctgacaagtccaaatctgcagtggggttggcaggcacaagacccaggacagccaatgatgcaaaacaagtccaaaggccatttgctggggaatttgctcttgcttgggaggctggtctctgttctgttcaggcctttaactgattggatgaggaccactcaccttatggagggcagtctgctttgctcaaagctcactgatttaatgttatc

SEQ ID NO: 234806 - DNA, 773 bp, Homo sapiens
ggcactcactccatcctgccaccctgtgaagaggtgcctgtttctcttttgccttctgtcatgattattctcactgtgttacctaggctgcagtgcagtggtgcgatctcaactcactgcaacctctacctcctgggttcaagcaattctcctgcctcagcctcccaagtagctgggattacagagctcatggtttttaaacaacttgtggtaaaaatctggtggaaaagataacaacagtatatgatatggcagagttgcacagaagaatcagaacattgttttagagaaacgttgggcaattaattaagccagctgattaagttttaaagaagctaaaccatatcatgtcgaaatcagaggagcgatgaaagtgtgagtggtggtatttctgctgttctcccccctgaaggcttctgcgattagcttctatgccttccttcccttatgggcattcagatccaaactacttgcaactgtagacaaggaggaagatggaacttggagaagacatacaggctgaagaaaaaaaaatattttggaagtgatcagcacattctaattgaccatggatgctctctgcattcatgtggtaacccagggagagtatggagtgaaaagaggatcaccaaagaaacttggggtatctcaacatttaggaaagtgtgcagagaagatgagatccttaaaatgttccaagaggttatatttaaatgttagaaggaaatcacaaagaatggcaccacaaaaatcaagggttggacttctttata

SEQ ID NO: 234807 - DNA, 897 bp, Homo sapiens
cttgaccgcagcacatccgttttccttacagtatgtagtacgcattctaccttttcctacaatgaatccaccagcagaaattcctgtacacatcttatcaacaaagaatttgaacctcaaagagtggctcaaagaggtcaggaggcaccttcaacacttttattggagatctccttgtctagatcatcagattctcactgtgttacctaggctgcagtgcagtggtgcgatctcaactcactgcaacctctacctcctgggttcaagcaattctcctgcctcagcctcccaagtagctgggattacagagctcatggtttttaaacaacttgtggtaaaaatctggtggaaaagataacaacagtatatgatatggcagagttgcacagaagaatcagaacattgttttagagaaacgttgggcaattaattaagccagctgattaagttttaaagaagctaaaccatatcatgtcgaaatcagaggagcgatgaaagtgtgagtggtggtatttctgctgttctcccccctgaaggcttctgcgattagcttctatgccttccttcccttatgggcattcagatccaaactacttgcaactgtagacaaggaggaagatggaacttggagaagacatacaggctgaagaaaaaaaaatattttggaagtgatcagcacattctaattgaccatggatgctctctgcattcatgtggtaacccagggagagtatggagtgaaaagaggatcaccaaagaaacttggggtatctcaacatttaggaaagtgtgcagagaagatgagatccttaaaatgttccaagaggttatatttaaatgttagaaggaaatcacaaagaatggcaccacaaaaatcaagggttggacttctttata

SEQ ID NO: 234808 - DNA, 428 bp, Homo sapiens
ataagtcatattgctctgtttatctttcaacataactgtcttttcaactgcacttcattttttccacccttagagctcatggtttttaaacaacttgtggtaaaaatctggtggaaaagataacaacagtatatgatatggcagagttgcacagaagaatcagaacattgttttagagaaacgttgggcaattaattaagccagctgattaagttttaaaggtaaggaaacaaaacaccatctgtgagagtatatgattgttaaaaaataaagttaagactacagaccccaaatttgtgtgaaagtttcaaagtaacaaacaaatacactaaaatgctagaaaagtaaaacaactacttttcacgaatgtatctgaaagcatacaagtttaccacagttgaataaaacagattcattttgaaaaaatt

SEQ ID NO: 234809 - DNA, 830 bp, Homo sapiens
cttgaccgcagcacatccgttttccttacagtatgtagtacgcattctaccttttcctacaatgaatccaccagcagaaattcctgtacacatcttatcaacaaagaatttgaacctcaaagaattctcactgtgttacctaggctgcagtgcagtggtgcgatctcaactcactgcaacctctacctcctgggttcaagcaattctcctgcctcagcctcccaagtagctgggattacagagctcatggtttttaaacaacttgtggtaaaaatctggtggaaaagataacaacagtatatgatatggcagagttgcacagaagaatcagaacattgttttagagaaacgttgggcaattaattaagccagctgattaagttttaaagaagctaaaccatatcatgtcgaaatcagaggagcgatgaaagtgtgagtggtggtatttctgctgttctcccccctgaaggcttctgcgattagcttctatgccttccttcccttatgggcattcagatccaaactacttgcaactgtagacaaggaggaagatggaacttggagaagacatacaggctgaagaaaaaaaaatattttggaagtgatcagcacattctaattgaccatggatgctctctgcattcatgtggtaacccagggagagtatggagtgaaaagaggatcaccaaagaaacttggggtatctcaacatttaggaaagtgtgcagagaagatgagatccttaaaatgttccaagaggttatatttaaatgttagaaggaaatcacaaagaatggcaccacaaaaatcaagggttggacttctttata

SEQ ID NO: 234810 - DNA, 797 bp, Homo sapiens
cttgaccgcagcacatccgttttccttacagtatgtagtacgcattctaccttttcctacaatgaatccaccagcagaaattcctgtacacatcttatcaacaaagaatttgaacctcaaagagtggctcaaagaggtcaggaggcaccttcaacacttttattggagatctccttgtctagatcatcagattctcactgtgttacctaggctgcagtgcagtggtgcgatctcaactcactgcaacctctacctcctgggttcaagcaattctcctgcctcagcctcccaagtagctgggattacaggaattacacactaatagtgaagaacaggtggcacctgaaatcacagaaaatttatttgtcctcaatgcaaagatgaactatgaagagcactttattgcgtttgaagaatataggaatgatgagtgaaatggtgaaggaagtggataaacaatgatgtaacgactgagcgtcatcttgcaactgaataagccagtgaggaacttggtaaatttgttgattatatttagttttacaatgtttaattctttattattttgaagtgatttattttattattaggaatgatcaatagtaatgcatcctccaaaactgtggaaagatcatattgcgcaaactagagcaaaaaatcacattcctcttgcatgggcatgaaatctttatcaaatgacatcaggcactgaagcagctatctgataccttcctcgcttccaccaaatggaaaggttattttaggattctctctttgtctgtctcttatgctgcaaacat

SEQ ID NO: 234811 - DNA, 763 bp, Homo sapiens
cttgaccgcagcacatccgttttccttacagtatgtagtacgcattctaccttttcctacaatgaatccaccagcagaaattcctgtacacatcttatcaacaaagaatttgaacctcaaagagactagcaagtacacaggaccactgtacagtaacagatcagttacactgagacaacagagtttacagcagagaaagagtttaatgctcaccggataccaagtggctcaaagaggtcaggaggcaccttcaacacttttattggagatctccttgtctagatcatcagattctcactgtgttacctaggctgcagtgcagtggtgcgatctcaactcactgcaacctctacctcctgggttcaagcaattctcctgcctcagcctcccaagtagctgggattacagagctcatggtttttaaacaacttgtggtaaaaatctggtggaaaagataacaacagtatatgatatggcagagttgcacagaagaatcagaacattgttttagagaaacgttgggcaattaattaagccagctgattaagttttaaaggtaaggaaacaaaacaccatctgtgagagtatatgattgttaaaaaataaagttaagactacagaccccaaatttgtgtgaaagtttcaaagtaacaaacaaatacactaaaatgctagaaaagtaaaacaactacttttcacgaatgtatctgaaagcatacaagtttaccacagttgaataaaacagattcattttgaaaaaatt

SEQ ID NO: 234812 - DNA, 472 bp, Homo sapiens
cttgaccgcagcacatccgttttccttacagtatgtagtacgcattctaccttttcctacaatgaatccaccagcagaaattcctgtacacatcttatcaacaaagaatttgaacctcaaagagtggctcaaagaggtcaggaggcaccttcaacacttttattggagatctccttgtctagatcatcagattctcactgtgttacctaggctgcagtgcagtggtgcgatctcaactcactgcaacctctacctcctgggttcaagcaattctcctgcctcagcctcccaagtagctgggattacaggtgaggagactggtgttaagtaactcgcccatccatgaccgcatcagtggttgaaatgggattggaatctggtcttaatcactcttccataatgcctccatggcaagggtggcagagaggaagaattatgctgaggaagtagaactgactagaagtcatgaaca

SEQ ID NO: 234813 - DNA, 808 bp, Homo sapiens
cattctcataaactgatttactagaagaaaggctgccaaaccataagtcttatgatatattctattgctaagttactctacagaaaagatggctgcaatgtatacccttaataatagagtacccccttcccttcacctttgtggatactgagagtcactgagaaacaagaatgctgccaccaccatcagcgaaaatagttattgtactttacatttctatatgtattaatgactaatagtagaagttgccccatatagtgaccatttgtgattttttaaaacatggatcatgtcttcatggcctctcaatttttcctgtgttaatctgtgaaatttcattaaatactaagattgttgatgctatccaatttcttgatttataatttgtttttaatgtttagtgttgtatttcagcattatgcatctagatgctgttacttgtgcatcttttcttgcattttatccttctacaaagcctttccacacactgacatcagttacttatcaatattttccactagttcttttatactcttacattttttaaaaaacatttaaccacttttaaatttagtttcatagttgtgaggaagacatcaaacctccccccaccatagtcaactcactgttttagctcagtttattcttgcaccattttttgtgggaggggggaaatgagatatgtgtgtttaaaataacagcctcctttggggctgggcgcggtggctcacgcctgaaatcccagtacttggggagactgaggtgagcggatcgcttgagtccaggagtttgagaccaccctggccaa

SEQ ID NO: 234814 - DNA, 772 bp, Homo sapiens
gaaaagagaagaaagaaaagtgggtgttacaggtaatgtgatcgtttatctaaaaacccaagagatcaactgaaaactatttaagctactaagaaggtccattaaggtgaccagatacaagctaaacatacaaaaaaaaaaaatcaggccttcggaaagcaggcttcaagttgtatttgatttagagctgcaagataatgcttattttaattggctaacattatagtaattgttggaaaaggaatggaaaagatcaacacgacattctaataataaaattctttctcaccctagagacaaagcacgtggatttttatagtgaaataagacctgtgaaaaatacagctttggcagtttttgttttcaaatttaaaatcatcttgagattgtctcattcaaggataataagccttgtgatgaaatagctacatgtcttgggaagcccttatacttcttatgaattctgttcccatcttaatacagacccctgtattaatttgctggggctaccataacaaagaaccacagagtgcgtggtttaaagaacagaaatgtattctcttatagttctgaatggcagaaatctgagagcaaggtggcagaagaatgggtattctctgaggcctctctcctttgcttttatttatttatttattatttatttattttgagacagtctctctctgtcgcccaggctggagtgcagtggtgccatctcagctcactgcaacctcgcttcccaggctcaaatgactctctcgcctcagccccc

SEQ ID NO: 234815 - DNA, 180 bp, Homo sapiens
ggatcctggccaaggagccagaaagtacagtgagcaagagtccaggacatgtagcaaggaggaatgtgactgaaataaagactaatgtcttcagtgcttgaggggagtaaccaggagacaagtgggactaaatggggcagagggctagagaggtcctgaaagcaaaactcctggctcact

SEQ ID NO: 234816 - DNA, 420 bp, Homo sapiens
atggggcgatcttggctcaccgcaacctccgcctcccaggttcaagcaattctcctgcctcagtatttttagtagagatggggtttcaccatgttggccaggctggtctcgaactcctgacctcaggtgatccacccacctcggcatcccaaagtactgggattacaagcatgagccaccgcgcccagcccacaaatttcaaattcagcctacttgggatttggtccactgaaacatatccagttttataatggaaagggggagggtagaaatcattttaaagaaatttgcttagcatctgaatttacaagactcttaagaacagaaacgtatcccaaccctcaaagacttcaactttcgcctttaaaccttatttttaaccatagtatttttcagctggaaaaacaaatcctcccaaac

SEQ ID NO: 234817 - DNA, 1025 bp, Homo sapiens
aaatataaaatacaaagaaatgttattctctatttatttttatatagattatagtctttatctaactgttcttagttcatttgaactaaaccaatgaatttgtcaacagaacaagccttaccagtggcttcagaggaagagcaagaaaggcatgaaagaagtgaaaagaagcaaccacaggtcaaagaaggaaataatacaaacaaaagtgaaaaaatacaactttcagaaaatatatgtgatagtacatcttctgctgctgctggcagattaacccaacaaagaaagattgggaaaacgtatcctcagcaatttcccaagaagctgaaggaagagcatgatagatgcaccttaaaacaagaaaatgaagaaaaaacaaatgttaatatgctgtacaaaaaaaatagagaagaattagaaaggaaagagaaacaatataagaaagaagttgaagcaaaacaacttgaaccaactgttcagtcactagagatgaaatcaaagactgcaagaaatactccaaatcgggattttcataatcatgaagaaatgaaaggtctgatggatgaaaattgcattttgaaggcagatattgctatactcagacaggaaatatgtacaatgaaaaatgacaacttggaaaaagaaaataaatatcttaaggacattaaaattgttaaagaaacaaatgctgcccttgaaaagtatataaaactcaatgaggaaatgataacagaaacagcattccggtatcaacaagagcttaattatctcaaggctgagaatacaaggctcaatgccgaactgttgaaggaaaaagaaagcaagaaaagactggaagctgacattgaatcttatcagtctagactggctgctgctataagcaaacacagtgaaagtgtgaaaacagaaagaaacctaaaacttgctttagagagaacacgagatgtttctgtacaagtagaaatgagttctgctatttccaaagtaaaagatgagaatgagtttcttactgaacaactttctga

SEQ ID NO: 234818 - DNA, 387 bp, Homo sapiens
gtttatgttaaaggagggaaagccgaccacttttatgtttttaacgggctaaattgggaacttgtcagtgctcacaatccagttcttcaaaattataaaactaaacttgaaagcaccctggtcacctctgacccactgtggaacacggtgccccccattgaagaggaaaggggtgcagttcttttcaagtagagccacctgcagtcacaggtgttctccgcaagccttggcgcttcagagagctatggtatttttgcttctgccagccattgtgatgacagtacctctgaagttcctgggccatattcaaaccttgtctctcacaagccacattagaaatatatatgccaccccctttctcaaaaatggtgttctttttcctgtttt

SEQ ID NO: 234819 - DNA, 475 bp, Homo sapiens
gtgcagtgactgttcatgcttctgtgtgtgtgcaggagtagtttggttggagtgtgcatatgcgaatgtgtgtgtatggaagtctatctatctgtaatgtaaagcagttgcgtaatgcaaatgtgtgtgtatggacatctatctgtaatgcaaagcagttgcgtaatgcaaatgtgtgtgtatggacgtctatctgtaatgtaaagcagttgtgtaatgcaaatgtgtgtgtatggatgtctatctatctgtaatgtaaagttcccaagtattgtgtatatcattgtttgagtttttaaattctaagataatttctagagaaaaagatgtacgggtgattcctggtgaaaagcagggaccgtgggcctcatattgagacacatttcacgctgtttagattgtaatggcaattatgtatgacttttgtacgttttttaaaaagccaataaaatacattttaaaatgtggaattatt

SEQ ID NO: 234820 - DNA, 2708 bp, Homo sapiens
  misc_feature (744)..(744): n is a, c, g, or t
  misc_feature (757)..(757): n is a, c, g, or t
  misc_feature (845)..(845): n is a, c, g, or t
  misc_feature (850)..(850): n is a, c, g, or t
  misc_feature (882)..(882): n is a, c, g, or t
  misc_feature (891)..(891): n is a, c, g, or t
  misc_feature (893)..(893): n is a, c, g, or t
  misc_feature (1107)..(1107): n is a, c, g, or t
  misc_feature (1109)..(1110): n is a, c, g, or t
  misc_feature (1117)..(1118): n is a, c, g, or t
  misc_feature (1129)..(1130): n is a, c, g, or t
  misc_feature (1147)..(1147): n is a, c, g, or t
  misc_feature (1151)..(1151): n is a, c, g, or t
  misc_feature (1161)..(1161): n is a, c, g, or t
  misc_feature (1187)..(1189): n is a, c, g, or t
  misc_feature (1229)..(1230): n is a, c, g, or t
  misc_feature (1233)..(1233): n is a, c, g, or t
  misc_feature (1241)..(1241): n is a, c, g, or t
  misc_feature (1250)..(1250): n is a, c, g, or t
  misc_feature (1257)..(1257): n is a, c, g, or t
  misc_feature (1261)..(1262): n is a, c, g, or t
  misc_feature (1267)..(1267): n is a, c, g, or t
cgcatggtgcgccgcacccactgtcccgcacccactgtccggcactgcccagtgagatgaacccggtacctcagttggaaatgcagaaatcacccatcttctgcgacactcatgctgggagctatagactggagctgttcctattcggccatcttggctccaccctcatgagacttattcacaatcatgagaacagcacaggaaatacccgccttcatgattcagtcacctcccacggggttccttctgcgacacgtggggattattacagttcaaggtgatatttgggttcagacacagagccaaaccatatcagctaggaaatgaccgtagagatgaaaagatattgatgatataaataatttcaataaatatatagggttggtttgatcagcttgaattttaattgttgaagatcacaaaggttacagacagcatttttgagagttaaagtgacatttttcagagattaccatgaacagtaacaactgtgaatagccaaaattaagctgaaacataagatttgtgttgggttctaagatagttagtgctgcaaagtcatgttgaggtgatgatctcagggatttttaggtgtatcctctgtgtatcttcaggcctgcctcttacttcgttggttccctaattgccattcatcctgcctgtatcagggaccactttacccgtcttctctgaagttcttggttattttatctgaagtttgttttttttttttttttttttttnggtaaatttctgngattattctgatttaccacatttggctttgaaatactgtatttaaatgttgagaatgtcatgccttaggaattcatagctagtctaanctaantaatgaaggaggaatatactgggaaaatccanccaacttangnggctccattacgtcttccagtttaattctttattactttctgagaccaattccttttggggatttggtttggtacagaggattagcttacttatctctgtatttttaatttaattttattttattttaagacgtagtctcgtggtgtcggccaggctagagtgcagtggcatgatgatcttggctcactgcaacctccacctcctgggttcaancnnttctccnncctcagcctcnngagtagctgggattacngggntaattttttntatttttagtagagacagggtttcannntgttggccaggctggtcttgaactcctgacctcgtgatcnnccngccttggnctcccaaantgctggnattnnaggcntgagccaccgcacctagccaggagcattcttcttactattgctgttctgctccttgacagattcacttagtgacagttgccactgccgcatcttagtcaagaaccttgtttctctctgggctatgacaatggtcttgctcactttctggctttcccaccccactccagtttggaaaatgctgtcactcttagaccattaggccaattaatccttcatcccctcacttaataacttttagttgcccttgtgggaggaagctcatattcttcagttttgcttttcaagttttccccaggttgaccccaaacttcctttccaacctcgacttttgctccgcctgactttaaaactgaacattagctgggatggttaatccactgttgcccaaaatgtttttcattgcctctttcttattctagcacattctgtggcctaaaatgtcctcttccttcctctgcctctatcctatcatcgaagcctcagttcagctctcaactcttctgaaaaatttaacttgatcacattagcctttagaaattctttataatccaaagttctctggcaaaattgcctccatctctcatttcattcaacattcattcattcattctacaaaggccacttgtcatagattgtcttgtattatcacctacgattgaagtgtttttttctttctgtttaattgcaaagaatagaaattcactcaagcttgtttgcataaagggaggtgaattgaagagatgtcccaggatgtcttgtcatcaagccacatttcccaagagttccagtgaatgggacccttccagttatcactcaccctggacctgcttagtgcaggagagggttgggggcacagttccttccaagggggcctgtggctggctgatgtagcagttgtgacctgcaattagcctacaatgggggcaaaatcatgtaacaaaaagcctattttgtattaaagcatcaaatatctcatgtagtttattgaatactgtattgaaagtgaaaaacagattggttgtataggcactcaaagagatctcagttctcttgcaagctccttaaagatgactggatgaggctttacaccattgtgtgtttgccaccgtgtttgtacacaggaagggctcaataaacaaatcattggtgactctttgacaacacagaaaacgattttgacttacagtgatttaaaggaattttagacccttttagcttgaagtcttaaaggaagttaagaagatagaaacttatttttaagagcttcccctacttgcattaataatgattaaatgttgaatcaaattagaatgaccaggctgcagtgcgtataccaatgtttgggaggtgaatgttctcaatgagggtcatgattctaacaaaattagttgttactcaaagcctgtttttcaacttccatttgcctcctactttgcccac

SEQ ID NO: 234821 - DNA, 903 bp, Homo sapiens
aagtttcccttcttggaaagaccccagcttctcccttgtacgtccacagagactctgaggccaagagtagtagcagctgctactatttattacttactatattccaggctgtgttctaagcactttatatttcttaacttcctccagttttcagtcactcagtagatgtctgtactatcatatccatcatatgaatatatcacatatgataggtaccaactatctgagtgaaaactggaagaaatgttctaaaatgacagtgttctcgttttatacttgaagaaacaaacagatttgcacaaggtcctcagctactaaatggtagagctgagactgaacccagacagtttggttccagagctgagagaggagtgaaagagttgggtaacagcaacaaccatcctgtacatggagatttgagtgattaaaatggattttcatatcttttatcttggacctcataatatttcaaattttttttaaaattatgaagtatatcatacatataggaaaatacccaaaacaagtatacagttcattaacacaaagcaaacgtgaataaccacattcagtaaagaaattggaacactgtcaacacttcacagcctcctttatactcctcccaatcactgctacttcctttcttcccacaggtaaccaccattctgacttctagcagtgtcatttaattttgtctgcatttgaactttatataaatggaatcatgtattcttttcatgttaacattgtgagattcgtcaatatttggaataggtgtagttttcattgctgtgtagtattcagtcatatgaatgtatcacaatttgtccatttactgttggtggactttgggatgtttgcagtttggggttattatgagtcatgccttttggagtacgtctg

SEQ ID NO: 234822 - DNA, 302 bp, Homo sapiens
tgaggtttagtcaagagtttgtacagctctaaatccttggatagaaggttttaataaaaatgccaacttttaattaaaaatctctctcttgattcagttatcttgcccaaacttggaaactcttcttactactgtatataataattcctgttaaccagatgttgtttgatagctcagtaataacaaatggagggtacttgtcctaacctgatttacattctttccttttgatgtgtagcatatgtggagcagtcagctaaataaaggtcttatcaataagatgcagtttgacacttggcttt

SEQ ID NO: 234823 - DNA, 458 bp, Homo sapiens
caggaccctagctttgcagagagtcctgtttccctttctgtccatttttgctcaaaaattccatttttttcaaccttcaaagtgtctgcgagtctaatatctcatggccatgtgacaagaaactggctcttagctgaactaaggaaaaagtcctacgacacaaggacacaaaaatgtacctgaagaacaattagaaagtctccaccactttcaaaaatcccgtaagagtgttaagaaaacttgctaatcagagtctatctatctcaggacttactccttttcctctataaaaccaaaacttccttcaaatacctttgaatcctgctgaaaagagcatggccacagatagtttcctttaaggctgcatgatcaggaataagtagcatttactaattttgtctcaaatttaattttatctttgacattattaaaataattattccttttcctactatatt

SEQ ID NO: 234824 - DNA, 1658 bp, Homo sapiens
  misc_feature (897)..(897): n is a, c, g, or t
tgttaaaagggttttaaataagtctctttttcaatggtgtaagtatgagatttgtgaagccctttccagatgcatgtgtgtttgcttatgtttaaaaaatcacttgagtgcaaacatttaaacacattttataaaactggcgggccaggcacggtggctcatgcctgtggtcccagcactttgggaggccgaggcgggtggatcacgaggtcaggagtttgagaccagcctgaccaacgtggtgaaaccccgtctctactgggggaaaaaaaaaattagccaggcgtggtggtgggtgcctgtagtcccagctactcgggaggctgaggcaggagaatcacttgaacccaggaggcggaggttgcaatgagccgagatcatgccattgtgctccggcctgggtgacaaagcgagactctttctcaaaaaaacaaaaacaaaaacaaacagacaaacaaacaaaactggcatggcattggacagtgacacataagaagctgatgtcatctttgccacttagagaaggcaaaatatcttgttagataacccctcttaaatgctctgcttggctagtactttttgggcttggtcagtgattagagtttaagttgtaaatggtattcataatttcttgtctctgtctcatcccaaacagattagaaaatctttgatttttgttggtaaggagctagcatcttattaatacaaagccttgtgcataaattatttccagtaattatttagtgcctaatgtggcatgctttgtgctgagtgctgaggataaaagaggaataaggtaagatctttatagtttagcagaggaggatgtgagtgggcagaaaaatgttatgagttctataataggaatatgtataggggaacttggttacagctcancttaattgagaaagggtgtgaaatgaaaagaccaaacattctttgcagaacagctaaacagttggaattatatactcagatgagttaatgattataaatagccatcatttattatctctccagaactccagaaccaaggttataaaaaatgaatagttctttatttagttcagaagcatttgtgaagtatctatagcatctgtaacatggcaggccctaaggacgctggcatgaatagtgggccgtcatctactgggagagtcagtatagcgtgtacgtgcgttagaggtgaaatgcataaaggggcatccaacatggctggtggctggccatgtgaacaagacatttgcatttgccacagcataaagaaggatatttctgagtcatggagtattttattatgtttatttggccccaatatttccaaataaaaagaggcctttgcttttgtgctacaggcgtttcttatctttaggaagaatgggccgggcgcggtggctcacacctgtaatcccagcactttgggaggtcaaggcaggcggatcacaaggtcaggagttcgagacaagcctgaccaatatggtgaaaccccatctctactaaaaatacaaaaattagctgggcttggtggcacacgcgtgtagtcccagctactcaggaggcgaggcaggagaattgcttgaacctggtaggtggaggttacagtgagccaagatcgtgccattgcactccagcctgggtgacagagtgagactccatct

SEQ ID NO: 234825 - DNA, 1514 bp, Homo sapiens
agtgcttttcatgtcttcaattatccaagtaccccaagcctgtggtttgcctcagtttgggtgggcatagccaagggggttccagggccgtccagccttcactcaaggatgactttccctaggctgagggcagtggacccttgacaaaatttaattaccgtctctgcttatggctggacctcagctggcagggtctcgggggctttaaacaaaagcaggagcctctccagaagtagattagggagatttgcattcaggccagggatttgtacatggtgttaattctcctccaggcagatatctgcttgggaaagggctgtgtgaccctatttagaaaaatggctacactttgttaacctttttcccttaagaaggaaaaatcattaatggcagaagttcaggccccagaggggattttctgggtgattctttgtttcaagagtcatgtttccccagatgtgattaaattgtccgtaacttttaactcttccctcccccgtgctttagttgaaaaataaaatctctgttcatatttcttgcatatcataggcttatgtctctttccagctctataagtcaaggctaaagattttttttttaagaaagaggaaaaaaaagacatttatttgagaagacatttttgtgtgtgccctgctcccaccatgcattcattcggtgctggaaagtggttaggggattctaagcagcccccttgctatagctggactgtgacgctgtcccttactgtcagtctgcttggctcctccagacctgatgcagatgctgcccgctccccacacagccctcctttttctctgttcccggaacactgtttgcttctgttactgagaaggcaatactgggtaaaggagaatgatgcacgatgtggagctggaagacccaggcccaaaggcagcttttaccacctcctagctgtgctaccctgggcccctgagcctagagttccttcactgcacttgcaattgcactgtgcaatgccttctcagtctcctggctagaaaatggaactcctggaggacaggatgtttttcatcctattatttccagtcatttatctagtcattcatttctttatataatgaccctcctaggacctaagaatagagagatgaacgcgatacatgtggtaggaattgtaagttgctgcttctttttgtttttgttttgagtgatccactgatggttgagaaagcctaggatctttctccccagagagaatgccactagagagggggcagaacatgaccctgcctgttgaccccaactgtgacacttctgaaaccaatcttaggaaagcctctcatgggaatggcatttccaagattaggggtaaagtgggacctccctgttgaaaagttgtcctgccctctgtcagctagacatgccataagcaagggaaagaatgacttttaatgacaggggtagaaattgggagcaagaggctgaacacatggaacagaattttttgaagtgccttgttaaatggaaagtag

SEQ ID NO: 234826 - DNA, 370 bp, Homo sapiens
attttaagacgtggaggagtaggatgagagcacgggcagctggacagagtggctccaacaggactgcaggggagacgtgcggtcacctgcggcgtgggaacagcagggcaagggcaggcgggctcggctcctggactcctcctgcggccacaaagctgccctgtttctccgcacctggacccccagtgtgtgactctgcatagagctcatcatgatttgtcgcccaaggtcataaccagtcacagccagcatcatttcaccaggcacacggggtagaagcagcgaagagaatcgcagcaccggcaaacacgaggaattccggcactaacacttatataatgaaaaccttctccgctctcactcaccgctg

SEQ ID NO: 234827 - DNA, 510 bp, Homo sapiens
tgtttggaacttgttttttgccccaccagctgagatcctttacaacaaacagtgcactgactcagggtcagtgagaatgttcaaccttcattaaatacattgcctagagaagaggccaaaagagatatgatcctaagatggcagtaaatccaacctttgtaaaaagatggaagccaatggccactgacgccagtgcagagttgccttcaatttaaagtgggttgttaatgtcgttccctggagctgacattttgtctttaggataaggcagaaaagcaggaaaagaagactgttattttgaagaagaaaacctgaaaacgcaacctcagttggtaactagtacttggcgaagaaggaaagccggtgcggttttaatgagagaaagtaactgccaggccttttgaccatcgccttcgctttgcaaatctggttttcatattcttgctcagtaatcacccaaagtcataactgtctctgaaattattcattaaagtcattttcagggattct

SEQ ID NO: 234828 - DNA, 319 bp, Homo sapiens
tctccgctccgactgcttgtaggcgatgcccaggcaaagaccgtgactgacactctcgctcacacgcacgcacggacccaggcccacgcccggaggtcgagccccgggctcgcaaccgttgtcgctcccggcgccgcggccagagcccggaccacggcttccgcgccgccgccgcctcgccgagaagggccgcgccggacctcgagcgcggcggcccccggccggcagggatggggaagcgggcgggaggaggagcaaccggagccaccaccgccgccgtctccacgtccgccggggccgggctggaacctgcggccgc

SEQ ID NO: 234829 - DNA, 529 bp, Homo sapiens
cagtttgctaagaactttatgtatagtaagttattcaatcctcagataagctcaccagttaagtgctattgtatgatgagttcagagagtttaagcattaagcccagcactgtccaataaaactctctacaatgctggaacagttctatatctgtactgcccaatatggtaaccacttagccacgtaagttattgagctcctgacttgtaggaagagcaaatgaagtgaatttttatttacttttagtttatataaatacaaatttaaataaccacatgtggttagtggctaccatattggatagcccaagttcatatggctagcaaagatcagaagtaaggatccaatcccaaaaattatctggctccaaaatcatgctttaaagattaaaataccaggatgggcatggcgactcacacctttaatcccagcggtttgacaggctgaggtgggaggatggtttgaactaaggagtttgagaccagcctggacaacaaagtgagactgcgcctctacaaaaaaacttta

SEQ ID NO: 234830 - DNA, 662 bp, Homo sapiens
tctatgtgtagaataaccttgatcagaaaacggattgaaagccaaacatgaaccttgctcagaacaaggagagtgttccactgattataactagttacctattttttcctttatctttaaaccctgatattattttctttatgttccaaacatgggaacatatggctgaaaaaatgaagactctgatggctaaaaaactattgcccagaacataaacatctaaatttagagaactcagtcttgcaacgattttttctactttgatttagctctgctatgcaacagtaaacctatgattcctttaccaacaaactctcccttcaaaccataaaatctctgagtatgctcattaactatggtccaaataaacaaataaaaaggattattccaaacacagattctattctaaaatagagactcagaggcaaaaaagaaaaaaaaagcgtagaagacaatgcatgttgtgaatataatgaaaacctcataaaagaaagagaggagagtaaaaaagagggagactttctaaaaatgcctagcacttctggacttgacttagaaatccattaagggcatataaaatgtggttcaaacacagaacctgagcttgagaaacagctctgattgtttgctgtatggcataaacagatggcatagcccctctg

SEQ ID NO: 234831 - DNA, 320 bp, Homo sapiens
gagaatgcaaagacaagccacagactgagacaaaatatttcaaagcatttttctgataaaggacttaaattcagaacacataaaatctcttaataaaccaacccagtggctcacgcctgtaatcccagcactttgggaggctgaggtaggtggatcacctgaggttaggagttcgagactagcctgaccaacatggtgaaacctcgtctctactaaaaatacgaggcaggagaatcgcttaaacctgggaagtggaggttgcagtgagctgagactgcaccactgcactgtagcctgggcaccaagagccagactctgtc

SEQ ID NO: 234832 - DNA, 325 bp, Homo sapiens
catcatcattattttatatacactttggcctacatagttataacatataaagttgtgaatagcattcgtgtatttatgtgtctaaaaaatgtgatgtagcaaacgtgcccaagtttaatgcaatcagactgtggcatttaacacaacctcactgagtgatgctcaataaaaataaaaaacaaagtgattttcatcactgctagctcatgggccccaaactcacatgaccagctcaaccatcaccacccaacgatagatctttgttgattctcatgcccccaccttcccagtttctcataataaagacagattgcttcttcacttg

SEQ ID NO: 234833 - DNA, 627 bp, Homo sapiens
agggagagagggacaaatcatgacatactacattaaatactataccttgcagaaatgagttctaattctagttgatcaggaataatttatcagactgccaaaacttttggctaaatacacattatctctatttattctcatatgaaacattatattcttccctaagtatgaggaatccataaattacagccaaacactccatactttttacatcttgtgtatagttctgatcctctagaatgggggtttctgcatcccagttatgctcaaattcacacagactttagagagacacagagctaatctcctatctaatgaggaatgaatgagggcttcactctgagagtcaacttatgccttgaggtaagtagctttaggacctagaacttgttcatgaatttaaagagaaaattcctgtgttttacttattaccaaattaagtagaggggacccaaggttcaggggagtgctaaaaatcacataccagccatacattaagccacttacttagctacagtacttaaaaggtttactttattacctgagaggaagacagtgccacaacataaactctgttgactggtaaatttgaggaattcaactactgaattaaaagcatggtagggt

SEQ ID NO: 234834 - DNA, 361 bp, Homo sapiens
tacaaggtctcactctgtcatgcatgatggactgcagtggtgcaatcatggctcactgtagcttcgaccaccctggctccggtcatcatcctacctcagcctcccaggtatgtgggattacagtggtgtcagtcatcaaccttgtgatcactgaggaaaagatacaataatccttgcctatcctttagaaaaagggtcttggatgttgcctaggctggccggaaactcctgaagtcaagtgattctcctgtctttgcctttagttctggaagtactgggagtgaacctctgcaccaggatttccctcaccattttctgtaaaatggcttactacaaagaacatttctgtagtatattttta

SEQ ID NO: 234835 - DNA, 497 bp, Homo sapiens
gtcttgtcaaggggtggtgcaagtcatgttcaggtttgtgaagcatgaacaaagtccaaagacatttttcagaccctcgtacgtgctgggcaatgtgcaggtagacaccgggctgtgaggcgcttgaacccaacaccaagaatcatgtcctcatggctctgcagcgaggtccaggagatgcttcatctgctggggcaggtggagactcctgcctgctacccagtgagccatggcctggtggctgctatctcacctccatgggacaagagcttgagcttggtcagcaactacagcagtgccagcagaggccgagggcctggcggcttccgcttaggtgcccagttgggtgttcagcagccatgcccaggctctacattgatcagcagaaatggctttaatcagagaattggtctttgacattttgagagcacctggctaatggatttgagtacattttgattactttaataaagcacccttgacagaatgcattttaa

SEQ ID NO: 234836 - DNA, 425 bp, Homo sapiens
caacagtgacaagtgagggcgacagtatgtacccttgaaggatgtgataagaggagcagtttgccccgtgatcttcctcccaacgtactcatcatagtaacatcaggcaaatcccaactgagggacattctacaaaacacctgaccagtactcctcaaaactgtcatggtggccaaaaacaaagtctgagaaactgtcccagctaggaggagcctcaggagacatgacagttaagtgaatctgggatcctggaatagaaaaaggacattgggtaaagtttatgaacacgtgaataaagtttggactttagttaataatagcatatcaatattggttaattaattatgacaaatataccttattaatgtaagatgctaataactcaagaaactgagtgtggaatatatagaaattctctgtgctgt

SEQ ID NO: 234837 - DNA, 463 bp, Homo sapiens
cacacaaaaatgagtttgtaagcattcacaagggtgaaattcaactcacctgtgatttacttataaaattaatctcttcataggaattatgtgtggacttcatgagcctcaaggttttagagggatgtgaacctgcatgtatattttctgacagtggagagggctctggtgcattgtgtcaccaacagatctcctagaccatggcttattaccaagccctccacagtgcaaggggtgctactggggaatgggtgggtttaaatcctgcctctgccattcactagatgtagccttgagcatgttaccattagccctctgcctcagtttccctatttgtcaagccgaagtaaaaagcagtctggaaaaatcgcattttggctctagaacccatggtcttaagcactgcaatatatcacctttcagtataaaaatatttgaatcagagttgcaataaaaaaaaaaa

SEQ ID NO: 234838 - DNA, 520 bp, Homo sapiens
caaagtccacaaaattagcaagtgacacagcagagctttaaattataatattttagaacacacactcttaatagttataatgatactctcttggtagtgggttatgagtttggttaatgactagacctctctgagtggtatgttcctcgtggatacaaatggtgttgctgagatattgattactaaagcacttaactaataagatgatggttagtaaaacaacatggctgggggtgttggctcacacctgtaatccaagcagaattttttgggaggcagaggtgggaggatctcttgaggccaggagtttgaagccagtttgggcaacatgggaagaccctgtctctacaaaaatagacaaaaaaccaattagctgggcatggtgatgtgtgcctgtagtcccggctaactacaaggctgaggtgagatgatctcctgagctagggaggttgaggctgcagtgagcccatgattatgccactgcactccagcctctgggtgacagagcaagacctattaa

SEQ ID NO: 234839 - DNA, 319 bp, Homo sapiens
cctaaaccccactaataaagtcagtctgaagtacaaagacaatcctccccaagaaagcagagccaagaggaggtttctttggggcggctgccatttgctcttttaacacttaaacatttcaaaattactcgtcattttctacagtttcttagcgtgcaaaaagtctaaatggcaaaggcatgattgtgagtttagatagttttatcacaccttttttttttatagtttcaaaatgtgtgggcagtttcagatgtgaaactccatctcacaaaggaggaactacagtctgattctttaacatccaagagagcagccagga

SEQ ID NO: 234840 - DNA, 425 bp, Homo sapiens
agaggtgagagaaaagattttcataatatgcatgccctttcctacttcctactcttctttcttttcttcacccatccctgtctttcttattgctagtaatggctaatgtaaagcatatcactcttttgcatgtatcactcttctccctgactctactgctatgtcagaactgggacttctacttcacagaaaacatagagattatcttcagatacgtctcagttttatgatcattgtcttagatatcacttgccttggcattagattttactttgatttctgccatttcagaggataagctcacctgctctctttcctctctttatttgtatatctgtctctgtccctctttttgtacattctcggtggtattgaagtatcctcatatgtttcttatccttaaaaaaaccattccctagcctaga

SEQ ID NO: 234841 - DNA, 558 bp, Homo sapiens
cccagaatgtccagacaacttacttttgactgattgaccttatctagttggtgttctttaacatgttccccatcccctgtaaaccctaataactaaactgataagagtcatcctcaaaattgagcaggcatctgaatcatctggtatacttactaaaattccaattgctggtccccaatttctgacccaagattctgcatttttagcaatttgttgctgatgcttctggtctggggcccataccttgagaacccccggtctagaggcctgataagattcaggcttaattttttttacagacatacttcataagtagtattgatagtttctttgaatctggtttttaataatctttctaatgatgaaggaggaatgttctcaatactgacagtaatctcagttcttcaaactataggataggtttctatagccacaatagtatttttgtcacaagggcccaaataagaatacatcatgtatatttttaatacttattcaaattacaaattcactgtctttaatttattctaacaaaagtaaacctaattttatagttat

SEQ ID NO: 234842 - DNA, 187 bp, Homo sapiens
tagaaaaagtgtgaaaatttgctcattgaacagtgaattcccaactgtaagttggtaatcacaaagagtttgaaacaaaaaaagcccctgaaggctgccctttgatctgcttgcctagtttgacaagaagcctgatctttcagaataggttagtgacacacaaaagcaggtttcagttaagcaacac

SEQ ID NO: 234843 - DNA, 558 bp, Homo sapiens
gagagggggtggccagcacggccccagcccgcatctcccacgctgggctcagtcctgggcacagtgggagacatggaggtagagacccgggtatatggcctgcgctcctctgactcgccagagagaggcttctctcattcagcagagctgcagccctgcggctgaagggcctgctgctgctcctgctggggttgtttgcctgcctgcaagaggcgctggggggcaggaaaagaaacctgggaggaggggatccagcagctcctcctgctcccagaggcggcttcttcctccaaccttggaggtctgccctcaactgggcttctgggctgtttgtccctgaggtgctgcccaggacaggctcttcttgacaggtgggcaggggtgtggaggccagggggcatctccaaagggtatcaaaaccgaagcttcaaaactcagcacttgtgcccccaaatcgccatgccatgccaccacctgccctagaattcatccatagtgttaaaattacaagtttctacaataacatttaaataaagtttgactttttgaaagttcgtg

SEQ ID NO: 234844 - DNA, 486 bp, Homo sapiens
aattcattgtcccaaattctgagaactcctgaggaaagatccaaaagtaatatggctcaagatttttgaactgcccaggctctactcaggctcttggacatcttgcccatctcaaaggtctctcctgcctactgccggccctacccacaagatgtgaacttcagagccttcttgcaactgcttcttggctattttcaccctctaaccctctggaagaagaatgaggactattatgaaggcaaaagcataaaaggggaaaagattagcctccagagtaggaagattgggttgttggaagccagcacaagtcttcccctgaaagagttaattcgcctccaatgggggtagggactgacctgggaggggcctcagcctacataggacaggcctaaaggccccattggggctgaaggtgacactgggtcagatccctaggattctgcaacttgaggtgggagtgtctataagctggaaacaaaagtttca

SEQ ID NO: 234845 - DNA, 350 bp, Homo sapiens
tgctctcgattaagtaggctttttccttttgtgacttgaatcaacaaaaaaatgcattgtcgccggccagtcgcagtggctcatgtctgtaatcccagcactttgggaggccgaggagggcagactacctgaggtcaggagtttgagactggcctggccaacatggtgaaaccccatctctactaaaaatacaaaaaatagccgggcatggtggcacacgcctctgtaatcccagctactcgggaggctgaggcaggataaaattgccagaacccgggatgcggaggttgcagtgagccaagattgtgccactgcactccagcctggccgacagagcgagactctgtctc

SEQ ID NO: 234846 - DNA, 415 bp, Homo sapiens
gacattgccaattttcgaataatctgatggtgggatgtcaaagtgtatatcttttatctaccctcaacttgcactttaaattccagccattctttgacaataatagagtagtgagaaaccaaaatatgtcagttgtctgtggaaataaaaaaggccatagatgtttaaaagttaaaccgtagaaacatttttaaaatgaacattttctacttaagctttccattaaataatagtttcatttaacgaatcaacttacctttgtgaagtgacatagcagataggtgttgtacagactgctttgaaagatgcagcccttatctggtgtccctacagtctaatatggataacattgatacgcaaacaaatgaagaaacattgtatgtaattattgtgcaaaacttttctaaatacatta

SEQ ID NO: 234847 - DNA, 425 bp, Homo sapiens
caaaaattactctcctacatttggtagtaaagtacaaagcttaatgtgtctaaattctcatggtcttgtcattccatgctcttgatccgcctcttccctcactccccagtccttactaccagtactgttagctacttgcatccagttttctcagcatttgctggtatctggctggccaggcttcaaccccacatttgctacctattttcaagccaacatttactatttattccaacagcgggccaccattagtgtcattaaaatttgtaatcctacccttacgcattgacttgtttaattaagggcctactgtttagctgcctctttatagattgagaatgacctaaagcaatataacttaagagggaaagacatcattttcccatgtagttttagccttgttttcttgatctatggagtggaaa

SEQ ID NO: 234848 - DNA, 549 bp, Homo sapiens
aatttgaggattctgtggacagtgaggaaattggagtccacaaggacagactgctttttcaagaaaaatggaagaagggaagtagagattcttaatgctgttgtttacctgtcacaggtgctgaggagaaagaccccataagaagaaaaagagtcaaaagatgactgggagtgaagtgatatatccacaagcatgggtggagccaatcagcatgaatgagggaagggagacaggagggagaaattgagggggtttcatctaagattgctcttttctccatatagtaagacacaagtaatatggtgagagtgagtgggaagagggcagaggtcatggtgtttaggagttgaaagacccataaaacatgaaacaggaatgggaaggaagccaactgctgatgtgtaaaaggcccatcaggttgtgtttgcagcctcctaaacttggtagcattccttgaggttgtatgatttcaacactgaattttgttcacgtgtgcttgaattagccatgcgtattactcacgtaatatgctgatccactttaagcaaa

SEQ ID NO: 234849 - DNA, 437 bp, Homo sapiens
cctatcaaattggcaaagattttgaaacgtcataatagcacatgttaaaaagaagaaatgagtactgatgggagtatgcaagctaaaactttgagaaaataatttaatcgtatgtatcaagattccttaaaaaaaaactgttcatgtcttctagtgattgtactctaaaaatttatcctaaggaaatactataaaatgattacaaaacattcagatgcaagtatattaattataataggatttgtaataatgaaattggatgcaatttaaatgtctaacaataaaaaatatttacatagataatagaacatccagaaaatgagatatgcaactattaaaattgtgttaagagaataatatggggaaatgtgaaaaagaaggatatatacagacgcacgtacacatccaaagtatgatcccattttaaatacaaacac

SEQ ID NO: 234850 - DNA, 626 bp, Homo sapiens
ttttttaggtacattttccctcaggtcttacatttgagtaaaaatagtttgtgagtctgtggagttgctattcagagtggtaacatgccgtagggagatgtaaatctgtattgctacctcgtgctcacttgactgactcttccgttggaacaggtgaattttcctcatcaaaatgttgtgtccatggtgatgagagtaatgaagatgataacgatgatcattccctttttatcttctcatctaaactatttgcaactcctctgtccctactttctaactagtcaaaacatggtcacttctcactaattccactgccatcaccttaattctaggccacaattaactctaacctggtcttttcaatagctttgtagatgaaatatgtgttgtctcttcatgatttgttctcattatgcaaccacagtaattcttcttaaatatgagtcaaatcatgttattctgcttcccgccctcttggcagtctagcaactcccttagaataaaaggcaaggaccttacagccatcaaccaggccccttgtggccaactcctgttcctttttcacttctctttccaatattcttgctcactctgcttcagacacaaggagtccatgctgccttttt

SEQ ID NO: 234851 - DNA, 428 bp, Homo sapiens
attctccttgctgtcatattgttagatccagagagttagactgtgcagtaaatgagctatttttttaccttagaaaagcagaagacttgaattttcataagtagactcttagaggttccttcgtgatgcttcagcacatttacttttctccaaagaaatgcttcagggccgagtgcagtcggacgcctgtaatcccagcactttgggagacccaggcgggcgaatcacgaggtcaggagatcaaaaccatcctggccagcatgatgaaacccagtctctaccaaaaataaaaaaattagacgggtgtggcagcacgtgcctgtagtcccagctacttgggtggctgaggcaggagaattgcttgaacccgggaggcagaggctgcagtgagccgagatcatgccactaacgacagagcaagactccgt

SEQ ID NO: 234852 - DNA, 552 bp, Homo sapiens
acacctgctccccagtgtccccctgagctctaacctctgtccatcctccctgcaggtcattccttctttcagagttgactctgctggttttccccagtagctgccacataccctttaaattctctttaaacgcttatccactgtcagctgctccctgaagtcttagcagatgatctcacctcccatgttactgagcagactgaagccattccaatataaatcctaatttcattcctcttatggacggcgtggcttagcctcatctctcttctcactcctgtttatgaagaaatgtctgttcccttataaagttgccccgttgccctgtgtgccggatcactctcctcctagctgtccaaaaaagctgctccacagttctcctttacgtgagcattccgtttcttccacatcatggtccccgttcttcctgtaaaaatatggtcaagtctactctggctttaaaaacaaagtcattccattactctggtatttactaagactcctgtccttctcctcacagccaattttctttaaaaaagttgtctgcatttc

SEQ ID NO: 234853 - DNA, 637 bp, Homo sapiens
aaaaaacaaaaaccaccaaaaaaaaactgccaaagtataggttatagaagagcagacttacttggtgtttgcaagaaagacaaagagatttagagtttccatcaagtttgttgtgagttactaggaggtagtgccagagaagcaacatggcattaggctgcatgggtagaagtatagtactgagaacacgggagagcatcggttttgttgtacttgggactaaacattctgagggtcctggacgttttatgagaggctttggtaaactgaagagtgatgtaggtacagatgcacagatgtagaacagtgagcccctgcgccagcccagcatcaatactttttttaaaaagtgccctgtattttcctcatgccctggagataatggagccgtcttttactcactgcccacttctcatctctgtctgctcctgcttcctcttgttggcttcctgtgcctccctccaaccttctcctacccccctgcagtgttttaaactctcttttcttcttaatttctgttcgcctcaaccaaccctaaagtgctcttgtactcacaggtaggcttttataattgcttgatcagtttatcagtcaatttcagtattttgttgagctttgacaaagatttttattctaa

SEQ ID NO: 234854 - DNA, 432 bp, Homo sapiens
aatagtagtgacggggtttcaccctgttagccaggatggtctcaatctcctgagctcatgattcacctgcctcagcctccgaaagtgctgggattacaggcgtgagcccctgcgccagcccagcatcaatactttttttaaaaagtgccctgtattttcctcatgccctggagataatggagccgtcttttactcactgcccacttctcatctctgtctgctcctgcttcctcttgttggcttcctgtgcctccctccaaccttctcctacccccctgcagtgttttaaactctcttttcttcttaatttctgttcgcctcaaccaaccctaaagtgctcttgtactcacaggtaggcttttataattgcttgatcagtttatcagtcaatttcagtattttgttgagctttgacaaagatttttattctaa

SEQ ID NO: 234855 - DNA, 356 bp, Homo sapiens
agacaaacaacattaaatcttgaggcttgagaataatcattgactccatatcccgtcttctgaacacactggggtggggattgggctcccaaggcttcaggcaggtccatccccatgacttcacaggatgcagcccacacagcttctctcggagttggagtcagatgcctgcagctctctcaggctgatgttgcatgctgatggctctacaggtctcaagggcagccctgatcccactatgcattaccccagtgggggctctctgtgatggccccaaccccatggctctctggacattgacctagtggggactgtctgctgtggccccactcccatggctcgactaggcattgcct

SEQ ID NO: 234856 - DNA, 226 bp, Homo sapiens
cgggtttctgggtgtgtgcctgtaggtgggctgggaatattgctgagaggccaagggaggttcctaaagcaacgaacccctgcctgacagattccccgctaaaaccaaagagcacgatccggaatttgttccctcctcttccctttaggcctgagaaaggggacagagtaatctctttcttgcctccttgtacatttccttcctcctgatttccccttctgtgttt

SEQ ID NO: 234857 - DNA, 370 bp, Homo sapiens
caattgaaaaaaattgaagataaaatgattctgtttttgttagtttatatgttctttgaacacttggttagaaaactcacagcataggccaggagccgtcgttcacctgaggccaggagtttgtgaccagcctggctaacatggtgaaaccccgtctctactaaaaatacaaaaattagctgagcatggtggtgctcacctgtaatcccagctacccaggaggctgagacaggagaattgcctgaacccaggaggtggaggttgcagtgagccgagatcatgccgctgcactccagcctgggcgacagaacaagatcctatctgtctcaaaaacaagcaaaccaaaaaaacaccaaaaaactcacagtat

SEQ ID NO: 234858 - DNA, 751 bp, Homo sapiens
agcatgacatactttttctttccaaatgaggcagtgccacaactaaaaaagccagttcgcctttcgctttctaaaatcatcttgctggagagaacggttatcaaatcccatccactgcccatgtaaaataaataccattcagaaaagcgtggcatggatggccatacttctgatgggtttataactgtagattgcatacgatcccaacgtgaagcctgaaatacgacattcaacgtcaggcttattccaggctactgctgtggctacttttgtaattcaaccagtggggcgttttaggctaacgtatattgcctctaagctgataagcattttcctgatcccaggccccttctaaaattgaacacacacgttcagctggggacacctagatggaaggaagggaaagaggagaacccgaagtgaaggaaaagtcaccaagaacagtttcgtggaaaaaaaaaaaaaaactctcaagaattaagaatgttgagttgcttgaatggagcttgggcaggaaaaagaccataactctcacacacgtgaaggttactgatacccaggaggtaaaagaagtatttaacatgctctaaagaagggtaaccagagtaatggggcgaaaccaagggaggacgtcctggaatgtaatattagaaataaacttccaaacagggaagtgtccatccgagtgtgaaatgggtttatcagaaacaagctgcatgccagtttcattgacattgcaaagaaggttaga

SEQ ID NO: 234859 - DNA, 480 bp, Homo sapiens
tattcgacatgttttctcttcaggcacattttgctgatggccatgacataattgaatgatcgaagttttgggaagcacaggtacatgcaaatcatttacacatgaaaaagaaaggatgaagcagtgcaggagagtaagagaacacacagactccatatgtagaaaggggatgtttcagggcctccatttccagtaacgaggaagaattagttacccagacacactgtaccattcaaaacaactaaaactgctaaattaaatataatatcttcttaaaagtcatcaacaaactggcaaagaaacaagaaatactaaggactaaggacaaaatctaaatgagggtggcaagctaagtaaacattaaccttttgctggcttgacgtatattaagaatctgaccttcacaatcctattgttggcaaagaaagatagaaaaaaagagtcaagaagcccaaaaaacttcaagccagtccacacatg

SEQ ID NO: 234860 - DNA, 406 bp, Homo sapiens
cattttctgcccttccactatgggatgaccctttccaattgccaacaccaaatgataagaaactcttggacttcccagccctcaaaagcattggccaaataaacttctgttctttataagttgcctagtctgtagtgttcttttatagcagcagaaaacaggctgagatggctacattccaatataatattatttacacaaacagtcagtgtgtcagatttaagctacagaccatcactggtgacccttggcctaagctaaaatgtcctgtaatgtgtaccccatagaactacagatctttatttataaaatataaatctgataatgttgttttcctatttgaaatacctcagtggtttttcatatacacaatagtggacaaaataaagcctcttctatttctacc

SEQ ID NO: 234861 - DNA, 457 bp, Homo sapiens
aagacagggtctctgtcgctcaggctggagtacagtgaagccatcttggctcacttcagcctcgacctcccgggctcaagcaatcctcccacctcagcctcccaagtagctgggatacagacacacatcaccatgcccggctaatttttaaaattttctttggaaaagggatctcgctatattgcccagactggtctggaactcctgggctcaagggatcttcccaccttggcctcccaaagtgctggatttacaggcatgacgcccagctgtttctctattcccaaaagagaagtttcagcatgtcttcaccttcattgtcgcagcagcttccttcactggtctcaaactcctaacctcaggtgatccacctgcctcggcctcccaaagtgctgggattatagggatgagccaccgtgcctggctggacttataatttttaaaaagacccctgata

SEQ ID NO: 234862 - DNA, 494 bp, Homo sapiens
tcagctcttacccgtcctacatagtgttggaaaagggatctcgctatattgcccagactggtctggaactcctgggctcaagggatcttcccaccttggcctcccaaagtgctggatttacaggcatgacgcccagctgtttctctattcccaaaagagaagtttcagcatgtcttcaccttcattgtcgcagcagcttccttcctggtctccccacttattccttccccttcctccaagccagtcttttctccatccatcagtcagagttgatggtttttaaaattaagttagaaaatatcacgcctgctccaaattacccatggttccccatttcaaacaaaataagcgcctaagtcctttctatgacttctgaggcttcactgatctgtcctttgactcatgtacctggggtcctcatctcttcccactcttctgcctcactgcttaactaaacctgtctgatttctggtgggagatgggtccgagctcga

SEQ ID NO: 234863 - DNA, 1574 bp, Homo sapiens
  misc_feature (853)..(853): n is a, c, g, or t
  misc_feature (1026)..(1026): n is a, c, g, or t
  misc_feature (1094)..(1094): n is a, c, g, or t
  misc_feature (1501)..(1501): n is a, c, g, or t
aaaaaggagaggaggggctcctgggaacagggctcagaggcaggcgaggtccctgattcactcactcactcactcattcattcgttcccacacacactaagcagacatgtgcccagcacctcctttgtgccaggccccatctggatgtccatgccaggagagaggcaggcagacctgggcctcccaggatggaggacggacgaagaccactgagcatgatgagaggggaaaagctgaaatgtgagtgggaagctcctgctcaccacggcagccccctggctagcacggcctggcagagtccatatggaaggaaggaaccaggttctatgggatcatagaggagcggacgtgatgcagcctggaaaaggcgccctggagctgagggtagggatgccaataggcattagccaggctgtgggtgggaggtggggagaggggatccctgcaagaggcaccaaggcacaaaaagcagcttcctggaggggaggttcggaggtctctgagcatcctatgaaatcccatagtgcttggccttggatcttcccaggaagcatgagacccagccaagctgaggacgaggctcagactctggcaggcgcatggtgaccccttcctgaggacttccagagggatgggtggagaaggacatgagaggtgccttcctcccatcctctgccatcttggtacttggtggacaccgcatagggtcccccagtccttcctgcactgctctgaccctgtgaaaggaccatgagttggttgtactctgaaaagtctcccaaccccaatataggctgacccagcaaagactccgcttatcctcattttaccaatggggaaactgaggctcccnaccgtcaggtgactgccttaaggcgtcacaacaaactcacaccagggccgattccagggtgttccacttttccagtgactatcatcttgggccatggcaggcccgtgattggaggagatgagaaggaagtggggaagaacttggtcttcaaaaatagcaggcaggaaggatcnggatcagcacaggggattggacttgggggcttggaccttgatggtaggggacaggaccatgatggggntgaacagccatccaacctagaccctttttgctcctaacactcccatcccactctcagcataatgtagtgggaagtcaggagggttctgcagtatctgtgggaaggacccatcacggcctgtggtcttcctcgcctactgttggctcctttctttgagtcagaagcagctggctcaggccaggcggggtggctcatgcctgtaattccagcactttaggaggccaaggcaggtggatcgcttgaggccaggaattcgagaccagcctggccaacatggtgaaaccccgtctctactaaaaatacaaaaaaattagcttgacatggtggctcacgcctgtaatcccttagctactcaggaggctgaggcaggagaatcacttgaacctggcaggtggaggttacagtgngccaagatcgtgccattgcactccagcctgggcaatagagtgagactctgtctcaaaacaaataaacaacaac

SEQ ID NO: 234864 - DNA, 441 bp, Homo sapiens
tattccagatagccactcacgtaagtttatctttttaatgctgatgggggccaagaaaggagttcatttgcttcctggctgggaaattcaggaattgcattttgggcagcatattttatagtatgtgtgtaagtatttcactgcttttcctcagtttattttttgtgagagttcattgaaaatgtccaaggctgggcacagtggctcatgcctataatcccagctctttaggaagccgaggtgggaggatcacttgaggccaggagtttgagaccagcctgaacaacatagcaagaccctgtctctacagaaataaagaaggaggcaaaggcaggaggatcacttgagtccaagagttcaaggctgcagtgagctgtgatcttgcagttgcactccagcctggatgacagaatgagactttgtctctcaaaatgtatatac

SEQ ID NO: 234865 - DNA, 341 bp, Homo sapiens
ttctgaggtagaattcatgagaaaggggagagtcaatgaagtatcacactggattttctcaagcacttgaaaattaacatgaagggaacataaggtcccagaagaaagatggcctgtctaggcggaggaaaaataagctgacatttttgttttgtgcaaaatagtggggtttctgcttctgggtaggatggagtgaataaagatgaaacaaaaaaagaaaaaaaaaacagattaatttaaagtgtaagctttagaggctagagaggaatatataagctaagattccataaatagcccttgtgagaagtgagaatattaaacatttacacacagaacagaaa

SEQ ID NO: 234866 - DNA, 432 bp, Homo sapiens
ccatgcgtggtggctcgtgcctgtaatcccagaactttgggaagctgaggcaggcggatcacttgaggtcaggagtttgagaccagcctggccaacaaggtgaaacctgtctctactaaaagtacaaaaaaaaaattagccgggtacagtgacttgcgcctgtaatcccagctacttgggacactgaggcaggagaatcgcttgtacccatgaggcacaggttgcagtgaggcaagattgcgccactacattccagcctgggtgacagagcgagactccatctcaaaaacaaaaaacaaacaagcataatgataaaagggtcatttcatcaagaagataaagacatttctattttgaaatatatttttatggatattttgatacctgccgtttctttgtgttgggaacattacaattcttctcttctggcta

SEQ ID NO: 234867 - DNA, 3081 bp, Homo sapiens
  misc_feature (1269)..(1269): n is a, c, g, or t
  misc_feature (1362)..(1362): n is a, c, g, or t
  misc_feature (1442)..(1442): n is a, c, g, or t
cggattcgagcgtcggtaccccctgggccttgggaagaagggccttggccttgggaaaaagggccttggccttgggaaaaggaaattgccgtggacccccggaggccgagctttcccgtgagcgcgagatctgcccccctgcacatcccgcccttggcgaccagagtgggactcccgtccttaaaaaaaaaaaaaaaaaaaaaagacctttagaatttcatttgggttaaatattgcccccttcctgcagctttttaagatgcgcattcctctaacgggaatccatagtaattccctactttctttgcgaaagttattggatcttttccctcattagaaaggcccgagtatgtctgggaattaaactgccactcaaccccacatttacttacatctttaccaccgcgtctattcctctctcaccccgcccccatggcccaagtctttagcctggcattcacgtaccctcactggcaatcttggggaaagcctcagaaaatggtacagcagaaagcccagcgtggaggagccagttgggagactcagcatgtgggcaccctgcttctctgcgcagagcctcctctgtcataggtagatccagcccatctcaggttacactacagtctgtaacccctagcctctccctcctcgcgcccctctggcctccatcactgtcgtgccggtcgtggggacagatgggagggaattacggtatttacagctgctcttcgccggctcttgctcccccgcgtgtcgacaaccgaaactgcagcgaggcccagaggcctctgcccactcccctcggagttccaggaggacgctaagcgcgagaagccaggctcagggaaactgaacgcccatacgctcctagtccctctcacctggatcctctgcgtcaggttacgtgcttgcgctatttttccttttgtttctttaaatttttttttgtagagacagtgagcgtgtgtgtgggggggtggaagggtaggtctcaccattttgcccaggccggtctcgaactcgtgggctcaagccttagccacctgccttagcctcccaaagtgctgggactacaggtgtgagccaccacgcccagcctgtttgcgctgttttctgaggctttccgccaaattgctttctttcctggcaagaaagtcaccccctagaattggggtgtcccagtggactggccgggtggttggattgaaggatgtcctccaacctcaccttcagctgtggcctggctggggacccagcacgtggttcaangccatgggaatcacctgtttctcctttggagcgagtcacacctggaggccattctcaactctccacagcttgttgtatgtccctgagtgaagnattaacctctctgaatctcaggtgcctcctccgtacagtggagcttccatattctagcatttgcctcacagagttgtcantatgattacatgggatagtataggttgcaggtggagagctggaggataatcaccgccaccacactagggcactcattgtgtgcctgggcctaggcattttgaaatagccctattaaaaaaggatcatccacagataaattgaaggtcagagagatttagtgattgcatggggtcacacagccgagctaggactggactcagaaagacatggatacacaagtgctgggagatgtgggtggagtctgaggtctgtgagtttatagcaggtgtccccaacccccgggcaggaccagtatgggtttgtggcctgttagcaatggggctgcacagcaggaggtgagcagcaggcattactgtctgagctctgcctcttgtcagatcagcagaggcattagattctcataggaacatgaaccctattgtccccacatgcgataggttgctgcactccttatgagaatctaatgcctgatgatctgaggtggaacagtctcatcctgaaaccattccaatggccccaccccaacccatggaaaaattgtcttccagaaaaccagtccatggtggtaaaaagattggaaaccactggtttagagggtacctagggacctgaaaaataaactggccctgcctccctttggttaatgctttcttcctctaatggattattcatcacctctcaatccaatgcttgaggggccagggacctaaaagaccatccaggcctatttccttatggagagagggaaaggacttgtccagttccacagctgggcagtgcagatctggattggagctcaggtctcttagtcctgtgctcctgctgctccttcccccactgggtgagcagttctgcagggggctgccactcctacccacaatcaaactgctcacttatttggagcacctgttcaggagctgcccactgggtacccctgaccccacttggctgggagcttctgccactccctccctcctctcaagcagctgattgctctaagcagagaggaaaccagtgccattctggctcccaaatgctggtacaagaccagcaaatatttaccactcttgtgtgtgtgtgtgtgtgtgtgtatttttttcttttgttagaaaagggctagcgcaatatataacaagtgattcatggtggcgtcttctggtagattgattgtattttgtcccttctttttttttttttttgtttttttgagacggagtctcactctgtcgcccaggctggaatgcagtggcctgatctcagctcactgcaagctccaccttccgggttcacaccattctcctgcctcagcctcctgagtagctgggactacaggcacccatcaccacgcccggctaattttatatatatatatttttttagtagagatgggttttcaccatgttagccaggatggtcttgatctcctgacctcgtgatcctcccacctcggcctcccaaagtgctgggattacagacgtgagccaccgctcccagccccttctttgtattttaaaatttctttagtaatgaacaaacattaataagacaagaaataaaaagctgttttaaaatttctcttaagcaaaaggccaacaatcatttaaaaaatgagtgggataagaacagattgttctcagg

SEQ ID NO: 234868 - DNA, 232 bp, Homo sapiens
gtagagatggagtctggggtctcgcttttttgcccaggctgatcttgagctcctggcgtcaagtgatcctttcaccttggcctcctaaagtgctaggattgcagctgtgatccaccatgcccagcctccattctttgttctaaactttttcctgaagggcctggaggaagtcacacccacaggccagaccccacattcttttctgctgaacccaagtcttttgacaaagctt

SEQ ID NO: 234869 - DNA, 310 bp, Homo sapiens
ggagtctgtcccagtgtcattcctgggactggcccagcagtcccaggatttgtatcagtggatactgaggatttgttatcagtgaagtgggagaaccgcagcataggtactgcagggcgtttctgcaagcccaccagcctcctctttacttgcctttgttgcctcttgtgcattgctcctttttataaacgtcccagccaggcactggcgctccgcctataatcctagcactttgggaggccaaagtgagagggtcgcttgaggccaaactagcctgggtaacttagcaagaccccatctttacaaaaaa

SEQ ID NO: 234870 - DNA, 511 bp, Homo sapiens
acagtgctaaaaatgtgcctctggaaagcacatttatggtgttatcctcaccctgggagaagggaagaatggagttctttgcattgaactctctcctgaccccacaaatatcttttcacaattggtggacatttatacccctcttgttgacttttgtctctgttgtcctgttgaacgctgatctcattgcacttaaacgttcacccatgcaagggaaatgtcactaaatgctgctgcttgctgagctgttgattttgcattggatagagcactgtgataatggcccactgagctaatcttcacaggaaagaaagttacactcatgtggttactctccctctgtaaagcagatctgtatttagtcttctgtttctgaaacttgaaggcacatgtcataaaaatgttctgcatataaatgaaataatgtaaagcaattatgatgcttgttaagaatgcaatgattatgaaatgtggagtgttaatgaataaaatatattttaacttgttcaaa

SEQ ID NO: 234871 - DNA, 480 bp, Homo sapiens
ctgtgtgtcattgcaaagtcatagtttctaacctttgcctgttgtggtttcaggctagtactaaacaggaccagaggacagttgaagtttactctctataatcaagagtgttttgcatgttttctacccagcaaattaaattatttgcctgatgagcattatttcatgattcccttcctaaaaggatgaagcatctggaaaatctgaagaaccgtgtaattgacgtccatgtttattagtggactaagagaaaatcatttcctcttgccttacattctcagacttacagggtcacagcttctgctgttggcatatggggggctgctccctctgacctggagccagcgtgggtctttggcctagactctcagctggacgtgggccaggggttctctggttgcgtgaccatgtgtcccctttcctagccagggttcctgcttcctgttgcccaagtgctcaaactccaactcgagcttgtct

SEQ ID NO: 234872 - DNA, 401 bp, Homo sapiens
aaaataagacctcgatgaaccctgaagggcagcaggtggaggagcgtgtgccagaagtagaggtgagggaccagggccacgcaggagcagcctctgtgtgtaggggagctgtggtgtccagaacctgcaagaccccaggtctgggcagctgcagcagattccgcccatagtggggagatgggaaagtctgttgtaattcccagggccatgtgaggcggtgggcagagcttggagcggaaaggcgggtgtccccggggtttgcatcccgggggcaagcagtgaggtctccatcagcctcggcacagcgagagaactgctgagcctcctatgagtgagcgtcccgtggttcccacgcacgataacgtcctagaagtgctgatcttgcccccaggttccagccc

SEQ ID NO: 234873 - DNA, 364 bp, Homo sapiens
ctctagacaacccaaaatgatgcctggattaagctagagcagcagaaatctgtgtacctagactgattcctattgtcccctggaaacttgctttctactgatttgatgttggagttgtgcgaattgaaagtcccacgtcaggaagtgtcctagtccaggacaaacttgggcagttggtcaccctaccagttaggcatatgtctcagtaaaattcacatgtgcatctaacgtgaggccatgaatatctttgtgtgaattctcagaaggtaattctctctggtcttagtttctcctgagcaactgtgtatttaaccaaacgacctaaggttactgtgaattgtagaattgaagagtttactttttc

SEQ ID NO: 234874 - DNA, 266 bp, Homo sapiens
ccgcctgtaatctgactctcactgtagccatccctgattgaggctgggtccccgcctgtaatcctgactctcactgcacccatccctgatcgaggctggactctttggtgtctttgtttacggcggcagatgggaaatgactacaaataatcagatgtcttgtcgtctgatcgtttaccggcatgctgttcatgccatgctgactgtgtttattgccctaatggggtgattaaacattctttattaaaataaacaaagtcttagga

SEQ ID NO: 234875 - DNA, 500 bp, Homo sapiens
ttccacactgcagtagcataaagataatttcctctccagcaaacaattgtagtaaaaacaattccatgcacaaagtaaattgaggtattgagaaacagttttcattattataaagaatgaaataaggatagggagacccactggggcttagttccaatttcatgtagcatttttctcattcatttgttggacttattctgccagaatgtattttatgttaatataactaaatctaatttttacctctcgtgaagagactaggatattataacattcaaccacatattggtgattctcttctattacggtcatatctgctgaaattgttatatagctatttttttgcaaaatatattaagacattccagatttttaaagtggttctttagtagttaaatttaattagacttaggtagactaaccaaaaggaatagtagtacaaatacaaggtgatttgcctttaaataagagacagcattgtacttataggaaaataggga

SEQ ID NO: 234876 - DNA, 372 bp, Homo sapiens
ttgggcagggaaggagagtctcaggcatgtgagaacaaagaggcttcctagaattggccactttttgtggttgcatccttgttgctggttatgtcttcttgccccagtgactctagacaggggaggatcatttgaggcacacagagaaaaagaggcttccctgacagtattatttgctatagttcattctttttttacgtgttctgcctgcccacttcagtatttcttggtggaaagggagagtctcagggctgagggagagcagagtccttcctctggccaattatttttggcgaggcttccaattaatctctttggctggtagcgttgaacttgtctgatagttccagagggacatccgctcaatcagga

SEQ ID NO: 234877 - DNA, 354 bp, Homo sapiens
acagtaggttggcccacttggggtctgtctcagtggggttggaatcatggggctgttactcttattaagagcataggcggccgggcgcggtggctcacgcctgtaatcccagcactttgggaggccgaggcgggcggatcacgaggtcaggagatcgagaccacggtgaaaccccgtctctactaaaaatacaaaaaattagccaggcgcagtggcgggcgcctgtagtcccagctactcgggaggctgaggcaggagaatggcgtgaacccggaaggcggagcttgcagtgagcggagatcgcgccacagcactcccgcctgggcgacagaacgagactccatctcaaaaaaa

SEQ ID NO: 234878 - DNA, 335 bp, Homo sapiens
  misc_feature (143)..(143): n is a, c, g, or t
  misc_feature (326)..(326): n is a, c, g, or t
  misc_feature (332)..(332): n is a, c, g, or t
tttttgtagagacggggtttcaccatgatgcccaggcttaggagaatgctttaaaacctcacaaatagataaggaaaagacaaaaggcccaagagagaaatagcaaaatatataaacaggcaatttctgaataaaaacctgtnagtggcaaataaagaatgtgggaaggggcattattctcattagtaatccaataaatgaaatttaaacatcaatatgatactttatattacccacaaatttggcaaagatctataaaaattataatacccagtgttcctaagaaattataatacccaggcttaggagaatgctttaaaacctcncaaatngat

SEQ ID NO: 234879 - DNA, 416 bp, Homo sapiens
agagaaagttattaatttaaagagtgaccagatactacgaagctttcttagaaggcattcatttttcacttagtgactttggacagctggatggtctttatagaatatgtatgagctgcatcatctgcaattagtgttttcaagagattcttttagtgaatgtaagccccttctgtctcctctgtatctgactcagatttggaaacccctaacatggtttattttggtatcatgaaaaaaatattttccacgtgggagaaactagatacaggcataaaactgagatcacattacacctgtattcaggattctaaattgaaagtattagtcttaaaatttatcctgaaagtacatattttttagttttttccattaaagtgacctataataaatgaccagctcagtggcaataagca

SEQ ID NO: 234880 - DNA, 439 bp, Homo sapiens
agtaaattttgttcctaagtctgccatttttatgttaatctagcctatatcaagttggcaaattcacatgctaagaggggtgggcagatagtacaattaagtgaaactgtctgagtactgaaccggaggtgacaaagagagtgtagctgtaaagaaactacagatttgtgccctgctgtaggcaacagtaaggtgctagggaagatacttgagggaagcagcctgactaccttggttgtaactggtagggagtatttaggaaggattgaagccggatagagatttaaagacagagagaagaggttgcagtttcctaagtaagggttatgtcattggaaaatgaggggttggattagaaaggaaaaaaatgggtaggacttggacagaaataactgaagcctggtccattgtcactttggaaagtttgtaaaaaaaaaaa

SEQ ID NO: 234881 - DNA, 364 bp, Homo sapiens
gcagccagtgagtaatgagttttgtgtcttggaaggaagtgaaataaatatatcaagaagtagaaagcggctgggcatggtgactcacgcctgtaaacctaggactttgggaggccgaggcaggtggattgcttgaggtcaggagttcgagaccagcttggccaacatgatgaaaccctgcctctactaaaaatacaaaaattagccaggtgtggtggcaggtgcctgtaatcccagctacttgagaggctgaggcaggagaatcacctgaatccaggaggtggaggttgcgatgagttgagatcatgccactgcactccagcctggatgacaaagtgagactctatctcaagaaaaaaaaaaa

SEQ ID NO: 234882 - DNA, 451 bp, Homo sapiens
cagggcctggcatcaattagaagctaaatcaaatgtgtcgaattgagctgctgaattagttgtcatccagctcctgaatggatgggttgcagaggaaaagttctggagaaatactccacagtgtggtccatggatctgtgccagtctgcaaactgttactggtccatgatgattaagcagtttgcaccagaatgtttatcaatgcactgcttccttcattgagaaagtcttggtacaaaataaatagcaactaaactaatcagtgtacttagctacagagtagatttacattctggtacaaactgtttaatcatcatggactagtaataaacagttcatggactggctcctgtgagtagctctgttctgaactctagaggttggcaaaatacgacctgtgggccaaatctaggctattgcttgtttttataaataaaattttattggaacc

SEQ ID NO: 234883 - DNA, 748 bp, Homo sapiens
ttgcaggactcactggatagatgttattcgactccttcaggttatcttgaactgcctgacttaggccagccctacagaagtgctgtttactcattggaggaacagtaccttggcttggctcttgacgtggacagaattaaaaaggaccaagaagaggaagaagaccaaggcccaccatgccccaggctcagcagggagctgctggaggtagtagagcctgaagtcttgcaggactcactggatagatgttattcaactccttccagttgtcttgaacagcctgactcctgccagccctacagaagttccttttatgcattggaggaaaaacatgttggcttttctcttgacgtgggagaaattgaaaagaaggggaaggggaagaaaagaaggggaagaagatcaaagaagaaaagaagaaggggaagaaaagaaggggaagaagatcaaatcttgcaggactcactggatagatgttattcgactccatcaatgtactttgaactacctgactcattccagcactacagaagtgtgttttactcatttgaggaacagcacatcacctttgcccttgacatggacaatagcttttttactttgacggtgacaagtctccacctggtcttccagatgggagtcatattcccacaataagcagcccttactaagccgagaggtgtcattcctgcaggcaggacctataggcacctgaagatttgaatgaaactatagttccatttggaag

SEQ ID NO: 234884 - DNA, 1860 bp, Homo sapiens
  misc_feature (951)..(951): n is a, c, g, or t
cagtaaatgctccccccatcctctccaggcccaaaccactggaattgtcctttactcctctttctgtcttatattcatgtctgtcagctaatatacctgaccacttctccccaccttcactcctgtccacccttatctccttcacagaccattatggcaggctcctcagtgatctctctgctctcacccctgcccccagagtgttccttacatgcagctggagggatgctgtgagcacctgtatcaggtcatatccctcccctgctcagaacacttccaaggctacatcttgctcggggtaaaacccagagtcctctgcaaggccctgcattgtctgccctcatcacctctctgacatcatctactcttcttactccctgtgctccagccacactggcccgagggcctttgtgcttgctcttttctttgcctaaagaactcatctatcaaatagcccagacttgttccttcctctttaggtctcccctgagatgtcactgccttcctgagatcttccctcaccacccttctaaatttgtgacttatagtcacatctatctttgcttctttaactttatccttagcattaatcatattactgtttaacactctgtagaatttatctgtgtttatggtctgtctcccctgacccttacctctaggagactgttgacttcatcagggaaggggcttttgtctacttcctccgttatctccaacacatagaaaagtgcttggcacacagttagggctcagtaactacttatcaaataaactattgaagagcacatatctggatcccagcatggcagggactctgccgatcccctttctacagaactccaaggagctgccttaaagttttctgagggctcaagatattcaacaagtatttcaccttgcctcttctttctcctcagcattgggaacacagaagagaacaaaatattnccctacccctatagaacctacagtaatagggacagtaatttagactatcaaataatcacacgtgtgaaattaccaagaaaggtagagagtgttataagaatacttgataggaaatcaaatccggatcctaggaaatgaggtttgaggtgatgaaggagtaggcattaactcctttaagagataagagtttgggatggttggagcctagaggctgatgcagagcaagaggtcagaccttgtgtatgccataaggagtttgggtgtttaccccacatgtagtgggaagttgtagaattttaagctggggacaggagcgtggtcaggtgtttgtgtgtgtgtgtatgtgtgtgtgtgtgtttccttctaaaattcttcacactaaagtgtactttaaaagactcctctggcttctgtgtggggaattgactataaggcattaaggattaaagtagggagaccagtgacaaggctgttactgtggaattaaaatagctgtgattgaagacagccacacattctttgctgtttttcctatcaagaggtggagtctccttccttctccttatatctgagctggccctgagatttgttttgaccaatagaatacaatgaaagcaggctgggtgcggtggctcatgcctgtaatcccagcactttgggaggctgaggcaggtgaatcacttgaggaaaggagttcgagaccagcctgaccaacatggagaaaccctatctctactaaaaatacaaaaaaaaaaaaaaaaaaatagccaggtgtggtgcactcctgtagtcccacctactctggaggctgaggcaggagaatcacttgaactcgggaggtggaggttgcagtgaaccaagatcataccactgcactccagcctgggtgacagagtgagactctttctc

SEQ ID NO: 234885 - DNA, 722 bp, Homo sapiens
ctaaggcagctgcatctagccaaaatatgactctgaactctcacctctccttctccagtctgagcaagctctgtgcatggctggagaccctaagagtgtatctctgaaaaccccagaccaccccttgatttactgaccaagatccacacctactcccacctcggaatgtcagacatcataaatttgatggaatctagagaagagactcccctgcaggttgggctcatagtaatctcatctagagtaggttaaatatttctgagggaagaggagaagtaaactataaataaaccatcgctattcaggcctcccatcagttgctttcactgaagatggagaaatgtataacccactgctttaaatcagggctcttgtcacctgagctagaaatgtgataaataccaaagtatcctaaaaaggattatttaagaaagagttaaaaatatatagagaatatattttccagttatataccttgatttatgctttttatgcttatgttacctctcaaattgttaagagtttagcactttgaccattctgtcctgaattaaaacatatctatttcaaaactgcaaaatttcatattctatttttcctagcctacctatattcttataaaaaagaactaaattccaaccctttattcttattaaacatctcttagagctttagataaaagtataggataaagtcccactattcggcacgagcggcacgag

SEQ ID NO: 234886 - DNA, 668 bp, Homo sapiens
ctaaggcagctgcatctagccaaaatatgactctgaactctcacctctccttctccagtctgagcaagctctgtgcatggctggagaccctaagagtgtatctctgaaaaccccagaccaccccttgatttactgaccaagatccacacctactcccacctcggaatgtcagacatcataaatttgatggaatctagagaagagactcccctgcaggttgggctcatagtaatctcatctagagtaggttaaatatttctgagggaagaggagaagtaaactataaataaaccatcgctattcaggcctcccatcagttgctttcactgaagatggagaaatgtataacccactgctttaaatcagggctcttgtcacctgagctagaaatgtgataaataccaaattccagttatataccttgatttatgctttttatgcttatgttacctctcaaattgttaagagtttagcactttgaccattctgtcctgaattaaaacatatctatttcaaaactgcaaaatttcatattctatttttcctagcctacctatattcttataaaaaagaactaaattccaaccctttattcttattaaacatctcttagagctttagataaaagtataggataaagtcccactattcggcacgagcggcacgag

SEQ ID NO: 234887 - DNA, 2797 bp, Homo sapiens
  misc_feature (721)..(721): n is a, c, g, or t
  misc_feature (1836)..(1836): n is a, c, g, or t
aagaagatgcctggagcaggcagcatcctcaaatggaaggtaattgccctcaaatcacttaactaggatgacctactttgctttcctgtatagccaggtctgttatcagacccttatcttgggaggcatcgtgccagagcctggggcaagaaagggctgctatccaggaatgcaggtgaaattatagctattagccctgtcttagagtgtgaggaaaatgtgcccccctacccctggctaagtttgggttcccatgtcataaactgcctccctctctgatagctctgcataaacatcccaggaactcaaagtaacatttgatttcccaaagagaacatttgcatttgtaactgtcagaaataggagagatcatcaaagctaaatgaattgggctataaacagtttgaaatatgtctttaaattttaaaaaacatattttttgtttgttttggggagagaggatcatttagactcaacaacaaaacagaaaactgtgagtgccattttgagacaagacctacctggtccttccccctcatactttctgctaccccgtgacctccctctctccttccagtcacagattatccgcttggttttggagttttaaatgtgtggtcctgagagggagaggagagcaagagaatctcaagatagatttggaagattagggtaagacagtgagggtactagaagtgctttcccaagtgagtccccagangggagggaaaatatccatggagaaggggcagtgtggttggtcctggctaaagggcctgaacagcagaggctattgcagccctgcatagcacagggcaatggaataacttcataggcccccaaactgcatggaagcagatagggtcttagaagcacggggttgctttcctggacctggtgtggcttggaagccacaaaatgtttcctgtgcacctacaagagtgtaagaaaaccactggataggaaaggaccttgcagactggaatgagtcatcatgcagaccaaagtctacctcagtggatggcagtgtggatggatagggacagatgtccggatactgtctgtcgtgtgcactcccaccccagccttttggtattcctggtacaaagatataactcttaggaaaaacagaaaccctaaataggctgagattaagtttctttcacctggaagaatgaagactatggtagattttgagttataaaactcaaatttttgcatttcttgaacacctaagtctatggactgatattagcaccagctgcagaaataagcacagttctcaccacttttcaatttgaatgcagaaggagccttgtctggccatagctctgccctctacagtggaaaacataactttagtggaatttagagatctttgagtaaagacagaagaatagcaaagtctgttatttaccacctcactttttttgtacaaatatttgaaagcattttcgcattatacaatacaatttgtttctattttgaggcaaacacatctgttagaggaattattgcatttcttccccctagaaagctgtctccttaatctttccacaaagtcttgagaatgttagcttctttttctacattgttggaaatcacagcgtggtgttcctcctgacggcactcccaccttcatcattctgtgcttacagtttcaccacattccattgttctaatgaggtgactgagtggaagctgaggttagaagataaaacttagaacaggagcagcccttggctcctttcccttggagggtgcttcaaaagaggtgaagttttcaaagatagaacttcagggagagggttttgtgttccggcttcgaagtggcanttctttcctgagttgtcacctggactatcttaccatatttcctggttgaatgattcctctaaatcttatcttagcctggccaaatatccctggtccctttgatatctaagttttctggccaagaagcaaattcctgtagttccaaatcagtagctcaagttcctgggtcagactacccgcaggccctcaagttgctgtctggttgtcgtctaaaaagttgatgtcacaggccagttgatatcaaagagtcctgggtttaaaaactgactcaggacttctaattgtaaggccttacacaagttatgtgacaattcttaacctaagtttcctcagctataaagtggggattatagcaatatcccacaatacctctgacaatgaaataatgtgtatatattgcttggcaccggatatggtttggatctgtatccccatccaaatctcatgttgaaatgtaatctgttatgttggaggtgggacctggtgggaggtgattgaatcatgggggtggtttctaatggtttatcactgtctccctagagctgttctcatgatagagttctcgtgagatctggttgtctaaaagtgtgtggcacctccccaccccacttttcctcctgctccagcaatgttcaatgtgcctgcttcctgttcaccttctgccatgattgtaagtttcctgaggcctcccctgccatgcctcctgtacagcctgtggaactatgagccaattaaacctcttttctttataaattgcccagcctcaggtattctttatagcagtacaagaactaatacagcacctaataggcattcaacaaatagtaattccctgctccttctgcctaagcagacatgcatgggtttgtgtatctaaactgtaggactttacaaagactaaaatggaattttttgaggcatttcactataatcaataaaataaagtatttgtaatcatgtt

SEQ ID NO: 234888 - DNA, 2751 bp, Homo sapiens
  misc_feature (721)..(721): n is a, c, g, or t
  misc_feature (1836)..(1836): n is a, c, g, or t
aagaagatgcctggagcaggcagcatcctcaaatggaaggtaattgccctcaaatcacttaactaggatgacctactttgctttcctgtatagccaggtctgttatcagacccttatcttgggaggcatcgtgccagagcctggggcaagaaagggctgctatccaggaatgcaggtgaaattatagctattagccctgtcttagagtgtgaggaaaatgtgcccccctacccctggctaagtttgggttcccatgtcataaactgcctccctctctgatagctctgcataaacatcccaggaactcaaagtaacatttgatttcccaaagagaacatttgcatttgtaactgtcagaaataggagagatcatcaaagctaaatgaattgggctataaacagtttgaaatatgtctttaaattttaaaaaacatattttttgtttgttttggggagagaggatcatttagactcaacaacaaaacagaaaactgtgagtgccattttgagacaagacctacctggtccttccccctcatactttctgctaccccgtgacctccctctctccttccagtcacagattatccgcttggttttggagttttaaatgtgtggtcctgagagggagaggagagcaagagaatctcaagatagatttggaagattagggtaagacagtgagggtactagaagtgctttcccaagtgagtccccagangggagggaaaatatccatggagaaggggcagtgtggttggtcctggctaaagggcctgaacagcagaggctattgcagccctgcatagcacagggcaatggaataacttcataggcccccaaactgcatggaagcagatagggtcttagaagcacggggttgctttcctggacctggtgtggcttggaagccacaaaatgtttcctgtgcacctacaagagtgtaagaaaaccactggataggaaaggaccttgcagactggaatgagtcatcatgcagaccaaagtctacctcagtggatggcagtgtggatggatagggacagatgtccggatactgtctgtcgtgtgcactcccaccccagccttttggtattcctggtacaaagatataactcttaggaaaaacagaaaccctaaataggctgagattaagtttctttcacctggaagaatgaagactatggtagattttgagttataaaactcaaatttttgcatttcttgaacacctaagtctatggactgatattagcaccagctgcagaaataagcacagttctcaccacttttcaatttgaatgcagaaggagccttgtctggccatagctctgccctctacagtggaaaacataactttagtggaatttagagatctttgagtaaagacagaagaatagcaaagtctgttatttaccacctcactttttttgtacaaatatttgaaagcattttcgcattatacaatacaatttgtttctattttgaggcaaacacatctgttagaggaattattgcatttcttccccctagaaagctgtctccttaatctttccacaaagtcttgagaatgttagcttctttttctacattgttggaaatcacagcgtggtgttcctcctgacggcactcccaccttcatcattctgtgcttacagtttcaccacattccattgttctaatgaggtgactgagtggaagctgaggttagaagataaaacttagaacaggagcagcccttggctcctttcccttggagggtgcttcaaaagaggtgaagttttcaaagatagaacttcagggagagggttttgtgttccggcttcgaagtggcanttctttcctgagttgtcacctggactatcttaccatatttcctggttgaatgattcctctaaatcttatcttagcctggccaaatatccctggtccctttgatatctaagttttctggccaagaagcaaattcctgtagttccaaatcagtagctcaagttcctgggtcagactacccgcaggccctcaagttgctgtctggttgtcgtctaaaaagttgatgtcacaggccagttgataaggccttacacaagttatgtgacaattcttaacctaagtttcctcagctataaagtggggattatagcaatatcccacaatacctctgacaatgaaataatgtgtatatattgcttggcaccggatatggtttggatctgtatccccatccaaatctcatgttgaaatgtaatctgttatgttggaggtgggacctggtgggaggtgattgaatcatgggggtggtttctaatggtttatcactgtctccctagagctgttctcatgatagagttctcgtgagatctggttgtctaaaagtgtgtggcacctccccaccccacttttcctcctgctccagcaatgttcaatgtgcctgcttcctgttcaccttctgccatgattgtaagtttcctgaggcctcccctgccatgcctcctgtacagcctgtggaactatgagccaattaaacctcttttctttataaattgcccagcctcaggtattctttatagcagtacaagaactaatacagcacctaataggcattcaacaaatagtaattccctgctccttctgcctaagcagacatgcatgggtttgtgtatctaaactgtaggactttacaaagactaaaatggaattttttgaggcatttcactataatcaataaaataaagtatttgtaatcatgtt

SEQ ID NO: 234889 - DNA, 1650 bp, Homo sapiens
cactccttcccttccctggttcctcaaggcacggctcccccaggcagatgaaagcttaatagagttttgcgacatgaaagtcagtcggaggaaagagccttgaacagttgtgcgtgagagagaggcaagcgcccgaaattattttacgacaaaggcagctctctctgccacagaggcacagaggagaaaggagcccaggaaacgggtcatttctttcgtggaaaaatggaaatgctctgaagcattttgggagacgtgctgtgaagcaggtgacaccagaagacaaggacactgggggctccctgccgggaggcgcaaaaagcaactcccgttcgagggtcagaggagcctggatgctaatgtctctccaaagtgacttggagccaactgccggaaaggccatgcccttaggagcacaggcaggtcccagctcagggatcaagaggtctgctgtgtgaccttcttcaagttcctgaccctctctgggctgcagtcaccttattcagaaaatggagaggctagacaagaaaatgatgctaatctcacccttttctgggctggcattttattgagcacctactaggcgctgggcattttgctaggcccttcgtgcacactgccatgagaaatccacagcaaccccagagatgggttcatcaataactcaccagcaaatacttcctgaggccccactgtgtgccgagcatgggcataggtactgggcacacctcgatgaacaagggaggtaaggatgtgactctcctagaactttctgtcgagaagaggagatggagaataaacatggaaacaagcaagatcattctggagaaaatgcaatcagatgatgtgctagatggtaacagagagaggtcgaatgagagagagggccgtgacagcctctctgagaagctgaaatccaagcagaacctgaaagacgaggagaaactcagatacataaagactgggaaaagcattcaagtagagggaacagtgcgtgcaaaggccctgaggtgggtgcagtagataccacaggccccctcactcgagaccactccaagcacctcctgccctcttgtgccacagagctcagaaagctaaagcaatgttccccagaggtcctgtggccaaggtcctgcatgggcctgggtgacccctgcagaagcttctgagcaagactgagcagggaaagaaaggccatgtcagaaaaccatcctccagcgagcatggaggcagagagtctcatcctggcatcccaggtgctgagcagagcagacagcagcagaggggctccctagagcagctgggggccctgcctgtgccgtcgctctttcccctccctgccctctggtctgacatcccattggcatcacacacgatgcctcccggaggtgctcttgtgcacacagcaggtcaaagtgccagagaattagatcctgtcctcttgggaacagccctcagccagcagtgagcccttaggaggatgctccaagctctatcctccccgggtccagaggccctgggatggagcgccattgtggaagcagtgacaacttgatgaagctccctgggctggccccttcctctctgccttgttccccgttccctgcagtcctgcaatcacctcccaaataaaccatgtgcccttgctgg

SEQ ID NO: 234890 - DNA, 2667 bp, Homo sapiens
  misc_feature (1201)..(1201): n is a, c, g, or t
  misc_feature (2165)..(2165): n is a, c, g, or t
  misc_feature (2271)..(2271): n is a, c, g, or t
ataactgactcatgagtctataacaggatggtcagttgataccggactgcggaatcctaaaagcccgcagagtaaaaccggaatcttagtcatagcccccattggaaggggatctgttagtgatccccattggaaggggatctgttagtgatatgatatgtccttcttttagcgcactagtgtgttctcatctcctgcatagatgcacgggttcatcttcacgtaaaaattgacccctaacaaacctgtgtcaaagaacagttttcatagcatatatagagggaagaattatagtagtctttcaacaaaagtaacaaaaccttccattgtactggattttttagcagcctgaaaaacatttctcaagacttccctgtcagaatcatctgatgtagagtgtttctgtgcgttcttagtttttctatgcgatgttaagttttggaggaactagaaatgtttgaccagaggcacccacaatcaggtttccagtatctcaaagcttgtcttgtggataaggagaaaactcaacgggcacaactaggaccaataattgggagtgtgagggtgacaggtttcagttcagtatctgaaaattaggctactagagctgcccaactgtggaacaggctacctgaataggtactgagcacctcatcccgggaggcattcaagtagactctggctgactgccttgatgacagtgttggatgagaagctgtattagtctgttctcgcactactgtaaagaaatacctgagattgggtaatttataaagaaaagaggtttaattggctcatggttctgcaggctgtataggaagcatggctggggaggccacaggaatcttacaatcatggtagaaggcgaaggggaagcaagtacctcttacatggctggtgcaagaggaaaagagagagggggaaggtgctacacgcctttaaacaaccagatctcgtgagaactctattgagagaacagcaccaaaggaatggtgctaaactattcaaaagaaatcacccctgtggtgcaatcacctcccaccaggccccacctccaacattagggatcacaatttgacatgagatttgggtggggacacaaatccaaaccatatcagaagctgcttttactgaaaggcctctccagtcagaaaactggattgtcgagtgctccaataagcagagtaattctgggttcttnggtgctaaaaaaaaaaaaaaaaatagaggagattactctccttgaacaaaatttgatctattgaaaaattttaccttggattttttttcacctatttctatttaaactttaccgaaaaaaaaatcaaggaatcatttttcttctccatgctcccctggattcttcaaacaaaggaaaaattttagtaggggttaggtgagggaggagtgagtgctaggactggatttgaaaaggtcagttgttgaagaaggaaaacagaggcaataattatttaaaagcatggttgcccaaatgtgattttcagtactggttttggtgatggcgggagaaaattcaagtagggctccctgacttgcaagtaacaaacacttctgccttttctagttcccacagacctacccccaacacacacacctatcaccccatcaatccaccactgctctttgattttctcataacagtaaagagaatgcaaacaaatctttccttctgaagcccaaaactggatcttaaaatcttaaaagttgggccatgagcggtaaggacaccagaagaatctaaaatgcctgcttaaatcaggcagtgaatcttatggagtctacagcagggtttggcaaagtaggcccaccacttgatcatacaaagaaagttttgttataacacagccatacccatttatgcagtgttttggcagctttcacaccatgatgatgacttgactctatatgacaaagaccatagggccttcaaagtctgcaacatttactatgtggcccttaacagaaaaaaaattgccaacctctagcttagggcagtggttctcagccctggctcagtgtcagaatcacctggggtacattaaaaatagagatgccaggctgggcgtggtggctcatgcctgtaatcccagcactttgggaggccaaggtgggcggatcacgaggtctggagttcgagaccatcntggcctatatagtgaaaccctgtctctactaaaaatacaaaaaatgagccggacatggtggcatgcgcctgtagtcccagctacttgggaggctgaggcaggagantcacttgaactgtggaggtggatgttgttgcagtgagccgagatcatgtcactgcactccagcctggcgacagagcgagactccgtctcaaaaaaaaagaaaaagagatgccaggctgggcatggtggctcatgcctgtaatcccagcactttgggaggccaaggcaggtggatcacttgaggtcaggagctcgagaccagcctggccaacatggtgaaaccccatctctactagaaatacaaaaaattagccaggcatggcggtgcatgcctgtaatcccagatgctcgggaggctgaggcaggagaatcgcttgaacctggaaggtggaggttgcagtgagctgagactgcgccactgcactccagcctgggcaacagagcctgactccatctc

SEQ ID NO: 234891 - DNA, 2553 bp, Homo sapiens
  misc_feature (1087)..(1087): n is a, c, g, or t
  misc_feature (2051)..(2051): n is a, c, g, or t
  misc_feature (2157)..(2157): n is a, c, g, or t
aatgttggtgaaagatactataattcttccctctatatatgctatgaaaagcgttctgtgacacaggtgtgttaggggtcaatttttacgtgaagatgaacccgtgcatctatgcaggagatgagaacacactagtgcgctaaaagaaggacatatcatatatagagggaagaattatagtagtctttcaacaaaagtaacaaaaccttccattgtactggattttttagcagcctgaaaaacatttctcaagacttccctgtcagaatcatctgatgtagagtgtttctgtgcgttcttagtttttctatgcgatgttaagttttggaggaactagaaatgtttgaccagaggcacccacaatcaggtttccagtatctcaaagcttgtcttgtggataaggagaaaactcaacgggcacaactaggaccaataattgggagtgtgagggtgacaggtttcagttcagtatctgaaaattaggctactagagctgcccaactgtggaacaggctacctgaataggtactgagcacctcatcccgggaggcattcaagtagactctggctgactgccttgatgacagtgttggatgagaagctgtattagtctgttctcgcactactgtaaagaaatacctgagattgggtaatttataaagaaaagaggtttaattggctcatggttctgcaggctgtataggaagcatggctggggaggccacaggaatcttacaatcatggtagaaggcgaaggggaagcaagtacctcttacatggctggtgcaagaggaaaagagagagggggaaggtgctacacgcctttaaacaaccagatctcgtgagaactctattgagagaacagcaccaaaggaatggtgctaaactattcaaaagaaatcacccctgtggtgcaatcacctcccaccaggccccacctccaacattagggatcacaatttgacatgagatttgggtggggacacaaatccaaaccatatcagaagctgcttttactgaaaggcctctccagtcagaaaactggattgtcgagtgctccaataagcagagtaattctgggttcttnggtgctaaaaaaaaaaaaaaaaatagaggagattactctccttgaacaaaatttgatctattgaaaaattttaccttggattttttttcacctatttctatttaaactttaccgaaaaaaaaatcaaggaatcatttttcttctccatgctcccctggattcttcaaacaaaggaaaaattttagtaggggttaggtgagggaggagtgagtgctaggactggatttgaaaaggtcagttgttgaagaaggaaaacagaggcaataattatttaaaagcatggttgcccaaatgtgattttcagtactggttttggtgatggcgggagaaaattcaagtagggctccctgacttgcaagtaacaaacacttctgccttttctagttcccacagacctacccccaacacacacacctatcaccccatcaatccaccactgctctttgattttctcataacagtaaagagaatgcaaacaaatctttccttctgaagcccaaaactggatcttaaaatcttaaaagttgggccatgagcggtaaggacaccagaagaatctaaaatgcctgcttaaatcaggcagtgaatcttatggagtctacagcagggtttggcaaagtaggcccaccacttgatcatacaaagaaagttttgttataacacagccatacccatttatgcagtgttttggcagctttcacaccatgatgatgacttgactctatatgacaaagaccatagggccttcaaagtctgcaacatttactatgtggcccttaacagaaaaaaaattgccaacctctagcttagggcagtggttctcagccctggctcagtgtcagaatcacctggggtacattaaaaatagagatgccaggctgggcgtggtggctcatgcctgtaatcccagcactttgggaggccaaggtgggcggatcacgaggtctggagttcgagaccatcntggcctatatagtgaaaccctgtctctactaaaaatacaaaaaatgagccggacatggtggcatgcgcctgtagtcccagctacttgggaggctgaggcaggagantcacttgaactgtggaggtggatgttgttgcagtgagccgagatcatgtcactgcactccagcctggcgacagagcgagactccgtctcaaaaaaaaagaaaaagagatgccaggctgggcatggtggctcatgcctgtaatcccagcactttgggaggccaaggcaggtggatcacttgaggtcaggagctcgagaccagcctggccaacatggtgaaaccccatctctactagaaatacaaaaaattagccaggcatggcggtgcatgcctgtaatcccagatgctcgggaggctgaggcaggagaatcgcttgaacctggaaggtggaggttgcagtgagctgagactgcgccactgcactccagcctgggcaacagagcctgactccatctc

SEQ ID NO: 234892 - DNA, 397 bp, Homo sapiens
gggggtaagaacccagaaggtaaaataatgtctattaatcccagcagtataagaaaacagctttgtggatattaagatttgcagcagtttgggctaggagaataataattgggcatcaaagcattgcttctcaagcttgaatatatgcaaatcactttgttaaaatgcaaattctaattcagaaggtctgaggtgagtccctagaacttgcatttcttacaactgcccacctacactgatgctgacagtactggacctacactgagtggcatgaatgtaaagaatctacattggagttatgtatataaatacagttttatcactggagtgcagtgagccgagatcgcaccactgtactccagcctggcaacagagtgagactccgtctcaaaaaaaa

SEQ ID NO: 234893 - DNA, 402 bp, Homo sapiens
gggggtaagaacccagaaggtaaaataatgtctattaatcccagcagtataagaaaacagctttgtggatattaagatttgcagcagtttgggctaggagaataataattgggcatcaaagcattgcttctcaagcttgaatatatgcaaatcactttgttaaaatgcaaattctaattcagaaggtctgaggtgagtccctagaacttgcatttcttacaactgcccacctacactgatgctgacagtactggacctacactgagtggcatgaatgtaaagaatctacattggagttatgtatataaatacagttttatcactggagtgcagtggcgcagtctcggctcactgcaacctctgcctccaaggttcaagtgctcctgcctcagcttcctgagt

SEQ ID NO: 234894 - DNA, 383 bp, Homo sapiens
attctcccacctcagcctcccgagtagctgggactacaggcgggcaccaccattcccagttaatttttatatttttagtagagatggggttttaccacgttggccaggctggtctcaaaactcctgacctcaggtgatctgcctgcctccgcctcccaaagtgctgggattacaggcgtgagccaccactcctggccttaaagctgtattttcaaatcatcaggttgtagatgatatttaagaggctgtatgaggtcacctgggaaggtctagcacaatttcattttattaaagtatgtttctcttcttctcagcttgcctatctcaggtttagtctatggtttcttaaggaatagtttctccggttgttcatttaaatggtt

SEQ ID NO: 234895 - DNA, 340 bp, Homo sapiens
gtttgttgatgggcagacagggacacagctgaggtattcaacaagggccctgagagagggacaggcagcccctgtgaatcttgctgttcagcagagacaggagtcagcacgtgtgagggcagcagggaagtcttcctggaggagtgagacctggcgatgaggaggcacggcagggaggtggaacaggcaggagagactcttcaggaattgaggagatagaatagaggacactaaagccttagagaggccaggggtggtggcttggcaggatcatcgcttgaggctaggagtttaaaagcagcctgggcaacatagcgagaccccatctctaaacacaaaa

SEQ ID NO: 234896 - DNA, 210 bp, Homo sapiens
aagtgtgagccatcacacccagcttccctgagcctttatacagaactcgcctttgagttaggttctgttgtatattctagttagggcattatattgattttttaaattactatcattctgaattaataacaaattgtggtacattcatacagtggaatagaactcagcaataaaaagtaatgaggggaggtggggatggttaatgggtac

SEQ ID NO: 234897 - DNA, 497 bp, Homo sapiens
tacaaaatataaacctgtacgctaaaaaggtacattttactctaaggaaataatacctcaataaaggaaactgaaaaaaatgtgcaagtagaaatggaaacctctatagtaaagctacaagataaagttgaagaaatcacccagaaaatggagccaaaaagacacaagtgaaaaaagagagaaaggatgtaaaatgtgaaatgcccagtccatgagggtcaaagtcaaaataaaataaatttctgaaagaagaaaaggaaatcatgaaacaactcaagaaaaatgtcagaacaccagaacacaagttttcacttttaaaggtcttagcaagtgcccatcaggacagaaaccgtagataaacaaaaagatcttatatgtcttcaaacagtcaaattaacaagaataaataataaaaattgcttcagacttttaacaacaatcctagaagccagaaaacaatgaagaaataaatgttaaagaaaaaatttcaagcatag

SEQ ID NO: 234898 - DNA, 1602 bp, Homo sapiens
  misc_feature (1125)..(1126): n is a, c, g, or t
  misc_feature (1147)..(1147): n is a, c, g, or t
  misc_feature (1239)..(1239): n is a, c, g, or t
  misc_feature (1306)..(1306): n is a, c, g, or t
  misc_feature (1413)..(1413): n is a, c, g, or t
tttctctgacactggacatggtcatataaaatcaggtatagaaccttttcaaagacttcaaatggattaatctcagaaaatttaggtggaatttttggatttcagattatttacttccttgtagttataattgacttggattagtaggtgcacacaatgatttttatctgttaaggtaaaagataatttttaatgtgacaaaattttctttaaaaattttaattggaaagtaaaacatttcctttaatctacatgacatacttcatccttaagctccttgagagcagagagaccctatcttatcatctctccattggtaccacataacccacaccattcctatttattgataccaataatcctttcaatgtaactagtaggcttttgagtatatgcacaaaactgtaactctactaataagctcttctgcctatgagacattatcgctttggatcatccttatttccataacagtttgttccattctgccattacaatgccaggatgtaaagctccaggggtgcaggaatctttcttttttgtttactactctatctccagcatctagaacattgtctggcacaggtaaccactcagtatttgttgaatgtatgaatacattttttttaagacacaatgacaaaatggctgcagagactgcttttgttgtatgggatgaagacctcagatttagtgtcagaaaatctcaatgactgtcccaagcttgctatgaatttactgtgtcatcttaggtgtgccacttaatctctctgtgcttttcttatatatgaaatgattatgttagatctgaggcatgataaacttccatcaacctttaaaggtacgtaattctctgcttcatgattagcagcatgcattttccaagtggctgtctgggaacagagttacattttgtggcagtggaaccagcattgccaactggcatacacaggctcggaagtaagattttggtctctttggcagctaaaaatttggctctaacaaatgaactagtcaccaacctgattttttaaaaaataaggctcttctatactttggcatagaaaatttatttataagaacagggaaaacttatgttcattgcagcactattcacaatagcanngacatggaatcaacccaaatnctcatcaatggtagactggataaagaaaatgtggtacatatataccatggaatactatgcagccatgaaaagaaatgagatcatgtcctttncagggacatggatagagctggaaggcattatcctcagcaaactaatgcaggaacataaaaccaaacnccacatgttttcattcataagtgggagttgaacaatgagaacacatggacacgtggggttggtcggggaaacaacacacactggtgtctgtcctggggaaaggtggngggagggagagcatcaggaagaatagctaatggatactgggcttactacctaggtagtgggttgatctgtgcagcaaagcaccatggcacatgtttatctatgtaacaaacctgcacatcctgcacatgtaccccggaacttaaaagttgaagaaaaaaataaactgtggaatgtattgttcagccatt

SEQ ID NO: 234899 - DNA, 433 bp, Homo sapiens
gagagagggtaagagaccgaggatagaaagagaaagaaagtttggcgacagggtagctggaagagagccttgaaattaaaggacagatttaaagttgaaatccattccatacccaccactctgatggttgaatttcctttcctggcccatgcaccaaaatgatacggctctaatgagtgggggaacaccagggttcttggtcctcatgccagtttagataaaatgacttgggcacacgtggagtggttttaaggagcagaaggtttaatagataagaagtgaagggacaagtgaagggagaagacagaaagaggaagctccctggtacagagacagagggagggggctccaaagccaaaagaggaggtccccccagtatacagatcttataaagcttctgtcagatttatcagtaagttccatatatatatat

SEQ ID NO: 234900 - DNA, 461 bp, Homo sapiens
aagatagattaatgagagaaaaagcgtgcaatttttgctaatatttatatgcacaagagttcacagaaaagaagtgaaactcaaagaagtagttagacttctagtttacatataattttaataaaggaaaatttgaacttcaagggatgataaatcatggggaagtaactaggaaatatatgggggaaactaacagaagataaaggttcttttcctaaggtctgttatgcagatttatcttggtgccaactctccatctctggtgatataagttgctctccttttcctgatacaggagatagacaccataacaaagggaaactcatgcccaacttctaggcagataaagggagggtggagaactcttctacatctgttgattttcagttgcctttgggtcaaaataaaccttacgttaaagtggcatattttggggtagcgtatcctgatccccttcaagt

SEQ ID NO: 234901 - DNA, 409 bp, Homo sapiens
agggtaggtagggcttcctctgaaactggttgtatctggtaagtaattgtcccatgtctcccacttgaagcttaaacttggccgtaggaggtccttatgcctgtaatcccaggactttgggaggccgagctgggcggaggattgcttggacacaggagtttgagaccagcccagggaacatgaggaaaacctgtcaatacagaaaatacaaaaacattagccaggcgtggtggtgcacgcctgtagtcccagttactctggaggctgaggtgggaggatcgcttgagcctgggaggcagaggttggggtgggcctcatgattgtgccactgcacttcaatgtgggtgacagagtgagaccgtctcgaaaaaaaagagaaaaggagccaatgatagcagctatgtttgtt

SEQ ID NO: 234902 - DNA, 748 bp, Homo sapiens
aggtggtgcactcacctcggcctcccaaagtgatgggattacaagcgtgagccactgcacctggcctcccatggtgttattatttttttaacatttacagatttttattgattcaatacatatttgaatatccactatgcaaggctactgtgttaagcaccaagtttactggtatgggaaagatagttgaaagcctcgtagaggatatattgcatcaaaagaaatggcaggcgtggtggttcacgcctgtaatcccagcactttgggagaccagcctggctagtatggtgaaaccccatctttactaaaaacacaaaaattagctgggcgtagtggcgggcgtctgtaatcccaactactcaggaggctgaggcaggagaatcgcttgaaccctggaggcagaggttgaatgagctgagatcgtgctactgcgttccagctcgggtgacagagcgagactccatctcaaaaaaaaagaaaaggacacgtgttcagcaactaagaagtcatttttatatacacgtgctaagtgccaccagtgtgtggcctttgtgtgtgggggaggagtgaaagatgctgggaggccggtcaaggaaggcaccttgtggaagtgacatttgagctaatagctgaaggatgggtgagaggaaagaaaaagcgtcagaaaacggcttgtacaaagaccctgaggttggagagaggtgtgcgtccaggaaaatgagaaaagcacagtgtttggaggaagaca

SEQ ID NO: 234903 - DNA, 654 bp, Homo sapiens
tttttaggtcaggaatttgggatgggcttgtctgggtggttcatcttggatccacgtgctatcagctggagtggctggaccagataatccatttccacagtggcctctttactcacaatgtcttcacaatccttggtctctctcccaacccggctgccaaataattataatctttttggagtttgtttgtttgtttgtttgtttttgagacggaatcttgctctgtcgcccagactggagcgcagtggcatgatctcggctcaccgcaacttctgcctcccgggttcgagtgattctcctgcctcagcctcccgagtagctgggattgcaggcatgtgccaccgcacccggctaattttgtatttttagtagagatggggtttcaccttgtaatctttctgatgtttttactttatacattgaaaaatgtttaagaagcagtctataaactttctgtattccaagaagtcctgacacaaagatactctgagccagaagatctacagtccatggagaattgtgtgagcttaatggagaagtaagaagtggtaaatttgagacacatttgaagtaaactaataggattttctggaattagatgtgggataagagaaagaaaataaataagggctattcttattgttagattgtttt

SEQ ID NO: 234904 - DNA, 302 bp, Homo sapiens
ttcggcacgagggctgctgccttttttcccaccagaggcttcttctgcttcttaacactgcgcatatgtgtatttctctccctccaggaggacgctgctgcgcatgcggttgggaacaaatgggcggggatttccccggaagtctccctttatggagggttggggttgggcgctccgcagtcctcccagggccgctctgaccggccgctctgtaacttctcgcctcctcttcgccgtccctcccacagcggctgctcggctcccgccccctcgccctcccacagcgggtcttcccgcggccg

SEQ ID NO: 234905 - DNA, 508 bp, Homo sapiens
aacccaggtagaccgactccatactcctagccaacaggctgtactgtctccataagaccaaatattgtcacatgctgacacaaatatgctaatatgttaacaattacccaatctaagtggaagacgtggatatgtactgaactattttttctttccttaagggattgctttaatttccttttttggagttttcattgatagtgtttagagacaccactgatttttatatattgatcttgtatccaacaactttgctgaaatcatttattaactctaattatttgtttgttcgagatggggtctcactatgctgcccaggttggtctcaaactggtgggctcaagcagttcttcctcctcagcctcctaaatagctgagataataggtgtaatgccactgcacctggcttgaactattctttcatttctggtaaatggttccaataaaacattagggggaaagaaaataataatttagaaaaaaattattaaaaatgctaatgcgaaaa

SEQ ID NO: 234906 - DNA, 372 bp, Homo sapiens
aatacgctagatacactgcaggaagcctaagagtaagaaatgcaacagcccaattagatgctggtgaatgctcaatcccttttcctggagagaagccattaagcctgctctgctgagctccatgagatcacatgttattaaacttcgtctttgccattcacctgagacactaacttataggcaatccaagaatgagttgtgacagcctgtctctctacccaggtggtaatgcttagtgccattcccaatgtacataaaggagatgtctctgttgtggtatcttaatagatcctgtagttcccacatgttttggtaactgtttgatataattactgtgtctcataaaaaataaattttttttaatacagtaaa

SEQ ID NO: 234907 - DNA, 2318 bp, Homo sapiens
ctggtaaagcagcggccagggggagccgtgagtgaggcgctgcctctcccgctgaagcgggttccaaggccaccgtgagggggaccatccatccaggagagtactgggcaggctgcaaatgtctgtgttaaaacagctctgctgggctaagacaggacagaagcagacagcaggtggatgagacacaatttcctatccagcagaacctgcagcaagctccacagcaccctccatgggctcagtcttgctcccgggaagatggttaattccatcagctccttctggccggcagcaggaagagtggccctgtgtgtgccaggccctgcagtctctcctctcagctggtgtctccagtgagggacctgagtcatcgcacacatgagcctgtgctcagcctgcacatctcccgcctcccaccagctgctcctcaactgccagggccagactgtggcaaaatctcactcctctgccgatgctggggtttccctcgtgtctgggaggtggtgtgcttggtggcctgagcactgcagtgaatccatgtttccctcccagcaccctgttctgtcctccaacttggccgacagctctggccagggacgcagcccagctggtgcccaccccgcactctgtccatttcataagagcccttggtttcctcacttccctcagattttgccaagagaatggtcctggtgtggcccagaaaggccagcggggtgcagcctgggactgaaagcagaggcggctctggtggggaaaaagtagctctcccagcctagccctactggtgggcggcacctcctggctccaggccatcttttgtcccagtcctaggtaagaaaaacacaaacaaaagccagtcccatggcactcgagaagcaggaggccgttccctgacagcaacatgctgtgtgcacagacacacgggtggacaggaggcagagctcggggttgctgcggagcgggcaggacactggagcggcaggcagtgcggacccgccgggcagccgtgcacggttgtcgtcctcagcggcaggagccagtttgttgctcagggccttgtctttttacaaagagccccaggccccgggggcttctctgggtgcctctttgctgccatgtctgcacgcgggcggagagcagaccaggctaccgaccctctcgctttgctgtcttcacgtggaaaagccagtgtcgtagccccaaaggaggggaaactgtattgatttggggagcctctatgttgatttcaaaacagattgtctcctgtgttctcaaagactggaagcgaaccccacaaccgccttaggccacaaaagctttatcctttctaattagcatccctgtgacctgctctgcgccctgcagatattttgctcagccagccagaaggagggaggccagacaccagcccccacagacctgcggctgcgaccccctgcctggggacgatggggtcggggtccagtagctgccccagaaacaagtggggctgcaggaggctgatggtgagcttggaggttggcagaattctaaatctgggcactgcagggtccccacaggtcacgaccctactctgctccacccaggctccggaggacctgagcaggaacctctgcagggggggcccggggctccctgtcctctcagcagccggcagtgctccctgacagcccgggcctctccctccagtagttcggtagtttgctgtcaccaacatggctgggcctgggacaggctcctcctctccctccagaagccaggcagtccctcctgcctcagtttctcagactaggccgcctctcccatcgcgagacactgaagaccctcagctgtttccatctgcccagtctgactgctggatcgccctctgtgtgcgttggtttgctgtgttcttgctactcgcccttggataagatttcttctctactcatgaagctgcgtgtcctggagggcagggccgcacctcacatgcatgttgcccacatagctcagcaacagatgctctcacgcttgttaaaagtaaaaccgggccaggcgcagtggctcacgcctgtaatcccagcactttgggaggccgaggtgggtggatcacctgaagtcaggagtttgagactagcctgaccaacatggagaaatcccgtctctactaaaaatacaaaaaattagctgggcgtggtggcacatgcctgtaatcccagctactcggaggcaggagaattgcttgaacccaggaggcggaggttgcggtgagccaagatcacgccatagcaattgcactccggcctgggcaacaagagcaaaactctgtcaaaaag

SEQ ID NO: 234908 - DNA, 605 bp, Homo sapiens
aatctaggctgaccctgtagattactttgaccaatacaatgtggtgaaaataatgttctgggatttccaagctaaggccccaaaaggacttagcttctactttcctcttcttgaaatgcttatacttgggatgctgcttcttggatcccagccataaatgatagcaagcccagccaccacgactggaagaactccaagtcccatggagaagccacataaactgagatgtggcagctgaattcccagctgatagccaccattaactgccaatcatgtgcatgagtatctcagatgtttcaagcccaatccagcccctagataactgcagctaaagtcaccatcatgtggcgcaaaaccacccagctgattcctatcaactcacagcattgaggcaagtgaaatggttgttattttaagctaattaagtttgagggtagtttgttagtaacagacaaccccacccaaaatttatgttagtgccattaagtaaatgaaatgaagatcaagaaacccattactcaagaacgaaagtatcactaatattgttttatgtattcatgtgttacaccttgccactatcctgagttttatgactcctttaaaga

SEQ ID NO: 234909 - DNA, 319 bp, Homo sapiens
aaataaatgagacaaaaatatgcataccaaagctactgttttcttgatgtgcccaaacagatcttgcccatcccttgacatcatgtacttcactttggagaccactgtctgatacagactgtaaatctgcctatacatacacctttggtacgagtttctttcatcttccttccttttcctgccttctccctcctttcctttcttttatatttatttatttatttatgacaggatctcattctgtcatccaggttggagtccaatgacacaatcatggctcactgcactccagcctggcaacagatcgagactctgtcta

SEQ ID NO: 234910 - DNA, 399 bp, Homo sapiens
ctggtcataaattcctgggctcaagtgatcctcctgtcttggcctcccaagtagctgagatctgcacctggcatgcatgctaaatatttggtcaagggtttatttctggactccctactctattccgtagatctatttgtctttatgccagtatcatgctgttttgattactttataatatgttttgaaatcaggaagtatgagacctccaaatttgctctttttcaagattatttctgttattcagagtcccttggtgttccatatgaatttttttttttttttttttgagacagaatctctctctatcgcccaggctggagggcagtggagagatctcggctgaccacaacctctgcctcctcggttcaagccattctcctgcctcagcatcccgag

SEQ ID NO: 234911 - DNA, 253 bp, Homo sapiens
atttactgatcattttatctgtattctacaaggccagcctaataatctttactttccaccggtaaggaaactaaggttcaaagaggtaaagatcatgcaactaagaagtatcagaagtgaaattcaaacatagttactcctcgttctcagggaatctcagtgtaataagggatataaatgcacaagaaattaaaatattagattaaaaaataataaaagattaaaatcctacattggaaggtcaattaaaaat

SEQ ID NO: 234912 - DNA, 495 bp, Homo sapiens
cagagattcacttagaattcaaattcctttgatataaaagtttggtttttctaatcggaatcaccctctctcaagggaatcagagctagtccagggagctagtggctctttgggccccagttttggtttcttgaggcaaatggtagagcaagaagagtctcactgaaggtcaagggctggaggaagctggagttgtaagtcaagtcaggaatgtgagtgaggtcaaacgtcaatggtagtggtgcagaagtaagacttgaggctagggttctaaagccaggagttcagaggtgcatatggcttagaaaacagtgaaaaacagatggcagggctggagggatttggaataattgttgaaactatcattgtgtattttgatagcttgactttataggtccaggggagagtggtgtatttatctggcttaggaagccatatacgagaaaggtgattactaaatctatattataaacatttgattatccacattgaagc

SEQ ID NO: 234913 - DNA, 490 bp, Homo sapiens
caattaatttgggactctctttccagctaaaaattcaatattgatttattttcctttgtcatgcacaattgctctgaaatgacaggtattctgaaattacttttcaaaggctgtatgttctggtggtttaaaagcatgggctttggggttagagagctctgccaacttctagccaagtgcgtgcctcattttctacatctacccttcttaaaaaattttaaatatattaaacattactaaattgtacctcttagtgtatcaacatatttcaatagtatgtacatgtctagtatacattcagtttaatcgtgtcttgtatacattcagtttaatacttacaaatctatacatctttttgctcattttcaaaataagtttgttttaattgaagaatactattattcatcatgtgcatgttgttttgaaatatgtataccttgtggaatggctaaatcaagcaaattaaaatttgcatttctccatatactta

SEQ ID NO: 234914 - DNA, 654 bp, Homo sapiens
taaataagcactaaacaggtcacaaacaattaaatagcattttcatgtcaccatgaagggtggaattggggcacttgtccctgatactttcttctctgtgataagacaaacaagatacatgccagcatcaagccttccctactagggagccacctccaccccaagacacatcatgcagccagccctctcacctggctaactccaagcattgattctccctgtcaaagccaatccttattttcttctctataaactgtctagtgcaattccactataatctttactttagctttttggagttgcctattttcaaatgaaaatcattggctttgcaaatgattgcagcatgttttaggcaggttccatggtgagtgcattgtccctgcatttgcagttggacaatataacactcatttgtagagctttttaatgtaatggtgctgtgatgtcttacttagttccttgaggatttcattagtggtaactgaattacactagtagtgggaattcagcccaggatgtattctttcattaagagctgcggtgtttgacagtatgtcagggatgaagcatgcctggaaatgggaagattttttaaagctctgtattcctcactcacttttctttctttctctctttagtctcccccagata

SEQ ID NO: 234915 - DNA, 475 bp, Homo sapiens
ttattttataatttctagattttactacaaatcctatgctataaatacactacaatcttcactattaataggaaccacagaaataagtaaagtcttctggaaaataaacatgtttctttaattaaaaaataatctctgacatctttgataataaatgtagcactgaaaatttattttaggattcaaataagattcctaactgtcttgactctatttattctgagcctagcagaatacctttttatataccctttaccttgaaagtttgcaaaaaattatactattgattggctggggtttaaagtctacacattttaggttataaagttaagagtagtttatggaatttaattgacagaagtttttttccccacaaatacacaaattccaatttacttacccatagtcacagatcagattggaaacttaggcaaatctgtgcgactaacaactttgtgtttagaaacagctccca

SEQ ID NO: 234916 - DNA, 591 bp, Homo sapiens
cctcacccttcatgttgacattccattccctaagagggtcatatgtttcttcatatgtccaagtcctggagctaaaatgctggcagaggcaggatgtagaccttatgtcttctatggttggaagaaaatagctgcttcccatcaagatctcacatctgggcaatgacccccaagtaggaaagtaagtggatactgcacagccacaccccctccaaaatatccagcatcataatggcaatggcgtgtactggcctagctctcatataattttcaggcctgttttgcaactcatcttagatattcaacatggaagtgtgtgctttttgttcgtcagtgaaaatttcttgcctgaacatttaagccttaccaaaaaaccctacccaggccaagaacagcatgtttctatttagaaccttctctatgtggaattagttcacctctgacagtcaggagacagagcacagggcaatgctaaagagaggggtgatgttgtgtccagcaatgaatcattacctgtaatcaaaatcggagaaagaacagaaaatggagctaaacaaaaatctctctataataaaattctctgggcaatta

SEQ ID NO: 234917 - DNA, 354 bp, Homo sapiens
tctcattactctgtccatacttataggttcaggggtgaacacataacccatgccatactgatgagactcaatttggggagtgtggttagaataattttgaagaaggaaacatttctttttttaagaaaaaatattgtaaatggaaaatttatagttatatgtgtttatggggtacaaagtgatgttatgatttataaatacaatatgaaataattaaatcaagctaattaatctatccataacctcaaatactctttttgtgttaagaatatgtgaaatttactcttttagcatttttgaattgtacaacacactattattaactatagtcaccacagtgtataatagatctcc

SEQ ID NO: 234918 - DNA, 625 bp, Homo sapiens
cagatcagggaaaaaagtaaaaggaagacagcaaagccaaccctggtttttttttgttgttgttttttgagatggagtctctgtcgcccaggttggagtgcagtggcaccatatcggctcactgcaacttccgtctcctgggttcaagcaattctcctgcctcagcctcccgagtagctgggattacaggtgcccaccaccacacccgggtaatttttaaaatatattcttagtagagacgggttttcaccatgttggccaggctagtctcaaactcctgaactcaggtgatctgcccgcgttggcctcccaaagtgtgggaataaaggcaagagggaagaaaaccccaattaaaacaatatggaaagtacaatgatataaacaataaaatggcaagtttataagaaaaaaatttagttcaataaaataaaaaggaagtattccactttgttttaggtactttaaccaatattaataatgcaaagatgactaagattcagttctaccttcactgacttgtattaacttcaagcactgaaagtatttagtgatacatgttcatgtacacatagtgacctattttcttttcttatactgttggttggtgacagtagtcagatcttct

SEQ ID NO: 234919 - DNA, 479 bp, Homo sapiens
gagctccagtgtgaatgtccaacttagagctcaacatttccatttggatgtttaataggaccctgatggatacagatggcaatagaaagcctctctgaggaagtgacatttaagctagactttcgggatgagcgggagccagccatgtgaagaacgggggaggagagacactccaggcaggaggaagtcgcgtgtgaaaactccaaggtggaaagagctcactgttgtgttcaaggaacagagagaagggcagtgtgtctagagtgcagcactcaggagagacagcacgagatgagattttctgaatttcatcccgatcacacagcacacagcagaggaagtggttggcctgccctccgggtcacctctctcctcatgctggcccttacgaaagataaaaatactgataactaatgcttattgaacacttactatgtttcaggcattgttttaaataaatttatattaaataaatagta

SEQ ID NO: 234920 - DNA, 491 bp, Homo sapiens
aaaggtcttacaaatatggctaagtatacaatagaaagaactaaacagaaactcttacttctatcagaatttgaaaggatgagaagttctgtaggttgcaaaggagacacaagggcacctttcaaagggtctgtttatctcaccactccataccttgcctgggcaaagggattttacattgcagctctaacgttaaggagatgtgcttatttgtttgttttttgttcttgcagctcaaggaggaattaagaagtaaaagagacagcttggaatgaaggtgggtgtaaaaggcaattggatgtgaaagggcaaatgtcctgactttggggacttgcctcagcttcactaatctcagtgacagttgcggtatagagccataattaccgtgtgtcctcttggctcagcataaaaagaataatattccacctactattgatgtctgtgcttcctgtgtactgcaggccctcaataaacatgtgttgaatcaataa

SEQ ID NO: 234921 - DNA, 455 bp, Homo sapiens
ctgacaagagaaggagaaatcgttggcctctgcgtgacatggagggtccccccacctgcaagcttttgtgtttgctggatcttggacagtaccctggcgaaaagcattcggcaagattatccggctagcacagccttcaaggaataaatatctaacaccttgttcccttttgcggttcaaaagccactgtcactgggctcaaggaggaattaagaagtaaaagagacagcttggaatgaaggtgggtgtaaaaggcaattggatgtgaaagggcaaatgtcctgactttggggacttgcctcagcttcactaatctcagtgacagttgcggtatagagccataattaccgtgtgtcctcttggctcagcataaaaagaataatattccacctactattgatgtctgtgcttcctgtgtactgcaggccctcaataaacatgtgttgaatcaataa

SEQ ID NO: 234922 - DNA, 326 bp, Homo sapiens
gtgctccccgcaccctcctcctcctctgcccacagccctaggccaccccacccacctccctcaggcatcgcgcaagagtgacggcagaccccctcatcccagacccccacttctcacccagaagtgagaggaggggtctcagacgttgggggacacactgctgggtgggtgatttccccccaaggtgctccctctgcccgtccttcccagggtggggctggggcctgcgtgggagtgcccagtgggcacccgctcggcccaagctctgcctgaaaggtccaaacgggcgggccctgaaggttcagccaagcatcctccgcggccgc

SEQ ID NO: 234923 - DNA, 467 bp, Homo sapiens
gttggaaaaactgcaaactagattcagctactgctggggaaagacttgctagactacagcaaaaacaaaacaaatcaaaaaccacattattccagtggcattcacaggaagcacaagcagttaggaaacccatgggaagcagataggaagagataagcccctttttcctcttccagctttgcagtctccctttagcaccacccatattgtcagagtctaacaggaaaccagcggtcaaagcagaaatacggttttgagagcctcagctccagcattctaaagcagaataaagaaagatggatttcaaagttaaaaataatactaataactggccgggcacagtggcagttattttgggaggccaaggctggagaattgtttgaggccaggagtttcaggcatgcagtgagctatgatcatgccactgccctctggcctggatgacagaacgagaccctatctctata

SEQ ID NO: 234924 - DNA, 728 bp, Homo sapiens
actgtcacctccttgaggtcaatgtgatgttatctaattttttagataacatctatgtctctaatagatctatctgtgcaatagaaccatacagtccttcgtagataggggaagcacaaatgttggttaatatttaacagagtatcagacctgcatccttctctctaagagctcaaacttcagagagtagattcagagagtaaatgttttcccaggctcaggcaagaggggtggtttgtatgttatttctttcttattttccagttagacttttggaaatctgccagatgcaattgaaaaaccctgctcagctttgtccaatgtctcatttgaggatcagcatgagtttgtttacttgagattaacaggagtcaaggatatacaaattcagcaatgtatggataactttcccctttttaacgctggcctcaccacaaaactaccaccatattgttgaattttggaagtttattatgctttattttttcctataaaaaaataaatgtcatcacattgtaatagttttataacctgttttatcatattttaaaatacatcttgaatattctttcatataattaatcttctacagcataattttaatatctatgaagattccattatgtgcttgtattatacatttttactctgaatacattattgttgtaaacaatgcttacaattatgaaaataaatatatatggctcatttacacattattctaaatc

SEQ ID NO: 234925 - DNA, 586 bp, Homo sapiens
tcttcattctaggcttcatctacaacagctttgcggaccatctctgctttactcaatgagctttacaatttccagtccagggttagactcttaactcagttttctgattgtttttctggcatccagtgtctttgagacaatcatgcagaaagcgctgggagccagttgcctgtgtattgaaagcccggcagagcgggacatggaggaaccacggaagccactgcccggccagcccagcagccccgttacccacaacctgccttaggaacccagtgaaatcaacagaccactttgcccctggtccaagatccccactggagacattcagctgatctggtgctcaactcttttgggcatagagtaaacactacttcacagaaggcagagaattgcaccccagcccgggctgactttggaaacacagccaagaggggtctgtaggggcacagtgttgggttcctggcagggcagctcactcgaagagcaggcaccgtacctgggttttgacagtaaaccttcactgacgatttgagggaggcagccagggtctgggtagttattcaaaagtctgatttctatgctattt

SEQ ID NO: 234926 - DNA, 399 bp, Homo sapiens
ttgacagctgccggacacaaactcgcagtggttcaattttcttcgaaacggtgtggtccctgcaaaaggatgtttcctgttttccatgctatgtctgtgaaataccaaaatgtattttttgctaatgtggatgtgaacaattctccggagctggctgaaacttgtcacatcaaaacaatacccacatttcagatgttcaagaaaagccagaaggtaaccctattctcaagaatcaaaagaataatttgctgttatagaagtggattcatgagcaacctgtgtcttgcagatgatggaaatgagtaggatttaacttttcaatcaggaataaaattccttaaagcctcaacattttcgcagcacttgaatcaataaatgtttcacctttgtgcatttgtg

SEQ ID NO: 234927 - DNA, 690 bp, Homo sapiens
  misc_feature (261)..(261): n is a, c, g, or t
ggcagagcatcggcacggtgcccaccgtggacctggcctcgcgctacgagtgtgccgcggtggtgctgcactcgccgctcacctcgggcatgcgcgtcgccttccctgacaccaagacgacctactgcttcgacgccttccctaagtgagcggcccgggcggggacggaggcggggcgggcaccggaggccgggcggggccggggccgggcgctaagtctcacccgctccacgcccctcccgcagcatcgagaaggtgtcntagatcacgtcgcccgtgctcatcatccacggcacggaggacgaggtgatcgacttctcgcacgggctggcgctctacgagcgctgccccaaggcggtggagccgctgtgggtggagggcgccgggcacaacgacatcgagctctacagccagtacctggagcgcctgcgtcgcttcatctcccaggagctgcccagccagcgcgcctagcggcggccccaccggccggacctcagcaataaggcggcccccggacctcaccccgcgccggccccccaggggctgcatgtggaccccccgggcggcccgggggaccccgcccccgacccaggggctgtggacgatgtacaggcaacagagctacgcactcctttccttttggaagcaagaagaaaatacgtgaaaacggaaattaaagatttaaaatta

SEQ ID NO: 234928 - DNA, 372 bp, Homo sapiens
gaaaaaacatagtaacttggatggagggcattgaatgctacctctgtgtagtttcttggctagtgttttggcctgtaagttcgtaaaactggtagaaaacctaggttctcaagttaggacaaccctccttctgcaagaaaaatgtagaatgtcactctcaagtcatacaagaatacaagttccctgagggcagagaccttatctctcttatccatgttggtatgtcctgctactagtaagtatttgtttagttaaccagtcatcataaagtaccgtaaggattttacaaatgctagatgatttctgggaatgtggtcaattcctaataacttcaagaataatttttgtgacttaagtacaagtctttatggc

SEQ ID NO: 234929 - DNA, 406 bp, Homo sapiens
ccgagattacgcgattacactccagcctggagacaaagtaagactccatctcaggaaaaaaaaaatttaaattaaaaagttctagtatctaaaatgagcaaaatcgccaggcgcggtgggtcacacttgtaatcccagcactttgggatgcagaagtgggtggaccatccgaagtcagaggttgagaccagcctgcagtgagccgagattgcaccaatgcactccagcctgggagacagagtgagactccatttcaaaaaaagaattagccaagcgtggtagcatgcaccagtagtcctagctaccggggaggctgacggggaaggattccttgagcccgaaggtcaaggctgcagtgagccttgtttgcaccacctcactccaacctgggcaagaccccatctca

SEQ ID NO: 234930 - DNA, 427 bp, Homo sapiens
tcaagatttgagccttgggtgagctcttttattgtaatatttgacttccaagtcatatctgaagagagagcagaagtactttcaactccactgatcacttgtttttccacttagcttctcattttctgagtttgtgctgttgagtgcaggaaatgttaaataggttggccttcagttgaaagatactgagatttactagcgctgttgtagattgggcttttgaacctagaattattgcttttggtgtaaaccaacatgactgccatgctgtttcctagacatatgaggatactacaggctctattagagactaatttttaaaatagcccctgatattcctcaactctttatatttagcattttgtacactattctccaagttggcatttggcagcttttcctcctcttaaggcaaagttaaaaaaaa

SEQ ID NO: 234931 - DNA, 481 bp, Homo sapiens
aagataaaagttcaagtcctggttctgtctctaactactaacttgatcttaggtaatcctttcaatatctaggccccagtttctatacctataaaattagattaaagtgatattttctaaaatatgtacctatattattagtagcatgcaagatgcttttacttttattgatttttattttaacaatattgcattttaaattagaaagaaaaacataattacagtatcaaattaaagacttatgaatattatttctagcaatataaaatttaccttttaaagaacattcatttaagttaaagaaaggtgagtgatttaaagaaaaatagtatgcatataatggtatagctgatatatagatatggcaaatcatgaatatgatatatgaaggactgaagtttcctccttgataaaatcaagaacaggttagattaaagcagtaaatcctagacttttagattttaatgatcaataaaatgta

SEQ ID NO: 234932 - DNA, 508 bp, Homo sapiens
tttgatttagctctttcttttttccaagatagaaaagttaatattgttgaagactcctgcattcttttccctagtcttattttcttccctcccataaatgtgttaaaatctctgtgtgtattgttttggttgtatttttacataaaactttacatattatataaaatttaattgaaggtaaaatttattaaattattcttaatatatattgtaatttaaaaattaacagcttcattgtcttgataaaatttatggtatcttaaacatgtgcttgtttttctaagagaacattgaaacatagattttaaaacaaattgttgaaagattaaaaaatctgcctttgcacactgttacattgaaagtggggcatttgtcgtgaacattcatttcaaatatgtagtatcttcagaatatttgagaaggatttgtattatataattgaaaaatctgttaaattgtatttatgttaactgcttaattctaataaaatttccattcattttttaaa

SEQ ID NO: 234933 - DNA, 547 bp, Homo sapiens
agccaacctctgtattgatgatcaatgtccacatcaatgctaatctcctaataggaagcctgtagtgtcacaatttctaagccatgacccattacataaattaaggcattgaatgtagtgacaaaatcaattcacagttgctaggttagccgaacccttttgggatccccctccagaagcccagcagacccaagaaagtggtaaatgagtagggaaaaccattggcagatgacaatcacacaccagaaaagattctgagcagataacatcatgatcaagcatatttccaagaactcacagagctaataatatggtcacctctataaaacaagatcaagtaaagatacaagagcttaaagcaacaataagacaataggtggctatcaggatgcattaacaaacatataagaaactttttttcaataaaacagtttttttagctattgaattactgaagctatagattgaactgacacaccttgtccatggtggggagaaccaatacaaaacaatcaacaccaaaaatagttattgaacttcatagaaa

SEQ ID NO: 234934 - DNA, 311 bp, Homo sapiens
caatatagttacatatatattacaaatgtgcgtgtgtgtgtgtgtgtgtgtgtgtgtgtgttttaatggaagatgcactgcctgcctaaactcagaataacctggtttacctaaagcatttgttaggcaatctttcctatagcatatttactttatgttgttgatttgttttatattttggagactttcaaactaataaattaagttttcgtggcaatggttctgtatctatttgtgagaaacaattcacaaattggagtctaaaggtgtatgactaaaaaaagtgtttataaaagaaataggataatagg

SEQ ID NO: 234935 - DNA, 387 bp, Homo sapiens
gagacaaagtctcgctttgtcgcccaggccggagtgcaatggcacgatctcagcccactgcaacctccgccttccattccaggttctcctgcctcagcctcctgagtagctgggattacaggcacgcaccaccatgcccagctaatttttgtattttagtagagacggggtttcaccatgttggccaggctggtctcgaactcctgacctcaagtgatccacctgcctcggcctctgaaagtgctgggattacaggtgtgagccactgcacttggccccaactcgtattcccaaatagatgtattcagaaaatctgccttcactttagctctgctgcttcagtacctttgattatgtttgctctgctctcccttctatcataaattc

SEQ ID NO: 234936 - DNA, 420 bp, Homo sapiens
gcgcttgggattacaggcgtgagccaccacgcccagccaagacattcttaaaggaacaatcaactggtaggaaagtatagattataaaagtactacatttcaaatatataactatttactactacctctaatgacagacatttaataaattcaaaatgacaaattcaatagattcaaatacatacttaatgtatttcacctgcctgaaaaaaagtaaagcagtcaaaaaaactagaatatataagttttctgaatcaagaaacatgaagagcggtctcccaaaatcatctgacctattagaccctatctgttaatggattcaagttatggaaaaagcctaaaataaagaatttgagaaagataagagccatttttctactacaataccctcccacctaaataaattactttggcccaaag

SEQ ID NO: 234937 - DNA, 373 bp, Homo sapiens
gccacacaaatgtgaggtggggttggaaggagaccctgtccagtcttctggcaggtctgaaacgacatctttaaaatgtccgttggcagccgggcatggtggctcacgcttgtaatcccagcattttgagaggtcaagtttgagtggatcatttgaggtcaggagttcaagaccagcctggacaacatggtgtaaccctgcctctactaaaaatgcaaaaatcagcctggcatggtggtggatgcctgtagtcccagctacttgggaggctgaggcaggagaattgcttgaacctgggaggcagagatctcagtgagctgagatcacaccactgcactccaactgggcgacagagcaagactccatctcaaaa

SEQ ID NO: 234938 - DNA, 265 bp, Homo sapiens
tagttggaagatctggaaacttggggaatagttgttatttctttattgatctggtcatatcctgaaaataattataattgaggaaaaaaggaatatcccttatatggcttgcaaaattcttgcatactttttatggtatggtttaagagagtcaataaatagcatctcctttcccttccaagtccagaatcagttaaaagatggatggaaaagacaggcaaatggtgatcaaatattgcctttattactgatgcaattggagaac

SEQ ID NO: 234939 - DNA, 334 bp, Homo sapiens
aaaagtcttccctatgaggaaaggagcccacttgtggagaagatgaacactcgcatggaagcccacagaagtgagagaggtggcctggaggagggcactcgagtgaggagatgggcacctccagccttgggtcagtcacaaaggaaggacagaggcaggaaacaggagcattctggacagggggccctggccgctgctcacagcagctcatcttctggcgggagagggttagctcctgcccagtgtcctcacgtacgagagtggtgagtttctaatgcatcacctctcaccatgcaccccaagacagctgctcttctgaatcctacctagagaa

SEQ ID NO: 234940 - DNA, 468 bp, Homo sapiens
cgtataacaaattcataccaaaattttaacaatttttgtcaaaatgttggttgaaaatataaataagggaatttgaagatattgttataaatacagttataattagatatttacataaataatccttttttgggagttaaatattttccctctatcaacttctgtttcttttattaaacacttcaaaaaattactggtcatgtgttgtggctcatacctgtaatgctagcagtttggaggcctagatgggtgggtcacttgatgtcaggggttcaagaccagcccggcacacatgccaaaacccttttctgcaaaacacagcgtggcgtggtgatgcatgcctataaacccagctactcgggaggctgaggtagtagaatcacttaaacccaagaagcggaggttgcagtgagccaagatcatgctactgcactgcagcctggatgatagagcaagactctgtctcaa

SEQ ID NO: 234941 - DNA, 742 bp, Homo sapiens
ttgaggtattgatcaagtcagtcaggagaagcaggctggcttgtgtgtgaaggctgggctgtttgggggcctcactgtgtgaaaagatttggattctagcagtttctttctctacaagatctaatgtctggagagatggagaggcctattaggggagttcagatgactggagctgggacatcactgcttcttcaggtcccaggcagcctcccctccagctatcagcatgtctcggctatcccatgctgtcccctcaatctccaactgccctcctttctctccatcaccagagaaatgtgactgcctagggagcaaccatgtcttgaaaggagaaagagcaagaataaaggtgtctctgaggggccttgcttctcttcccctagttcttttaggcattttgttttgtttcatttggataagagctaacatttagaacaataatagaaaatagaagtacttgtctggagggtctagcagaggtccacagtgactcttatgagctgtataaaggactgtcccttctggagtctagtaatcaaatctggaggagtagtcctcaaatcttgttagagaatgaagttctcagggtacactcttcctggctaagcaatcccatcccagcccctctctactgaaatcattcatcctggtcaagtgtgtttctcagaatacctgggtatgtcaacagagataaaagagaagtgcagcacacttcctagtttcagctggcactaaaacaaga

SEQ ID NO: 234942 - DNA, 496 bp, Homo sapiens
ctgtcctccttggcatcatcctccaagggccacggccaatccatcacccatccaccagggggagcactcatgaacaactggcatctcccctagaaggaacagacctccagaatttggtcgggcaccctcatacctgtccatctcatcaacgtcatagacaaacagaagtaggtacaaaagaataaagccaacagagtctaacgctgcacatgccattgctctgtcaccacgtggttgctgtaaatccctctaagaattctgctggaatgtccacttgtaaaatcacagaggggtcaaactggcattccagacccagagaagccacagaattggtaaaaatgaagccaaagtaggttctttttttctcctcgagacaaatgcagtaagatcatctcttatttcatgccaaagtaaaaatggtcacagcgatagaaaaggactaatatctagaaaatagctaaataacaacctcaaatgcataagacacaaagcatct

SEQ ID NO: 234943 - DNA, 554 bp, Homo sapiens
acactgttcaaactcaggatgacagaccagggaagaccctggaagtggactcagggccatgtggtcagggatgctggagttgcagggtctaaaaaggaggatatgggctctggggtgggcatattctcttgtccctacagaccccccaccccatggcaagagggtcaagaccagagtaggatccctctgagatatatagatatagatatagatatagatatagatatagatatacacacacacacacacacacacacacatgcacacatgcatacacatatacacatatacatacacatgtaattggcttatgttcttttaaaggcaagataaggggaaaactaatcaaactaataatattattgctacggggatttgatagaggggacaaagatagaagctaggtttctcctagtgtgctttgttttgcagttttgactttggaactgtgtaaatattttacataataatgcataagattgatatttatttatttatttattgagacaaagtctggctctatcgcccaggctggagtgcagtggtgcaatctc

SEQ ID NO: 234944 - DNA, 534 bp, Homo sapiens
caggccaggcgcctgtctggaatggccgagtcagtgggtggccagatgggccctggaccctcctgacatgggagcctgagctccacacggctccagtcacctgccctggaccatgttgtgttccagcaggctcacctccctggtgtcaccccagctcacaggccacacaccctgctctgccacagaccctcacgccaggtcacacacgcagcctgtgtgcgggcagcctctctgcttggagggttcttcccagcggccttgggcaaggggtgccgtgcgcctctccgtgtaccctgtccacatgcaccacatcccctctgggtcacgctttgtgcagaggtttctagccccctctggactgttccatagagcaggaactaggggtcggaagtctttggtcttcagtccaagcataggacccagcattcaagtgatcagtaagaatgttacatggatgagttaatttatgaatgaacaaattaaggaattaatgaatttaacttcatagaaagtttcctcctgccattccggaga

SEQ ID NO: 234945 - DNA, 486 bp, Homo sapiens
ctgatactgccacctttttcaaatgttagcttccctaataggtgagtagtgacatcacattctgattttttcagaagggtttatatttgctatacatcagttcacctactttgcatttcttcctcttagccctgcttttaataaagaaaactctttccacattgtcttctctttcctcacttgattattcttcgtgggaataagagaattaaaggaatgtggaaaagtgtttctcttgcattatattgtcctaagaagcctcagttatcacttgctcttaccagtgctttgcagtcaccaggaatggtagaaagcagcggctggccagagggctggcagaggcggggctgttctttgtgcttgtttatattcattttctagtcacagctcaagttgtttcactttctgctgctcagggagacgagggcaatgtaaatgtgcttgctgttgtttaagcctcccggacagtaaaaacaaaagcggccg

SEQ ID NO: 234946 - DNA, 318 bp, Homo sapiens
tgcatcatctggtaaagggatttctgcctcatcagattacagactacatgtgaagccttgaaggatagctccaaggagatgcgtgagcacaaggcagtgtcctcacagtgagctaggaagaggcttgcactgtcactgccagtccgtttgtgcatcagagaaggcctaagcgtaattgagcagtcattgctgtctcctccagggagaggaaccatcctcctcacagatggctgaagatcttatgaagctgaacctcccaacaaatcctcatatttcgatacaaataagaatatgattgtcaatattcatacaatgttt

SEQ ID NO: 234947 - DNA, 699 bp, Homo sapiens
gcaatcattctagaaatctagtttactgctgcattctatagagatgcaaatggagctggatttatgtttcctttggaaaacagactttatttaaacacacactatgtattgctaattccaacaacaggaaaaagaggcaagtcaagctctttccacgactggcagattgcaaagcccttattttaaaattgcactgcccactgacaaagggctattataaaagaaacaactatttgcaaaagtaccagatataaactatcacatttagcaggataaaagtcacttggcttaatcaagagtctattaatgaaaggactgacctatatacaggaaattgtcatctttccctaattccagaatagcaaaagaaaaatagttatgtttgatttcccagtaagagatataacacattgggcagtcttgtagtttccatttatgtcaattacattagtacagaatttggatttcagctcataaaccaacaattccttgccatccagttaaaaatgctataggcatatcaattgctttaaaaaatttctacattaatatgtaagactatacgtggggaaaaaaaggaaaatggaaaaggaaagaggttttataattctaggaggaaaatggagttggcataatcatatttcttggtaagaggtgataaaaaagaatatacacacataaatttgaattttactgaat

SEQ ID NO: 234948 - DNA, 710 bp, Homo sapiens
aagtaccagcctgtttggttggttggtttgcttttgaaagttattacaatattatttaaggccttttcggataagttcacttttaaagtaggtgttatcaatctaatttctgaacgttatgggtcagaaaaatcactagcaagtggctcagaaaaagggaaaaggtacacttctgcaatcagctgaggagttcacacctttttttctaaatcaacatcatatttgctgttcagaggcaatctgaaaagctgcaaattcagctcacctcaaccccataatttcaaacgttagaggctggtctctgtggtttcctactggttcctgtggggagctcccgctttctttctccatagagcttagggtatttctcatatgccccattggctacctagtgtctcaggtaataaacgtatccgaagataaagcaaagattgctatgggagagtgttgtctcctaaaataggactgtcttgccaggccaggcctcaagaaccagagagaataataaacagcacaggatgaaatcagcatgattgcaaaaggactggactcaggaaaaacaagtttgtttgcccagaacaaattaccagaagggatcaaaaacatcttgtttttctttggtgataaccatatgctaccggattggaatgtttaccagaaaatggaataaagaccttcccactggcaaaatagagccagggttcacccag

SEQ ID NO: 234949 - DNA, 885 bp, Homo sapiens
agcgggcgtcctgttcccgcctctccagttaaggccactggtgtgagccggggctctgcgcgagcgagggacgacggaagggacgggcaggtgtgggcgcggggccacgcagcccgacggcgggagtcgcaggtgctgggtgcatgggccagtgaggacgcacagagatccctcgccgcgcggaggaggagcagcgcgggagccaggcgctgccccaagaccctgcctgcgtccgagcgagcggaacctcgcgcttcgcccggggacaatccgaagtccgcgctatggaagaggagaaatatttgcctgagctgatggcagagaaagatagcctggatccatcttttgtgcatgcgtcgcgccttttggcagaagaaattgaaaagtttcaaggttctgatggaaaaaaggaagacgaagaaaagaagtatcttgatgtcatcagcaacaaaaacataaagctctcagaaagagtactgattcctgtcaagcagtatccaaagttcaattttgtggggaaattgcttggaccaagaggaaactccttgaagaggctacaggaagaaacaggtgctaaaatgtctatcctgggcaaaggatcaatgagagataaagctaaggaagaagaactaaggaagagtggggaagccaaatatgcccacttgagtgatgagcttcatgtattaattgaagtgtttgctccacctggggaagcttattcacgtatgagtcatgcattggaagagattaaaaaattcctggttcctgactacaatgatgaaattcgtcaggaacaactacgtgaattatcttacttaaatggctcagaaggactctggtcgtggcagaggtattagaggcagagggatcagaatagctcccaca

SEQ ID NO: 234950 - DNA, 423 bp, Homo sapiens
gttggaacttttttttttttgagacagagtctcactctgttgtccaggctagagtccagtggtgcaatctcagctcactgcaacctccgcctcccgagttcaaatgattctcctgcctcagcctcccaagtagctggggttacaagtacgcaccaccatgcccggctaattttttgtatttttagtagagacaggtttcaccatgttggccaggctggtctcgaactcctgacctcaggtgatccacccgcctcagcctcccaaagtgctgggattacaggcaggagccaccacgcccagcctaaacatttttatcttaccaagaattcctcaaagacccttggtgctgccacaatgcaaatgtggtcacatttataagaagggagtttatatttacaaggactgttatcacatttatcattt

SEQ ID NO: 234951 - DNA, 421 bp, Homo sapiens
agtgcagtggcacgggtgagactcactgcagcctcgaactcctggtctcaggggatcctcccgcagtgctgggatgacaggcacgagccacttctcccggcctaggcgtggatctgaagctgcaggaagtcagcccgcaggagtaagaacggcactgggctgtgatgaagtcatctcggtacaaaggaattctgtgccacgaaaatattcatggaaatatttcctgatgcgatgtctttcccagcatatcgttgggtaaagcacagactgctgtgtgtccaccaagacaaggtctccaggtggcagggatcatttctttgttttcatatctgcatttctggtttttctaccaatgatcaggtattccctgtatgttgattttacttccaaaatttaggaataaaatatttaaagttaataa

SEQ ID NO: 234952 - DNA, 524 bp, Homo sapiens
caaggccccgttgtgcccttgagcccaaggtcctgggtctagactgtgaactgttgtacgctctcagagcgccctgttcctctccgtcccccagcacttatcatggtttgtaattttatggaatttgtgtaattgagtcgtgaatgtctgtctctgggctcgtaggctctgagctctccaaaagctgggaccaggtctgctttgctcatgctttgtccccagtaccttagcacagcacctggcactttgtgggcactagacaaatacatgctgtgaatgaatagctgatacaggctggtttcaatagcagagacatggctcagccttctcttctaatccaaggcatcccaaagaggccaataacggaggggtaggaaaccaagcgggcagggcacacacggtccaggcaacattatgaaattggaaaggtcactcccttctcaggtgtcaaccttgaggtggggcaggtggtatggagtgtttgaaatagaagaccttgggaataaacactcatggaaactttg

SEQ ID NO: 234953 - DNA, 453 bp, Homo sapiens
tgggccccctgcctagtgaggcctgaatgtccctttcccttagtaatgcccatgcccagcctgctggggggctggttctgtgcaccccatggccagccgtgcccattacctggtgccgcaggatgcctccacagagagctgccctgatctgcgtgttctcatggaatctgggcaggtcccttccagcccctgccatgcgtagaccctgccagaatttctgtgttgctttgagcagtgtgtacctagggttcaagcacacacccttagagtgcattgccagggttccagaagagtgggctttgctcagcctgagggcagttcccttaagagtgagccaccctcctccagccttcatgtgtggcagttggctcagaattttgtgtattctcgatcattttgctacacatccacagctcatagctgagggttttgctcagaaaaaataaataaata

SEQ ID NO: 234954 - DNA, 348 bp, Homo sapiens
tcttcaattctaattgtgctttgaaaatagctgatagtcgccgaagacttattgttcaagggagaaaaaacctgccacttttaacgcacagacacttgttatttaaatggaaattgtataattgctttcactatgatctatagactgccttggaaatatgagggccctggataaagcatattacagcttttattatgtctagctttatctattatgtttattatgtttagtttttctattggtttctcagatctaatttggaatttcttttaaattctctgtgtgttatcacttcagcaatatatcctgggtatactcttctgttgactagctttccaccagctagat

SEQ ID NO: 234955 - DNA, 486 bp, Homo sapiens
agcgatattttcattatgataagataaaaagtattgaatttgcatggacattcatattttccaactcagtatataggatttctcattctgccctacactcacgtatctattgtatccacctttctccatgcacgcttttcatgggaatgtgaggccctccttctttcaatgctaacctgtctactttctccagctccggagatggacagtatctggaaaaagtctattatgacattctatcttcttggctgaggattgaaaggtaatctagcaagaaccaccaaatagaaccttaatactgttgcttactattatgtagtatatagaaccttaatactattgcatagatgttctatgtctcttatgggacatcagtgagaatacatgtagcctactttattactggcatacgtgtgtgtctgtaaaggaagtatgtttaaaagaaagtcaaataagcagaaatagcaataaatggaaatgaaatga

SEQ ID NO: 234956 - DNA, 542 bp, Homo sapiens
tgctgctggactgagctcctcatcctacacttgcaggggttgctcttttggacagaaagctggaataaaatgtaaattttagacttccaccaaggccaggactagggtgaagggactaacgcactagtctcaggagcaactgttaagtaacgctaatcctgaatgaatgaaatagttttaaaattgaatgtaatcgcaaagaaaaaaaacccatgatagacaaaatattaaaactttaaataaaggcttgcacttgcagaacccaggctcaccggcctctccctgctcctggcccggtttcccagcttggttctctacaagtcagaattcctagcaaaatcaaagtgtgcgcgcgtctgcccgagtacacgccgcagagttatttctgccccatcttccctatttgaactcaaacaggacagcattttcctgggtgcagcccctgcgttgggtgaacagcgcagtgataaagcctggcgttctccacctgcaggcggaggctgacggcgcggtctttggcgcgagtccgtgcaccgcggccg

SEQ ID NO: 234957 - DNA, 271 bp, Homo sapiens
agactttataaagttgtgtgccattatcataatcatgatcatcatcatcatcaccagtatctattccccagcctcagctggtccttctctgttgatagctaccgaccaagatggtgtccacctgtccctcagccagtctcaatgttagatgatttctttctgacctccctttatggagagcatttactttagaacactgctcatgatgaattctttctctgtcctttgagatgtaaatctttgtccagtctctggccagttttacagctcg

SEQ ID NO: 234958 - DNA, 510 bp, Homo sapiens
ggaatccttccgaacttctggcaaggacagagccgaagagtatcaatgtagccaaaaaattcgatctgagaaaagttatctgcagaaagaccttcagctgcccgaagggctgcacttcagagagccttgtcctccttttaggccagattctatttgacagtctgaggactgtcaaaaaaatagccacaaaatggaatcatcagtaccgtattcctggaagcactggtccttagggatccagaatacttggggaatactttattctgattgaaccaccacttccctaatcaatcatgttggctactgaacagcaaccagagtgcctttatgcagacgaaaatcgccacagcctaaatccgtatgaacaatgtcttgcccatttcaaatggaaggttttcattcatgcttaaatagcagcatttcataaaggaaatatccatagcagaataaatgactcctgtaccaaaaatttctgagactctttagaattaaagtcacagttcaaataga

SEQ ID NO: 234959 - DNA, 2624 bp, Homo sapiens
tggctgcctgacttgggagatggatgggctgagggagtggagggggacctcagaggagcaggaccagggagactcccaggacggtaagcaacatttgaggaccattcactaacgcttctctgcaggggtttcctctccatccatttccttgctgggttgtcagtgatgccatctgagttgctgtcagggctgtagcctgacaaagggtttcctaatagatccaaactgtccatttgtggggagcttctgattttctgttgttactggtttcccttagcccaacaccagggtcattaagaaggaaggaatgtgaggaagaaagaaaggcagggcattcaggaagaagtgtggaggcatgggagggttctcatggggccctcctgggcactgggtgacctgtcctttctcccctcaggtaggggtcccacggctgggtggtcctaagccactgggtggatgaaaggccgagggatgttggtcctgcttctgcatgcggtggtcctcggcctgcccagcgcctgggccgtgggggcctgcgcccgcgcttgtcccgccgcctgcgcctgcagcaccgtggagcgcggctgctcggtgcgctgcgaccgcgcgggcctcctgcgggtgccggccgagctcccgtgcgaggcggtctccatcgacctggaccggaacggcctgcgcttcctgggcgagcgagccttcggcacgctgccgtccttgcgccgcctgtcgctgcgccacaacaacctgtccttcatcacgcccggcgccttcaagggcctgccgcgcctggctgagctgcgcctggcgcacaacggcgacctgcgctacctgcacgcgcgcaccttcgcggcgctcagccgcctgcgccgcctagacctagcagcctgccgcctcttcagcgtgcccgagcgcctcctggccgaactgccggccctgcgcgaactcgccgccttcgacaacctgttccgccgcgtgccgggcgcgctgcgcggcctggccaacctgacgcacgcgcacctggagcgcggccgcatcgaggcggtggcctccagctcgctgcagggcctgcgccgcctgcgctcgctcagcctgcaggccaaccgcgtccgtgccgtgcacgctggcgccttcggggactgtggcgtcctggagcatctgctgctcaacgacaacctgctggccgagctcccggccgacgccttccgcggcctgcggcgcctgcgcacgctcaacctgggtggcaacgcgctggaccgcgtggcgcgcgcctggttcgctgacctggccgagctcgagctgctctacctggaccgcaacagcatcgccttcgtggaggagggcgccttccagaacctctcgggtctcctcgcgctgcacctcaacggcaaccgcctcaccgtgctcgcctgggtcgccttccagcccggcttcttcctgggccgcctcttcctcttccgcaacccgtggtgctgcgactgccgtctggagtggctgagggactggatggagggctccggacgtgtcaccgacgtgccgtgcgcctccccgggctccgtggccggcctggacctcagccaggtgaccttcgggcgctcctccgatggcctctgtgtggaccccgaggagctgaacctcaccacgtccagtccaggcccgtccccagaaccagcggccaccaccgtgagcaggttcagcagcctcctctccaagctgctggccccgagggtcccggtggaggaggcggccaacaccactggggggctggccaacgcctccctgtccgacagcctctcctcccgtggggtgggaggcgcgggccggcagccctggtttctcctcgcctcttgtctcctgcccagcgtggcccagcacgtggtgtttggcctgcagatggactgacctggccagaggggggaaagtttgcttaactgggcttgagtgtgtttgtggtaaggggagaggagccggaatggagggcagaggtgaaaatcccagtggagggtggaaggaaccgtttgcctccagagatggccccagggagaacacagggacgtgccactcgagggggaggatggtatggatttctgcttttgtcacacgggcatccattggaaaagagaagcaagaatgaacgtgggccctcgggtgggaagactaggaatcggaagcttctagggcttcacatcccttcccctcccctccccttcccctcatcttccaggcaacagtgcctgcaaggcctgaattagagagacttccattggctaagtagttaagagccgtcccatttctcctggcggggtaacccattacaccgaagtcctttgttttctaccacaatcctcctcctcctctccaggggcctggaaacactaggattcaggaaggtaggcaggacgtgagagaagggagatgggagagagatttaagacaaagggtggcggtggttcctggggtctgagatgtgttaggaggcgtttaaaacaaagatccagttcatttactccacagttattcccagggctggccctagccacaaaggaactttagggcagggtagggaaaaaaggggcagcagggggtgtgtttgtggacaaataaatttgtaaagtccgaggatt

SEQ ID NO: 234960 - DNA, 2292 bp, Homo sapiens
tggctgcctgacttgggagatggatgggctgagggagtggagggggacctcagaggagcaggaccagggagactcccaggacggtaggggtcccacggctgggtggtcctaagccactgggtggatgaaaggccgagggatgttggtcctgcttctgcatgcggtggtcctcggcctgcccagcgcctgggccgtgggggcctgcgcccgcgcttgtcccgccgcctgcgcctgcagcaccgtggagcgcggctgctcggtgcgctgcgaccgcgcgggcctcctgcgggtgccggccgagctcccgtgcgaggcggtctccatcgacctggaccggaacggcctgcgcttcctgggcgagcgagccttcggcacgctgccgtccttgcgccgcctgtcgctgcgccacaacaacctgtccttcatcacgcccggcgccttcaagggcctgccgcgcctggctgagctgcgcctggcgcacaacggcgacctgcgctacctgcacgcgcgcaccttcgcggcgctcagccgcctgcgccgcctagacctagcagcctgccgcctcttcagcgtgcccgagcgcctcctggccgaactgccggccctgcgcgaactcgccgccttcgacaacctgttccgccgcgtgccgggcgcgctgcgcggcctggccaacctgacgcacgcgcacctggagcgcggccgcatcgaggcggtggcctccagctcgctgcagggcctgcgccgcctgcgctcgctcagcctgcaggccaaccgcgtccgtgccgtgcacgctggcgccttcggggactgtggcgtcctggagcatctgctgctcaacgacaacctgctggccgagctcccggccgacgccttccgcggcctgcggcgcctgcgcacgctcaacctgggtggcaacgcgctggaccgcgtggcgcgcgcctggttcgctgacctggccgagctcgagctgctctacctggaccgcaacagcatcgccttcgtggaggagggcgccttccagaacctctcgggtctcctcgcgctgcacctcaacggcaaccgcctcaccgtgctcgcctgggtcgccttccagcccggcttcttcctgggccgcctcttcctcttccgcaacccgtggtgctgcgactgccgtctggagtggctgagggactggatggagggctccggacgtgtcaccgacgtgccgtgcgcctccccgggctccgtggccggcctggacctcagccaggtgaccttcgggcgctcctccgatggcctctgtgtggaccccgaggagctgaacctcaccacgtccagtccaggcccgtccccagaaccagcggccaccaccgtgagcaggttcagcagcctcctctccaagctgctggccccgagggtcccggtggaggaggcggccaacaccactggggggctggccaacgcctccctgtccgacagcctctcctcccgtggggtgggaggcgcgggccggcagccctggtttctcctcgcctcttgtctcctgcccagcgtggcccagcacgtggtgtttggcctgcagatggactgacctggccagaggggggaaagtttgcttaactgggcttgagtgtgtttgtggtaaggggagaggagccggaatggagggcagaggtgaaaatcccagtggagggtggaaggaaccgtttgcctccagagatggccccagggagaacacagggacgtgccactcgagggggaggatggtatggatttctgcttttgtcacacgggcatccattggaaaagagaagcaagaatgaacgtgggccctcgggtgggaagactaggaatcggaagcttctagggcttcacatcccttcccctcccctccccttcccctcatcttccaggcaacagtgcctgcaaggcctgaattagagagacttccattggctaagtagttaagagccgtcccatttctcctggcggggtaacccattacaccgaagtcctttgttttctaccacaatcctcctcctcctctccaggggcctggaaacactaggattcaggaaggtaggcaggacgtgagagaagggagatgggagagagatttaagacaaagggtggcggtggttcctggggtctgagatgtgttaggaggcgtttaaaacaaagatccagttcatttactccacagttattcccagggctggccctagccacaaaggaactttagggcagggtagggaaaaaaggggcagcagggggtgtgtttgtggacaaataaatttgtaaagtccgaggatt

SEQ ID NO: 234961 - DNA, 1583 bp, Homo sapiens
  misc_feature (1013)..(1013): n is a, c, g, or t
ttttttagatttatcaactaatgagaatgatcgatttaatgaaatttgttatttctacatcagttattttttctccacactttttatatagatacttatcatcagcatttgtctacctatgaacttcatcaagtaaatttagcttcataaacatcataaaaagatcaatgaatactaccacatattcttttaactaaatgggatggtctaggatcttgtaacatattgcacaatgaagtttcctgttgaatgactgtctggctaaaagtacttcttgtccttaaaaatcatattgtacattcattccttcttaagtttcagaaaatttatctaggatatcatcatctgaagattcataacctgagatttcactactacctgcctctttacattcaccatctaataactgtgaaatatctttctttgtcagttttcttctctttgccattatgggtagaaaatgaaatattctgaattttcaaccgtgtttactgaaaccctcaaaaatacaaagataggatttccagccttcttttcaaaagatgagacaataccaccaaccaaaaaaagcctgggacctgatggattcacagccagattctaccagatgtacaaacaagagctggcaccattcctacagaaactattccaaaaaactgaagagaaaggactcctccacaacttattctatgaggccagcatcatcttgataccaaaacctggcagagacacaacagagaaagaaaacttcaggccagtatccttgatgaacattgatgtacaaatcctcaacagaatacttgcaaactgaatccaacagcacataaaaaaggtaatccaccatgatcaagtaggcttcatccctgggatgcaagattggttcaacatacacaaatcagtaattgtgattcatcacataaacagaactaaagaccaaaaactacatgattatctcaatagatgcagaaaagacttttaataaaattcaacatcccttaatgtaaaaaactctnaataaactaggtattgaaggaacatacctcaaaataataagagccatctatgacaaacccacagccaacattgaactgaatgggcaaaagctggaaacattacccttgaaaaccggcatgagacaaggatgtcctgtcttaccacttcaattcaacatagtactggaagtccttaccagagcagtcatgcaagagagagaaataaagggcacccatacaggaagagaggaagtcttctctgtttgcagatgacatgattgtatatctagaaaacccaatagtctcagccgggcacggtggctcacgcctgtaatcccagcactttgggaggccgaggtgggcggatcatgaagtcaggagatcaagaccatcctggctaacatggtgaaaccccatctctactaaaaatacaaaaaattagccgggcgtggtggtgggtgcctatagtcccagctacttgggaagctgaggcaggagaatggcatgaatccaggaggcggagcttgcagtgaactgagattgcgccactgcactcaagcctgggtgacagagcgagactccatctcaaag

SEQ ID NO: 234962 - DNA, 371 bp, Homo sapiens
agcaaggtggggagaatagaccttctcatcttgacattcagaattcttcacacttggcccttacctcagagaagcattctggacaccatagtcttggaatcctgtaagagattgtatgtgtatttaagtatgtttctgggaagaggacttatagtttacatccaattctcaggagtctgtagtccaaaaaaaccctagagacttcatccttagaatattctctggctttagagtcaaaattaactcagtttggcaagttactgaccctgagacttagtttctgccttagtaaaatgagataggcctgtggaatatatattcttatctgaaaattagagctaataacagtaaatatttgatgaacactgaat

SEQ ID NO: 234963 - DNA, 560 bp, Homo sapiens
atgagtggatcatgatgaccgtattgtagggacttgccatagtatggctgcttcccgatctactcgtgttacaagatcaacagtggggttaaacggcttggatgaatctttttgtggtagaactttaaggaatcgtagcattgcgcatcctgaagaaatctcttctaattctcaagtacgatcaagatcaccaaagaagagaccagagcctgtgccaattcagaaaggaaataataatgggagaaccactgatttaaaacagcagagtacccgagaatcatgggtaagccctaggaaaagaggactttcttcttcagaaaaggataacatagaaaggcaggctatagaaaattgtgagagaaggcaaacagaacctgtttcaccagttttaaaaagaattaagcgttgtcttagatctgaagcaccaaacagttcagaagaagattctcctataaaatcagacaaggagtcagtagaacagaggagtacagtagtggacaatgatgcagattttcaagggactaaacgagcttgtcgatgtcttatactggatgattgtg

SEQ ID NO: 234964 - DNA, 505 bp, Homo sapiens
agaaaggcttccctcgagaaatgatacctgagtattaaactgcaggatgagtaggattcagctgagcaaagaagggttggagaaaagtagacagcagggaaaatccctgatcctagagaagtgggtcttgttggaggagccagaactggcaggtggctgggaacccagtaggaggtgtgagtagtgggtaaaaccagggctgcaacaagcgttagaaacagattatcctaaggcaaaaataactccctttcactgctgctgctggtttggttggcaaaaggaaaaaaaaaaggactccatgattttagtaatcagattgctggtaataatattggtattattattctgatactattcactatatatataataggatagagcaaataagtaattaggctaatgttgatagaaaccaagattcttcaccataagagatgcaaatataaaatttttaaaattgtaaaaattctgtaattttaaatttgaataaaatatattagtgtaa

SEQ ID NO: 234965 - DNA, 652 bp, Homo sapiens
cctgccctaactctctgctctcatcatcctgaactacttgcaatttcctcagagttgccaggctgtctgtctgggcttgtgtactgttgccaatgcttcaagaaatgctgacgtctctctccatccccttactagattaactcctacacaacccataggattcaaggtaagtgtcactacttcccagaagtcttcccgggcaccctaacccactccctgctcccagtctgggttaggtatccttcctatgtgctctcactttatcttgcaaggtctcatatccaagcactgtgtattctgattacacacttgtcattgaagctgagcttcgtgagagcagggattatctttttcagctttgtgacttcatcactcccacatagtagagactcagtaaatgtttgatgtatgaatcaggaggaaatgctgacgtctctctccatccccttactagattaactcctacacaacccataggattcaaggtaagtgtcacttcttcccagaagtcttcccgggcaccctaacccacttcctgctcccagtctgggttaggtatccttcctatgtgctctcactttatcttgcaaggtctcatatccaagcactgtgtatactgattacgcacttgtcattgaagctgagtaatcgt

SEQ ID NO: 234966 - DNA, 753 bp, Homo sapiens
cctgccctaactctctgctctcatcatcctgaactacttgcaatttcctcagagttgccaggctgtctgtctgggcttgtgtactgttgccaatgcttcaagaaatgctgacgtctctctccatccccttactagattaactcctacacaacccataggattcaaggtaagtgtcactacttcccagaagtcttcccgggcaccctaacccactccctgctcccagtctgggttaggtatccttcctatgtgctctcactttatcttgcaaggtctcatatccaagcactgtgtattctgattacacacttgtcattgaagctgagcttcgtgagagcagggattatctttttcagctttgtgacttcatcactcccacatagtagagactcagtaaatgtttgatgtatgaatcaggaggaagagcaaagcttttcttgctgtgatggcaataacttttgtatttgtcaaaaattgttaacgaaatttcaagtcaattatttagatattgaatttaatttagattggtacatgataatttgaggggtagaatattcaggcgaagatatccaacaagtagttagaagttttggagtacaaattagaagacaatttagtactggccatgatgactcaggagtcatatgcattgaggtgacagttaagaacatggcggtggatcaaataaagacagagagacaggcagagccaggcagagacaaaggaagaaggagagatcagcagagaaattta

SEQ ID NO: 234967 - DNA, 307 bp, Homo sapiens
ctccatcctgggcgatagagcgagactccgtctcaaaaaaaaaacaaaaaaaattagccaggcatggtggctcatacctatggtcccattttgaagctgcagtaagccatgatcacaccactgctctccagactttgcaacagagcaagaccctgtctctaaatatatagctttatcatctcaacaagccgtgtggagtctagacctagcttgggtgagaaatacctgttggccacatgcatgcaggtggcagctggggcagtagccccatgagcaggctctgaggcctttccccctatgccgtaaa

SEQ ID NO: 234968 - DNA, 478 bp, Homo sapiens
agtcccacggagttggagtagcggggcacggtgacctggaggaaagtgaagacccagctgggcttcaggttttctctgcagaaccccaaggcgatagcccggcagcccctgaccctagcggggggagccccagcatcagagatgtccctggcctgacacccaaggcgcctctgagtgtcatctggcagggccagcctcgcagcgaggggagcccgggacagggatccccgcccccaggcccaggaaccccggggtcagtccacaggcccgagggcccaccctccgcctggcccccattgggaggggccttgagagaccgacgctggggaggggactgggccggcgagatggagcgcgcagcccacccccagggccggagacgcagacgagccaccgcccagcccgggaacggaagccgcgggggcgcgtcagcccttgtagaccccgcgcggggtgtcgctggggccgcggcggccgc

SEQ ID NO: 234969 - DNA, 1956 bp, Homo sapiens
  misc_feature (1417)..(1417): n is a, c, g, or t
gtaccagccccaaaccctgccagcagtatgggggaggatgcatttctccacaccttgctgaaggatggggacttggcagagttcagtgatgttttagggttggaacattgattcctttctctctctcttttttcccttttctccttgtgcctctcttcctgtgggtgcctgagaaaatactcagcctgtatgactgtggcctgagtcgagaaggagtgctagctctgagaagaaaaggtttatttccactctcatgtgactatccatctatccatctctccatccatcagcccattggacaatatgtacccagttcctatatccagctagctactgtaccaggtgccaggcatttcgggaagaataagacagacaaggttgtcgtcctcatccttctgctctaccaggaacaagtgaagtgataggaagagcttttcctcaaatagctctgagttgtcccaagtccagcctccagatcagagaccgtggttagggccctggaggatgcccacagcacctcccatgtttgcatgctaactggaggctgcctcttcaggtgtgaggaggcaactgtgcaggtggggcagggctgcctttcatccccctcctttcttctccagggatctggtatgctgagtttgcttttgaaatggaggtcctggccagaggtagcctggtaaatacagttcttaatctaaaaaaacaaaactcagtggggagagagtatggggaagaaggaagcattctccttacctgtggactagacagggagtgctgagagacggagcctggggaaagtcccattggtgtgagcttagagttccaggagagattagccacagccggatgctgacaagggtgccagattgtttcattatggaatggttagttatcacctcagcctcccaaagtgctgggattacaggtatgagccaccatgcttgacatggttcattttaaaagattacatctgggtctgtagacctcctcccatataacttggattttgtggacctgtatgatggcctgcagcacagcactgccagcctcagagaaggctggggtgtcagttcatgagtcaccccagagtcaacacaagtcagccccaccagccgcacagtgtgcctgctgtctattgcaaggtgaatgcaagatgattttttaaacaaatttgtctccctgtggctggtcacttggaggccttttttttttttaaaacatgtatttacatcctattgatgtatcaccatcctgttggtaactttaaaaattttgtgtatgtaaaattgcctatctactaatttgacaacaataccccggaggtggaactcatccccaacttttggcctggctgtgagacatccctccttgttatgtcttactttgttgctgttgcttttgtttctccccacacccntgcccccatgggggtccttggccagctctactccgactgcagttgtagaactgggcagagaaggtatgacaccccctcccccattatacctcagaaagaactagaagtatgataaatgagtacgactgggaatttgttttttccactatctctaggatgttcatgttttgtagaatccatatccttaattctttttgtgtgaaaatgtagagcatacctagttctcagacccaattccatagattagaaagaagttttggccgggcacggtggctgatgcctgtaatcccagcacttcgggaagctgaggcgggtggatcacctgaggtcgggagtttaagaccagcctggccaacatggcaaaaccccgtctctactaaaaatacaaaaattagccaggtgtggtggcgcacacctgtagtcccacctacttgggaggttgaggcaggagaatcacttgaacccgggaggcggaggttgcagtgagccaagatcgtgccactgtactccagcctgggcaacagagtgagactccattt

SEQ ID NO: 234970 - DNA, 249 bp, Homo sapiens
cttcacaataattactattattatccctatttaatggatgagcaagctgaggctttcaaaggttaagcactttgctcaaggtgacagcgcaaattaatgttacatctggaacccaaattcacatcccaaactgggaccctccctcagtcttctgcacccactaaaaaaccttgacagttcatttcaccaagcacctatcaggtatttggcaggtgccttttaaatcactaatactttaaaaacacaaaa

SEQ ID NO: 234971 - DNA, 449 bp, Homo sapiens
ttctttactgatcattgatgtaggtacataatgagagatctccatcagtgagcttggcaccagccacaggtggcccactgccaccagagctgggcacaggcccacttccagctgctactcatgatggagcaaaaaccctcacttctagccatcacccctccagatctggtacagagcccggaaaaggaagccttaggtgtgagtgaagcctcagtgaacacacacacgtgtcagcaatggaccagctgctgccaaatcacacaactacgcaacacgttgctcagaaatgccaatggtgactagcagagtgcaaacattactatgacaatggagcagaggcccggggcggcaccgagccttggtaagagccgacagaaatggcaggtcacaggccgtcactgaggagaactgcaatgcggcaacacttatatgacacttaatttgggtca

SEQ ID NO: 234972 - DNA, 440 bp, Homo sapiens
caagagtcttagctccttccttcagtcttcagtttaaattctaagaaatattattcgaagtttaagaggtcttattagggcattaatgtgggttttcccgtatcaagagcagacacaggtttttggtgtcttaggttctaaagataccagtgttccttagatttctgacctgactgtgaagggaattctcttttttttttgagacggagtttcgctcttttagtggcatgatttcggctcactgcaacctccgcctcctgggttcaagtgattcttctgcctcagcctcctgagtagctgggttacaggtgtggtggcatgcacctgtagtcccaactacttgggagtctgaggcgagaggattgcttgagcccaggaggttgaggctgcagtgggccatggtcacaccactccacttacagcccgaccttgtctcaaac

SEQ ID NO: 234973 - DNA, 458 bp, Homo sapiens
tctgaaaagaattcatggagcactaaaggtctttcttccagtaaacacctcacagagatgttttctgttggttcgtgtgtatgatctggtagagtcacttttatattgtcataccaaaaaacaatcagatactactcgatgagatcagaaatcttgaaatggaaacgcttttgtttcagggagtcaggattaaattcagcactgtgtgccctttgtgtggccattgctgaagccaaatgccagaagaggtggagttgcttgagacagtggtatacagtggcattaaggggtgaaaaggtggaagcagcgaggttgggtgcagttcatggatgtgatctggcatcagctctcgctcatagatgaaaggaacccttgccagggtgtacgagaaaatcactgatgaaggctgaacacctttctgttacacagacatcagaacaataaacagtgtgatccca

SEQ ID NO: 234974 - DNA, 396 bp, Homo sapiens
gagagaatccgtggagcccatatcacagtcacagtcacagattcggagatccatggctgttttcataaattacacccgaacccctggtggttcccgttgtgtgtgttttctcaactgcagtgtgtctgttgatgtgaggaacccagaacagtggcttggaaacccctggaaccacagagctgtggtggtcagagagcctcacacatttgtctgtctgtgaagtatgggctgcatgaccctcctttccccggtcgcagcttcatgggaggctgtgcggggcgggcccagccccatggagctgggctcttgcctgtggaaactgaccagaattaagtggtcagaaacaggcccacagagactctggagggttcttcctttgtgttctgctggcagcag

SEQ ID NO: 234975 - DNA, 1191 bp, Homo sapiens
atttttatctgttctatcttgttaggaatcaaagaaatacaaattaaaatatcaaaggccattttttacctttacaattggcaaattcttctgaaaccttaacatagtgtactggtgaaaaagttaaaaaaaaaaaacgggcattcttatacactaatagaaggaccatatattttatccaacctcaggaaataaaacacacatatgtacaaaaatttatctatagagttattcactgtagcactatttacacacaattaaaagagcagtaattaaaacaaggttccaaatatcagatacaagttaaatttttacattcatgcagtggtgtattatgtgccaatttttaaaagatgttattaaagtatatttaatggcatgggatatatttgagattggttcagtttaaaacaataggcaacaaaagatttcattaatgaccctaacatcaacaattgaaaaagactgccatcccccgcaaaacaactcacttttgaacacagaaaaaggccgggcatggtagcccaccctgtaatcccaacactttggaaggctaaggtgggcaaatagcttgagcccaggagtttgagaacagcctaggcaacatggagaaaccccgtctctacgaaaaatacaaaaattatctgggtgtggtggtgcacacctatggtcccagctactcaggaggctgagaggtaggaggattccttgagcctgggaggtcaaggctgcagtgagccatgatagcaccaccacactccagcctggacaacagagtgagaccctgtctcaaaaaaaataaataaataaaggaaaaaaataataaataaaatagaaaataaaatttgaaatatcaaatttagcaaatataattcaaaattcttgaaaactatgaatctggccgggcgtggtggctcatgcctgtaatcccaacactttgggaggctgaggtgggcagatcacgaggtcaggagttcgagactagcctggccagcatggtgaaaccccgtctctactaaaaaaaatacaaaaaattagctgggcatggcgatgcacacctgtaatcccagccactcgggaggctgaggctggagaattgcttgaacccaggaggcagaggctgcagtgacctgagattgcaccactacactccagcctgggcgacagagcgagactacatctcaaaaaaaa

SEQ ID NO: 234976 - DNA, 605 bp, Homo sapiens
ctatgtaactgtttgccacactggctgcaccaacttacaatctcaacatccatgtgtaaggactccaatttctgtctctcacttgttatcgtctttctaatttttttcagagacagtggtcactctgacactacacagaacaaatcactgatcaacaatgctgatgattttgtacttattaagagtgataaagaggaagtataaagttctttagacatcttgctaagacacatgtaagacagaagacataaaacccacaaaaattaagagcccattgcctaagtaagatttctaggggtccaatggttggaagcctatcaggatagcttctccaaggtgtcagagacaagttactctacttgcactatcagtggatactaaaaaggacgttacaaagattaacaatcactgtggattttgaagcagtactccaactcattgaccaaggaacctgttaggctaccatttataagttgaaatcagaacaaaagatggctctgcagcaagttcatgctatagtataagctgctctgccacttgggccttataacccagtatatcaattgtctggagcctctgaatccttcctccaagatcttgtggca

SEQ ID NO: 234977 - DNA, 463 bp, Homo sapiens
gctaacagccaactatgcgggggaataaaacggagcagagaaccgagttgggttccagagaccccagattgtcttcatttgcagttgccaggttccctgcagcccgggtctgtggatttcccgcggctcagcgcccgcagctcaggctccgtggagcccggcggcatggacgaggcgtcgcgcgcgccctctagtggagaaaaagggtcactgccgaacgccagctgcggaccgtcgagagttccttgggccatggctcctgccgggagcagcagccctggggccgggatccaggatgcagaggcgagaaaatgaactgcccggccaccacgaagacaacccaccccttgccagtcacccctcaaactactgacaatgtcaacaacaataattataacaatcatattaataagtagaatgacaaatataataatatttaacagtttgtgattttcagcccaca

SEQ ID NO: 234978 - DNA, 6229 bp, Homo sapiens
  misc_feature (935)..(935): n is a, c, g, or t
  misc_feature (1104)..(1104): n is a, c, g, or t
  misc_feature (1454)..(1454): n is a, c, g, or t
  misc_feature (1497)..(1497): n is a, c, g, or t
  misc_feature (1567)..(1567): n is a, c, g, or t
  misc_feature (2247)..(2247): n is a, c, g, or t
  misc_feature (2433)..(2433): n is a, c, g, or t
  misc_feature (2523)..(2523): n is a, c, g, or t
  misc_feature (2555)..(2555): n is a, c, g, or t
  misc_feature (2617)..(2617): n is a, c, g, or t
  misc_feature (2771)..(2771): n is a, c, g, or t
  misc_feature (3359)..(3359): n is a, c, g, or t
  misc_feature (3472)..(3472): n is a, c, g, or t
  misc_feature (3576)..(3576): n is a, c, g, or t
  misc_feature (4056)..(4056): n is a, c, g, or t
  misc_feature (4075)..(4075): n is a, c, g, or t
  misc_feature (4320)..(4320): n is a, c, g, or t
  misc_feature (4376)..(4376): n is a, c, g, or t
  misc_feature (4488)..(4488): n is a, c, g, or t
  misc_feature (4533)..(4533): n is a, c, g, or t
  misc_feature (4899)..(4899): n is a, c, g, or t
  misc_feature (5235)..(5235): n is a, c, g, or t
caaaaaatgagcattattttagcaacacaatcctgacactatgagagggagaaaactgggttggatcaagtattcatcttacccagtaagccattataactcaggcttttgatgcatattttgggctgttattcatcaaggtggtcaaagtcatgaagaactgtatgttattctataatatactttctatattaagtctgttcagatgataccacattttctacatcactgatccattaaaaaaaaatctttctttgaatgcctcttgccactaatcaggctatgatattcagtttttgagataggttaacaaattgaaaacccagctttaaatgttatggtagtttaaaaatagaagtgttttacttcaaactattctgagttgctgcttagagcaataaaaatgtactttatagcttgttaacctagatctcagggatatccgttctacaataatggaagtagatttgtttactgtctaaatcagccttgtcagaacaatgctctccagtgactttttaaagtcagagtaaaccaatacattctgtcttctgtgattatacagcatggcatggtgttctcttgtatacttgtgttttgaatatgagtaacagtctttagctgactttagcattttggagaaatctgtatatgtggcttctacttatataagcatctaccaaatatattaactgagttttatagtccggttattttccatttcagttacttccaagactcttcgatatgcacttacatacttcatactcattaaatgaagatattggaagctaccttattttgaggtacagcataaagcaccagcagagcttagttactacacattttagcacaatctcctgtaagttactgcatgctgcaaaagagctgaatgagtcaacagacattgtaatggtgatgtgtaactcataacntgaaataaactatgtcaaatcgattagaaaggtctgagcacatctggaaaattggcaggtaatttagaaagaaatgactagttattaagaactcaggccagttaaactgggagattaaaatgtattacattgagagactattgccatcaattgccatttgttattgaanataaaatgcagcctagttttgagactcaagtgatgaacccttcccatgggttctttctacctttctactggtcctcaaaaacaagttaaagcaaaaaagatttaagtgataaaatgtgtttatgcctcttggatgtatacttttttttaatctaaggaagaaaccttatgatatgatatgatgaaaccatcctctctggattctaatcctaagtaaatactgaccagctgcattaagaaattttctgtttttttctccagatcttcaaatgctccattaaaaaaagaaagtttgttctagtgttttcccatcagcatttacctactcttatgtaccttcaccacaatcanaactgttttccagcccaaacttggcctccaggccctcactgcnctagagccagcccctcctaatggtttcgctcacactcagcgccttagcttcccctcctcagggtcacttngagaaggaaatacttctgcctctttgtaccacctcctgccagaaaggagaccccgcactgtacctgattctttgggtcataggaacagcatgtgccccacgtgggcattctcctcagtctttatatcacataccctgtgaatcagcatgctggggtaggaccccagggtggaaactgttgaaagccgtccagcaggcaatgaggtatgctctaccctggaggcctggtaaccttcacgacccccttgagcttcaagtctctgtggctgatggttttaatgataggagcccagaaagggaggcagcttccacccagctgcacccctcgaggtcttgtgctccctgaccgggccatcagctacatccttttgcaaagcagccatcagcttatgatggggtcttgctaagctgagtgcctgctccaggaaagccttgtgatgctcatacgtggtccgatacttgtatttggggtgagccagcttaggtttaacgactaaaggacaggaagagcccggcaagccttgcttgtgaaatggacacggtatatccaggaacacacccagtctgaccccagcagcactgcactttacatggaaagttagcagctatccattattcatttcaactgcaatgctattgcagtcaggcagtgcagagagacagcagttttcccttatccangtgatcttgagaaggggaagttgaggcactaagtagaaggaaaacccttagggaaggttggctctaaagagcaggaaatttatccctccctcatgcacctgaagcaagctggtgctcagtgggacccacaattcatagaagttccctaaatgcctgggcctggttcagtgatgatttggctgagcngagacctgggagtgctctctggcttgctgcagccattccatctcagctccaatgagacagggccaaagatggacctgattctccacccantgggcagaactcaaggccattctcagctatanctgctacttcccttggtaatccctgttacattcttcccaactcttaggctgttgccaatggnctagctatttggtttgccacctgaaaaaaccagacaagcagataaaggcacctctttggggggctgtagaccatggaaacaaatcatgcatggaaccatgtgggtcactcaggtacaagcccacagtgtggacctgtttcgatgagaccaactngaatgagctgctgatccagatggcactggccacataaccaccaggctgcctgagtttaccttcatactgggcattgcagcacatcccccatcacaacatgagcacaaaggaaacccagtttctgacacagagctgccactcactgcatgcaggtgttttatagtccggttatcttctgtttcagttggtgtctcaggaggccacacttccctgggcaaggccccccctgctcctggaagactgactacgttggacccctgacctccactcagggctgacactgttccaggctatgttgttactgtcccagtctggtcagccaacttcagccacaccaccagtccgcttggttcttactttctgtttgcagtctgacaatggaacaccttttgtcaaggaaaccactcaggagtggacagatgaccttccatgccattgccatccacaggcaccaggcattgttgagcactggatcagtctcttcaaaaactgactcaaagacatctgactttggtctcctcctggtcacacgcttgactaagacacgttgttcactgaatgtagctgttccagaaagggaccatcttntcttggctgcttcttgagtaatgaccagaatgaaggggcaaggaatcatctagatctattttgaaaatttgataacctttcctgatcattcctggacatgaggcttctctctntaccctaacaactcccccaggcccacgtggttagtgcacccccgtgagcccagcgcgttctagtctaattctgatgcgaccacctggatgctcatgccgcattnccatggactgagataggtgggacagggaccactggctgagagctccgccccctgacccccctacagtggttcacacaggccaaaatggtggccgtgacaggcctctgtagactttattaaaatcctctgtgcctcttgcacctgactgtccagatggaaagtcgggagtgagcaggggcatggggagcaaagtaaagctccagccactgacatagggcacactaattttattccagtggagggagaagaaccacctcagcctcaggagcctcggcccacaccccagagaaccacctcagcctcaggagcctcggcccacaccccagagaagaaccacctcagcctcaagagcctcggcccacaccccggagaagaaccacctcagcctcaggagcctcggcccacatcccggagaaccacgtcagcctcaggagcctcggcccacacccctctacctccactaagaggtaagcggggtgngggctatgaatgacctttntcctttactgtcatccctggtgtctgtcttccttgtgaaggaaaataacttggtgccgctcacccaaactattacaagcaccttaactgactgctggctctcacatcgtcaccaggcagctctgaacacagctggactgccattgcccttaacttaccgagaaatttttggaaacagcaggggagggcctcggctcgactggcagtgtggacagacagggcagggtaaatggatggctctcaaanagtctctccaaagccgagaaggacttcacccagttgctcaaactgaactggaaacngtgcgttttaccagcagatcaggaggctacattgtagtgattgtcaaagtgcacttctcagttcacactggtcccaacagtcaaggaagcccaacttgggggtgccagcaantgtaacccacactctgttttcagaggcaccacgcgtgccccaganctacactccttgtatgggagggagtcaggtactaagttgcttttcttccccaaaacgtgctttcctttccccttacaccttatggattctcttgagaatggaagtcgacaccatcgatagaccgtgcagcactccgacggctatgcagatcgaaaacagagccgccgtgcttaccctcaccctgtgggcagtcagatatgatgggaatcacccagttagaaagatggcatggaatctgtccctgacttcaaatgaagtaatcaatggtattgccctggaaggcaagcaagtcagcctccactcaccagcgagagttgtcagggatggtagcattgccccagactcactcttagtggcacaatcaancacgaactcagtcattcataccttgggacgtaaagaaatgacagtgaatggcagtaacaaaggcacaccacagcaagggacccaagctcggcgcaccattgtcctttttcattctggttttgctgagctgctgttgcttggccttgcacaaatgctgactgggagtagtctgagacctggagtgggacacacgtccttcccatgactaaaactgctgatgaatatgataatatttctacactagcctccctcaagcccagaaccatgatctggaacagcatttgcatggagcaccaaattacaggccttaatccaacaagtatttcttgattatangacttgattccaggttagacagatggaaaaatgctgataaatataaaacatgtcttgctctctaaaaaattatagtttggttgcaaaagtaagaccaagttgactaagatataatggtcttttgtatcattatgtgatcatttgatcattgtatcattatttgatcaccaaattatatggggccaaaaataacacaaaattgggaaagagattgtaatcactgagggatgaaaaaaggcagtcaggttttgaaaaagagctctatttgggtgcacgccgagcctgcctgactgtctacaaatgaaaatcaggccaatgcctgtggcctgcaaggcttctcgatattctaaggtgacatggattgcatgttattatgcaatttttaaaaaaatggtagagcctctggatgaacgtgttataattaggtttccttttgttgatttggaactctttctgttcattgctgtgtgaaacacgcttgtggaaggaattatgccagctttgcatagtgtgcatttttagagagaacattttcattgaaacagaatcagaaatgtaacaacgagttgggtagaaatttgtcatgattcttgttggcatatattattgttgctaaaggcatttattaaacttaatgaaagtgttcattaagaacactgaagattataatgctgacaaaaacaccaaaaaaagtcattctactacattgaagattaaaaataaataagctaccccatcaaaccaaataaactataacttttaggtaattataaaatacaacttcacctgcctgggcaacatggtgagatccccgtctctacccccccgcccccaaaaaaaaatttagccatgtgtggtggcatgcgactgtgatctcagctactctggaggctgagaagggaagatggcttgagcccaggaggtcagggctgcagtgagcagtgttcgtgccaccgcactccagtctgggtgacagagtgagactctctctctc

SEQ ID NO: 234979 - DNA, 430 bp, Homo sapiens
caggtcttgataaactggctcagttggacttgtggcctctgcctaggaactgattcagcataagaggacagctttgactccctattattttatctctgacctgatcaatcagcactgccaactttctgaccccctatacaccaaattattcttgaaaacctcagtctccaagttttgggagagactgatttgagtaaaactctggtcccctgtacagtcagctttgcatgaattaaactctttctctattgccattcccctgtctagataaatcagctctgtctaggcagtgggcaagattaacccactgggttacatgtggcctttcccaattctatcttatgaaatatttatctacttggtccccatagtcatcttgaaatgtgtttcatgttgcaatgttttaataaaggctttagctaatatcttt

SEQ ID NO: 234980 - DNA, 227 bp, Homo sapiens
tctgtgagtgccagtgagaaataatgatttttttgtatatgactgttagtatatatttgtcaaatcatcgtgtaccaagttaaattttataattcttatttaatatttaaatacatttatttagaacttgttgtcttcacttgcattaatttgaactgtgaattttattaaagttgaaatatgaaaaaatgtgttgtttcctttgaattaaagatgtttgtaataga

SEQ ID NO: 234981 - DNA, 296 bp, Homo sapiens
cattttgttatcttttccccatcagatcgattaacaaggagtgataagtaataacttttttcctgtctagtgaactatccaaagtgaatgtcaaggagatataatggctgggcgaggtggctcatgcctgtaatcctggtggtttgagaagcctagaggggagaatcatttgaacccaggagtttgagaccagcctaggcaacatagcaagaccctgtctctacaaataataaattttaaaaaggagatataaggagtctggttaattcattctctgaagaaatacttcattgttt

SEQ ID NO: 234982 - DNA, 346 bp, Homo sapiens
tgagcaaattactgaacatctctgtgccttagttttctcatttatgaaatattccctaaatggtagctagtgcttatttagaatttactgcactaagtgttttatatgtgaaaaaaactaagccttagagagattaaatagcatcaagtggacagaaatagatttcactaggattaataatgggcaaagaaaatgaaatctaggagcaatacatgtaaagttcataacatttgtacttttattaaatcatttccataaaattgatctaaatgttttagttgactgtgagatgaatatgattcattgtcatgtcgtggctttaaaaattagaaacagaaaaaacagc

SEQ ID NO: 234983 - DNA, 100 bp, Homo sapiens
atctctaataccactgcccaatttcaagcgtatagcttcatgaaataaatgaaacaatttatctcccaataaccacccttatcccttctgtgcattctcc

SEQ ID NO: 234984 - DNA, 484 bp, Homo sapiens
tatgaatccactgtgttctcaagtagcctatttccaatttagggccatagctagtctttggaaagagatttcaaaatcccagtgactaagaggctgcaaaaggatgatggattggacgtttggaacgtcctttccctcccatgctttcagtgtaatcgcttactcagttcatctccctcaagttttaagacaaccctccgacctggtaggaaagctcgaaagaactggaagtgccagagtttggatgatttgttgctgcccgcagtaatgaggatttgaattggtctcatctttgtttttaaggaaacagaatcaacaaataagtgagatggcactgtgctaggcaacaagaacactgccaaaaacaaaaacacggcctgagaaaggtttgagatagaagcaaaaatatagttgatcaatgatgtcgtgccataaaacagtgccaaatgaattatataaagacagtaagtttttgttgttcttt

SEQ ID NO: 234985 - DNA, 589 bp, Homo sapiens
ttgacaagacatgccaaaacataaaaatatgtacactgcaattagtttctgaatgtagatgttacaacttaaacttatttttaaaatatttaaaaataggaaggctagacatgcctctgtatagaaaatctgataaaaatatttctccctaaattgtaaattcattgatattccagtaaaaatttccatatttttttagttgagaagctgattctgatcatctgtagaattttgattttaacgaggaatgtagtttacattaggaatgtagtactaatactaattgaacatttgctaatgtttcacacactattttaggtgctgggggatacagtaaggtacaagatggacaaaaatacgtgctcttacagatctagtagaacagaaaaaattaaatgcatgctatgtgataagtatatgatatgtcccataaagagaaatgatataaaaaagaagctagggagtgctggatcaggcaccttactatccccagaacatgttggtattagaggatgagggaagaactagaggtaactgtgagacacaaaaggcataatgaaaatagtcatgatagtcccaaggcagatat

SEQ ID NO: 234986 - DNA, 325 bp, Homo sapiens
caatcatctgttccagtttcccagaaccctgctgggaaagtactttttaaaaagtacttttacaaaaccccagcctccaaattctgggggagacaggtttgagaactttctccctgttctccttgctcagcaggcctgtgattattacattctttgttgcaactcctgctggtctcattagtcttttttcagggcagtgggaaagaagaacccatcaggctgcgacattgttccattaaacttgatactagatttttgacatatataatttatcatgtaaaggcagttttcatcttttcctctcttaatgaagacttaaaaaaaa

SEQ ID NO: 234987 - DNA, 457 bp, Homo sapiens
cacatgctatatgattccacttacataaagttaaaaagcagtcacagctaaattataatgttaaaaatcagggtattgattgcagttttggaggaagagggcagtgactggaaggaggcatgaaaggagggcatattgattcctggtaatagtctacctcatgatgtagctggtattcacgtggaggttcacttgtgatagtcactggctataagctatattttgtgcacttctctatatttttctaatacctgaattattaaaaatgtgtaaagagtaaatatcaattaaatttcccaaagtttcaagaaaatcataaattacaaaagtagtccagaacctagaaaaaaaaaatgaaggaaactttcccagtctgttctataataatgctatacttgatccccaaattggatgaatacagaattcatgaatataaaaaacagccaagaaaaaaaaa

SEQ ID NO: 234988 - DNA, 468 bp, Homo sapiens
aatactgttgtgttacagttggctacgtatacagtacaataacatgctgtataggtttgtagcctaggagcaataggctataccagtagcaataggtgcgtagtaggctataacatctaggtttgtgtaggtacattctgttatatttgcacagtgatgaaattgcctaatggtacatttctcagaacgtttgtccctgtcattatgtgacccataactgtgtgtagctcagaggtcaaaggtatattaggaggatatgcccagaattctcactaccatcccattttaccttccttgtggataaccatttcatgactactttcaagtttatcttgacctaacaagtaagtctgattgattaacctcatcttaatcatgggacaaaaacaagcagactcctcaaagttccatatttaaaatggtgataacgagacttaactcattggattatattgaagattaaatgga

SEQ ID NO: 234989 - DNA, 530 bp, Homo sapiens
atttattgctcctgtgtttggggtcagcagcactgctgatcttggctgaactcactcatgtatctggggctcacttggctgacaaaggctgaccttggctggggagaccagggtgactcagctttgctccatgtgtctctcattccccaggatgctgggttagcgagaaagtggaaaccccagagcctcttgaggcctccacttagaactggcagattgttgttctggctgctgcattctgataactaaagcaagtcgtaagaccagcccagattcagggagtggcaaaatggcctctatctctttagtgagagaaattgtaaggtcacctgacaaagaacatgggttcagggaggggtgagaaattggcccctaaatgaaattagtcaagcaccccattatctcattttagagaggagcaaactcagtttcccaggagagccagcgactggtccatgttcactcagcagaatggggactagagcccaagactctcgtctttcactctgggggcctttccatctacccca

SEQ ID NO: 234990 - DNA, 331 bp, Homo sapiens
tgtcagcaggtgaatggtaagcaaattgtggaatatttgtacaaagtaataggattcggctgtgaaaaagaatgactattgatacatgcagtaatctgtaatgacagaaaacagattagtggtggcctggggttgggagtagaagagaaggggaggattatgagagggtaggaaacttttggggatgatataaatgtttgttatcttgattggactggcagttttatgggtgtatacatgtatgaaaaattatcaaattgtaaacttgaaatgtgtgcagtttactgttcttcaattatatttcaataaagttcaaaaaaattagtgcttg

SEQ ID NO: 234991 - DNA, 941 bp, Homo sapiens
gagaaaacaccaaatggcggatgacgccggtgcagtgggggggcctggaggccctggtggccctgggatggggaaccgcggtggcttccgcagaggtttcgccagtggcatccggggccggggtcgcagccgtggaccgggccggggctgaggccgcggagctcgcggaggcaaggccaaagataaggagtggatgcccgtcaccaagttgggccgcttggtcaaggacatgaagatcaagtccctggaggagatctatctcttctccctgcccattaaggaatcagagatcattgatttcttcctgggggcctctctcaaggatgaggttttgaagattatgccagtgcagaagcagacccgtgccggccagcgcaccaggttcaaggcatttgttgctatcggggactacaatggccacgtcggtctgggtgttaagtgctccaaggaggtggccaccgccacccgtggggccatcatcctggccaagctctccattgtccccgtgcgcagaggctactgggggaacaagatcggcaagccccacactgtcccttgcaaggtgacaggccgctgcggctctgtgctggtacgcctcatccctgcacccaggggcactggcattcgtctccgcacctgtgcctaagaagctgctcatgatggctggtatcgatgactgctacacctcagcccggggctgcactgccaccctgggcaacttcgccaaggccacctttgatgccatttctaagacctacagctacctgacccccgacctctggaaggagactgtattcaccaagtctccctatcaggagttcactgaccacctcgtcaagacccacaccagagtctccgtgcagcggactcaggctccagctgtggctacaacatagggtttttatacaagaaaaataaagtgaattaagcgtgagaaaaaa

SEQ ID NO: 234992 - DNA, 344 bp, Homo sapiens
aaagtgaaacttagtgcctcagacaagcaggggcaagtctgctaaggaagctgtggccagaagcacagatcagaaacacgatggctctgttaacagccgaaacattccgcttacagtttaacaacaagcgccgcctcagaaggccttactacccgaggaaggccctcttgtgttaccagctgacgccgcagaatggctccacgcccacgagaggctactttgaaaacaaggtgccacacgggctctctgggcacagggccggcaggggctaaccccatctgatgtgtgcagaaaatacatgaaatgcctgcctataaatttctcaatttttgatgtaacaccct

SEQ ID NO: 234993 - DNA, 184 bp, Homo sapiens
tgggagtatttttaccagccagtgcttcttaaacattttggtcttggaacccgtttacactgttaagaattattgaatgtaggccgggcgcagtggcttacgcctgtaatttcagcactttggaaggccgaggtgggtggatcacctgaggtcaggagttcgagaccagccatggtcaacgtgg

SEQ ID NO: 234994 - DNA, 415 bp, Homo sapiens
tatttatttatttatttatttaaatagagacagggtctcgctgtgttggccaggttggtcttgacctctttcctgtttgttttggtttttgagatggggtctcactctgttacccacactggagtgcagtggtacatcctcggctgggctgcaacctctgcctctggggttcaagtgattctctcacatcagcctcctgaacacctgggactacaggtgcaggccaccacacccggctaatttttgctagttttggaagagatggggtttcactatgttgcccaggcgtgctggtgggcgactgtagtctcagctacttgggaggctgaggtgcttgagccagggaggtcaaggctgcagcaagccatgatcgcaccactgctccagcctgggccacagaacaagacattagctc

SEQ ID NO: 234995 - DNA, 427 bp, Homo sapiens
  misc_feature (137)..(137): n is a, c, g, or t
  misc_feature (148)..(148): n is a, c, g, or t
  misc_feature (195)..(195): n is a, c, g, or t
  misc_feature (335)..(335): n is a, c, g, or t
  misc_feature (364)..(364): n is a, c, g, or t
cattggaagatgccgagccgcagccaccctgacggctgggactcggtggaggctccctacactcgctggggctggaagaaattggtctttggggattctgaaggcagcttcctctattctcttgctccttggtaacnccacatgacangagctccgccggcaacttgcctgctcacacctcccgttcgcaggtgnccccaggagagcggcagggtttggggcgagatgagcccaagactgccccaaatgcacggcagcacactgcggaggacgtactgcccgcccctccctcactgcctggctttctcatgctatagttggggttgaactctggnccctgcggtgactctgccctttccacccnattcgcagagcccagctgctactccacggtccctgcaccggctgctgcacagacccgcggccg

SEQ ID NO: 234996 - DNA, 129 bp, Homo sapiens
gctgtgtccacatagatggccacagagagatagaggcatcccgactcttcagtatcagacccagagagaccttgaagactgcaagcatgaaatgaaaaagatatgcaaagcggaagtgactctggagat

SEQ ID NO: 234997 - DNA, 757 bp, Homo sapiens
aggatcagcttgtcaatctctgcaaagtagccagcttggattttgatagggattgtatggaatgtgcataccaatttggagtggttttagggttttctagagaaacagaaccaataagaggtgtaggggtgtatgtgtgtgtgtttgtgtgtgtgtgagtgtgtatgtgtgtttagagagagaaattactggagggaattgattcgcttgattatataggctgagaaggcctaagatctgcattctgaagacccaggagagccaatggtatagctccagtccaaatccaaaggcctcagaaccaggagagttgatgatgtaatttctaatctgagtccaagtctgaatcaggagaataccagtgtcctggctctaagacaggcattgagaatgaattcttccttttaaccttttattttattcaggttttcagtagattggatgaggcccacccacattggggagggcaatctgcttattcatcctactgatgcaaacgttaatctcattcagaaacaccccacagacacactcagaataacaccaaatatctgggcaccctgtagcccactcaaggtgacacataaaatcagtcatcacagagagtattgccatcttaacaatactaagtctgacagtcgatgaatacaggttccttttatatttatttggatcttctttcattttgctcaacaatgttttgtagtttttggtgtgtaagttttgtatttcttgggtgaaatatactccaaagtat

SEQ ID NO: 234998 - DNA, 413 bp, Homo sapiens
ccccagcctgggcgacagagcgagactccgtctcaaaaaaaaaaaaaaaaaaaaaaaaagagagagagaaaggcatctttgtcaatgtatttaagttaaggatcttgagatgagattatcctggattgtccagttaaccctgaatccagtgacaagtgtctttaaaagagatacacagaggagaagacagacacaaagagagaaggtgatgtgaagatgggggcagagattggagggacgcagctacaagccaagaaaaccaaggattgctggcagccaccagaggctgggagagaggcctgggttgagacggcctcagagcctccagagggagcctggtcctgctgacacctcagttttggagttctgacctccagaactatgagaaaataaatttctgttgtttcaagcca

SEQ ID NO: 234999 - DNA, 560 bp, Homo sapiens
tggaaaatacaactctggtataaggcaactcttgcgtctcacaaatcctatcttccgatcaagctgaaacaaatgttcttgctccccacatcctcacaccccgccttccctccaccagcatgcttacagcagcactgcaccctccgaaggcgtgctgaggcttttcccaccgcagccccggatctccacaaagccaaactcacgcatccagcagatccaaataaatgccgcatctgccctgacgccttcccaaattctatgggatgttctttgttcttttttcctagtaattcgtcaaccaccgccttgtattatagcaatgtggatataaatcttatcctctcttcactgcaaagaacatgtctggtttatgttcctattcttttgaccccttggacctgttcagaaagcattacttaaatgaagtaacaaaggcatgggctaacgacagagggtgtccctgagccatttggattccaccgccataaggtgtagtacaaagactcaaggagggggtgctccgccgttcaccccttgttactaaatgaccattcctgtca

SEQ ID NO: 235000 - DNA, 353 bp, Homo sapiens
gaccgtgtgagggagatactaccaccattttacagatgaggaaactgagggttagagaatgtaggagttgacccaaggtcatggtgcatctagtacatgatggatccaaggttcctatctggacagtctgccttaggcttacagtgctaagcaccacatgcagtttccccaatcatacaccttaggacaccacctttgtatgtgggtctcgtgccagagatgaacgtgggcgcatgcacacgcgtgcatgcacacacacatgcacacacacacacacggagagagatttatttcaaggagttggcttacacagttgtgggaactgacaaatccaaattctgtagggcaggcca

SEQ ID NO: 235001 - DNA, 356 bp, Homo sapiens
gaccgtgtgagggagatactaccaccattttacagatgaggaaactgagggttagagaatgtaggagttgacccaaggtcatggtgcatctagtacatgatggatccaaggttcctatctggacagtctgccttaggcttacagtgctaagcaccacatgcagtttccccaatcatacaccttaggacaccacctttgtatgtgggtctcgtgccagagatgaacgtgggcgcatgcacacgcgtgcatgcacacacacatgcacacacacacacacggagagagatttatttcaaggagttgtcagttcccacaactgtgtaagccaactccttgaaaaaaaaccggcgcggccg

SEQ ID NO: 235002 - DNA, 458 bp, Homo sapiens
cacacctggccaatttgatttaagacaaagtctccctctgtcacccaggctggagtgcagtggtacaatcttgattcgctgtagcctctgccttctgggtttaagtgatcctcctgcctcagcctcccgagtagctgggattacaggggtgagccactgtggccagcctaacttttgtatttttagtagagatggggtttcactatgttggccaggctggtctggaactcctgacctcaagtgacccgcccgcctcagcctcccaaagtgctgggattacaggcatgagctaccacgcccggcccgtcaaatttattttcttgttagtaaatctctccttcgcatgctgtgcagttcacgtggctgcctcacttaccatctgctcccacccatgcaatgtctgctcacaagggccgggatctttgaactgtggcctctgctgtgttaccagcacactc

SEQ ID NO: 235003 - DNA, 449 bp, Homo sapiens
tagattggtatagctattatggaaagcagtatggaagttcctaaagaagttaaaaatagagccaccataggacccagcaatccctattatgtacgtacccagaagtgctgagattacaggcgtgaccaccgtgcctggcagttttacccttttgtaagccaataaaattattttaatgataggatgttctcttttctttaaggttttgtggtatagtattgaactgaaaatatttgaggtgactgtaaaatacacatatttcccaaaattattcttgaattaaatgtcaaaactaatataaaagcataattgaaaattataggcatcttgaaagttccataaagacagaagtaagggtcattcagtcattattactttagaaaccttgattaaatatgtgccatgtgttaggccttttgttagatgttagggtgagagattttatagga

SEQ ID NO: 235004 - DNA, 434 bp, Homo sapiens
ggttcttcctctaaaagatctgactcctagtgcccttgtcccgttagaatcccacagaccccaaaatggcattctatccctgtccttaggatggcgtgatggaaaagagctgagttcccctgagactggagcagggtcagaaagacagggaattgaggctgggcacagtggctcagcactttcagaggccaaagcaagagaatcgcttgaagccaggagtttgagaccagcctaggcaacagagtgagaacttatctccacaaaaaaattttaaaaattagccaggcatggtggtatgcctatagtcccagctacttgggaagctgaggcaggaggatgacttgagcccaggagttcaaggctgcagtgaactgtgattgcaccactatactccagcctgggcaacatagtgagaccctgtctctaccaaatta

SEQ ID NO: 235005 - DNA, 442 bp, Homo sapiens
agatgaatttttaggattaccagtagagtaagtcattgtgtaaattaacgtaataatattttatgaaagcaaaatattatgattgttttaagcatagtactggcaatatattagagtggctttgattattaatgtccaatcctactatttctcaatcacttgttttgctttatgttggtttgtttataagatttatttaaatttgtctattttttgtctttcaaatggtgagaattaacttgcatttttataaaaccactatgtcgaataccattccaacctttcttagtcaatttagtaagtaatagctcagaatgtgttggaaataactgtgcctactatataaacattaatcacagaagtttatgcataagccccattttaaacactatttggatgttgctttatagctataacaaataaaaaattttaaattattacc

SEQ ID NO: 235006 - DNA, 1953 bp, Homo sapiens
gctttaatgatttatggcaaactcatactagccttgatcagagaggtgaccctggcagttattgagcattaactctggaggactgacgccactgagtctttctacacactgtaatttagtgttcctatccaagatggccactaaattgcacttcttctattttcaccctctggagaatggtaaaaagcatgatttgcaaatattgtcaagtccaaagtgtgtttctaaactactaagctagccaaatgcatctctatatgttacaatgttctgcagatgtgaaaaaatccttcccgggtttatgaaagtgagaatgatatgcatctttagctgcctctggcatccggcacgtcacacagtgtggtcagtccagtcaggctgcccgagccacagattcccagcggcttcatttgtcagacaagctgacaggtgttggtcaggaaaatactgatcaagttgtttttgttgttgttgttttgagacagggtctcactctgtcacccaggctggagtgcagtggtgcgatcttggctcactacaacctctgcctcccaggttcaagcgattctcctccctcagcctcccgagtagctgggattacaggtgcccacgacgacacccagataatgtttgtatttttgtagagacggtttcaccatgttggccaggctggtctcgaactcaagtgatccacccgcctcggcctcccaaagtgctgggattacaggcatgagccactgcactggccttcaagatgttaaaagaaagtattattgtcaatgactgagtatttataaggacagaaattcctgaaattactccgttgatgctcctggtcctgaggcctcctttagagtacgggggagccttgatattgaaggccatggagggaagaatcagcagagcagcatctccaagcatcagcatctgggttccaggaaaaggtgcacgcactttgtgctggtagcacctgcgtcagattcccaagatgctctgaaacagaagcatttactggagtaaaatactgccttacaggctgtgcacagtggttcacgcctgtaatcccagcatttagggaggccaaggcgggcagatcacctgaggtcgggagttcgagaccatcctggccaacatggtgaaaccccatctctactaaaactacaaaattcagctgggcgtggtggcacacgccaggagtcccagctactcaggagtctgaggcacaagaatcgcttgaacccgggtggcagaggttgcagtgagctgagatggtaccactgcactccagcctgggtgacagagcaagactttgtctcaaaaaaataaatactgccttacaaaggagagggcaaaatagagtatttctgatgctgactgacaatgcaagtgacatgaaaatagcccccatgattcaactctaggccagcaactcttattactatgcctgtgaactctttgggaaacttacaaatataaattcctacatcctactctggtagtcagctttgtttggtctagggtgggtccaggactcctcacttttagtaattgtccctgccgattcttttttttaaataatggctttattgggatataattcacttaccataaaattgactctcataaagcatataatttagtggtttctagtatactgactgtgttgtgtaacaaccaccactctataattttagaacatttccatcatcctgcccccaaaatccatacctattagcagcctggccaacgtggcaaaaccccaaaaccccatctctacaaaaaaatacaaaaaaaaaaatagccggacagggtggtgcgctcttgcctcagtcacagctagctgaggggctgaggcaggattgcttgaaccaggaaggttgagactgcagtcagccaagattgtgccactgcactctggcctgggcgacagagcgaggctccgtctcaaaaaag

SEQ ID NO: 235007 - DNA, 1541 bp, Homo sapiens
gctttaatgatttatggcaaactcatactagccttgatcagagaggtgaccctggcagttattgagcattaactctggaggactgacgccactgagtctttctacacactgtaatttagtgttcctatccaagatggccactaaattgcacttcttctattttcaccctctggagaatggtaaaaagcatgatttgcaaatattgtcaagtccaaagtgtgtttctaaactactaagctagccaaatgcatctctatatgttacaatgttctgcagatgtgaaaaaatccttcccgggtttatgaaagtgagaatgatatgcatctttagctgcctctggcatccggcacgtcacacagtgtggtcagtccagtcaggctgcccgagccacagattcccagcggcttcatttgtcagacaagctgacaggtgttggtcaggaaaatactgatcaagttgtttttgttgttgttgttttgagacagggtctcactctgtcacccaggctggagtgcagtggtgcgatcttggctcactacaacctctgcctcccaggttcaagcgattctcctccctcagcctcccgagtagctgggattacaggtgcccacgacgacacccagataatgtttgtatttttgtagagacggtttcaccatgttggccaggctggtctcgaactcaagtgatccacccgcctcggcctcccaaagtgctgggattacaggcatgagccactgcactggccttcaagatgttaaaagaaagtattattgtcaatgactgagtatttataaggacagaaattcctgaaattactccgttgatgctcctggtcctgaggcctcctttagagtacgggggagccttgatattgaaggccatggagggaagaatcagcagagcagcatctccaagcatcagcatctgggttccaggaaaaggtgcacgcactttgtgctggtagcacctgcgtcagattcccaagatgctctgaaacagaagcatttactggagtaaaatactgccttacaggctgtgcacagtggttcacgcctgtaatcccagcatttagggaggccaaggcgggcagatcacctgaggtcgggagttcgagaccatcctggccaacatggtgaaaccccatctctactaaaactacaaaattcagctgggcgtggtggcacacgccaggagtcccagctactcaggagtctgaggcacaagaatcgcttgaacccgggtggcagaggttgcagtgagctgagatggtaccactgcactccagcctgggtgacagagcaagactttgtctcaaaaaaataaatactgccttacaaaggagagggcaaaatagagtatttctgatgctgactgacaatgcaagtgacatgaaaatagcccccatgattcaactctagttcaccacgttcatagtagtaaattggcgcagccgcaagttccacgtgctgcgaatcccgggcctgttttccacatcgtatgtccagcacagattcatgagatcgtacatctctcttgga

SEQ ID NO: 235008 - DNA, 2071 bp, Homo sapiens
cttataatccttttattcgtctcatgtagattccctaacacacccaccaccgtggccactccacagctctcccaccatcttgactcctagttcctgagaaaatcgaggctgacccacctgactttcctgtttccttcttcccacatcagagacctatatttcgctagcttcgtacccatcatttctcgctcaaagaatgcagcatccttccttattccaggctcacctctcctactataccctcatcccagccctcctccatcctctttacagaccttccctatggatttcctctgagcttttgcatttctaatgtggaatttctctgcttactgccttgtacttttgatccagctgaactaaactaactcaaatgtgtcatggtgttttcttcattttgcctgcttaactcatgtctttccagccttaaactcaatgctcttccctttgggaagagttttctgaccctccatctcttcccgtggctgatcacagcgtttattggacagggctctgcttgtcattttcacatgtgtgtccacctctggactgtcgctctagggtacagagcagcctctaccccagtgctggacaacactctgcccacacagatgggtgctccctgcgtcctgagtggactttcctgaaagagaaactgagtctggccttctcttgtttacaatttgccttcacctctgctctgaatgctcttggaggtctctagcccttctgtggtttgttgtcttttcccctcagtcttgctgcagcatctgccactgttaaacaccttcctgaaattctctcctccctgatggcctgtgacatgacacttcctttgctcttccctagcatatgtaaactctcctgtttctctccttcactggctcctccaaacccttagagatgggtcttcccacagttttgtttccaaacttctctctctgccctctcaccttctgtggcttcacctgtcacttgtgtgcagacaaatgcttcgtagtctgtgtgtgtaacctgaatccctctcctgagcctcacgtgtgtgtccagcagcctgattgacatcatcacctgaatgcagtcccagcatcctaagacccacacatccaaaagtcagctgatcacgggtcacacactagttcgggccctaagtagccccaactgggtcagctcctcagagcttctaaccctgtctccccaccccatctgtctgcccactgcgatattttcagatacttcagtttgtaaacacatactgactacctactgtttctccaaagcacagttctgatcatttctttcctcatctcaaaaaccttcaggacttccctttgcctagtaaattgagtagaaatgccttagtcagcatcccagatccttgtttttttgtttgtttgtttgtttttaaactggggcagtactcctgctttcctcccattcctctttcatccctgtattgaggtcagattctcccacctgtcactcctcttgtacacttgatacctgtgcagcatagtagagtagccattagccacctgcagctatttaaacttgaattaaaattgaattaaaattttctccttctgccagggccactcatcgcacattcctcctttttcacacaaactttcctgatcattcctttcttcatgagatatcccctcccttttgagcctcagtagtatgtttttcccttgcaaaacctacccattctttccttgtagccattgatatacttacctcatttctgaattggaagagtttttgaggtaaagactacatgaagggctgggtgcggtggctcacgcctgtaatcccagcattttgggaggccaaggcaggggattacctgaggtcaggagttcaagaccagcctgggcaacatggtgaaacccccgtctccactaaaaatacaaaaattagctgggtgtggtggcacgtgcctgtaatcccagctactcaggtggctgaggcaggagaatagcttgaacccaagaggtggaggttgcagtaagctgaaatcacaccactgcactccagcctgggtgacagagcgagactccgtctcagg

SEQ ID NO: 235009 - DNA, 985 bp, Homo sapiens
  misc_feature (966)..(966): n is a, c, g, or t
aatggttagaaagtggctaacatttgttgagcacctgctgtgtgcctggccccggctgggagccttcgtgcccagagtgaccccgtctgaatgcagttctttgcctcattcaaactggggagtgggaggcagagctgcacaactcacaggtgccgagctcaagactcactcctgggtctgcctgggctgggctgtgcttgttgcccctgtggccaacacacgcgcacctttcacctgaaagccaggatccgcagaacgttccccgaggaggtcgttgtttggcactatgatttgtctcttcctaaaaaggtgatagagttacactggagagagcagcatccaggtgcagcagggatgggcctggggctcacgggcaggggctctgtgtccggctggggcctggggtcctgcgctgcacctgtgtgtcagaagcactcagtaaatctttgctgatgaaggatgagaggatagaggacatgatgcttgctgctgcattgcctgcaatcctggatgagatgcccaggttggctttgctccccgtcgggtggatgtgatgttagctgtgatgttaggtccctggctttaaaatacgagggagctgggaattgagggagcaggttggggcagaaaggacagccccgcagaggcctggagctgaggcagtgcgggcgaccccaggagcagtgagtgcttccgtcacagccttcatcgcaccctgtggtcctcataaaggggatggaatctacgaatttagttttcccagcctccttaaaaactcattcatgccaggggcagtggctcacacctgaaatcccaccactttgggaggctgaggcaggctgattacttgaggtcaggagtttgagaccagcctagccaacatggtgaaaccccgtgtctactcaaagtacggcggagcacttgaccccagaggagaggtttagggggccgattgggcactgaccncatctggcatagatgagcc

SEQ ID NO: 235010 - DNA, 574 bp, Homo sapiens
cccacgcgtccggccttcatcgcaccctgtggtcctcataaaggggatggaatctacgaatttaggtccctggctttaaaatacgagggagctgggaattgagggagcaggttggggcagaaaggacagccccgcagaggcctggagctgaggcagtgcgggcgaccccaggagcagtgagtgcttccgtcacagccttcatcgcaccctgtggtcctcataaaggggatggaatctacgaatttagttttcccagcctccttaaaaactcattcatgccaggggcagtggctcacacctgaaatcccaccactttgggaggctgaggcaggctgattacttgaggtcaggagtttgagaccagcctagccaacatggtgaaaccccgtgtctactcaaagtacaaaaaaaaaaattagtcagacgtggtgtcacgcacctgtaatcccagctctttgggaggctgaggcaggagaatcacttgaacccaggaggcagaggttatagtgagccagtattgcgccactgacctccatctgggcaatagagtgagaccctgtctcaaaaaaaaaaa

SEQ ID NO: 235011 - DNA, 819 bp, Homo sapiens
gagatagaggcgtccgcggtgtaatttcgatgccggtaccgagtctctctagaggtctggaatcagcagcctgtgaaaaactgcccactcctactcctcaagtagtaaaggaaggtgattcctttccagataccttggcaaaaatgggcaagagatagccccagcccagatttccaaatcattaatggtagataactacaccaaagatggagtcccaggtcaagaaagacccaagggtccctctgctgttgtgccctctacaagcacaggaggagttgctctacctattacaacagccatagaaacagttaacattcatggagatcactctcttaagaataaagctgagcttgctgattccatgaaaaatgaagcagggatcgatgaagggcatgtgataggagaatctgagtcagtgcacagtggtgcgtctaagcattcagtagagaaagtcacagagctagcaaaaggtcacctccttcctggagtgccagtagaagaccagagcctaccaggagaggccagagccctagaaggatatgcagatagaggtaatttcccagcacatccagtgaatgaagagaaagagactaaagaagggtctgttgcagttcagattcctgacttactggaagacaaagcacaaaagctcagtttttgtgaggaccaaaatgctcaagatagaaattccaaaggttcagatagtttgaataagaaggtagatctgactcttttgtctccaaaaagtgaaaatgataaattgaaagaaattagtctggcttgtaaaatcacggaattggaaagcgtttccttgccaac

SEQ ID NO: 235012 - DNA, 821 bp, Homo sapiens
gggtcaggtagcaggccggtggggaagagctgataaataaatcatctcctctagaggtctggaatcagcagcctgtgaaaaactgcccactcctactcctcaagtagtaaaggaaggtgattcctttccagataccttggcaaaaatgggcaagagatagccccagcccagatttccaaatcattaatggtagataactacaccaaagatggagtcccaggtcaagaaagacccaagggtccctctgctgttgtgccctctacaagcacaggaggagttgctctacctattacaacagccatagaaacagttaacattcatggagatcactctcttaagaataaagctgagcttgctgattccatgaaaaatgaagcagggatcgatgaagggcatgtgataggagaatctgagtcagtgcacagtggtgcgtctaagcattcagtagagaaagtcacagagctagcaaaaggtcacctccttcctggagtgccagtagaagaccagagcctaccaggagaggccagagccctagaaggatatgcagatagaggtaatttcccagcacatccagtgaatgaagagaaagagactaaagaagggtctgttgcagttcagattcctgacttactggaagacaaagcacaaaagctcagtttttgtgaggaccaaaatgctcaagatagaaattccaaaggttcagatagtttgaataagaaggtagatctgactcttttgtctccaaaaagtgaaaatgataaattgaaagaaattagtctggcttgtaaaatcacggaattggaaagcgtttccttgccaac

SEQ ID NO: 235013 - DNA, 640 bp, Homo sapiens
agaaatggggtttcaccatgttgatcaggctgatcttgaactcctgacctgaggtgatccgcctgcctcggcctcccaaagtgctgggattacaggcatgaaccaccatgcccagcctctatcttccattttttatttgtatactatttaccaagcatgaaccatgacttttcaatatgtgttattatgggttttctttttcttaattctaatgggagttatcatagatttgtattaaggttttacttttttctttttttttttgaagacagagtctcaaaggaatagatgaaatataaaatgaaataaacatcgcataatgaaattgaatataaaatagaatagaaaagaaaaataaaaaaattattttggggctcaagttagattttcttggaataagaacggtgttttgttttgttttgcttgttttataaaaatgcagctttgagtggaaggaaaggtttacactgccaaaaaaataaaagttttgaaagtcatgccgactcttcatttttttcctctttacatggaaacttagctgtaatgaatatttagttaattcttccactctgcacttttttctttttagacggagtctcactctgttgcccaggctggagtgcagtgctgtgatctcggc

SEQ ID NO: 235014 - DNA, 1207 bp, Homo sapiens
caacccatctccgaaaaggattaagcatcactagggctccaagtgagttctgatcagaggctgttcggaagacagcaggggccatgaccaccctctctcctgaaaacagcctctctgccagacagtcagcctccttcatcctggtgaagagaaaaccacccattgacaagacagaatgggacagcttctttgatgagagtggccacttggccaaatcacgggacttcatttgtgttaacatcctggaaaggggtctgcaccccttcgtgaggactgaagcctggaaattcctcacgggctacttctcatggcagagttcccaggatgagcggctcacggtggacagcatgaggaggaagaactacaaggccttatgccaaatgtatgagaagattcagccccttctggaaaacctgcaccggaacttcacagagactcgcaataacattgcacgtgacattcagaaaatctatgacaaagatcccctgggcaacgtcctcatcgacaagaagaggctagagaagatcctgctcctgagttacgtctgcaacacgcaggcagagtaccagcagggcttccatgagatgatgatgctcttccagctgatggtggagcacgaccacgagaccttctggcttttccagttcttcctgcagaaaacggaacacagctgtgtcatcaacattggcgtggccaagaacctagacatgctcagcaccctgatcaccttcctggaccccgtgtttgctgagcacctaaaagggaagggtgcaggggctgtgcagtccctcttcccctggttctgcttctgcttccagcgtgccttcaagtccttcgatgatgtctggaggctctgggaggttctgctgacggggaagccctgcaggaacttccaggtgctggtggcctacagcatgctgcagatggtgcgggagcaggtgctgcaggaaagcatgggcggggatgacatcctcctggcctgcaacaacctcatcgaccttgatgctgatgagctgatctctgccgcctgcgtggtttatgctgagctcatccagaaggatgttcctcagacattaaaggatttcttcctctgaggacaccaaagcccgcagtggactgatgccttcgatgggcaggatgaaggccaggggcactggagtgagggagtagataaaacagctgcaatataaacagtcctctgggataa

SEQ ID NO: 235015 - DNA, 450 bp, Homo sapiens
agctgccccttagaggaaaaatttattgttctagcttctaggaatgttattggcaggtggcatttaaatctcagccccttcagggtttacctgaactgcagagaacgagcctacctgaccaagtacaagatcctttccaagtcagcccaggagggatgactgacagagcagaggcagaaaggaccagccattctggagcaggataagtgttgatcccaagggctcgcatagaaaacacgtgcacattaaactcagtatcctaatctgcttgtagacaaatgttacctgcaacatccagtggaagagagtaggaattcgggaagattaaagttgccaccattgcagagaaaaatcattattgagccgggtctcaaatttattattattaccattttccacatactggtgtccgaaaataaacctgaaataaatgcttaagaaaaaaaatca

SEQ ID NO: 235016 - DNA, 360 bp, Homo sapiens
tgtgctgttgataatgttttgtaattatttgataaatgtgggtgggagatacaggataaacaccaagggtgatatttatcttctttgaaactgtcttcccccaaccctggtaactatttgatgcagagcatatataatgcacatgaataaatgtttgactgacaactgattgattgatttggctttatcatcaagtaggtaggaaattttcttcaaatgcaactgcaaaggacaaataataatgtctcaggagagttatggattggcaaactagaaaatacctggtccagccacaatgagatatattgaaagctttcataggcacagatgtttgccaaaaaacacaaaacagcacaatta

SEQ ID NO: 235017 - DNA, 498 bp, Homo sapiens
ttttttccatggcttttgggctggtcttaggcacttgctgtcattgtaggcaaggctgttcttttttgtgttgtttacaaaattatgaaagaaaatcctatctcttaactggatggttataattttcattcattccaatagcttttgatataaataactgcttttctttaacagttcaattactaccatcttctaatctgtttcatagttagctttgatattttccctagaggaaatgacacctatataaaacttaactaaacttattatacaatataacttcaatattcaaagcccttttaatgagaatttaaaatttgtttctcttcgagtttcattttcttggtctaaccgaatcattctcacaataagtgagaaaatagagactactatctctctctatatattttttaaaacagaaggttaatttgcttgtaagtcgtggctacgttcgatctggagacttatctgttggactccaaagcacaaatttttttc

SEQ ID NO: 235018 - DNA, 482 bp, Homo sapiens
gacaatccggggctctgagagtgcattgccagcagacctccactatgagaattgttaaaggcacttcttcaggcagaagtatgaaagtttagatgtacccagaggacttgagagatctagaaatgataaatatgtgggtaaatagaaatggcattttctctgtcatctcttaatttctttaaaagataatggagtatttaaagtaatatggaatttataacatggaagtaaaatgtatgctatcagtagcacaaagggtgggagcaaagaattgggaatatactcttgtgaggtgtatacattatatgtgaaatggtgtaatattacttgaagataaactatgataagttaaaaaatggatagaatgaactctagagcaatcacctggaaaaaaaacacacacaaaaaaggggtgtaactaataaaccaatagtggagataaagtagaataagaaaaaatattccacaagaagatgggagaa

SEQ ID NO: 235019 - DNA, 635 bp, Homo sapiens
gaaaatatagataagaagaattaaagcccctttatgggatcctattttgtttgtatactaatccttgtttaatctgggaaggggaacaagttaacaaaccattcggacgaaagttgatacaaacttgaattttccaccagaatgtttagggaaggtaatgtgtcaatacctttttcctttatgaaaaaagtgttaataaaattagcattgaagaaaactagccagccaggtatggtggctcacgcctgtaatcccagcactttgggaggctgaggtgggcagatcacttgaggtcaggagttcgagaccagcctggccaacgtaatgaaaccccttctctactaaaaatacaaaaattagtcggtggtgggtgcctgtaatcccagctgcttgggaggctgaggcaggagaatcgcttaaacccaggaagtggaggttatagtgaaccaagatcgcgccattgcactccagcctgggtgacagagcgagactgtctccaaaagaaaagaaaattaaaattaaactgttcacagcccctcagaattaacgttgccagttttcctgagatggtaaggtcgtttcctggcccatgcctagcctacctaacctctctctgctgctctgttgatcatggc

SEQ ID NO: 235020 - DNA, 355 bp, Homo sapiens
aaagttgaaaatataatagccaataatagtggaattaataaataatgttgtatgataaaacagtatacagcagtgaaattgaatgaactcggctgcatgtatcaacatgaataagtttttgaatataattttgaatgaaaaaggcaagctgcctttactttaaataaccctgtctctactgaaaatacaaaaattagccaggcgtggtgacaggcacctgtaatcccagctactctggaagctgaggcataagaatcacttgaacctgggaggcagggcttagcagtgagctgagatggcgctattgcactccagcctgagcgacagagcggactctgtctcaaaaataaaataa

SEQ ID NO: 235021 - DNA, 679 bp, Homo sapiens
agttacttacctagtctgggctcatcattttcacaggtataacaggagtaatgacatggtggggatgaagtgggatattgtctggaccacgctttgcatagtgtctcatggctaggaagtactctatacaaagtagttactattattagctattatatttcaactgatgaaaggtacaaagaaactcccaggaagcgggtcattgctgcatgccgctgtctttaaagaacgcccagcagcaatcccatacgtagccaacaagatatgtggacgtcaaaagtaagtgctccttgggtgcagcacaccaacatggcacatatatacacatgtaacaaacctgcacgttgtgcacatgtaccctaaaacttaaagtataataataaaaaaattttaaaaaaaagtaagtgctcctatgcaacatacccagtaaattaatgattccaacttccttttcagttaaagcagtggatcagaatttgaaaaggagtaaaggtcaaggccatgaggtctaactaacacggtagcatcagagcctggcccatagtaggcccccagtgtctaccggctgaatggatggaggctggttgtttaactgtcaaaccatactctctgatgataagaccacagttagccagaagataaagtttctgcctccaatatttttgggtcttagaaagga

SEQ ID NO: 235022 - DNA, 363 bp, Homo sapiens
ggaacttgatggtaaaagtaaacagagcagtaactaaaggaagataagaagccaactatggcttccattttgttttatttttcaggtaggagacatttgagtaagtttatatattactggggaaggagacagaaaggagcaataaaaatacagaaatgaaaagaaagaagtgatgaacatcacttcgacaattcttcactttcaaaacgcaaactgtatcacccggggtccaattaagacacagaaaccacactataatttggttggggaaagtttaatataaaaaaagttggctgctaagcagtaacaaaagagaattggctgctaatggggtaacaagaagtctaaagaatagaggactga

SEQ ID NO: 235023 - DNA, 387 bp, Homo sapiens
tgctttttcccagtcatcgacccccaagcaaccactattctgattctgtcactacagacttattttgtttggtttgcctctaaatctcatataagtggaattgtacagtatgtattccttgtatctgacttcttttattcagattgatgtttttaggactcatccatgttgtgtgcatcagtagttctttttatcgtatagattttattaatgtagcagtttattcattttcctgtgggtagatacctagcctctttgcagtttggactattgtgattaaaactgctgtgaagattctttgtggaaagctttttatggagagatatatagagagagatggtttcactctgcactccagcctgggtgccagagcaagactccatctca

SEQ ID NO: 235024 - DNA, 709 bp, Homo sapiens
ctgcaggcagtgtcaggacagaggaggtagagagcagggcatatgctgacccatgcagccgaagaaagaagaggcagcaacaggaggaggaggacttgaacctagaagatagaggtgaggaacttgttttaggttgttggaaacagggaaagcagagagcagagcatgcagtgatgaaagaggaggaagaagctacagcatctgaaaggaatgatgcagatgagaagcacccagaacatgctgagcagaacatcagaaaaagcaggaagaaagaaaagaaaaggagaaaggaaaaaacaaaaaagaaaaagaaaaggcaggaaaggcaggaagaaagaaaagagaaggaaaggaaaggagaaaggaaaaaaagaggaaaagaaagaagaaaaggaaaacaaaacaaaagaaaggttgtagaacagaaaaacatagtaactaaatttaactttatacaatgggctgatgaatagattagatacagataagagaattaaagcatcctgagtgaagaacaatgagacagaaataacatacactgtgccactgacatgtaattggaggcccaggaaggagaagaaaaaatggggcagaaacagtaaacatataatggatgagaatcttccaatacttgtgaagctcatgaaaccatagtctcaagaagcactacaaaatgccagcaggattcaaaaaaagacatctacagacc

SEQ ID NO: 235025 - DNA, 321 bp, Homo sapiens
ctgcatccagcttgtcattttgattttttttaaggatcatatcccccaaaagaggaaaagtaatgtccaaattatttttacttatttgaacttttcctaaaagtgactcagtgctgagatgcaatttatttctctttttatatactatcaccattgtatgaaccattttcattaagtgaaagttgacttgtccttcatctttagttcattacaattagattttttttaaggcagtttgaccaaattgtgtcttccaggatggcgttttcatacaaaagaggaaaatgttaatccaaattaaaatttaattagttaaatatg

SEQ ID NO: 235026 - DNA, 135 bp, Homo sapiens
gataatctctggtacccccaagccaaacaagtcaggtcatggaataatatggaaacagaggtttagacttaagaagactctgcccatgactcttgaaactccacaaggaaaacagaacactctaaaaggggtgag

SEQ ID NO: 235027 - DNA, 730 bp, Homo sapiens
gatggaccaggagggggccctaaatgttgcagcctcagcatcgccacctttggtctctgcccttgcactatcagggtgttgaggcaagaagaaggaggagaagttgtttcaggcaccatggtctcttgtcctagccttgctcctgctgcttttcctgaagttaacaacctctgcctcagggaaaggctttatcatccacaaggcagtatcatccacctccttctgcttcctacgccactccccaggcttaagaccccagccttctccctgtttcttgggatctcagtcaggtagcctctcttcctagtcaccttgatattccccaccttctctccaccctagtcagttccctttctttctctcctcttgcccttgatctccctctgcctttttctgcctttccttccctgtaatcctgtggctggagataggctttgggctgtaattgagaccagagctggacctgggacctgcatctacttctgcaggcaaccagccagtcatgtcaccttgatggagtctgtcacctctttgaacctcagtcttttccctgaggccaatcagtttatgtgatgtgtgtagccttttggctttccaggactctcagctcttcctctctgtcctccacatcttctactgccttttgcatgggaaggtagagaacaacacccaaaggatggtgtctcctgtcccagttgaaaaggtttctacctagctattgatctggcca

SEQ ID NO: 235028 - DNA, 423 bp, Homo sapiens
agccagtgatacaaaaaatatattgtggaagtgtcttgtcttaattctgcaatcgcttctgtacatgtttgaagtcctagaccccaggaggagagacagtcaaattagccaaaggtaatttgtgaagactggccatgggaggtggtggctaaaagtcctccggcccctgctgtctgagcatccccacagaaagtcctgggccgcactgacagctgagaaagaacatctcagggcttggatcccctgttcagaggacacatgctcctccacccagtagaggaatggcggctccatgctgtgtcctgcagagctctcagactctgcacttgaggccctgggcctgcatcaatgtgaaggctcttcagtgttatcacgtggagacagatgataggaatcctgcaaatgagcagaaaggatgtgacg

SEQ ID NO: 235029 - DNA, 401 bp, Homo sapiens
gaaaggctgaagaagcagaaacagggaacgaaaggtagattggcgtttcagagttacttcccttgcagggttaaagcatgggggacttcctcatcaaacctgctcaggtaaactgggccccttctgattagctgctgtgcatctcctatttttttgaaaagctgccctttttaaagttccgttggacagcctggcacctagcaggagtgactccattctggtttggtctggtccgttgggcctagtgtaagagttcagtcctcccataaattttatttaagattattcttgaactactattctccttgctattcatgggctttcccaattaccaatataacagagcctgttctgaatcatccataatccaatccttcgcatagcatatattctgcactctg

SEQ ID NO: 235030 - DNA, 229 bp, Homo sapiens
ttttttttttttagcagtttgagttggtgtagtgtattcttggttatcaaaatactcatatagctttgggattttgaattggtaaatattcatgatgtgtgaaaaatcatgatacatactgtacaatctcagtcccatgaaattggatgttgtgcctactcacaggatctagaagcatatgtcaaactataaactgcttgtgattgtgaatgactttgttctttgcttc

SEQ ID NO: 235031 - DNA, 574 bp, Homo sapiens
ttgtgagttattaataattttaaatatattaacatatgttaatgtaattaaatacaatgctggaatccatttgctaatattttatttaaagttttttgtctttgctttggaatgtgattggcctttcagttttgtctgtttattagaatcaaggtatatctgcctcatgaaaggtatgtgtttgtttgtttttcctttctattctctgaaagagttttggattatctattcctttagtgtatggtagaacactcctaaaaaacttttgggctggtgttttttaatgggtagattttaattactgattcagtttctttggttgttcaatagtttattcagattttctgtttcttttttgagttagttttggttctacatttgttttgaagaaattgcctgttttacttattttctaattaatttgtaatatagttgttcaaagcattattttatgattgttaaatatcaaccgtatttgtaactatgtcttcttttgttcacagcacctttttttttttttttgtctgagtcccactctatttagcctgggcaacaagagcaaaactctgtctcg

SEQ ID NO: 235032 - DNA, 351 bp, Homo sapiens
cattgtttttaaaatgagtattatatttcattaaatctaagacatctcacaattttaggtaccacaaagaaaaaatgaagccaaatgaattgtgacactttgtcaattaaaagacacattccctgggaggccgaggtcaggagtttgagaccagcctggccaacatggggaaactttgtctctactaaaaatataaaaattagctggtcatagtggcacacgtctgcggtcccagctactcaggaggctgaggcaggagaatcacttgaacctgagaggcagaggttgcaatgggccatgatagggccactgtaccccagcctgggcaacagggctcaccctgccatctca

SEQ ID NO: 235033 - DNA, 336 bp, Homo sapiens
acaatttatgattcgtattcataaaatttggttatattgacttctctgagaaccttagaagaaggggctttgcaaaacaatggaggaataggatagaaaatctagaacatttgaaacttaccacaatttgaccttggcaacgatttgttgactgtgatcccaaaagcataggcaaggaaagcaaacataaatgggatagtatcaaacaaaaaaaatcaacacagtaaggaaaataatcaacagagtgaagaggcaaactaaagaaatgagagaaaatattggcaaacctaagatgtttatatccaaaatataaaagaaaatcaatgctccatctca

SEQ ID NO: 235034 - DNA, 114 bp, Homo sapiens
cttctcctttgttctcccttttaccttcaggcacccacttgcatctcttctgggggttctttcctttctttcctgttctaaggctttttaaataaacttccatttcttctctga

SEQ ID NO: 235035 - DNA, 361 bp, Homo sapiens
cagttaaaatatctcaattaaaatcatacatactcacatgttcaaataaactgcaataagcttctataaaattgcttagaaaatataatttctgttttaaatttgtaaattatttcccaggtcatcaaattaataattgaaaaaaaccttctaataattggtgggtatttctgcctaattttcattaaaagtggtagtttagtctgtcctcctgaagcacttaacctgattttatatcttaataaaggaacactatttaggagtttggggactgtgctatgctgtgaaagccattccttggagcccatttttgttattgatgaaattcttccagtctgggatgaacaaactgtaaagccat

SEQ ID NO: 235036 - DNA, 597 bp, Homo sapiens
taggggccattcacggcccgctagaatccctgctgtgcaaaaagcttgtaaacaaccattgcctcatttcatctttcccctaaacattatttctgagattcatctacgttgattcacatagctcttttagtcccaagagggcagatatgaaccgtcccattttacagatgcaaaaccgtgactgctcgggaaaaaacgagtggctttgcgacgacgaaatcccaggacgccaccgggccacgtgcggcggcgcatctggccgctcgcgatcccacccgcgcacgctccctcccgcgctccctcccagccgccgccgcgccgggtccacgtgtgtgtgtctgtgtgcggaatggggacgggggcggtgccgccggaggggtggggtccgggccaacgtcacgggcggtgcggcccaatcagcggcgggctcgcggccccggcgctggtattggggcagcgagggggcagttctctataacgcggtctccgggagccagcggggaagaaagaaaccgagcgggcggaaggcgccctccccgccgcctgggcccgggcaccgggtgccgggcccggggtccttcccgcctcccgcggccg

SEQ ID NO: 235037 - DNA, 521 bp, Homo sapiens
cagaatgtggttgttattaaggcattgaaagggcttttctttgataagatcgccttgtcctgcattgtttgcggctgtgttggcctttcagcggctcgggggagctccctctgatcaggcctgtatcttcccaggacgcttttgttgtggtttgcaaagggttttacctgaacaaagtcagcctgcggggcattaaacacctccaggcaactcccaggcccttcagatctttctgtgggattgggcactgggcgattgaacctgttcagctgcaagaagacccaaaagtgggacggagccagagagaacagcttctggccagggctctgccaagggctgagccaagacagacctggtggagacgccaggctcgggcctgctccaacattgtggacactatttgtcaaggcccttcagtaaaacaatcaatctgggatttaatatgttgactcaatccaatgagcatagatcactggtcaggataactctggccggatttgcagcaggaataaatggaggat

SEQ ID NO: 235038 - DNA, 498 bp, Homo sapiens
gctgggattacaggtgtgagccaccgtgccccgcccatgtagcatgtagaatgtagtcttttctaagaggttaatgctcccagctaaaaaccttttctttccggaaaaagggaagaatgaatgttgggtaactaacactcggcagtgccctctccctatgctctagaccccctcccctctgacagtccctgctccagcattatccctcccctcacctcgtgtcatggctcttctctcctaacctgtcctttcggtaattaattgtgcaacccttaccctccaccatcccccttgaccttaggtagccctctagctgttgtccagttattttgtttttcttcagagccaacttcctggctttctcattgccctttcacatttcagcttgttataatgtggcttcgtaggccatcattgcaataaacctagtattgctgcagtgagccatgacagtgccactccactccggcctgggcaagacagcaagaccctgtttaa

SEQ ID NO: 235039 - DNA, 482 bp, Homo sapiens
cagcctactctgctgtgcaggaagctgccaggaagcttccttgggttatctcatgctgtcctcagacagtagcctaagacagcagcctaggcatttccaatggaaagaactcttcagtctgagcagctccacagccaagcatttcccccaccctcatacccctcctgccaatgcccccttgagtaaagttgagctaccaatcctcctgccaattcctttcatataaaaactctggggtcccacaccaagaaaagaaggaggcagcattagaggagagaggccaggggcacagaggcacccactgagttagtgcaaaagcgggcatggctcagccctacctgggtggcactggcagttaggggcatgcggaaagcccaagtcagtgattagaagggacgttagtgtaggcctagttggcaagcgtggagttaatttggcacagaatttgggagtgtggttttgggggccagagccaaagctcc

SEQ ID NO: 235040 - DNA, 489 bp, Homo sapiens
agccccctgctttcacgctatctgacagcaccacagcacacttaggttgcacagaaacagaatgtgtgtgaggggcacagccttaagggccactaaaggatctatttgggagacaaggaatggagaaagaaatgagtctagggctacagagaggtagcaccagagcatttttctttggcagagtggctgtttgttacaatttgtttttcttgtgcagaaatatggagtttttttcttgaacaactcaaatgggtcccctgtgtcgatgcctcactacacagattatcggtggtgaaagccccaggttgatgtggcctgagcactgatcctatttccaggagacacttctgcccaagggaagttgctattgccagaggatggggaaggatgatttttggctaaaaagaacataattaagatggcaaaacaaatgccttggcaaaataatcccatgagattcagcaaaagccaggtataaatgactgtttg

SEQ ID NO: 235041 - DNA, 739 bp, Homo sapiens
cacatggtgtttaattacctactgctgactatccacaaacagaaagagactggtcatgccccacagggttggggtatccaagataatggagcgaggctctcatgtgtcctaggttacacaccgaaaatccacagtttattctgtgaagaaaggaggctatgtttatgatacagactgtgatatttttatcatagcctattctggtatcatgtgcaaaagctataaatgaaaaacacaggaacttggcatgtgagtcattgctccccctaaatgacaattaataaggaaggaacattgagacagaataaaatgatccccttctgggtttaatttagaaagttccataattaggtttaatagaaataaatgtaaatttctatgattaaaaataaattagcacatttagggatacacaaattataaatcattttctaaatgctaaaaacaagctcaggtttttttcagaagaaagttttaattttttttctttagtggaagatatcactctgacggaaagttttgatgtgaggggcggatgactataaagtgggcatcttcccccacaggaagatgtttccatctgtgggtgagaggtgcccaccgcagctagggcaggttacatgtgccctgtgtgtggtaggacttggagagtgatctttatcaacgtttttatttaaaagactatctaataaaacacaaaactatgatgttcacaggaaaaaaagaataagaaaaaaag

SEQ ID NO: 235042 - DNA, 2869 bp, Homo sapiens
  misc_feature (821)..(821): n is a, c, g, or t
  misc_feature (981)..(981): n is a, c, g, or t
  misc_feature (1750)..(1750): n is a, c, g, or t
  misc_feature (1891)..(1891): n is a, c, g, or t
  misc_feature (2065)..(2065): n is a, c, g, or t
  misc_feature (2272)..(2272): n is a, c, g, or t
tattgtttaatgtagtagactacatgggaaaataactctactttgaactttttaatttaatataaacatccccttgttgctggacaacaagttttgtttacactgccactaacagaatatcataatatgaaacatgatattcatttgaatatttgaggggtacttcattataagggagtgggattccttttctagctttcttaggcagagtctctcccatctacaacaataaggccatgctcaagtctccagaacaatgatcatactgtattactatttttcactatgtttccagacagactggtaaattcctttttgtttgtttctttttgttaattctaacgttaattgaaaacagtggtttttgttgttgttgtttttgtttttgttttgagacagagtctctctctgtcacccaggctggagtgcagtgacgcgatctcggctcactgcaagctccgcctcccaggttcacgccgttttcctgcctcagcctcccaagtagctgggactacaggcacccgccaccacgcccggctaattttttgtgtctttagtagagatggtgtttcaccgtgttagctaggatggtctcgatctcctgacctggtgatccgtctgcctcggcctcccaaagtgctgggattacaggcatgagccaccatgcctggctgaaaacagtattttaagagcaatgttctgagctctttttgagctttagctacatggttcttgcattaacctatgatgtaggcacccttatagaatatacagctggtgctaaataagtatctgttgaatgaatgggtaaacaaattcantgttacagatgaggagaaaaaaatctggttttgttaccttcattttctctttttctagcacatgccttgtccataggatagtcaggatgacagtgggaagtgtcagaccagcctaaggttcaagttcatctctctgactgaaaaagagctgccggtgatngagctctgctttgagcttggaataatgctggtgctttacatgtgtgttgctaagccccactaaaaccctgagacatggggtattattgtccatatcatacaggtaaggtaagtgactagtttagacttgtacagtaagtaggaacagagaagcatttggaacccaggtttattggcagttgagtcttgtgctctttctagatcccacagcttcccatttgtcttgataagagaagatgtctgcctctccgaggtagtgttgtactggttcccttccctttctcctcaatgactattttgttggttaaagataaacttggaacattctccacagggaagtgatggaagtgtccacgctgacaaaatgctatcatgaaatgccttttttctgccctgtaatgaagagtgtttccgaggcaaattccaagtcgttgagttactcttccacaagccaaccattaaatctaagaaaggggaggtggggaaggcatcaaataaattttgaatacaggagagcttggtattgagtaccttcagaagggcagtatgttgacttcttttctctatatagaacctgaatttgcattgctcctgcttctatataaagctttatcttgggcttcataaagagtagctattttgggctagacacaatggctcacagctgtaatcccagcactttgggagatcaaggcaggaggacaccttgagtccaggagttccagactaccctgggcaacatagtgagactccatctctacaaaaaaatntaaaatcagccaagtgtgttgtcactttcctgtagtcccagctactccagtggctgaggggaaaggatcacttaagccgggaggttgaggctgcagtgagccaagattgtgccactacactccagcctggatgacagaacnagatcctgtttcagaaaaaaaaaaaaagaaaaaaaaaaagctattttgactaaactagtaacatttctcagggtccaaaccttatggaacaaagttatggaacaaattttctagaaagatctaatatgcctcctctgacccttacactaaagacaacaacaaaaaggccaggtntggtggctcacgcctgtaatcccagcactttgggaggccgatgcaggcagatcacttgaggtcgggagttcaagaccagcctgaccaacatggtgaaaccctgtctctactaaaaatacaaaaattagccagatgtggtggtgcacacctttaatcccagctactcgggaggctgaggcaggagaatcacatgaacctgggaggcgnaggttgcagtgagccaagatcgtgccactgcactccagcctgggcgagagagtgagactccatctcaagaaaaaaaaaaagaaagaaaaacaacaacaacaataacaacaaaaaaccctaaaacataaaacaacaaacaaacaaaaacacctcacatgttttcttgaaggagtgaaagtacgagttactgaaattcataaggaagcatgccctggctccatgtctgctccagtgctttcacccaggaagggcatggagtccagatggggcttcaacttgcatcccagctttgcagtcccatcaggaggggcaacaacactttgtgtccatcacaaagcttcatacaccccttcacttctggttcacatgagtgacaatacattttcttcacagttccggttctcagggcttcacattctcgtgacttcagagtttaaaggaaaataatcaatgggcaagtatggtggctcatgcttgtaatctctataacctttgggaggctgaagcaggaggattgctagagcccaggagttcaagaccagcctgggcaacatggcagtactgcatctctactaaaaaatgtataaaaatgtcttt

SEQ ID NO: 235043 - DNA, 420 bp, Homo sapiens
cacgcccatctaatttttaaaaaagtttttgtagagacagagtctcactatgttgcccaggctggtctcaaactcctaggcttaagtgatttgcccacctcggcctcccaaaatgccgagattataggcatgagccagcacacctggccaagttaagcttttctttgcccttagaacgagataattgtaaaatgaaaacattgagattagtttttttggtctgtaaatctcatgttacatatagtttaaattacattgagtgtgattggaatagatactaggtagaaaaatattatctagttaatctataccactttcctgtgaaaagagagaaaagaagacacatatttatttaacagagaacacaattctgatgggctggagatgagtctgtgtaagtctattaacttatatttcaca

SEQ ID NO: 235044 - DNA, 416 bp, Homo sapiens
tacactggtttgcataattgcaacatccattaggtgatctaggttgcttttcctttatcaagggctttatttatcagaagggcattacgcttgacctccaaatttggctgacaatttactgatgagattcttaacctttgggttgctctggcattttgacatatttgctgggttctgggccacatcctggaaggccaccataacttctgaaccctgcatggctgtgagaacctctggtcactaagaattttgagtccatgcattcctgccattccagacatgtcccctcccattccaggcatttctctgagaaaattaccaggcattctcccagaaaggccacttggaaaagagccatactgagctctggatcatcttctggcttcttcctccctctgggatctctcatgcttttc

SEQ ID NO: 235045 - DNA, 447 bp, Homo sapiens
ttgtttctattttgattaatgtctgtcttctccccagctccaaaagacaagaatgtaactttacaggttctttctgttgtgttttggtctctgagtacaatacctggcacaaagtaggtaatttgtaaatatttcttcagcaaatggtgattgatagtagttggtctatcattcctgtgacgaaagatgccgaagtcccagatttctattatcttgagcccctttgaagtcctctttgaaaaccaaaccaaatagtttacttacaaaccaagtggttactctttaagtggtttattttatcagttttctaaagttgcctttatgttacagggctgaggttctttttgaggagtgatgatgtgttttgtggtgttaaggacagtttgtggtcatgactattttacagtcaaagacccaaacatcagatactaaagcccttaatagaaa

SEQ ID NO: 235046 - DNA, 410 bp, Homo sapiens
agctaaagtgttttggggtattgaaagcctaatgtaaatgtccttgggaaaattagtttcttttttttatagttcccattatttaatgaaatgtttcaaatgttatatatagtaaacaacagataatataacaaacacccatttggtaaccatttagatttagcacattttaatgttttactatgatttattcagatcttttgatatatttttaggaaactgaacaattgtgacaaagctcaaatttcctttgcatagaattctcatataagaacaaaacagaatattaaaggcctggcacagtggcttatgcgtgtaatcccaacactttggtaggccaaggcaggagaatcacttgagtccaagagtttgtgaccagcctggacaacatagggtgaccccacctctac

SEQ ID NO: 235047 - DNA, 252 bp, Homo sapiens
tgccacctccctccccctcgtccccgccccctggagcgggagcatttgggttgagctgcgcctgtcctataaatccacatataattctcctctttcctgttcagctaaggaaaataaacgtgtaaggctgtttctgggagcccagctcagggaccgctctaaattctcctcttattgagtaggggctggaaatcattcagctcggcggcgcgccccagaaccaccccctacccccgctccggcccgcggccg

SEQ ID NO: 235048 - DNA, 572 bp, Homo sapiens
tggcagtagaagtagtcttaacaagctgtatctacataaattattatgttattataaatctgactctgaaatgcacttggggaaatggtaatttaaagacaccctaaaggggtttctttgacaaagagaaacagggaagcttccgcctctatcggcctcctgtgagacgcagactttcctacgctgagtctcttagcgggagggatacccacagaacacactcaggaaaaacaaagcagctttctcatccagagtcctcaacaatcaccagtcaccttcagttatctttgaagaaaggactagaaagaatgaaagaagctgtgaaaagtcagataattttcaagaccttttcacttctgtttctgtagaaaaaatgaaatggaaccagttggcaagtgtgtcaggtgtcagggaaatctgattaatgacacccttctatatgacaatcattaataaccatgggataaaataagggatagaaaaaacgcatgcagtaaagcttttcttttattgaattttatatttatcataccagttaaaaaaaaccaagaaaataaaataaatattacagt

SEQ ID NO: 235049 - DNA, 246 bp, Homo sapiens
ggcaccagctgggattccctcctggatgaatggctttttctggtggcctctcacctttcccaggagttttaagggtgtaatttattggtggccctgatttccagcttcagaggtgccatggtcagggagaaccctctgaggccagggggcatcacctgaatggctttttcctgcctccctttctgagcagctgggtcagactccctctgcccaagtcaggtttgctgctgtcctacagggacaggt

SEQ ID NO: 235050 - DNA, 585 bp, Homo sapiens
caatgtaaccatcagctctggggtcaagaaatcgaacatttggcacctcagaagccatattcatgatccctcccaatccttgccacttacctctttcccaaaggtaaccactgttctgatttctaatgccataaattaattatgcccattttggaactttatgtacagtaagtattcttttgtgtccagctttttttgttcaaggtgtatttgtgagattatttcatggtgttgtatatatttgtagtttattttcattgtcatatagtagtatatcacagttaaaatctgttttcttattaatggatatttgggttgcttttagcttgagactcttgtgagtaatgctgctttggatggttttctgcttatcctttgacatatatatgcatgaatttctagtgagcatatacctaggagtggaactgctgggtcataggatatgcataaattaaactagggaagaacaccagtttccaaagtggttatacaagttttccctcttacctacagaggggaagtttcagttgctccacatccttgtcaacacttgatgttgtcagtctttttttttttttgagacag

SEQ ID NO: 235051 - DNA, 347 bp, Homo sapiens
acactcttcttcttccccaattctgtattttctcctatatatagattggtttacccaccttcttctccagtgatctagaagttgggacagtctattttaaattccactttaagccattacaaatttcaaaacattattaagcatatttatataattgtcaaatataaaaacaaaataactttagtttttcatgggagatttagacctagttttaattctattgtttctagcatttagaattgcaaaaaagaaggcaaattccctttcattctgttgtatgtaatttcattttgtgttgtctagaattttttagagtctttctttacttttgagctttaaaagtcatc

SEQ ID NO: 235052 - DNA, 520 bp, Homo sapiens
agcaactttggaactgggtaacaggcaggttggaacagtttggagggctcagaagaagataggaaaagtttggcacttcctagagacttggagggctcacaagacaggaagatgtgggaaagtttccttcctagagacttgttgattggttttgaccaaatgctgatagtgatatggacaataaggttcacgctgaggtggtctcagatggagatgaagaacttgttgggaactggagtaaaggtgactcttgttatgttttagcaaagagactggtggcactttgccccagccctagagatttgtggaactttgaacttgagggagatgagttagggtatctggcagaagaaatttctaagcagcaaagcattcaagaggtgacttaggtgctgttaaaagcattaagttttaaaagggaaacacagcataaaagtttggaaaatttgcagcctgacagtacaatagaacaaaaaaaattcctaaggagaaaacttgcagcctgacaatgcaatagaaa

SEQ ID NO: 235053 - DNA, 455 bp, Homo sapiens
caataggagctgtgatacccacagcttttttcctttctgtcctgccatttagtcagacataagcatagtcaaggaaatgtgtggtatcatagggtaactaaagctccagctttatgactggagaagcaaaaaggggagtcccaggaaactagaaagtaccagataaatcacgatgatggaggactcaggaaaacaacctcatgaagttgtttatgaaatactgagctcaccccctgacctgggcatgcatggatcccatctcagtcacaatgtcaaaaacggtgagaagtgaacaaacaacctgccaccttagactgaccacaggatggaacatacatgagacatatttgaatggcactgcaaaggctttgaaaatgtagctgacattggagccaccgcccatagaagaaggctaaaactgtggaatgaatctagccaggttgtttacatgctaa

SEQ ID NO: 235054 - DNA, 461 bp, Homo sapiens
tcacctttaaaccttcactgacttccctttgcaggtgcactgtcattttggtaactcaacactgtctgcattttattttggtgcatgggcggggggctctggcttcgatttagtccttcagacacatacagtgaaataaataggtactcgacgatagtatgtgttgttgctgtgtagttcttttgctcctgaacagcaaataccattggacttggcattgtcctactgtggctgcaagctgtgtctcaccacagctaacgccagtgcagaggagccatgccacgcaaaaggtccccttgcggcagacacaagcctgaagctcttcagtcatgaaaatcagggaacacgtcattgatgactgtcctggtcctggcacaggttttaccaaaatgcaatcaggtttcgccagaaatgcagtcatgtgactcctttcttctctgagggaggatggtgttcatgaa

SEQ ID NO: 235055 - DNA, 598 bp, Homo sapiens
caagattacctaaaagcactaaccaaaggaaaagctccctcacctcaacctatgactgctcacatttttcagattgaatcatttcaattgtattttaaggttcattgactctttaccacctccaagctgctcctgaacgcaactgattattattttttaattttgaaaacgttctcacttctagaatttccacttaagcctttgttattattgtagtttcttcttctctgctgtgatttcctatccatttattttaagggtttttggggttttgattttagtaagaattacaataactactttaaaaatccacactaattccaacatctgggtcatctcgaggtcagtctctattgattgcctttttctttgaatatgtttctttatatgtttattataatgggattgaattctgaagattgtaaaactagattttgttctgttcctctgaaaattttgataattttttgttgtatttgttgtattgtgcttgattttttttctattgtatactttacaatatattttcctccaatggttttaacatatctatttctcaaaatatttatgtttatgttaaaaattatacaaagtagct

SEQ ID NO: 235056 - DNA, 458 bp, Homo sapiens
ttgacataaataaggtagtagtttaaagggaaagtaatgattagcaaaacttatgaagacaggagcgatcaacgcacattaaatagtgtgtaaattacctaatcctaggcttgctgaatcttcagacacgtatatacataatatatttttgtgtcacaaaccagtcactctgtgttttctatatgaagagaaaataggtttgtgttaagaaatgatctctgaatgttcaagaaaataatactatgggcttgcttacatgggtggaaggaagatctccagtccgcggggaacggcagcacttttaaaactttgagattgatgagtggttaattagaccctcagccactcctatggtaagtcatgatggatgccaagacagcagtaaggggttgtgattttctttgttttcttccttgtgcaccaaagacacagagatggagctggtctcttgttttatt

SEQ ID NO: 235057 - DNA, 388 bp, Homo sapiens
gtgagccgagatcgtgccattgcactccagcctgggcaacaagagcgaaaccttgtctcaaaaaaaaaaaaaaagaaaaaaaaaaagaactgggaagattacataatatcttcagggctcctgcaaattataagaaaagaccaataatggaatagaacaaggggtaaagagtatgaatgagagtccaaaaaagaaaaaggaaaaaatacaaacagtcgtagacataataaaaggtgtaaggtgtacaatatagcttataatagaaatttaaactaaaatcacattgaaataccattgttcattcatcagattggtagtccatcgctggtaggagtatagattggtgtaatattctataatggacaatttagttatatctattgatatg

SEQ ID NO: 235058 - DNA, 1754 bp, Homo sapiens
  misc_feature (102)..(102): n is a, c, g, or t
  misc_feature (689)..(689): n is a, c, g, or t
  misc_feature (710)..(710): n is a, c, g, or t
  misc_feature (903)..(903): n is a, c, g, or t
  misc_feature (1312)..(1312): n is a, c, g, or t
  misc_feature (1332)..(1332): n is a, c, g, or t
  misc_feature (1676)..(1676): n is a, c, g, or t
  misc_feature (1713)..(1713): n is a, c, g, or t
tgcatgctggaaaatggtctgtctttaaagaaaatacctgctttgcaagaatattcatctcatctcttgcaactttttctcaaaaacatcctttatttctgnagggatgaaagttgggggccacacacgacttccccacccattggctggttgccctctagcgatggaacttagtaaggcctcttcccttgagactggacaccccaccaggccagtgagagcacaggacacaggtgcccagactcggccagcggcaaagtatagatggagtgatattaacccagtatcactgtctagcccaggcacatagattccagattctgtctggggggtattcaggaggtgtctaacacatcatcaagagcctgtgtgttttcaggatgctctgcagaatcttctgccctcacaccttcatcagtgtcctctgcccgaggagttccttaaaaatcttcagcatcactgctcctgccagtgccccgttcagtgagggcctgagcgatggtgcccagggttctgtcttctagcatctgcgggcccctggcctcagaaccctgcagccaagtgggatacatgctgccctccccattctgcacagcaccttggccctgaggtagcctgcctgtacctcgcatcacccagcatccctggaacaagcatctgttttccgtagtccttctctacatagagcnggacaagaaacaggcctatgnagtccttgggattccctgattccggaatccaacactaaggacctgctccatgcaaaaggcaatggtgaggctgtctcaccaagacagccacccaaacagcccctggtcttccatcaaaaccagcaccctccacaacagccaaaaggtggaaaaaacccaggtgtctgaatagatgaacaaaatgctatccaanaaacacagggaatattattctgccttgaaaaaggaaggacattctgacacatgctacaacatgcatgaagcttgaggacattatgctaagcgaagtaagcaagtcacaaagggacggatactgtatgagtgcacttacaggaggcacctagagtagtcaaattcatagaaacagagagaagaatggtggctgccaagcagaggaggaagggcaatgggagttgtgtgatgggtacagatgatgaaagatgaaaagagttctggaggtggatggtggtgatggttgcacaacactgtgagcgtagttaatgccactaaactttgcacttaaaaatggttgagatgccagcctgaccaacatggtgaaaccccgcctctactaaaaatacaaaaattagccgggtgtggtnacgtgcgcttgtaatccagntactctagagggtgaggcaggagaatcacttgaacccggaggcggaggttgcagtgagccaagattatgccactgcaccccagcctgggcgacagagtgagactccatatcaaaaaaaaaaaaaaaaaaaaagattgagatggccaagtgtggtggctcatgccggtaatcccacactctgggaggccgaggcaggtggatcacctggggtcaggagtttgagaacagcctggccaacatggtgaaaccccgtctctactaaaaatacaaaacttagccgggcatggtggcgggcacctgtaatcccaactacttgggaggctgaggtaggagaatcacttgancccaggaagtggaggttgcagtgagccaagacggtgncactgcactccagcctgggtgacagagtgaaactctgtctc

SEQ ID NO: 235059 - DNA, 433 bp, Homo sapiens
ctctttttgaccaggctggagtgcaatggcgctatctcagctcactgcaacctccacctcctgggttcaagcgattcttgtctcagcctccgagtggctgggattataggcacataccaccacgcccgggtaatttttgtgttatttttagtagagacagggtttcaccatcttggccagtgggtctcaaactcctgacctcatgatccacccgcctcggcctcccaaagtgctgggattacaggcgtgagcccgcgtgctgggcctcaatcccaccttttaaaggcttctcctactgtgcccatttgtagtcttatcttttccccaggaattcctatagcacttaggtttgtatattgagtttgacccttaagtttttattgtcttgtattgtcaacttttccaggattcctcacccttctgtattttcatc

SEQ ID NO: 235060 - DNA, 503 bp, Homo sapiens
ccaggatccgtcaggagacccctcacaccctaactggcccaaagccatgtaaacttctctgtgtataccgatggaatgtcagatttcaataacattcctgtaccaggccagatacggtggcttacacctgtagtcctagcactttgggaggcccagtcaggaggattgcatggaccgaggagtctgaggctacggttgggcacagtggctcacgcctgtaatccaagcgctttgggaggccaagacgggcggatcacttgagctcaggagtttgagaccagcctggacaacatggagaaaccctgtctctaccaaaaatacaaaaaattatcccggtgtggtggtgtatgcctgtgattccagctactcgggagaatgaggtgggagaattgcttgagcccaggaggcagaggctgcagtgagccgagatgacatcactgcactccagcctgggcgacagagtgaaaccccccatctcaaaaataaataaataaataaattat

SEQ ID NO: 235061 - DNA, 324 bp, Homo sapiens
ttgtacagatgccgtgtggaaggcacccccggagatatgcagtgatggcagggtctattcatcaatcagcaacacccacgcagcctcaccctgcctgggcctgccggggagcctcagtaaaaattcccagggcatctttctaccttggtcacagcaacccagttccccaagcatgtccctcataggccacacggcgttcccatttctcctgctgtctttctatccaccttccctcttcctgaaaacttccccagcatcaccgctggctccagctctatcctctcaccagcaaaacatgcaagttgtggtcagtttgcttagaac

SEQ ID NO: 235062 - DNA, 738 bp, Homo sapiens
gcagattgagaatttagttttattagacacagtctcaccctataaagaaacaaaaaaagaatgggagcttatagaaaataggagaaagaggctgttaaatctaacgtatcccactgtcttcagaagcctggaatctgaaaagcttctttgcatttagcttctaaatgtggtgttaataaaaacatatatgcccattctatataccaggcagtgtgatatgctcacacgtcataggtagagtgacatattatttcatttaggctatccctcattttcctggtagggaaaataagacctacaggagctaaatctaaagtcacacagctagttaactatgcagaacttgagttaatgaccaggtgtctctgtccagttttctttttactttacttcaatactgcccaagttattttctcttttcctccttttaaaaaaagacagcttagcaaggtttttctaaacttgttttgtatataattatgaaagcaagtagttatggcagggatgcattctcacatgaatattaatttaaattattgggtagcctccaaaaggaaataaagaagattctcaaaaattctggaaaggaaatctttctctctgtaaatgattttttaatgcaagcttttgactgtggttatattttagcataatgggatgagttttttgaaagcaagagcatggaaagttcatcataattgctcctgactttgatttgtttttactgtagtcaatttc

SEQ ID NO: 235063 - DNA, 178 bp, Homo sapiens
gctctccttcctagccaggctctgggctccactgtccagtgtaggaagcaaagggcagggctttgggaagccacgtccctccaaaggccaccagcttgggttaaaggctccagttgtaactaacggtcaggctagggagctctaaagacaccatagcccagcagactccccctcccaa

SEQ ID NO: 235064 - DNA, 356 bp, Homo sapiens
acagacacacacagtgagagagacagacagagagagagagagagagagagaggcagagacagagacacacacacagtgagagagaagaccgatgcagagatgaggacaggcagccacagagcagggcagaaaggatgggcagtgaacattcaacactacagttgagggggagaatacaggaaccagagtctgcccagctagaaaagccataggaaggagtgagatgagacctcttccatgcacataaccagcagtgtgaggccggctgcaaaagtgccagtcatctcatgaactgcaagatgaagcactgcctcccagcaaaaaggagagctccagccaatgaacaagagcccaga

SEQ ID NO: 235065 - DNA, 463 bp, Homo sapiens
gaccatgaaatcacagcactaattccggactgcctaatttaggtcctctgttagttgagagacggaatccttgtgtgtttaggccatatttttgagttctgttgcttacgatcaaacataattcctaactgatagatgatacagctattattttgtgcacaaacaatgtagatttcaaaatttcaggccacataccttcacccatatattttcctatggccttgggtgttgatatggggctaggcagaagaggagcctacataaactaatacggcatcttacacctcatgatttccttccaacagctgctctcaataaagggcccactgtagataccttctaccaccttggatgagtgcccaggtcagtgtgaaaacagacacccccccttctctacataaggagaaccttcactaagctggccttaccctgagatcaagagacttaaagaatgcaaaaacct

SEQ ID NO: 235066 - DNA, 381 bp, Homo sapiens
ccctgtaatagatttatatatctaagcccttcactatgtgacttttcaatgtctttttcttggagtagcatatggtcatgctcatggttaacattgagcgtggccatacaacttgctttggtcaagggaatgtgagtggatataacatatgtcatgtcagaaaggttttaaatgtgcttggttcttttcggacctcttggagcttcctccctctgccatgagaagagtatgccccaaatggtcattgtttcttcagcctggatacaggaatggaaacacatggagcattctgaactcagcctggccaagtcagcgcagctgaggtcagacaaaccacaacatatatgcagatttatcagcaataaaaatcactgttgttga

SEQ ID NO: 235067 - DNA, 592 bp, Homo sapiens
tttttttgagacagagttttgctcttgttaaccaggctggagtgcaatggcacgatcccggctcaccacaacctctgcctcatgggtttaagtgattttcctgtctcagcctcccaagtagctgggattacaggcatgtgctaccacgctcggctaattttgtatttttagtagagacgaggtctcaccatgtttggcaggctggtctcgaactcctgaactcaagtggtccacctgcctcagcctcccgaagtgctgggattacaggtgtaagccacctcgcccagctgccatctgaatttttaataatggccccagatgattcttatggacaccaagatttgagaagcattgaatgactgagagaaaatttcttgtaagggtagaagcccagcacagtggttctcagtggagataatttcaacccccaagggacatttataaatgtctggagatagttttgattatcacaccttgagggtagggaaaagtgctgctgacatctagtggctagaggccagacatgctgccagggacaatgtacaggacagtccccacgacaaagaattctctagcccaaatgtcattagtg

SEQ ID NO: 235068 - DNA, 435 bp, Homo sapiens
cctgaatgatgttgctctgaaccctagaagcctgcagaaatgtcaccctttaagagaaaagcaggcatttgccctaggatgctttaaagaccctgtcatcatcaccatcaacaaacacttagaaatgttgccttactatgcaggtctggagcaggaagagagatcagaatcccaagcgattcaatctgactgcaaaaagggctctgatctgggcaaaagccaaggtttctcacattcatccctttggggcttgcaatgtttaaaagtaaatttccccccaccactagtacccactgtgtggaactagtcatgagaagaatggatacccatttccctctgcagcaatccggtctgcctcccgaagctcagaaatgtgctgtgctcagcatttctgtgctgatgcagcatccatggtagaaaaggcaggggcggccg

SEQ ID NO: 235069 - DNA, 414 bp, Homo sapiens
tggcaaaaatcccaaggacttttgatccaaaggcggcagttatcactaagtggtttatttccttttaagacctagccaacggtttcagagccaatgctgctggtacaactactctattaatgggatagttttggtaagtctggatcctcccagctgggtcctcctgatcagtgcaaagcagccttttgttttaaaacccattgcaagcaatggcttgggaagtaaacaccatttgaggctcgctggccagaggcaaggggagacggcaggcagttgagcctgcctgagggttctctcagcagtgacttcctttttcccttccttcttctgcctagtcctgtatgtgaggactattaattgttttttgttgttgttgttgtttgttttgtgagatggagtctccctctgttgccc

SEQ ID NO: 235070 - DNA, 2198 bp, Homo sapiens
gcggggacagggcggtttgggaggcccaggcggcggagcctccgggacggcgagcggcgggcggcggaggaggagacggcagtcgggcattaaaaaatatttaatcattcatgtgttgagactcattcttgagttatggatgacaaggcttctgttggaaaaatcagtgtctcttcagactcagtatctactcttaatagtgaagattttgtcttggtttccaggcaaggagatgagacaccatctacaaataatggaagtgatgatgagaaaacaggactcaagattgtagggaatggaagtgaacagcagctgcaaaaagagctagcagatgtactgatggatcctccaatggacgaccagccaggggaaaaggagcttgtgaaaaggtcacaactggatggtgaaggagatgggcctctttctaatcagctctccgcttcatccaccattaaccctgtgccattagtagggctccaaaaaccagagatgagcctaccagtgaaacctggacaaggagattctgaagcttcaagtcctttcacaccagtggccgatgaggacagcgtagttttcagtaaactgacttacttaggctgtgcctcggtaaatgctcccaggagtgaagtggaagccttaaggatgatgtccatcttaagaagccagtgtcagatttcactagatgttaccctttcagtgccgaatgtgtctgaaggaattgtgagactcttagatcctcagacaaacactgaaatagcaaactaccctatctacaaaatcctcttctgtgtcagagggcatgatggaactcctgagagtgactgttttgctttcactgaaagtcattacaatgcagagctcttcagaatacacgtcttccggtgtgaaatacaagaagctgtaagtcctcaagagaaaactctctgcaaatgaaacttcaccagtgccctcactaggttgaaatgattatggtatttattatgatcactcataagccagatgaaattctctgctattgttttagtgattctagcctcatgggccaaaatataaattaactaaaaatttgattaactagaactttgttactactactaagaatgtcagaggagatctgttggctacttttgattgggttaagtaggcattctggttctaacattgacagatttgcaaaccattcttttaaatcaaaacttgttaggactgttttcattgtaatatcttcagatagtttctaacaatttaggaagtgatttttaaattggatttatagtgcttacaaccatttcttttttaaaaccccttgtctggacatttttagtgttgcttgctttataggcctaacaaattaggtaatttaccaaaagaaataagtgggataaagataattattgccctccaaagtaggtaatcttccagccttaataaaggtattttatatcttttgataacagcccatttcctaacatgtctggttgtaggtaagccggatactttacagttttgccactgccttccgccgttctgccaagcagaccccactttcagccactgctgcaccccagactcctgacagtgacatctttaccttctctgtgtctttagaaataaaagaagatgatggtaaaggttattttaggtagggaatcttattttattcatgtattaacatgctgtggttcaggggaaattctaggtcagattataactttcataccataaaatgatggcttttaaagggagggcttttaaaaaaaatctggatgataaaggcatataaatacataaatttaacagaggcaaagtttgaagaattttaaagcaattaaaaaaattgtcatattgggaacatgttgctaccttcttttagtcagataccaagtggctaactgctcacaaaaatatggccaaaccgccaggcgctgtggctcacacctgtaatcccagctctttgggtggctgaggcggacggatcacctgaggtcgggagttcgagatgagcctgaccaacatggagaaaccttgtctctactaaaaatacaaaattagccgggcgtggtggtgggtgcctgtaatcccagctacttgggaggctgaggcaggagaatcgcttgaacccggcaggcagaggttgcagtgagccgagatcctgccactgcactccagcctgggcaacgagaacgaaactccgtctc

SEQ ID NO: 235071 - DNA, 1290 bp, Homo sapiens
gcggggacagggcggtttgggaggcccaggcggcggagcctccgggacggcgagcggcgggcggcggaggaggagacggcagtcgggcattaaaaaatatttaatcattcatgtgttgagactcattcttgagttatggatgacaaggcttctgttggaaaaatcagtgtctcttcagactcagtatctactcttaatagtgaagattttgtcttggtttccaggcaaggagatgagacaccatctacaaataatggaagtgatgatgagaaaacaggactcaagattgtagggaatggaagtgaacagcagctgcaaaaagagctagcagatgtactgatggatcctccaatggacgaccagccaggggaaaaggagcttgtgaaaaggtcacaactggatggtgaaggagatgggcctctttctaatcagctctccgcttcatccaccattaaccctgtgccattagtagggctccaaaaaccagagatgagcctaccagtgaaacctggacaaggagattctgaagcttcaagtcctttcacaccagtggccgatgaggacagcgtagttttcagtaaactgacttacttaggctgtgcctcggtaaatgctcccaggagtgaagtggaagccttaaggatgatgtccatcttaagaagccagtgtcagatttcactagatgttaccctttcagtgccgaatgtgtctgaaggaattgtgagactcttagatcctcagacaaacactgaaatagcaaactaccctatctacaaaatcctcttctgtgtcagagggcatgatggaactcctgagagtgactgttttgctttcactgaaagtcattacaatgcagagctcttcagaatacacgtcttccggtgtgaaatacaagaagctgtaagccggatactttacagttttgccactgccttccgccgttctgccaagcagaccccactttcagccactgctgcaccccagactcctgacagtgacatctttaccttctctgtgtctttagaaataaaagaagatgatggtaaaggttattttagtgcagttcccaaagataaggacagacagtgctttaaactacgccaaggaattgataagaagattgtcatctatgtgcagcaaacaactaataaagaacttgccattgaaaggtaagcatttttagtaagtttagcttaaatataaattttggcttttatcaatctaatggcatagttttacactgtattaaaaaatgtatttccaaagaattttgttccctaggaaattatt

SEQ ID NO: 235072 - DNA, 1337 bp, Homo sapiens
gcggggacagggcggtttgggaggcccaggcggcggagcctccgggacggcgagcggcgggcggcggaggaggagacggcagtcgggcattaaaaaatatttaatcattcatgtgttgagactcattcttgagttatggatgacaaggcttctgttggaaaaatcagtgtctcttcagactcagtatctactcttaatagtgaagattttgtcttggtttccaggcaaggagatgagacaccatctacaaataatggaagtgatgatgagaaaacaggactcaagattctgaagcttcaagtcctttcacaccagtggccgatgaggacagcgtagttttcagtaaactgacttacttaggctgtgcctcggtaaatgctcccaggagtgaagtggaagccttaaggatgatgtccatcttaagaagccagtgtcagatttcactagatgttaccctttcagtgccgaatgtgtctgaaggaattgtgagactcttagatcctcagacaaacactgaaatagcaaactaccctatctacaaaatcctcttctgtgtcagagggcatgatggaactcctgagagtgactgttttgctttcactgaaagtcattacaatgcagagctcttcagaatacacgtcttccggtgtgaaatacaagaagctgtaagccggatactttacagttttgccactgccttccgccgttctgccaagcagaccccactttcagccactgctgcaccccagactcctgacagtgacatctttaccttctctgtgtctttagaaataaaagaagatgatggtaaaggttattttagtgcagttcccaaagataaggacagacagtgctttaaactacgccaaggaattgataagaagattgtcatctatgtgcagcaaacaactaataaagaacttgccattgaaaggtgttttggtcttctccttagtccaggaaaagatgtacgaaatagtgacatgcacttattagatttggaatctatgggcaaaagttcagatggaaagtcgtatgttattacggggagctggaatccaaaatccccacattttcaagttgtaaatgaagaaactcctaaagataaagtcctgtttatgaccacagctgtagatttggtaataacagaagtacaggagcctgttcgatttctcctggagacaaaagtccgcgtttgctcacctaatgaaagattattctggcccttcagcaaacgtagtactactgaaaatttctttttgaaactaaaacagataaagcaaagggagagaaagaataatactgacactttatatgaagttgtatgcttggaaagt

SEQ ID NO: 235073 - DNA, 1572 bp, Homo sapiens
gcggggacagggcggtttgggaggcccaggcggcggagcctccgggacggcgagcggcgggcggcggaggaggagacggcagtcgggcattaaaaaatatttaatcattcatgtgttgagactcattcttgagttatggatgacaaggcttctgttggaaaaatcagtgtctcttcagactcagtatctactcttaatagtgaagattttgtcttggtttccaggcaaggagatgagacaccatctacaaataatggaagtgatgatgagaaaacaggactcaagattgtagggaatggaagtgaacagcagctgcaaaaagagctagcagatgtactgatggatcctccaatggacgaccagccaggggaaaaggagcttgtgaaaaggtcacaactggatggtgaaggagatgggcctctttctaatcagctctccgcttcatccaccattaaccctgtgccattagtagggctccaaaaaccagagatgagcctaccagtgaaacctggacaaggagattctgaagcttcaagtcctttcacaccagtggccgatgaggacagcgtagttttcagtaaactgacttacttaggctgtgcctcggtaaatgctcccaggagtgaagtggaagccttaaggatgatgtccatcttaagaagccagtgtcagatttcactagatgttaccctttcagtgccgaatgtgtctgaaggaattgtgagactcttagatcctcagacaaacactgaaatagcaaactaccctatctacaaaatcctcttctgtgtcagagggcatgatggaactcctgagagtgactgttttgctttcactgaaagtcattacaatgcagagctcttcagaatacacgtcttccggtgtgaaatacaagaagctgtaagccggatactttacagttttgccactgccttccgccgttctgccaagcagaccccactttcagccactgctgcaccccagactcctgacagtgacatctttaccttctctgtgtctttagaaataaaagaagatgatggtaaaggttattttagtgcagttcccaaagataaggacagacagtgctttaaactacgccaaggaattgataagaagattgtcatctatgtgcagcaaacaactaataaagaacttgccattgaaaggtgttttggtcttctccttagtccaggaaaagatgtacgaaatagtgacatgcacttattagatttggaatctatgggcaaaagttcagatggaaagtcgtatgttattacggggagctggaatccaaaatccccacattttcaagttgtaaatgaagaaactcctaaagataaagtcctgtttatgaccacagctgtagatttggtaataacagaagtacaggagcctgttcgatttctcctggagacaaaagtccgcgtttgctcacctaatgaaagattattctggcccttcagcaaacgtagtactactgaaaatttctttttgaaactaaaacagataaagcaaagggagagaaagaataatactgacactttatatgaagttgtatgcttggaaagt

SEQ ID NO: 235074 - DNA, 1545 bp, Homo sapiens
ttatacaatgtggcctgaaagtttccctcctctttccaaatcaaccataatattctgaggcattaaaaaatatttaatcattcatgtgttgagactcattcttgagttatggatgacaaggcttctgttggaaaaatcagtgtctcttcagactcagtatctactcttaatagtgaagattttgtcttggtttccaggcaaggagatgagacaccatctacaaataatggaagtgatgatgagaaaacaggactcaagattgtagggaatggaagtgaacagcagctgcaaaaagagctagcagatgtactgatggatcctccaatggacgaccagccaggggaaaaggagcttgtgaaaaggtcacaactggatggtgaaggagatgggcctctttctaatcagctctccgcttcatccaccattaaccctgtgccattagtagggctccaaaaaccagagatgagcctaccagtgaaacctggacaaggagattctgaagcttcaagtcctttcacaccagtggccgatgaggacagcgtagttttcagtaaactgacttacttaggctgtgcctcggtaaatgctcccaggagtgaagtggaagccttaaggatgatgtccatcttaagaagccagtgtcagatttcactagatgttaccctttcagtgccgaatgtgtctgaaggaattgtgagactcttagatcctcagacaaacactgaaatagcaaactaccctatctacaaaatcctcttctgtgtcagagggcatgatggaactcctgagagtgactgttttgctttcactgaaagtcattacaatgcagagctcttcagaatacacgtcttccggtgtgaaatacaagaagctgtaagccggatactttacagttttgccactgccttccgccgttctgccaagcagaccccactttcagccactgctgcaccccagactcctgacagtgacatctttaccttctctgtgtctttagaaataaaagaagatgatggtaaaggttattttagtgcagttcccaaagataaggacagacagtgctttaaactacgccaaggaattgataagaagattgtcatctatgtgcagcaaacaactaataaagaacttgccattgaaaggtgttttggtcttctccttagtccaggaaaagatgtacgaaatagtgacatgcacttattagatttggaatctatgggcaaaagttcagatggaaagtcgtatgttattacggggagctggaatccaaaatccccacattttcaagttgtaaatgaagaaactcctaaagataaagtcctgtttatgaccacagctgtagatttggtaataacagaagtacaggagcctgttcgatttctcctggagacaaaagtccgcgtttgctcacctaatgaaagattattctggcccttcagcaaacgtagtactactgaaaatttctttttgaaactaaaacagataaagcaaagggagagaaagaataatactgacactttatatgaagttgtatgcttggaaagt

SEQ ID NO: 235075 - DNA, 1595 bp, Homo sapiens
ttatacaatgtggcctgaaagtttccctcctctttccaaatcaaccataatattctgaggcattaaaaaatatttaatcattcatgtgttgagactcattcttgagttatggatgacaaggcttctgttggaaaaatcagtgtctcttcagactcagtatctactcttaatagtgaagattttgtcttggtttccaggcaaggagatgagacaccatctacaaataatggaagtgatgatgagaaaacaggactcaagattgtagggaatggaagtgaacagcagctgcaaaaagagctagcagatgtactgatggatcctccaatggacgaccagccaggggaaaaggagcttgtgaaaaggtcacaactggatggtgaaggagatgggcctctttctaatcagctctccgcttcatccaccattaaccctgtgccattagtagggctccaaaaaccagagatgagcctaccagtgaaacctggacaaggaggttaggattgctgcattgcttgcgtaactgaaggttattgtttttaatatattctgaagcttcaagtcctttcacaccagtggccgatgaggacagcgtagttttcagtaaactgacttacttaggctgtgcctcggtaaatgctcccaggagtgaagtggaagccttaaggatgatgtccatcttaagaagccagtgtcagatttcactagatgttaccctttcagtgccgaatgtgtctgaaggaattgtgagactcttagatcctcagacaaacactgaaatagcaaactaccctatctacaaaatcctcttctgtgtcagagggcatgatggaactcctgagagtgactgttttgctttcactgaaagtcattacaatgcagagctcttcagaatacacgtcttccggtgtgaaatacaagaagctgtaagccggatactttacagttttgccactgccttccgccgttctgccaagcagaccccactttcagccactgctgcaccccagactcctgacagtgacatctttaccttctctgtgtctttagaaataaaagaagatgatggtaaaggttattttagtgcagttcccaaagataaggacagacagtgctttaaactacgccaaggaattgataagaagattgtcatctatgtgcagcaaacaactaataaagaacttgccattgaaaggtgttttggtcttctccttagtccaggaaaagatgtacgaaatagtgacatgcacttattagatttggaatctatgggcaaaagttcagatggaaagtcgtatgttattacggggagctggaatccaaaatccccacattttcaagttgtaaatgaagaaactcctaaagataaagtcctgtttatgaccacagctgtagatttggtaataacagaagtacaggagcctgttcgatttctcctggagacaaaagtccgcgtttgctcacctaatgaaagattattctggcccttcagcaaacgtagtactactgaaaatttctttttgaaactaaaacagataaagcaaagggagagaaagaataatactgacactttatatgaagttgtatgcttggaaagt

SEQ ID NO: 235076 - DNA, 580 bp, Homo sapiens
caaaaagctataaaggacatggggacatttgcggaaatttatggattgtatgttactactgtatcgatgttaaatttcttgagtattataccttgtttttaggagatgcatgctaaagaatttatgcataacgaatcccataatgagaatgcaaatgtggctagatgttaaagtttgtgatctagctgggtgcagtggctcatgcctgtaatcccagcactttgggaggctaaggcaggcagattgcttaaacccaggagtttgagaccagcccaggcaatatggtgaaactccatctctataaaacataaaaaaaattagcttggcatagtagcacgtgcctgtggtcccagccactggggaggctgaggtgggagaaacgcttgagcttacgaagtcgaggttgcagtgagctgaaattgtgccactgcactccagcccaggcaacagagtgagaccctatcttaacaaaaaaagaaacacacacacacacaaagtttacaatctagtaagagtcatagacatggacagaaataattagaaggcactgtacaaagcattgtagggttgggaaaaagca

SEQ ID NO: 235077 - DNA, 443 bp, Homo sapiens
tgatgttatcgccccacacctggtgattccaaaaaatcaagacagaggctgggtgcagtggctcatgcctgtaatcccagcactttgggaggctaaggcaggcagattgcttaaacccaggagtttgagaccagcccaggcaatatggtgaaactccatctctataaaacataaaaaaaattagcttggcatagtagcacgtgcctgtggtcccagccactggggaggctgaggtgggagaaacgcttgagcttacgaagtcgaggttgcagtgagctgaaattgtgccactgcactccagcccaggcaacagagtgagaccctatcttaacaaaaaaagaaacacacacacacacaaagtttacaatctagtaagagtcatagacatggacagaaataattagaaggcactgtacaaagcattgtagggttgggaaaaagca

SEQ ID NO: 235078 - DNA, 913 bp, Homo sapiens
tggtatccaaagtgctccattagcatctttaaaggatcgcctgagaagtcccagctgtctggcttcagctctgcttagcatgggtacccatcggtgtccacaggggctagcagcaagtctgctgaaggagatgccccaccctgctcttttcagctgccttagagcctcaagcctgagcctctcctgctgttgggaggaacctggcaatgccatctttgtcttcccaatgccggtcatcccaagccactcagagagataaagagccattgcagtccctcttagggctgtcttggagcagaaagactggcacatgatagcatggtgttggcagtagtctggccttgggtctccccagagctggtggtttatcgcttattagttactgtgatacaatttgaggttcagaaaagacagtcactgtacccttaacatctcttcgaattctaagttgagtgaaaacccagaaaaaaaataggctgttcttctctaagcgcttctaaataagcagcagccaggccagggactaaaatacatcgccctgtagagccactggacactgggatgcaggtcttttgtgtctttcctgctcagtaatagatgtggaccttagtttgtaattttaggtcggctttgttttttaataacctattttttgctaaaatccatggcattcgtttattaaagaatagtatcacttagtcacgaagtctcagagggtaattccagtgtttctgaaggctaaaactgtaattgacagtcttggtttgattgaaggtttggatgtcagtacgtctcctctctctccctccctctccctctccctgtctcttcctctctcatcctctttcttcttctttctctccgtctcccttccctcttcttttcctgctttgtctctgatgcaagaagtctg

SEQ ID NO: 235079 - DNA, 949 bp, Homo sapiens
ggaattaataattactatcttatgcctggctcaatttttcctaattgtctgaaaaatgcctttttatatttggtttgttagaatcagattccaaccaagactctcacattgtatctgattgatgtgcgttttaagtctcttttaatctttaacaaatcgtctgctttttcccgccttgccattttttttttttaaaacgaggtcatttatgctgcaggatgtcctaccttatggatttggccatcatactcatatggcaatgtttagctgttcttatatccctcatttctatttagatctgtaacctgactagattgaggttcaatttgagggggcaagaatacttcataggttagactctttttaaaaaaataccttttttcgctaaagctgatttttacccatttttattactatgcagacatactaaaaggtcatcatatgagctttataagtagaattggtgtatagtacttgcgtttaataataaatgctaaatcatttcgatttcaattgtgtaactatatcacctaacatttttgaagcactttctataaattaggcagagccttaattcacttaatctcaacatatgaaggtaagtactattatccatgttttccaaataaggaaacagaccatagagtttaagtaatttacttaagattacaccatgaagtgctttacatgcaattaatattctaaagatttatggtttaatataatttctcttctccttgctttgtgctgtaccatgattaggatgcgaaagtaagtttattactggatgccaaaaatttatattattttccatcattaaaatatagtgttgccttttaattacaaaattcgttgctagtaatacctgaaagttggcctccttggtcctttattttgtgatttgcaaaatcagccactttggaaaattattaaataattttttcctgga

SEQ ID NO: 235080 - DNA, 530 bp, Homo sapiens
  misc_feature (477)..(477): n is a, c, g, or t
  misc_feature (480)..(480): n is a, c, g, or t
  misc_feature (482)..(482): n is a, c, g, or t
  misc_feature (515)..(515): n is a, c, g, or t
tttgtgtggccaactttgaaataacacaaaaatgatttttggtgaccttttatgagcagggtggccataaacaaaaacaaatacttgttctaggcttataaactggggttcactgaaggtacctgacaaccttgaaatgacacagaaatgaattttggtggccttttatgagcagggtggccttaaacaaggcttataaactagacttcatcgaaggttacctgacaggcttagcaaagaattttaaccaagtaaatgcctatattttattaaagcagagttttaatgtcttgggattcaaattaataatacagttatatattacaataaaatactgtcttttttttttttgtggcggagtcttgctctgccacctagggtggagtgcagtggcaggatctcggctcattgcaacttctgcctcctgaggcaggagaattgcttgaacgtgggaggcggaggttgcagtgagccaanagntngccattgcgctccagcctcggcgacgagcaaantccgtctcaaaaaaa

SEQ ID NO: 235081 - DNA, 1436 bp, Homo sapiens
agtcacagccaggtaaccctggagtgaagcggtttagttagaagggagcagataaactcgtcactctagtagctttaaccctcaccctgaggcaccttagcaatcagccattgcctgcaagcctccaaagcttgtctttgcctaatatggagcccaaagaagccactgggaaagaaaacatggtcaccaagaaaaagaatctggccttcttgaggtctagactctatatgctggagagaaggaagactgacactgtggttgagagcagtgtttctggggaccactctggcaccttgaggaggagccaatctgacaggaccgaatacaaccagaaattacaagaaaagatgactccacagggtgagtgttctgtagctgagaccttaaccccagaggaagagcatcatatgaagaggatgatggcaaagcgggaaaagatcattaaggagctgatacagacagaaaaggattatctcaatgatctagagctgtgtgttagggaagtggttcagcccctgagaaataaaaagactgataggctggatgtggatagcttgtttagcaacattgagtccgtgcatcagatatcagccaagctgctgtcattgttggaagaggccacaacagacgtggaaccggccatgcaagtaattggagaagtattcttgcagattaaagggccactggaagatatttataaaatctactgctatcaccatgatgaagcacatagtatactggagtcctatgaaaaggaagaagagctgaaggaacatttgagccactgtatccagtccttaaagtaaggccttttcaaatgatgattcccatctcctctcagttgcctagcagggaacattttaaatggatgtagatgaaaggtctcacataaatcctatgttttatgagacttgctgggagctctgctttgcattccctttataaaaagctgacatgccagaagccctgattgactttttttccccctgcgagaatgactaaaaataacatggaagaagatttagagctctgcagcgattgaaaaatgcaatatcaaaatataaaatgtggaagaaaagcctcttcttaaagctattgtaacttgcctggccccacgtagttcaaggattatgtgagataacacgtggccccatgaccactggagcacatgggttaatggagttaggggaatggcctacaactctgcatggccgtcttctttccccaaactcactgtggggagatgggtgaagacaagtcaggccttgttaaagttagtttcagaacaattactcatgccttcctttctcatccctaaaacattggtgggggagctacacaatgtactttttcttttctagaggaagtatctattcactgtgaaaatctgaaaaatataacaaagtatgtgtaagataaaaaccccttgctatttc

SEQ ID NO: 235082 - DNA, 461 bp, Homo sapiens
cctatattattgggacaagggtaggtcagagaatttctagacagaatttctgtctaggccagttcctagacagaaaggtgaggggaaggttagagtagtaattgtagtttttatggctggctttggagaagagagatctagtctttattatctgctttggtgaggaggaattctggtgtctgtacttgctttgggggagaatgaggggcaagagacaggagggcaggagaagatgagagagatccaggttctgaggctgcttctgataccttccagtgcaaagtactttgtgtgctgaagtgccatattttggagtattgttttctgagctccagcattagccctatttgccagtagaatatggtgtggcaagtactttaaaagaatgctttacatgcttattttctcaagagtatataccgtgagcttttcggaatagttggaccatctgggaatacgta

SEQ ID NO: 235083 - DNA, 362 bp, Homo sapiens
tatacttggctgtggttttgcttacagtaaattcctgaaggcgtttctgttgctcagtggaaatcactggcagaattcttgttactgagcatcagactgtggggcaccgtcatggtgtcttaggggtgtcaaagcagatgcatttgaggggagatgtattcacattttccagtatatcattaccacattcttgtgtgatagcttcctggtaattcaacttgatttagtgtagtacagcagcacaacttttcctttctgagttgtggagatttaaatttgttgagcaaaggaaacactgaagaggactcagaacactccagttgagtgcacacactgcatgaagctgatggctctgcctcctg

SEQ ID NO: 235084 - DNA, 488 bp, Homo sapiens
tctctacaagcttacaaaccgcatgggtgtgtgggggtcttatttaatattgcgaacagctggttcctgtatctgaagttcttgccctggagcctgggtgtttgttgtagttctgcaccatctgccttggttgataaggcattttggaggccactgattttaggcagcagtgttgttaggatacggaaacagcaggatgtttgtggattgagccttttcagctgaatcttctggccagttctttctggctgtgtgaagttgtgtcgactacagagcaggatgctcatgttgcctgctgggctctgttagggtggccagacgtgcttgtagcagccttactgccagaggaacgtacgttggcatccagagtccagtgctgccgccagttgcagtgcagcaaggctagccccaaacctgatttgctgcaaggattagctcaactctagtgacatttattgtgttttctcatagcccaaatcacagccaaa

SEQ ID NO: 235085 - DNA, 559 bp, Homo sapiens
gaagggcttttgtagagtatggttaagaatgcagatctgcagtgggtcacgcctgcaatcccagcacttggggaggctgagacaggaggatggcctgagcccgggagttcgaggctgcctaccccctgcaccccagcctgaatgacagagcgaagagaaatcctgttgtctctttatttgaaaaaaatttttaagtaggttctggagccggaatgttgcagagaaccaggcgccggcgcctcccaatggtcaccagcaggtggcgccgctgacctaggtgctgggctcctctgcaccccgggttctggatggggctgggaggagccagtttaggcgggatggagccctggaccacttgctctggaccaaagtcaggtggtgagcatgggtgacccggcttctttaccttcctgaggccttggtcgaggggctggctgcctgccctgtgcagaggactttgtccctggggtgggtgggtgcaataaatgtcagggctctgatccaggaacagaggggcacagagggtaaagggtccctcactctcccctggcagcggccc

SEQ ID NO: 235086 - DNA, 435 bp, Homo sapiens
atttattatttcatttactcaagtaaatagtaattttaaaaaaaatctgtaaaccttttacataaagttatgtcacaaaggttacagcaacagaatttgaatcaagtttgcaatatgacatgagggttctggcatctattttgtcccttggtatcaagtttatttctctaaatagtttgtttttaactttggttacctgccaaaaggggaaaagaaaattctacttgtaagtataaatataaagcagaaatcctgtagttacgtatgtaacgatcttataaaatataatcagactgttgtgattgtttcatgtatcagtggatgtatatttacagtaatacatttatacatgtaaactttaaatttgagttatagttctatgtatatgtattttactgagcctctgagcataataataatgctgttactaagtta

SEQ ID NO: 235087 - DNA, 807 bp, Homo sapiens
ttcttgagatgcaaaactagatgtataaggcctgtttaagaaaaaaaaaagtgggaggcagggtgagaggaggaaacagtctatgtttatacatatacaaaatgtaactacactaacataaaactgttacaacagtagctgtttccgtggtggtggagagtatggaatggaaaggggagggggtgatgtagcatggctgaaggggaacttcacagaggagggacacttgagctgggccccaaacctaaacagcctgggaaaatttttctctttgtgtcttgaagttttctgatttatcttagtgatttatatgattatttgataaatgttagtcacctatgactgcaagtactgggatgtcatagtcagtctctctttcttgcttgccattattcttgattcctaataggtccccagtaaatacttggtaagtgaatagaggtggtgggcacagaaagcctttgtgaaacaggaaggggaagggtattctggggcaaagtaccttgtctgatttggtaatagagcagggcacaggcagtggttcatgcctgtaattctagcgatttgggaggccgaggtaggcggattgcctgagctcaggagtttgagaccagcttgggcaacatagttaaaccccgtatctactaaaattaaaaaaaaaaattagctgtgcatggcagcctgtagtcccaactactcgggaggctgaggcagaagaattgcttgaacctgggaggtggaggttgcagtgagctgagatcgtcgtgccgttgcactccagcctgtgtgacagaacaagactgtctc

SEQ ID NO: 235088 - DNA, 550 bp, Homo sapiens
tccacagggccctgctgcccccagaggctctgggcagagcccttccgcctttccagctccccctggttcccgtgctcctcggcctgtggccccatcactctggcctctgccttcatctcatgccgagatccctgaagcgggcccagctccgttcactgctcccccggcctcctgctgtttcccacacgcagccatggtacagggcagctcatcccaccacctccccaaccgcagcctccagggatgtacaccctgcctcaggggctgtgcctgggccctggctggtggagggcacagccgtcagggaaggccctcagctgcaggatgccgtgcctcagagaccaaccaggccctcgaaggcactgtggccggcccagatgtcagcagctccagcaattaggctgggacagatggtgcctggtgacacaaggggactgtgggggccacaggggaccctgctcacctggacctaccgtggaggccagggagggagatggactcgaagggcggaagggcccagagaaggcacatttgcagagcagcggccgct

SEQ ID NO: 235089 - DNA, 431 bp, Homo sapiens
ggttctgttcccttattctaccccctgccctaggccgagatccctgaagcgggcccagctccgttcactgctcccccggcctcctgctgtttcccacacgcagccatggtacagggcagctcatcccaccacctccccaaccgcagcctccagggatgtacaccctgcctcaggggctgtgcctgggccctggctggtggagggcacagccgtcagggaaggccctcagctgcaggatgccgtgcctcagagaccaaccaggccctcgaaggcactgtggccggcccagatgtcagcagctccagcaattaggctgggacagatggtgcctggtgacacaaggggactgtgggggccacaggggaccctgctcacctggacctaccgtggaggccagggagggagatggactcgaagggcggaagggccca

SEQ ID NO: 235090 - DNA, 771 bp, Homo sapiens
gaggaagagaaggaggagacagagaacaggagagttggggatgaagcctttgatgaggggagtgaggaggggcagaagtaggagacagacatgaggaaaccaccaactgaagtcccagaaacccagcctccgtcccctctaggtcctactgccgtcatcctctttctgtaaaggtgagagtctaggtgcagtgtcccaggttccaaacacaagttcatactcattgactagtgggatgcccactgtgagagcaggaaggagggctagagagatctaagagggcagaagccctgccctgccagtattttttgcctccagccacctgctctgttctgagacatgcctgagaccagctgcctacagggggaccagggtctgtttctgctgttaaccttggttccctcctgcattcctgcatgtggggatgtagacaggaagcctgcaggtatggagcaattgaagcagagtctagatagagcccagactccttacttcccatagtactattctgcattttgtagtgctgcttatgcttttcagtgtttccacatctatttactaataacatcatagtacaacagcaagaacatggcctcagaactcaaagttctggaattctaatattttatttgattgtcagtatttctgtgagatagataaaataggaattatttcctctgatctgcaggtgaggaaactcagtcacagggagcacatttatccatacttgtggagctatagtataactagtattaggacaaggatagccaa

SEQ ID NO: 235091 - DNA, 450 bp, Homo sapiens
gggactactcataatacctcttttaaccttaatgaactcttcaaagtatctccaaatatagtcctattctgaggtacaaggggtaagacttcaatgtatgaatttggccaaggctcgggcagaattcagtccataaccattatgttagctaataatatatgtaacaatatattcaacttcactaaccatcaaggaaatgcaaactaacacccaatacagtaccattatacacccaccaggatgttcaaaatgataccaagttttggtgaggatgtatggagcaacttgaacactcatacaatgctggttggagtgtaatttagtacatcttttggaaattggcagtttgcactaatgctgaatttccacgtgccctgtaactcaacaatttcagtcctatatatctataatcaccaaaagaaccccaaataaactagtatacatacatgc

SEQ ID NO: 235092 - DNA, 491 bp, Homo sapiens
tgggctcaagctatccttccactgtggcctcccaaagtgttgggattgcaggcgtgagccactgcaccttgcccataccatacattttgaaccttggccgctaggtccaaaagctggccgttgtgactatagctgttggcatttttgttgggatgacaatgttattttatttaaaatttcttgtactatttaaaataatctgtttggaaaatgttaaccaagtaatctttctgcttccacttccccttcagtattttagtggactgaatctctcagcctggcattcaaggccagtcacagtgtgacattccagcctcccagttagagctcagctaacaacaagccaagtcagaaagctgctctgcaagactgatttgcccattatacttcccaaataccctgccttcctttcctgcttctgcttttgccacactgttttggctttagcaggacaaaccaaggaataataaaatagcctgtcttgtgatgta

SEQ ID NO: 235093 - DNA, 393 bp, Homo sapiens
ttatttatttatttatttatttatttatttatttattaagacagggtcttgctttgtggcccagcctggagtgcattatagctcactgcagctctgacctcactggctcaagtgatcctccaccctcagcctcccgagtagctgggactatagtattttagtggactgaatctctcagcctggcattcaaggccagtcacagtgtgacattccagcctcccagttagagctcagctaacaacaagccaagtcagaaagctgctctgcaagactgatttgcccattatacttcccaaataccctgccttcctttcctgcttctgcttttgccacactgttttggctttagcaggacaaaccaaggaataataaaatagcctgtcttgtgatgta

SEQ ID NO: 235094 - DNA, 84 bp, Homo sapiens
cttaaaagtccagaagtaaggctcttgtagggttagttcagtagcacaagaaaatcattatggggctaggttctttccatcttt

SEQ ID NO: 235095 - DNA, 339 bp, Homo sapiens
gcctggcagcccacttgtgtgcaaggggggtatggcagatcaccgccagccagtgccaacactgtgaacgtgaacgctactttaaatatggaaaatacttcccagcgtggccaataatcacaagcagagcatgcggacgctgtgtggacaagcccacgactctcattcagaggacaagccccagaagaaaagcaaaaccaggaaaagcacatcaggggagcgaggctggaagaatgtctgtaatgaggtatttcatgttatgaaattcattagaaataaaaatgagtggagataaaacatctatcttgatatggaacaaacatctttgtgtaaatgcaa

SEQ ID NO: 235096 - DNA, 538 bp, Homo sapiens
ttgtgcgtggcgggctgtcgctgcaatgtgcagcccattgacactgatggatgcgccaatggttggacggacagatgttagggcggatcgcacagcgctcggcgcctgagcgggggagggccaggcagcgacccagcggcggcggccggctacgcggagacccgagttcaggccgcggcccgcagtgggagggggccgaaggaacagaggtttgcaagaacagcgaggggatggaaaggaggagaaaagcgcgaccagggagaactacacgcttccgtgtgcggcgccccgcgctgtgcacacgccgcaccgggcgcgcctaagtgggagcttcgaaggtgagctgggagccggcgggagctgaccccgtgcggcgcaacccgcctccaggcgacaggagctcagcgcggccaccagaatggtgaggccgccggcggtgtcggccaactcaccgtttcctcgcttgcaagaagcgtttcacgctccacggccgcgtctccccggcctggaggagtagcggttctggcctctgcggccg

SEQ ID NO: 235097 - DNA, 351 bp, Homo sapiens
atgactctagcctatgttttttatgtttaagacagctctactgataaacaatcaagtttaatggattctatttgtcactgtgacatagtttaagcaattagtaaagattacagtcttaatgtttagaagactttattaagaaaaactaagttaaatattgaggtcagacccatcactcttattcttaaacatgatgtaaaggaccttgactatacagtcattactcctgtctacttctttaatgtttttcttagcccatctatatcacatttataaaatgctgttatttttcctctctgcttatattcatttcccattcaagtcttctaactggtcattcttacacttggt

SEQ ID NO: 235098 - DNA, 519 bp, Homo sapiens
attttttattccataaagagaaatgtattctacaatgattaagtcattaattctcatagcatctcgttataaaccaggagtcagcaatctctggcccaagagcacaaaacggttagctacctgtttttctacaacctgagagcccagaataatatttacatttctaaatgactggaaaacaaatgaaaagaagaatactatttcttggcatgtagaaattatatgacgttctcctaccattcgacccagcaatcccactactgggtacatacccaaaggaatataaatcattctgttataaagacacttgcacgcatatattcactgcagcaccgttcacaatagcaaaaacatggaaccaacccaaatggccatcagtggtagactggacaaagaaaatgcggcacatatacaccatggaacaccacgcagccacaaaaaagaatgagatcatgtcctttacagggacatggatggagcaggaagccatcatcctcaacaaactgatgcaggaacaga

SEQ ID NO: 235099 - DNA, 1077 bp, Homo sapiens
gtgctgggattacaggcgtgcagctgcacccagctgagtctattatttccttatcaccaagaaaaagaaataccatcaagtaattttacaatgccacaaatatgatatatcccactgtaggagattttaaggtgtgatcaatgtatgtattaaaattgatgaaatatgggagttgtcacctatgtaaatgtgaacttgattgttaactctggcagaatgtccactcagcagcaacccttcagtgtttctgtcaacaaaccatatgagaagtcagatgagttgtattgtttgaaaatgtttcattggataacaaaatgttgatggttgctaacgcttagtgatgggcatttggaatttgtatgtacactccacttctgtatatagtagtaagttttttataataaaaagattaaaactagaacaagcaaccttccattggcactttctggcatgatcaagaaagcatctgcattaaaattttcagtgtcgtgttagtggatggaaagaaaattccagagacaaaagtcaaaagaatgttttaaagaaatgttgggttatgatctcagtgatgtttttaatgacacataaggtagaaatgtatggaaaaataggacacagttgacaaatttgaaaagatattcagaagaatctaactctaaatatgaaaaagttttaggaatacctacaccaatttattttgcatctgtttttctttttacaggctgtatgagagtgattttaataatctctgtccaaataagtctaaaggagcttatcaagaagtaaagcataacattctaggggataagtcatagttggtcgtagtttaagcagcatactttttagtatctcttattttgaataaaaaaaaattaagtaccatgtatatagttaatcatttttagtgtttccaagatactgcttttcttcataggctataaaaagcttttgttgcttatattagtaacaaaaacaattttgcaaatggaaacatttctagaaaccttactatttatattagtattatataaatttatccaatttccagaaatttgggtaatgctaaaatcactttcc

SEQ ID NO: 235100 - DNA, 953 bp, Homo sapiens
cagtatatctgctgttgaggatcctgcacttggagacaagaagacctgagttccagactctcactaccttggacaagtcacttaacttctctgtggctgcattattttaattgaaaattataaatagtaaacctattcttcctaacttataggattactgggaaaataatacgaaatcatgaatgtgaatgtatttagtgaaatattacacgcattgtggaaatttgggaagtttgatgttaaccccctctttcccactctggaccctggatataacagagatcctacttcatcttctaaattatttttggtagaatatacactgttcatgtagttttaatgtaaatcacattatgcaactaaataatatgttcaaattcattgaaattgtacagttcacctagagcatggatagcaactttattaattagaacacctaccatgtcaaggaaacattgctttcaacattatcattaaatcaggcaaggtcataggagtaccattctgccaggaattagtttaaaagtaagataattgtttttgctcagttaaattctgaaatagttcaaatcagtgtaacgattaatatgtcagggtgaaccaggactagtagaagtttccatctttgtcataacaaggccgaattcgttagatcttgtggcgtgaggttaataaatgtgaagggaccgttggagggaaggtagtggacaactctagaggcattgcggaggtcatgcttttttgacagacaatgcacgtggatttgttttgccatttaccaacagtgtgactttatgccagtttcctttctccttcagttttcatttgcaaagtgctagtatgatgataatgttatggttttgagaagaataaatgtgctaacatctgtaaaatgcatgtcacaatgccgggcacacaacaagcagtcattcaacataaggtattatttttac

SEQ ID NO: 235101 - DNA, 1129 bp, Homo sapiens
aaaccaaacttcaagaggagcaatttaatcttcatacctgactccttgtccctcctcaggcatgctgttgtgcaggacagagccctggcttctcctggatgtcacacctggcctgtctctgacccttgctttccctttctctgctgccctcaagggtcattcacacccaagagggtaagaagctgccctctcatcccttcctctcccaccctgggcctctgccctctgcctggccccagcagcacagtcttctccatagagaggggctgggccatgggaccccagttcctggggtctcggtgacacagttcactgtttgctgcagaggaggccccactcgcagccttggcctctgccctgcagaagaattccctgtaactcactcaccagtggccgtgggagccagtggcctcggcgagggtcagttggactgcatagctgccggctgagtctctctggccaccctcactggccccatcactccaggttgcactgctgcccagggggtttgtgccaggcctgggtcacagtggaagagagtctggaaatcacaaggcagaggaggagacctctgccaatgtgagagaacaaagttaaggggcagtccatgggggcattgaccttacttaggtgaggaggactcagggaacatctacagactctagggctagggtgagatcctcctgatagtgctggtagctccagctgctgctttggcaagacttggtcgtctctatactgagagagcaaaagctcttttcctggggctgcatgttcttccataggaaagtgggcttcaggtgctgcctattaaacctcctgcctcccctgctgcagtgctttgatgcctttcacctgtgtctacctgcgaacctctgcccaccacggaagagcagctcacatttggaaggggctaaaatttttacctagtttgaatctgctctgcaatgtccccatcaagttcttaaccatcccgggttccaatggttacagagttctgccctggggagggaggaattgcttagcaaatgatgttgagaatagtgattatttgggggaaaattcaggtaagatctcaccttcataccatataccaaaatacatctcagtagattagtaagctaatgca

SEQ ID NO: 235102 - DNA, 1540 bp, Homo sapiens
  misc_feature (318)..(318): n is a, c, g, or t
  misc_feature (559)..(559): n is a, c, g, or t
ttctctcttcccaaaactcagacactgagagaggttctcgtcagagtccaaaatgcacattaagttgtggggatcttattaacaatgatgattctgatgctgtaggtttgaagacgactcaagattccctggagacatcaatgctgctggtccatgggccacggcttggatagaaagggtttagggagaggttgacaagtaataatgcagggtgggtgagtactgctctactggcattctaaaagcagagtgagacagagaggggtatggggagtggggaggaggcaggcaaagcctcctagaagtgagtgacttggnccctgaataggtgagtcaatttaccaagcagaaaagtaggaaaggcctttggtcagagggagcaccatggatgtggaccccggctggctcctgcatagagtgaagaatgcagaggaaggtgatgggacgatggccagagaggaggctggaaagctcaccagggtctggatggtgaagggtcagctctgtttgccatggtaagacctaagactccagtcagcagggagtcttgaggtttcanagaggtctggttatagtggacatgacaaactgctttgaaaatagccaatactacatcatgttagagaatttgcataacccagcagggcgcggtggctcacgcctgtaatcctagcactttgggaggccgaggcgggcggatcatgaggtcaggagatagagaccatcctggctaacacggtgaaaccgtctctactaaaaatacaaaaagaaattagccgggcgtgggggcgggcacctgtagttccagctacacgggaggctgaggtaggagaatggcgtgaacccgggaggcggggcttgcagtgagccgagatcgcgccactgcactccagcctgggcgacagagggagacgccgtctcaaaaaaagaaaaaaaaaaaaaaaaaaaagagaatttgcataacccaaaggagattgtgcttgaacactcccaggcagtgaataatctgcaaaggagtaagactgtagttgagaggcaggtttttagacttccacaggcttgggggacaaacagaacagaaattgatttctggttccctgctttctagctatataacctcaagaaaattaattaactttctgaatcttagttttctcacctgtagaaaggatgcaataaatcctgtctcatcaaagaattgtgaagaggaagtcattcatttaattaattgaagcactacattttggcaaagcatgcagtttgttgataacaggaggtatttgttaacttattattaatgttgatttggagctcccatgaatttttgcctaggaaatgacctggtagatcggatagttaccatgttgatagattgccaagtgccttttctcatgtgtggggttctgatgccatcatcagctggaagctcagttggtcttgtgggtggcatgctgcaccagttgtctgattcagcaatgctgtgagagaattgagagggcgttcattcagtaaagggtgggaaggattttcttaaatgttt

SEQ ID NO: 235103 - DNA, 585 bp, Homo sapiens
agaccatcctgaccaatatggtgaaactccatctctactagaaatacaaaaaattagctgggtatggtggtgcacgcctgtaatctcagctacttgggaggctgagaaacaagaaatcgcttgaacccgggaggcagaggtggcagtgagccaagatcaggccactgcactctagcctgggcgacagagcgagactttgtctcaataaataaataaattcttgtaaatattcgaaaataatctttaatatccaattaggtagatagttgactaaactactcccttacatatgcacatatatattaaattgtttttactttattattattcatagttaatttgtctctgtgcataattgtccccatccttttgtgtgtgtttttgtttctgatacgttttctttggaaaggttctcagaagtagaaacatttggaaagattgtacacattcacttttcatggtgggagcatacttttcacccgcttatttatatatattcttgatccttaggaggttttcagaggcttagttgaagtctgtctatggcttatagtggggctctgttcttctgcttgattgctggtg

SEQ ID NO: 235104 - DNA, 719 bp, Homo sapiens
aattttaagagaccaacatctcagtacagagacagcagctaaaaatctagattcttacctttttattattatttttttaaagtaaaagatctgggagcctttgacctatagacctatgtagccaacaaacaaacaaaaaaacaaagcaaaaaaaaaaaaaaaccatctgattcacctttagataaggaagattctgtttgccaagtccctcagtgttgtctccccaacacagaggccaggtagcacttgacatttatcattgggcctgcaccattgttttttcttgtgcttgcacagcttgcattacctacttggcctctaaatatctcaagttgcctctccttgtagagactaaaggatgtctcaatttttgcctgttttaccttaactctattacccttctgaattcagtacctgttagagttgtagaaatcagtaaagaattagtgggagtgtgagcaactgagactctgactttgcttgaggccctaaaatactatattaaagtatgtcaataaagtctgttgcttgaattttaaaacaaggaaatacctataacttacccttgcaaaaatgtattcccatcctgaaatatggtaatatttaaaaattgcaagcatcgcatgtttaatattttctgcctctggaggtttgtaaaatattttctgggaatgaattgttatattcttgatgttctcagtggccaaagataaatgtga

SEQ ID NO: 235105 - DNA, 265 bp, Homo sapiens
ttcactaaaaaacagtgcagtgaagcatataggacagatgttgtgtatgagaaagaaaatggaaaacaaacacaactgtgcattggggtgcatgtgggaggagatataatagaattcaatgtggttatttctccagaacatcccagccaaggataacatccatccttgaggccagtgaccttattgctaaaactgcctgcctaaatataatttaagttactaagaaatttgtttttggaaataaacaagggactctagtgtatta

SEQ ID NO: 235106 - DNA, 470 bp, Homo sapiens
agctttgagactatgttcaatgaataacatcactagagtgctttgactttgcaaataatgctttgatggtttctgacactcttggatggcccatttatgacacctgtctgcagacactttaaagatagagcagttgttctaaaaagtttctgaaataactgtgcagtgagtatcaacttcaaacatgcacagggaatgttttaatatcctgttcttatgtaaatgccaggaccaggctggctgaaggtcactagagaggacacaagctaggctgagagaatttgacctgggcaatatttgagagccatagacaactgcacttgttaggggtaatgacaatgcattggtttaggactgaggcagacattcaaaggacaggaaaagcttcaacatcaagacagtaggagtcttgatgttggagattattgatccatttgtcaccaaaaataaaaaaggaccctgactcaatc

SEQ ID NO: 235107 - DNA, 371 bp, Homo sapiens
gttgaaccccgtgctggctactcacttctaaatcctctgaggtctcgggagcttcgttgtccggtgtttctctccacattttctcgggaatctttaagtgccagatacttcagagctgggaatgctgctggtaagggatccgggatgctggcatccttgcattgtgggcatgaataaccctgacctacaaaaattatcaaaaacaaccaacacaccaagtgtagaagaaaagaagtctctctcgggagagagaactgcttctgaaaagaacggacacatgagtgctttgatgtctaaaatctcaaagaacctagaggccttggaagagaaaactttaaaaatagacatgtttttaagttctcaatgcttca

SEQ ID NO: 235108 - DNA, 352 bp, Homo sapiens
ggttttcaaagcaagacaatgccccaatccaagcctgtgtgagcagttcgctttgcagcctcttgcggggattaacaccccttcttcaccaggctccaccctctctgcaaggtctatgctgcaaaattagcaagtccaggaggcttgctccctggcagagctgctgagtcctctgtcttctatttattcactttttgaagaaccctgaattaaaggcctgtctaaccactgttcagcctactccttctgggtgggaggggtcagaggctggcttctagaatcacacagtgattgggcaagtgaaggctggcatgcccagctaaacctcatctcctttttttttttttttttt

SEQ ID NO: 235109 - DNA, 1099 bp, Homo sapiens
cctggtactggttgctctgagaagccatgggtttccttccttggacaatttcagagcccatcattatggtttatggaaaggaagtggcactgagagagacccttgcttctcctggcagctcttctcccttgagaaagctcctcaacttctcctgagcttagtttcagaagtgattgttcatcctctcccactgggagtcctgggatgggctccgtatattttactccagccacaggcggatgagtgagatgaccttttcaggtcactcaggagatcctccagtttctcaggataatctaagcatctccctttcctttagaagctgtcagagctaactcagcgtgggtgtgggctctttgcagctacaccacctcccctccaatatttagaagttctttgctggttcttagggtctcctaatcacaggtctttttttctgggctctgcctgaaaggccacatccgttttttccctgaaagctagctaggtcctctgggctaaacaccaccgcccctcagctctagaaatggctgattttcatgacgccctttgccaaccagattatttcttaaattgctctcccccctgctgggtgttctgggacacagacgccagtgtgtggggtccccggctttcctttctcccagagcagctggaggagagcctcagtttctccaccgcacaccctggcctgagggtagcagccgacccagtcgggggagtgggcctcctgcgccctcggaggcacaggaccgcggggccccaccgaggaccccctgaacggcagcccgccgcgaggcagcgtggggaccaaactgccgcgccccagagcccgccgccgcctgtccccgcgtctgaggtccgcaaggaagagctgcgggaatgcacgcccggggaagaggctttgtgaaccgaggctcggcgcgccccccacccgcgcccctcatgggcagccgggcccagcccgccgcccgggcccctctgggaagggcttggaggcgacgcggggggtcgggggaggagggagcgttcctgcaaatcacatgattttcccgcttatataaatcacagcttgtttttctcaaccagaaacagactt

SEQ ID NO: 235110 - DNA, 444 bp, Homo sapiens
ttcccagtcaaggtgggccacacccactcggggatggcaagcccagtggccacagctcaggccccacagccagtcccagctctgcaacttctaaactcagatacttcatcctcaaaatggggtgacgagttcctgcctcacacgattgtggggactcatggaactgggcctggcgcgggttacaagctgcattccaggcagttgttttccctcccccaggacattaggattccatgataggcaaagtgtgggcgttgggggaaaagggggtgcgtagttcctttggtgaagtgcataagaattcccccactgtttccatcagcccctccaacggggatgtgtggacggtccctgtgtctctaggaaaaggacagagccttggtctcatgaccgactgactccctccctcgaaggcctgttggcgtgggtgggtggcagcggccg

SEQ ID NO: 235111 - DNA, 387 bp, Homo sapiens
ggaggggaggggaggggttgcattgggattttgattggaattgcatagaaactccatattaacgtgggacattttacaatgctaggacatcagtttgaaggtttgtctaagtctttgtgtcctgcagtctgattttgtttatttctagggcatgtggacagttttaaccaggtcctcttcccgtatgatgcggggaaggggacagtgcggtgaactttgcagatggcgaaaagacccaagttttatgcgcctagactaaggaggaggatacttcccaaatggtagctaatttctagacgcttggtagttaagtttatttggaggtgataagcatgttgttgggaaatgatctggcttacatgtgctatgtgtgatctataattacat

SEQ ID NO: 235112 - DNA, 430 bp, Homo sapiens
tacttgaatttattaacaattctgtttttaattgtttgcttttctaccaagaaatgatgtattttcatctgtacttgttttatgactttaaaactgtgttctttataacactttaatccatctgcaatttttaaataaatattatgaggtaggaagaaagctttatcttttccaaataatcaacaaattatgccattccccttcccaatgattaaaccattctttcctactaattaagatggatcctttatatcatattagtaagcacatgtagtttctgattatctaagtctgtttattcatctgtcttgcttgacttctgtatgcaaaacaatacatttgtgttcattcaaatatggtatgaatttcagatttgcttcatgtgatattctctggctataaacaattggactgaggaaaataatgaatg

SEQ ID NO: 235113 - DNA, 513 bp, Homo sapiens
ctcctcgctcagccgctccagccgccggtccacctccagcttctccagcgcgcggatcttgaggcgcgccaggccctcttcgtaggccacatcagcgggtgagggggacgcgggcgaagcggaggcaggcccggggcaagggccggggccggggccaggcggcggcgtcgagcacgccgaggacgccacggacttgcgggcgaacagctcccccagcgggatctcgatctcgcgcagcgcatagcgcgctgctgcggcgggcacaaggcccggctcggccaactcctcacagggcaggctagcgggcaccaggtcgccggggaagtgggcgaggggagcgtggtgatggtggtggtgcagcaggtgcggcgccgcgggcgacggcccggccgcctgctccttgccctggaaggaagtgctctcgaagacctctcgccgggcgccgggcacggccagcagggcggcgggctcgggagccagcgggaaccccgaggcagcggcggcggcggccgc

SEQ ID NO: 235114 - DNA, 441 bp, Homo sapiens
cggttttttttgctacaagttctatattgcattgcattgatttatgcaagtatctgtttctttatctggggtcctaccctctttcaacacagtgcttggaattcaataggtgataaatatattttttgttaaattgaagctgcctgggagtggtggttcatgcctataatcccagcactttggaaggctgaggtaggaggattacttcagcccaagattttgagaccagcctaggcaacatgggagaccccatccctactaagaatacaaaaaaatacaaaaagccagatgtggtggcacacgcctgcagtctcagctactcaggagggctgaggtgggaggatcacttgagtccagatcaaggctgtaatgagccaagatcgtgccattgcacttcagcagcctgggccacagagcgagactctgtctaaaagagaaaaa

SEQ ID NO: 235115 - DNA, 379 bp, Homo sapiens
tttttctagtggggcggggcggggaggggggggggttgtgatcttgaagagttaagtaccagagctaagctgagctttcttaactctattggcctttgtacctgcctttgaccctctttgtagtagcgatcccaatccaatatccaaaggggtttgggtcttgtataacagcagggttctcctgacctgatgtctactgttgttcctctgtcagtcccctcaactcctgctttccatgtggctctgcctgggataacacaggcctgggaccagtgaattgtagggaactgagtattccagaaatacctctgtgaaagggaaggtgcacctaccactgccttaataataagggggtgggagagaggctgtctcacccagc

SEQ ID NO: 235116 - DNA, 438 bp, Homo sapiens
cactgcttcattctagcttcactctttatctcactcctcatgattcagctcttattttctgggggctgggaaatttggttataaagtattggaaattatgtcacagatgttaacaaagctaggagtggagtgctctttttagaaaaatagcagaagccagccaggtgcagtggctcatgcctgtaatcccagcactatagtaggcccaggggagtggatcatttgaggccaggagtttgagaccagcctgaccaatatggcgaaaccccgcctctactaaaaatacaaaaattattagccaggcatggttgcacacacctggggtcccagctactcaggggcctgaggcataagaattgcttgaacccgggaggcagaggtcacagtgagccaagattgtgccactgcactccagcctgggtgacagagtgagactga

SEQ ID NO: 235117 - DNA, 336 bp, Homo sapiens
aggagttcaaggctgtggtgagctatgattgaaccactgcactccagcctgggtgacagagcgagacatggtctcttaaaaaaataataaaaataaaaaatacctatgcatatatgtataaaatacacataaaatatatctatagaaaaaagaaaactgtgctttctatattttctacagagaacatgtattaatttcctaaacagaaaaaaatagaaattatttttaagatggtactatgaataaactgggtgagatgttcttggggattgaagaagggcttgggatgggaggtggagaagaaagctgggtgaggggaagggtagcgggttgctg

SEQ ID NO: 235118 - DNA, 410 bp, Homo sapiens
ccttgtcttcatagtttggagacataccactgtcattggagtagaagatctgctgtgttatgtacttaccatgggagaaagggaggaagcttcctgggtttcaattcccactcagagccaggtgtggtggctcatgcctataattccaccactttgggaagctgaggcaggaggacttcttaagaccagtgtgggcaacacagtgagaccctgtctctacaaaaagtaaaaatttagccaggcgcagtggtgcaagtctgtccctcctcttgggaggctgaggtgggaggaacacctgagcctggggagattgaagccacagtgagccatgatctcaccactgcactccagcctgggcaacagtctaagaccctgtctcaagaagactctgtctcaagaagaccctgtct

SEQ ID NO: 235119 - DNA, 207 bp, Homo sapiens
caacccccgccccgtcgcccgccaaatacagcagatggagctaagagagagaaaactatattttgtttatccttacaagccaaaagcttgatgttgcaagagttggagtagtttggaaaaaatggcagtaatcctgaatgaaatccaactatctaatattccttttcctcaataaaaaattagtgatttttagcccctttttccagc

SEQ ID NO: 235120 - DNA, 518 bp, Homo sapiens
gcactgggatggggcagtggcctcccatctgtccccagaggcagcagctggctctcctgggcaggctcttaaggcaccgctatacaagtggcctgagggtcgctccttccttgctgacagccctggtgcaggacgcactgtctgcagcttctgtcacctgcaccacagacattgggttgagggccccctttccaggcactggagggacaatggtgaagaggtccttgccctgtgaagccttcactcttgtggtccagggaaagaggtagctgataggccatgagacgaacagagaagaaattgcttgtgacaagtgctttgaaggaaggaaaccgtgaccagaaccttctctaggctgagtggtcaaggatgaggggattcctgagctggaagcggaagactaagaaggggctggtcctggtacagggggacccatgtggctggggggtggcagaggctgagcctgcggaggggcctggggaaggagtttgcatttcctctggattttgagcacagtt

SEQ ID NO: 235121 - DNA, 494 bp, Homo sapiens
cattatatatatatggttcatattaggtgtatttatcataattaacgttgcttgttattgccagttttaatctgctttgaaatattaaaagtataagaaggatttcataatacagtggcagttttctcctgtgaatttctaaaaaagctagatttaaatttttatggttggcacacaaaagtaacttaaaaaaatggcttcctatggtataaataatatttagtaaaacagtaaactactctactagatggagttcttgtttgcttctgaaactgttagcaactgcatgtatttgtctgccaaaacttcacaggcattttatgtgacttttaggaatataaagaattcttaaaagagcaatgatgagtggagacttagcctcaacagataatgaacctggactaattgggcttttaagggagcagagaggaacataaaggaagaactgtaaaatgaagaataaagtttgtgtaatacatgattatttccaaaat

SEQ ID NO: 235122 - DNA, 490 bp, Homo sapiens
caaacagggctgagtttccaccatttattgccacatagtattataataattgcagaagttggaagaattctagaagctgttggaggaacatgaaaactgctgttctgcagattccgctgaccattacagtcatatggagatgacagagggtgtgacagatctagatgtggccatggagggaatgtgactaaatttaagtaactttctcccagtaggcactcaggagagatgagttgaatggaactaaatggtagatagagccacacaggagaagatgttttgccataaaggcaacaatggtgaaatgaatatctgaatccaataaattaattgctctaataagtaaatggcctctgtgggctactcaaaggaactttatctttgtgcatttaaatgatgatatctaatagagtcactgtccctgagctaactggcagtattactgaagagttgtttttggactgtttctatgtgtagtggaaagtatctt

SEQ ID NO: 235123 - DNA, 646 bp, Homo sapiens
ttttgtggcaactatttctgcattttctgcatttctttctgagtctgctttgaaatgtttttatctatctatctatctgcctacctacctacttccaatttcgatgtccaataatatggtgattatatattatagagtattaactcactggcatattaagtgaccacaataaatgcaaatgaaaatatcatctgctgtgtagctccatggaacagcacatctgaaacatattaagtgaccattccgtatatttaattatagtctgaaaaatttatgtaacatgtggataaagtttagacattttctcaaaaagaagtaagtgaactagaagttcttaatggcctaatatgtgctggatttatctcatttaacccttagaacagtcctgtaaattaagcgtcattacctccatctgaagatgtagaacctgagtctcaatggatcaaataacttgtctaaagtcacacagctaatattaatataaaggtacagccagagttctaggttggtccaaaagctggaatctctgctcttttcattatgccgtgctacgtttagagaaatctaagcaatgatagacttatgtaaagggcttagaattgtagcattttgggttaaaaataaaaataaaagtaaatataaaaat

SEQ ID NO: 235124 - DNA, 416 bp, Homo sapiens
gagacagtttcacccttgttgcccaggctggagtgcagttgtgccatctcagctcactgcaacctcagcctcccaagtagctgggattacaggcagccgccaccacgtccagctaattttttgcatttttagtagaggtgggatttcgccttgttgagcaggctggtctcgaactcctgacctcaggtgatccacccgccttggcctcctaaagtcctgggattacaggtgtgagccaccgcgcccagcccatggtgctatttcaagtaaaagaaatgagagaattatgaaaaaactttatgaaaatttcttgcctctctcactctccgcttcccatctcttccctctttccacactccagcaggagttctgttctgtaaatgcacatctaattgtatcccttctgtcgtcttctc

SEQ ID NO: 235125 - DNA, 385 bp, Homo sapiens
gggcagcaagagcctgtggctgtgactctgggcatcacgctttaaccttggtaatttctagacacctggattagtccagatcggttctttatagttgtgtggttgtcttttaacagttctggtatggacaggcaggttgtgccttatgccaagtgatacattgactttgtgggtgactgtgcagaaaaatattgaggtctctgaacacctccccaataaatagcaccttattcctcactcaaggtttgaacaaattgaacaaacaaacaaacaaaaataaagataggggtgcacaaatctttcgctacggcatcaagccaggcagagggacctgactgtgctctgctacctggaccagggcaggcggtgccctgcagggatggag

SEQ ID NO: 235126 - DNA, 512 bp, Homo sapiens
aagtttttatgttaacatacatatgttttatatagtatgaacatacgtatgttttatatgttaaggtacataggtttcagttctctttggcatatacctaggactggaatggctgggtcatatagtcactctatgtttaaccttttgaggaaatgccaaattgttttctatagcagctgcaccattctgcatttccactagtattgtataagggctctgatttctccatatcctccccaacacttatttttctgttacttttttcattttctagtagccatcctaatgtacgtaaagtggcatttcattgtggttttaacttgtattttttgtgattactaatgatgttgaaccccttgttatgtgcttactatatatttgtatattttctttactgaagtgtcacttcatatgttttgtccattttaaaattgggctgtctgtctgcttaatgaattgtatgaattctttatatattctgaataaaagatctttataaagataggtgattt

SEQ ID NO: 235127 - DNA, 381 bp, Homo sapiens
atcatcttgattactgttgctttgaagtaggttttaaaatctggaagtgggatcctccaaatttgttctttttcaagattattttggctatttggggtcccttgagattccatatgaattttaagattttttttttctgtttcttcaaaaatattcctttgggatttttttggtttttagtggcaggatttcactctgttccccaggctggcctcgaactcgggcttgagtgatcctcccacttcagccttccaagaatttaggactaaggcaaatgctacaacacccaacttgccactgggattatgataaatactgcattgaatctgtaaatggctttggatagtatggacattttaacaaaattaaagtttttcaatc

SEQ ID NO: 235128 - DNA, 85 bp, Homo sapiens
ttatctttaccccagaggcacacaggaccaggcatgttgtatacatttaaaaatatcaaattttaacattacaaaactggccaat

SEQ ID NO: 235129 - DNA, 550 bp, Homo sapiens
ataataacaggcatatctttggatctcatgcattttggagacaggccatcctcacctgtcctagagtggtgcttgtggaatcactgtggtgaggcacaagcgcagcctcttcttggtcagagcctcatgtgagcttgttgtttctgcctctcatggtgtttctcagcctagacttgccagccaaggcatggggcactctgaggtcattccaaggggagaaagattgctaagaaggaggccttgggtggatggagacgagagagcagatgctgagctgctgggcgccatggaccacctagggtttcagccaagggctgggctcttcctaggcccgagcaagatgagttcattgttggatgcacttgaacttcaggaaagtgctgacaccagcccagagcaggggcctcattgtccctccccacctcctctcagtgggaatgtggcacgtcgttgccagctgcgaggtgttcctggaatgatggtgtccacagctggagcaggtcccggtccctggagacagttatcaggtctcagggctccagtcaatgca

SEQ ID NO: 235130 - DNA, 360 bp, Homo sapiens
catttcagacaaagggaagtcataagttaaggaaggcgtattggaaattatgtgtgtatagggaatggtgaggtcaagtttgattcagagatacagtgctaggtacagtggctctcatctgcaatttcacctccttaggaggctgaggtgagaggattgcttgagcccaggagtttgaggctgcagtgagctataatcatgtcacggcattctagcctgggtgacagagtgagaccctgtctcaaaaaatttagtaaggaatacagtgtttgagaggtagtaggctatagaatttagaaatgtctagaccaatgcttgacacttaaaagaagcctggtgaatatttgacaaattgatgga

SEQ ID NO: 235131 - DNA, 839 bp, Homo sapiens
gttaaatgtaggagagtcccaaaatttattctcaatgccatttaagaggagaaaagcatcactaaccctcctaggtacatagcagggacactgtaactacagcctgcatgaatgaataaatattgagtgttgagtggtgagtggttcttacctatgctgcaggcacagccctgtgctgcagtccacacaagtcctgtggaatcatctggatgcaagtgcttggaaagggccaggggaaggctattgtctgctcgcacaagttacttgttattgggcagttgtaacccatactgctataagcattactgcaaatcccataacaaattttacgatgaaaatctcatgaacttgactgtttctgcaattttgagccagtgatccactcattccaaacaacattgacttcccaagcaacagaatctgggtagtccctgggagtttgctctaatgaagcttgaactgtgtcgcaaactcttattttgccttttaaaagaaaagaagccagttggattcatttggtagtagatataggaaatctgttaatagtttttcatgtctttattgaatgatcataatttaaaatatcctcaaaggcggccttccaaacaccagaatgctggatttttttcttctgcattcatcacaagtaacaatgttgagtttattctctcgtctgtaacctcagcatcttttactcatgctaaaaatcctttgtaaaatctaatgaaaaaattagatttcatttattcagtagatacttaaattttctaagtattgtcaataaacatttggtggtgtgtagtattttccctcactacattttttaggaataggaagca

SEQ ID NO: 235132 - DNA, 430 bp, Homo sapiens
tgggagggacccagtgggaggtgattgaatcatgggggtggtttcccccatgctgttctcgtgatagtgagtgatttctcaagaaatctatggttttataagcatctggcatttcccctgcttgggttcattttctctcctgctgccctgtgaagcagtgccttccaccataattgtaagtttcttgaggcctccctggccgtgtggaactttcagtcgattaaacctcttttctttataaattacccagtctcatatatttcttcatagcagcgtgagaacaaaccaattaccataagtgggaaaagaaagtatttcttttctggtagaaccagatctagaaaataaatctttttctctttcatagtttatactacatgttgtctttttaaattattttctcataaagccttggatatgtttaaatgta

SEQ ID NO: 235133 - DNA, 450 bp, Homo sapiens
ggtggaattgactagaaatgaataagatgcccccagtggtttcttctcagttaataagagaatttagcattcatgttattcttgtcatggaagactgagttccagtttttattaatacccattgccattcattgattctcccattcttctattcaaaatgcctttatggttaccatgcactaggcacatgccaggtaaaggggatataaacacaaatatgacagtctcaattattgagatgcagagaaatgcagtaagcaagtgagtacagagtgggataagtaccaggctagatctgtgcacagggtctaactggaacacactgagaggcacttattctaaactggggcatacaaagcagaaaagcttgctagagtagatgctgtctgggctgaattctcagggacaagttgcagctatgaaggcaaaggaaggaaggtcattgagcca

SEQ ID NO: 235134 - DNA, 966 bp, Homo sapiens
cgtggcctggtggccgggacatggtgtgtggcctggtggctgggatgtggctgtggcctgtggctgtgaacgcagcgcatggcctggtggctgtgacgtggcacgtggcctggtggctgtgatccctggtgcacatgagggagttttagttttgtgcttgcgttcctagtcatgtcataatccagctcagacctggacatgacctcagcccaggccgtgcccggtccccctactccgtggttcccccgtgggactcgcattccttcatttttatcccgcgttgcacgttcctccaagtcctgttgtttcctcggggccatttttaactttctgaaaagacttgaggccatctgtgatcttccaggacttccttttatgtatttcttgttaaacttcatctgcagagcactgtgtggctataatgtggcacctgctgtgtgttatcccgtcgggtgaaacgctacatttaaatccccgcttgtgaggggactgaggggtgcgcaggtgtttcctggtgtgtacaccaagaatacatcttggcgaggtttctctagggtgcatgcccaggaggaagtgtggctcgtggggcaggtggacgtacatctgttcctggaactcccccaactgcaggcccgagaacacggtgtgaggatcgctggctcctgcaggacgtggacgtggcaggggcctgggatctggggtctggcctggggtctggggtctggcctggggtctggctcctgcaggacacaggcgtggcaggggcctggggtctcacacacaggacagcaccgcgctgcatctccttcctgcgtcataggggatgtgggtgaggagtgcctctccagtgaagctttataaccctaaaaagtattgtctgcccctaagagcgtttgcttatgtgcgttctgtctcttcatgtttatgatgatataaattaaaaccaagacattttaaattatctat

SEQ ID NO: 235135 - DNA, 552 bp, Homo sapiens
aaccagggtcaccagaccgacagggaagctgctatagaacccccaccctcttgtataggtgaggaaactgaggccatagcgctgacactagccagatgcagggaaggcaaacggaaggattaagaaagccccagaaggatgccttgaggaatgtcgggtaggagcgctcgtctgaggagctagaaggctaactccagcccgctacaatagcccaccccaaaggagtctgcacacctggaacccacccctacggcgcgccctcatgagggcgctcccagcgcctctaaccctccaagtagcgagagggttaagcttcctcgcagtacttgccgcagtaagtggaaaggaaagaagtgtcaactctgttctcaccacagcggggctgtcggatggcacctccccccgccccgcgcaccccgcccggcctgctcccccgccctcccctcggagcgcgcgcgcacacacctcccaccgctttgcccaaattattttcgatcccgggagactccggatgccagacgcgctcggcggcggcggcggcggcggcggccg

SEQ ID NO: 235136 - DNA, 240 bp, Homo sapiens
tccccaccacaccccacccccgcacccggccgactccagcaagaggcttcccgctcggtgtgcagcggccacagtggccaggaattaaaatgcagcgaggaggagccgggcgcgtcagcaccgcgtctccaggagcgcacggcgctcacggccgccgccgccccgcccgcccggagccgcggggccagcgagctgaggagcaggtgctcggagcccagccgcgccagcgtcgcgcggccg

SEQ ID NO: 235137 - DNA, 171 bp, Homo sapiens
taggctctgccctcatggagtttatattctagtgggagaaacagagaagaaagatatagacaaggtaaataatcaaggtaatttagtaaaataagcatgaagaaaactactgtggaagctgtaagggataaatttccaaaatatataaggaattcctaaaactcaatagca

SEQ ID NO: 235138 - DNA, 326 bp, Homo sapiens
gcagctatcacttccactttcccttgccccatacaaccgctgtcagattccaacccagtgcttctaaaaaggtattcttgggtttctgggtcctggtggtctttaggcaaccaaaagattcagagggtcccagtagggagccagagttacactgactgtgaagatcctggctgtctctcctggggaccagggacaacaccccaatacatgcagaaatgtgcacgcgagcacacacacacacttaggggtaggaaattattattaaaactatttcactgtttttttttactgtgttctaatgtgaccaataaataattttaaattac

SEQ ID NO: 235139 - DNA, 931 bp, Homo sapiens
gaggggagaactgttttattaccctaaaatagtgagaaccactgttcaaactaactagctaccaagtgacttctaactcatgaagaaaatttgtatttaagagcaagttcaaatgtagcaggctctcttctgagagtattctggataccacggaaagtttcatttatatattgcttacaagtacgtggtaatttgaacttcagtaggtgatatgtgcaaggagaaaaagtaggtcaaggagaaagttggttagtgcagaggactgacttagcatcagtctgtgaaatttcattaaagtagcactaaggcctggctgtttgcttagcatgtaaatgctgcagtgtccaagaaaatgcctcctatgccttagaaaatttgctgaaggcttcctgttactggtggagtagaaaagcaatagcctttgagactccaaagagagtagcccccttagggttttcatactgaagaaccttgtggagtactgtgaaacattgttgaactttatgcaaattatactgcactggattttaagattttatggggagagagtagagcagagtggggaagtaatgataaaagataaatacgtaaacttgtactatattttaagcaaggaatgaaacaaattccctaacaggaattccctgtcagcactgtgaagtttggtcaagttctgcctaatgggttggcttgctgattcctcttaaacctctaggaaatcctttctaagacagcaaaacaaacgttagtttgagtactactatttcaccaccctgctccatccccctactctcaacgaaagaaaagcattcccaaactataggcaaaagaaatgtgttctcagtccattaatttttcatctgctatgatctctgttcacagttttagcacattgcattattttgtaatctgatagcagaacatcaggaac

SEQ ID NO: 235140 - DNA, 410 bp, Homo sapiens
agctgtaatgtttgcaaaactctggggttctgaatgtagaaaaacacaaccccagtttaagacgtcctcttccgatccctcagtttcttgctgttcatacttgccatctccatctctgtagtcttcctgattaacaccttccagcttcagatctggaagtagtaatccgagcactggactggaaatcagatcagacctgtttcacatttaaagctttgcctttgtattagttctgtgacaagtcacttgacctctctgtggtctcagtttatgaaattggaaggagattggttaatatgggaggatctccatgagccttttctgttttggtctgctaggattctaaaagtattctctgttcttaatactgtacttacaatagagtccaccccaactttatttattcatac

SEQ ID NO: 235141 - DNA, 883 bp, Homo sapiens
agtttaataagggttttctttttttttctgtttctagcctaagataaaagtggctgcatatgagcacaaaatatgcagatcatagcattccaacaaaaatgtaaagaaggccgggcatggtggctcatgcctataatctcggtactttggtaggccgagtcaggaggatctcttgagcccagcagttcaagaccagcctggggaacatagtgaggccccatctcttccaaaatttttaaatatgaataaaactagaaatacaaaatctgtgttaagaaagctctcaaactttaccaaaagaccagacctaaataaagaggggccaggtgcagtggcttacgcctgtaatcccagcacttcaggaggccaacgtgggtggatcacttaagccaaggagttcgagaccagcgtgggcaacatgcgaaaccccatcgctacaaaaaatacaaaaattagccaggcatggtgacatgcacctgtagtcccagcactcaggaggctgaggcaagaggatcactttgagtccaggaggcagaggttgcagtgagctgtagtcttgcccctgcactccagcatgggcaccagagccaggccctgtctcaaaaaaaaaaaaaaaaaaaaaaaaaaaaaaagtgtaatactgtattccttgtaatactgtattcctcgtttggaatgtttactgttgaagatttttttattttataaacattttagctcgtcctttgtgttctaggagttacaggtagagctatgaacaaattaaggtcccctcttttatggtgcttatatcctattaggtaaattgcgggggagggggttgttgaagagaaggcaggaaaaatatagtaaaatatatagatgtcagatgatgagaagctct

SEQ ID NO: 235142 - DNA, 517 bp, Homo sapiens
  misc_feature (451)..(451): n is a, c, g, or t
ttcacctttgcatcatcttcaatactggaggtttaccttgtgtagaggccttgagagagttctaatctgttcagtgcattttctgcaaatgcagctccgtagaatacattctcgccatgttttcattgtgcgtgaacactgtgcgtgtgtgtcttcctcagtaaatgaagagatgtccttttcccacatctgcattgtgagtgagaacatttcgccagattgtggctctttaggcgcggcacacacgtggtttttgatccgtctcatcaaaagacttggaatgtccatcgcggtgcggcagaaggtggtggttatacagctgggtgcacagttgcccatcacagtgatacgtgcttagagagtaagcttctgggccgctttcttagacggcccctctgttttgcttgtaactggcatgcccgtgtgaccacgtttgtgtacctgggtgtgnatgcttgtgaaaatatgaatgctgttgctgcctatcttatcaagtaaaggacctattagtgttgtc

SEQ ID NO: 235143 - DNA, 242 bp, Homo sapiens
caaaatcagagaccagcacaggtaaggatcttattaaagttgtatagatgagagatagttatggctggaagtgaggcaatagcagaggagggattgagaagagtgagattctgggtgtatttttaagatagagtcaatatgccttgctgataggatggaatcaggagaagaaaagaaggcaatgttgacgtcaaggatttgagccacaaaaagagacctctggggatgactatattatttaa

SEQ ID NO: 235144 - DNA, 1248 bp, Homo sapiens
  misc_feature (1110)..(1110): n is a, c, g, or t
  misc_feature (1162)..(1162): n is a, c, g, or t
tccatttctgaatctcaattattttcatttctcctattcagtatagtttttaatagatagcattgcattacatggatgtcccttatttaatcaactgtttggtatttcttttctgtttttcaaaatctaatgaacactccagtgaatatccttttgttcgggatttatctctagaaggaagattactggctaaaaatatatgtacatttaacattcatatacatatctatacacacttttttttgagacagcgtttcactctgtcacccagactgaaatgcagtggcatgatcattgttcactgcagcctctacctcctgggctcaagcaatcctcccacctaaacctcctgagtagctgggactatagacacgtgccatcatgccagctgagtttaaaatctcgttttgtagagacatggtcttactatgttgcccaggctggtttcagactccttgggctcaagtaatcctcccacctcagcctcccaaagtattgggattataggtgtgaaccactgggcctggcctatgtatacataattaggctatactgtctataaaatttggctatctatagtcaaattattttatatgcatatatccaaatatacctataaatagccaaattatacatatacagccaaattttatatatatatatatataaatgttatatatatatagccaaattatataaagctgtatatatagtcacattatcctacaggaaatgatgtaaatgtaccaatttacattcctgtaacagggcattagaattccctttttccagagccttgccaacactggttatttataaccctttcaaactttgtatgaaagttgtatgtattttaagataaatgaaaacttatattgatttgtaattatttattggtataattgaacacctttccatatctttattgtactaatgtgtatgaattccatcttaatagttttgctaacttgtccattgaggggtttcctactgatttgtaatggctctctatataaaaaggatgttaatttttgcctattttacagtaatagtacaaatattctctcatgttttctattagtcttttaacctttgtttagttttttttcnttccttcataaatgctaaattttatgtcatcatatctttcagtccttttctntattatttctggctttgatggcatgcattgaaagcccttttccaccccagagttatcaactcgttggaaaatgatgttgaaatgtc

SEQ ID NO: 235145 - DNA, 537 bp, Homo sapiens
caaactggaaacaactcaaatgtcttatagaagataaatggataaacaaactgtggtaaatccatacaatggaatactattcagtaacaaaaaaagaacaaaatactgatacacataacaacatggataaatttcatttctgttaagtgaaagaagccagacgtaaaagatacgtactgtataattcttttatgtgaaattctagaaagcgtgtaagtatagtgagagaaagcaggtctgtggatgctcacagccaggaaagaaggggttacctataaagggcacaaatgaactttggggggtgatggaaatatcctataccttggtcgttgtggtgattgcacagctacatacattgatcaaaactcaccagacgtatacctaaagttggtcaactttagcctatataaattgtacctcagtaaagctgatattaaaaatcaatcacatggctatacagcagtgtgaatgtacttgatgccactgaactgtacaattaaaatgaataaaatggtaagttttatgtcatgtaaaaat

SEQ ID NO: 235146 - DNA, 459 bp, Homo sapiens
cctagaaggttggaaagtgtctgggactataagggttaacatgcataattgcaaagattgtccgaaggctgatggaaagcagagactgaatgggattgagaacagatgcgaagcttgatttaaattacattttattggatgctgcagccttaagagacgtgactgctttacagtttgtttccacactgtgggcagctgctgtctgttctgtgtccacagtaggatcctgcccaataaggagcagcctccccacctcattgtgtttgaggcttggcgccttcctcttaactgtagggcttgagtcaggaacatggcttgactcgcagtggggctgctatgtatcctccctggcttccagccaaaatcacattggtagattcaaaggggccaaatttctttcccctctatctttccctttcccctggttttggaaatagagttttctgtctactgatttgt

SEQ ID NO: 235147 - DNA, 351 bp, Homo sapiens
tactatgagccaggcagggattttatacatttaatatgtattccttccttttatccactgaccctactttatggaagaggaaactgaggcatctcagtgactgaagaattttcccagatcacatacagagtaaacagagaaaccaggatttgtctccaagattctgcagtgctgccccaaacaactggctgccctgagagtgaaagagggtcaaggaaacagagggtatatagacagtctgtcaggaagtttggaagaggaagaaagctagattgttagccaaagaggtcaacatctgaccaaagtttttttaatgggaggggtcattaaagatcttctaactcagtcctt

SEQ ID NO: 235148 - DNA, 544 bp, Homo sapiens
tgggtggtgctgtggcccacaaaatccagtatggcccatcattgtgtctatattttggccatttggaagatgaaagaaaagggagaggtgggactgcccttctgttaatgcacaacctggaagttggacacattgcatctattctattcctttggctataacctagttgcacttatctgaaaaggagtttgaaaaatctagtctttatcctgtaaagtcatgggctggctactgccatggaacaaggggagaatgggtattgggagacagctctcagtctgtctaacaggtggtgaagagaaagtgggacttgagaaggagaaaggggagggaatatggtaaatttctgggattggacagagatagctccctatggctaaaacaaagagtaaggctagcaataaagctatcattggagaagctaggcttcattacagttgttaatatctagcaaatgcatgacgagctagacagatgaaggaaaatggtgcccttcagagatagaggccttccagatttctgagatagaagctctccaggagga

SEQ ID NO: 235149 - DNA, 474 bp, Homo sapiens
ttcacgtcaccttgatgaggggactcgaaggtgaatttgcactgggttccctttcagccaagcatcagtttgctccaacctcttgagcacacagaagttgagaaaaattgttattttagcaagaacactagaggactgtgctgttctctgaaccacgttcatctgattatgcatttgagggtatgaattaatccacgacacaggaacactgaataagttgtgctttgccagtcgggctgcctgtgttttatctgaacaaaacatctgactttaaccccaggcagatttctcttcaggttgtaattattctggaacaaacagagaatttgggaaggggcatcccagtgggaacaatgatacctcctgtgtggaaggattcccactggaaattttcaaaacacagtgtactgaagttgacccggataactgctggctgcaatccagcttaccctcttttatgtagatgagttctca

SEQ ID NO: 235150 - DNA, 153 bp, Homo sapiens
gagacaggcatgagccaccgtgcccagcctgaaaggataatttaaatccttaatcagagcgtactcctcctctacctttatcggcttcttattcttccaaattccttgtccatggcctggctacctcttagatcccatccaataccactttcc

SEQ ID NO: 235151 - DNA, 392 bp, Homo sapiens
ctggtctcgaactcctaacctcaggtgatccacccgccttggcctcccaaagtgctgggattacaggtgtgagccaccacgcctggcctaacatcactgacttttcaatcctcacaatttaaatctgacaaaatgaagagaactattttttaaaattgtgttttatgttcattgacaattaagtagaagtcattttttttagttatgtatctatgattatcaccaatcttcatgtacaaaacagtttctatctctggacctcattatataataagaggaaggatagcattgttctaaatataggtataaagaacacttacgacttgtgattgattaggctatcatgaaaataaagtattttactactgtgtgatcttatgaaggctgaatta

SEQ ID NO: 235152 - DNA, 957 bp, Homo sapiens
  misc_feature (874)..(875): n is a, c, g, or t
  misc_feature (921)..(921): n is a, c, g, or t
gatgtgcattacagagttactgagagttttagagaaaaatgatagtcacacttcatgcagagtgaactggatagagatcagaatgtattttgtataaaatgttaattctcataatttttgaagcttagactgcctgtttgttacagtatagatgctgttgtttccattttcagaagactgtgcagtctttgtaactgatgaagagcaaggctttgtctctaattctgcccagttaaagtgcaggcgttaggctaaagctgggacaaacctggagcggcttcattggctttcctacttcttttgcatcccaaagcataagcttaaatcgtctcagaaggacaaggtccgccagtttatggcgtgcactcaggctggcgagagaactgctatctactgcttaacgcagaatgagtggagactagacgaggccacggacagcttcttccaaaacccagactcgctccacagggagtccatgcggaacgctgtggacaagaagaagctggagcggctgtacggcaggtacaaagatccacaagatgaaaacaaaattggagtcgatgggattcaacagttttgtgatgatctgagcctggatcctgccagtatcagtgtattggtcatagcgtggaagttcagggcagcaactcagtgtgaatttagcagaaaggaatttctagatggcatgacagaacttgggtgtgacagcatggagaagctaaaggctcttctgccaagactggagcaggagctgaaggacacagccaagtttaaagatttttatcagtttaccttcaccttcgctaagaacccagggcagaaaggtttagactagaatgctgtgcgatggaaatagtgtatctgaagggtaatnntagatcttgacacatctaatgacatcacaagatcatcaggacactngactctgtgacttgacagatgcgtgttgctactcat

SEQ ID NO: 235153 - DNA, 658 bp, Homo sapiens
  misc_feature (604)..(604): n is a, c, g, or t
  misc_feature (628)..(628): n is a, c, g, or t
  misc_feature (651)..(651): n is a, c, g, or t
caattatgtagtttgagaattcccaagatctacagcttggaagctgaagacccaggaaagccaatgtgtatatccagtcttagtctgaagacctgagaaccagaaaaccaatggtgtaagtcctggtctgagggcagcagaagaccaatgttccagctcaagaagtcaggcaagaggacttcccttttactcagcctttctgttctatctaggtctctaattgcttggatgagcaccccacccccacattagggagggcaatattcttttttttttaattattattattatactttaagttttagggtacatgtgcacaatgtgcaggttagttacatatgtatacatgtgccatgctggtgtgctgcacccgttaactcgtcatttagcattaggcatatctcctaattctatcccttccccctccccccaccccacaacagtccccagagtgtgatgttccccttcctgtgtccatgtgtcctcattggtcaattcccacctatgagtgagaatatgtggtgcttggttttttattcttgcgatagtttactgagaatgatgatttccaatttcatccatgtccctacaatattcttatacnatctgattcaatattaatctcatncagtacagacataccgagattgnttggccc

SEQ ID NO: 235154 - DNA, 605 bp, Homo sapiens
  misc_feature (551)..(551): n is a, c, g, or t
  misc_feature (575)..(575): n is a, c, g, or t
  misc_feature (598)..(598): n is a, c, g, or t
caattatgtagtttgagaattcccaagatctacagcttggaagctgaagacccaggaaagccaatgtgtatatccagtcttagtctgaagacctgagaaccagatcaagaagtcaggcaagaggacttcccttttactcagcctttctgttctatctaggtctctaattgcttggatgagcaccccacccccacattagggagggcaatattcttttttttttaattattattattatactttaagttttagggtacatgtgcacaatgtgcaggttagttacatatgtatacatgtgccatgctggtgtgctgcacccgttaactcgtcatttagcattaggcatatctcctaattctatcccttccccctccccccaccccacaacagtccccagagtgtgatgttccccttcctgtgtccatgtgtcctcattggtcaattcccacctatgagtgagaatatgtggtgcttggttttttattcttgcgatagtttactgagaatgatgatttccaatttcatccatgtccctacaatattcttatacnatctgattcaatattaatctcatncagtacagacataccgagattgnttggccc

SEQ ID NO: 235155 - DNA, 337 bp, Homo sapiens
gagtgcttcttcactacagcttcatctgccctctagatgttatgccacaactagctacgaaggatagcagccctatgttttgctttggaaaaggccagtgcaatgctgaatatcatcaggaatggtaatggaaactgaagagaaacatagccctaatcttatattggaaactatagtgcattcaccccctcagagcccttgcttgtaggttttaaatctctgactcacaggaatgctataatgaaatcagaagtaggaaggacaacttctgattgtccttctgacctgattgtcagcctgaccaacatggtgaaaacccgtctctactaaaaataca

SEQ ID NO: 235156 - DNA, 675 bp, Homo sapiens
tttgatgtttgctcagaattcccctgtaggcagagaggagggttccccatgcaggggatttgatgccgtctaagttcacagtttctattagggcttatcattatgtattatagccagatgttaatctgcctgttttccccagtagactgtgagagatcagggagcaacacatctgcatctggcaatagaggaattttggacaggggtgtgtgtaggagttaaccagacgtgggacatatcatgataaaccagggagtaggaaagaaaccctgaataaaagcagggcccagagagatggaaaggaagagatggagctttttaggatgtggaatctgtgtcaatctctacaacgaaccagggaggagtcaagaacgagctctcagattctagtttggacaaccaggtagattcatggtaagaccttgatcagagctggggagcataggagaagatgcatcatggatggggaaaaccgggatggtttagttctgaatggattgagtctaaggtacctgggggtctggagtacagatattctggtccttttagtgccacaggctgagctcgtctctgtaactactactgggtcctgatggtctgatgtcttactgactcgtttcctgtccttgagtctcacattttgtagtccgcccttgactttgagctctagatggg

SEQ ID NO: 235157 - DNA, 2805 bp, Homo sapiens
  misc_feature (1686)..(1686): n is a, c, g, or t
agatcaagcattacaagcatcctacaagcctgcttatgtctcctcccaatcatcacttccttccttctcctaagagataacctctatactgacttctaacagattaatattacctatcttttacatttatataaatggaatcacatagtacatatttcatgtatgcattcttgtactaaacattctttgtgagattcatttatgttgtggcacataacagtaattttctgatttccagtactgtatagtatgctattgaatggatatacctgattttatttatctgttttcagctgttatgaataatggtgctagaagcattcttctttacttctcttggggcattcatgtaggcatttatctcagagcagaatgaatgcatacttcagcattcttaatttcagttactatattttttgattctagaatttgcatttggttcttttttatagtttccattcataagatggagttctacatcttgttaacacatttctcaaatatgttaatcaaacttattttaaagcatttagctcacaactccaatatttggatctatatgtaggcctagttctattatctgtttatttttcccttggtcttgtctcttggtatgcctgataagttttgagttaatgatggacattgggtatcaaaacttaggaaatattttgaggctctaggtggtgttttcttcctctgaagatataaaaccaaaaaataagagaaataagtgcaaaagactaaaaataggatggaaatgctaccaatattaggtattagtccacggagttcaccatcagagtaaaaggattccagaaagagagactagaagaaacagaaatataagatttcccaaaattcaaggacagatattttcagattgagatagctcatcacatgccagaacaactaatgaaaaagacttagcactgtgaaattttagaacaggaaagataaagagaagatcctttaaacttccacaatttaaaatacaatttatgtacaaaggattgggaataagaatgatatctaacttcttaatagcaatgttagatgatagaagaccttgaaactacctttaaaagtctaaggaaaaattattatcaacctaaagttctatatgcatccaatctatcaatcaaatgatgcagaatgaagatacaaggcctcaaaaatttatttacatcgtttctcagaaaatatctcgaagatattctccacaaaaatgagtgagtgggtgaagaaaaagaagtatataggattcaagaaacagaaaatttcatccaggagaaaagcaaagagagaagctgctccaaaaaagtaaagtcttaatagcaaatacatggaatcaacccaaatgcccatcagtgatagactgaataaagaaaatgtggtacagatacaccagggaataatactatgcagccataaaaggaatgagatcatgtcctttgcagggacgtggatgaagttggaagccatcatcctcagctaactagcacaggaatagaaaaccaaacactgcatgttctcactcataagtgggagctgagcaatgaaaacatatggacacagggaggggaacaacacacactggggcctgttggggagtagggaacaagaggagggagaacttcaggcaaaatagctaatgtatgctgggcttaatacttagatgatganttgatagatgcaaccaaccaccatggcacatgtttacctatgtaacaaacctgcacatcctgcccatgtaccccagaacttaaaattaaattaaacttaatttaatttaaaacaagaaagttaagtctttaagaaaagaaagcaaaaggatttctagaattaagcacaaaagaattcaaaggatgactcttggacagcacatctataggcagactgtccagagtttagcagaaaatggaaactttcaggagaaaagtttccaggaaaaaaatgtatctgatagagtatgatgtgtttgaacatgaagaataaaattgattgtggtgttgtagtgctaatggaggatttagaaagaattaatgttagaagtgtagaaaacctacaacaaaacaaagcaataatcaacatcaagaaaaacaaaaagttgtacaagagaagaaatatcgtaatatatcatgtagctcagatatgcacaactttttttttaagtagactttatttttttagcagttttaggctcatagtaaaatgaagcggacagtatagagttttcatcatgtcctttgtccccacatgcatgtagccttccccactgtgaacatgcataacagaatggtacatatgttacaatcgatgaacttacactgagacatcattatcatccaaagtctatagtttacattagaattcattcttggtactatacgctctttgggttcttgcaaataggtaaagacctgtgtctagctagtactatagtatcacacagaataggttcactgccctaaaggtcttctgtgctccagctatttctttctttcttcccctaacccctggcaaccactcatttttttaaattgtcttcctaattttccttctccagaatgtcatagttaaaagtatatagtatgtagccttttcagattggcttctttcacttagtaatacgcatttaaggtccctccatatctgttaatgccgtcatagctcaattctttttaacaccggataatattccattgtatacatgtaccacagtttattcatccattcacctattgaaagacatcttcattgcttccaggcttttgcaattatgaataaaactgttataaacat

SEQ ID NO: 235158 - DNA, 347 bp, Homo sapiens
tcaaaactgcgtggatgatgttagtaggcagatgccatggatgctgtgaaaggtcctacaatgcataggtcagccccccaccacaaataattatctaactcaaaatgccaataatctccagatttagaaaccctattcttcctaatgaatagtcatattttaccatctttaaaaattgagagccatgtgacagaattattttggcattccctttctcagaagaatgttaaacatattttgctcactctttctgagtgatttcaccacagacactacttgcatctgttcccacttaactttttagcatcaaaccaaatatagcatttcaaaaactagttactttttct

SEQ ID NO: 235159 - DNA, 512 bp, Homo sapiens
actttgacactttgcttagaaacctcctctgccaaatatccaagttcattccttacaaattctgctttccatattactgtagaacacaatttagctaatttttctgccagtatttgaaagatccacttccctcaaattcccaagcatgttcctcattttcttccgagtcctcatcagtgtacttgaaaattcatatttctagcaactttctgtgtatgatgatatatgtattctctgcatctgatgatacaggctttctctgacttcttcattttcttctgaaacctcaccaacagtaacttaatttttcaggaatgcaagattgttttcatattataaaagcaattaatgtaatttactacactaacagtgtgacaaagaaaatcttatctcaatggatacacaaatttatatatgttttaaatgtgaaaataaggaatagaatggaacttctttaatctggttaatggtatagtcataaaattctatataaaacatcataattaacagag

SEQ ID NO: 235160 - DNA, 388 bp, Homo sapiens
gtcattgtttgaagcaattgctagtcaaaccagcttcaggggatgtgcttttgtaatcaccccgtgggttcttcctgccccctgcacaaagtccattcactgagaccatggcattgcagtagagaaagtttaattgatgagagtctggcccatgcaagagaaatggagttaacactcaaatcattctctcaggcttggagcttagagtttttgtagacgatgtggtgggcagggagctatgaaatgggtgctactgattggttgaggatgaaatcataggggtgtagaaaactagcctggtgtattgactccacctctgggtgggagcacaggacaagctgagtcatgagtcatgagtctgggtgaagttagtctgaaataatctaaa

SEQ ID NO: 235161 - DNA, 502 bp, Homo sapiens
ctgggacccagaaaccctcttaccctgcacctctgtcatacttctcaaaaaaaaaaaaaaaaaaaatctaaaagactattttaaaagtctattcaggtgggtgggcaaaattctaacatgatcctcaagattccaagcctgtttcacacctgctgtgtaatcctttcctcttgagtgtaaaaaaactgtaactgtggtgtgaaattactcataaaattaggtcactaatgtgttgcctttgtggccatcaaaagggagattatcctgattgggctaaactgaatcagaggtgcttttaagagaaagggacacaaaaacacttcagctggcctggaagtaagtgatttctaggtgggccatgctgtaagctgcttatggtggccacgtggcaggaaatatatttgtatattgtcatcattcctgcctcccacatggtgcttccagtagagaggacagaaggatctcatggcagaggaaaaaaaaaaaggagtctaatttatgc

SEQ ID NO: 235162 - DNA, 395 bp, Homo sapiens
aaagttgttgggcaaaagttcttgatttaaaaataactaagatgaattaaggcaagcagtcatcgatttgaatggccccctttaaaagcaaagcatccctttattcctttgattgaaaggaagcccttttctgttgcattttaattgtgcagtttaagaaccatctgttgctggactcccacgtctctgttgtaatattcccagccacacgaaaagaaaaataaaaaataagccaggcgtggtggcatgcacctgtagtcccagctactcaggacactgaggcaggagcattgcttgagcccaggagcctgaagcaatgatcgggccatgattgtccctgtgtgtagccactgcactccagctggggcaacataatgagacccctatctctttca

SEQ ID NO: 235163 - DNA, 362 bp, Homo sapiens
actttaaatgtcctgtatgcaaaaacagtcacactggggattagggattcaacatatgaatttgggtggggagggacacaatttagtccataacactctgccttctggacttccaaaattcgtatctagccgtgagcgcctgccataagagtgctctcttgaattcctttcctttctccataagtgtgaagatggcagaaatcaataacagatgttccactttcctgatatggaatggaggaaaaagagttgctttccttcattgatcatgagatagttggtttatgctttactttctgcacagtggtcctttgtattttatggtcttttgttttaataaactgcttctctacaaagctgca

SEQ ID NO: 235164 - DNA, 453 bp, Homo sapiens
ggtgtctcacccctgtaatcctaaggcttcgtgaggccaaggcaagaggattgcttgaggccaggagtttgagaccagcctggccaaaatatcaagaccctgtctctaaaaaaataaaaataaattaggcagacatagtggtgcatgcccatagctacttgggaggctgaggtgggaggattgcttgagcccaggagatagaggctacagtgagctatgattgcactgctgtactccagcttgagcgacagagcgagaccccatgtcataaataaataaataaatacctggaacaccttgtgatgccagaaataagaaagtgtcaaaaaggatggagatttattgaaaggacactagagccaacctgaaaatgttccaaacagtccaagccagaacaatctgaacaataaaataatgatcatattggattatagattatagaataaaataagc

SEQ ID NO: 235165 - DNA, 559 bp, Homo sapiens
atatctgcacacttacttcctggcttccccttagactgtaaacatcatgagggcagatacttgcccggcacatggaaggtcctcgggagaggaagaggcaccatagctagaccagaaattctccctagccacgtgcagccccctttgggacaggactggcacaaacgaggactgctctgccatccaccgtgcagctactggcgtggtgcgccctcctggaaccccgtggtatagctgttatgatccctttcacagtagcataatcaagactcccaggagagacgcggcttgccaaggtctcatcgcccttcagtggcagagacagccttggagtcggccggcctcactccagggccagagccccgagagctccgcggctcgcgtgtctcagtgccgaaggcagaaaagccgccttggaaagtagtgtcatcgtaggctccgcgcggcgcgtgcattttagcaacagacttccaggtttccagcgcgggccaggaaggggccggcgccccgcgccccgccgggtgtgtgactttgccgcgagggcgcagccgagcggccg

SEQ ID NO: 235166 - DNA, 373 bp, Homo sapiens
aggctgcagtgagccatgatcacgccaccgcactccagccttggtgacagagcgagaccctgtctctaaaaaataaataaataaaatattgtgagtctctgatggggagcagtattgcatggtggttgagaactgaggctctgatgttagaactggattctgacttaacccactgtttgcccacatcttgagccttggtttccctatctgtaaaatggcagtattctcgggctggctgaggaaaggaaatgaggccaggcgcggtggctcaggcctgtaatcccagcactttggcaggctgaggcaggtggatgatttgaggccaggagtttgagatcagcctgaccaacatggcaaacccccgcgtccacta

SEQ ID NO: 235167 - DNA, 264 bp, Homo sapiens
gttaacctctctattaacaatggcttttcctttgaaaaggtcttaatagggctggcatccaagtttcatgggatgccctaatagggctggcaaccttgttttcatgatctagtttggtagaaaagtttcatagaaagtgtccatatagctgggtgtggtggctcacatctgtaatcccagcactttgggaggctgagatggaaggatcaatgagtccaggagttctaggctagcctgggcaacatggcgagactctgtatctat

SEQ ID NO: 235168 - DNA, 338 bp, Homo sapiens
gggattctcccacctcaacctcccaaagtgctgcgattacaggtgtgagccactgtgccggacctaaaggactctttgagcatcaaagagtgatgctgaatgtgtgatttctcctttctgagatgttatcttgttatctgtgaagtgggggatctggctgagccactaggggtttatcagatgtgtttttgaacttgagcaattgatggctaggaggctcagttttgtcatttggaaaatggagttgctgatacctcaatccttggagaacaactgcaagcactagagttcgagtggaggttgcagtgagccatgctctcaccattgcactccatctc

SEQ ID NO: 235169 - DNA, 224 bp, Homo sapiens
cacacacacatattacttcctggatcattcaggacacaggtcaaatgtcccccacaccataaagcctgccctaacttcccaagtcagagtaagatcctcccttctcactgctcccacagtacttggctcagtgtgatctccatgtgaatgcttactacttggtactcaaacttcccatttacaaatttctataggccagagagtatactctaaatgctaaaagt

SEQ ID NO: 235170 - DNA, 404 bp, Homo sapiens
gttggtggccggtccaccggctcctggcacaaccttgcagaggtggccggttgctttttgagccagcttggccttgcccggcatgcataattctgtgcaacaactgtgacacaaatggagccacacagagaaaatgagcagcaggctcaggaacagggtgtgtgcttcctcaggggctccagtccatgcctaagggttcatatggcactgtgggcttcttggttgcaaagaggtagaccacaggccatcttcaggaggtctttatgtggaagtgcagaaagcagccaggattaccacccgtgggactcggccttttgtggccctggcctgacagaatttggcccaaggcaggacaagctcactcggagcaacatgtcagaacctggggccgtgcatgtcaggca

SEQ ID NO: 235171 - DNA, 397 bp, Homo sapiens
caggcttcatctagcacaagcactcgatttttcagccttcaggctgttttaggcttgaagatggggttttgtccaagacacttggctgttttctaactctgttattttccactgtcaataagtatatctaactgctgttagaataaggataaagatgaggacaaaaaccacttttaagtgcttcctgatgacagggggcactgttgtgaaataaatggcagtcagttattccttagaggcctaagtgtctccagtgaaaggggccattgtctcagcctatggtagtgtgactgtttgaagtttgatagcctgaaggtgaggagaatcaaactgtgttactaaaaagcacgtattaaaatgaaccaagggaaatgtggaagagacagctcaaaaaaaa

SEQ ID NO: 235172 - DNA, 261 bp, Homo sapiens
caacctttgaaacaaaaaagcaaaagtatagaggttagaaacaacatatgcaacaaatgtattgcatatgttgcaaacatatttattgcgaaaatgtacagggaatgtacattttcccctaggtctagggagtatttacagaagttgatcatgtcatttatcacagaaaacaaaaagtgaaatatgaaaattttgatttttgtatgcaataacctgtcctgtcagtccagtgaaattagtggtaaaaaaaaagagatgatt

SEQ ID NO: 235173 - DNA, 625 bp, Homo sapiens
agcctctcaaagtcttggggttacaggtgtaagccaccacacccagctcatattttttataatagccatcttaatgacttgacaatttcattataatgtgtcttggtgtgggtctctgagtttatcctacttgggacttcctgggcttattggatttgtagattcacatcttttgttaaatttgggttgtttttggccattatttagataatttttcttcccctttctctttccttatagggacttccatagtgcatctattggttgacttgacggtgttccataggtctgttaggcgttgtttacttttctttattttttctttctattccaagacttgataatttcagtgtcctatcttccagttttctgattctctcttcttcctgctcaaatctattgttgtgctcctctagtgaatttttcatttcagttattcttttcaactccagaatttttattcttctttgtaatttttgtctctgttgatattctgattttgttaatcattgtttttctgatttcctttacttatttgttcatcttttcctttagctctttgagtatatttaatacagttgttttaatgtctttgttgagtaaatccaatgtcttggctttctca

SEQ ID NO: 235174 - DNA, 822 bp, Homo sapiens
gccactttctaagtccttgacccaatgaaatggatattgtcatcataccttttttgaggacaaagagagtgggacagaagtaatttgcccaagaaagtaggaaaaagaatgccctggagtttagtgtttggggcctttgccaggtggcagaaataacagaagtaggtactgttggtggagagccagtacctttacataaagcgttgtaatacacaggttagcccagcagggcattcccatgacctcagatgtttatcaggtgaagccagtggctctcagatttcagcgtgtatcagaatcactcgaaggctgcttacaacgcccagggctgggacccacctctgccagagtttctgaggcaaagagcttggggcaggtggcagtgggcagttgacatgtctaatgtgttcctggatactgtcatgctgctggtctggggaccactctttgccaaccactgccatcagcagtgcccatgtcagcgaggagccagctgctactacttctagttacagtcaggtgggatgatttcagatttagacattggaagtgccttccgcctcatgaaataaaaactgaactcatgtggtcctgtttatctaggacagcagaggggtgtctgagccagtccagagcagaaacttgcttttcctgctcaccagtggttctggcatggctcaggagagatgatcccaaggtggagagaaaacttggaaatataagtcagcactcattagaagcttggagtgccatcattacatcccatcttaggaagatggcctcatttatttttgttatttttcattcccccttccattggca

SEQ ID NO: 235175 - DNA, 369 bp, Homo sapiens
ccttcactccccacccggctcctttgtgaagtacttctaagacactcgtgccggtttcccagttaatcaacacccacatgctagccatcccacctccccagggccccgaggtcttgcagattaaaacgcacttgcttctgggttccaggggatgtcagtgggtggactgcagtggactgctgggtgtagtgctctgggaagccagaggtccaacctggcattatcagcaactggtggttaaggggccatattctgtttctgagctttctgtaaaacgggataataatctcttctcctcggcaggtgcactgtgaggattaaataggatcatgtaagtaaaaatccaaaaacagcagaatgttattttga

SEQ ID NO: 235176 - DNA, 933 bp, Homo sapiens
tgtttcaaatttgattcatatattgcttatcagtaacataagtaattcttatttttttcatttctactcacttttgtgaaatgaaaaggacaaaatatgatgaaacattcaaataatttcatatacattactatgttgagagagatagaagcactgctgaaactgaaatacatattggcagactagcagcaccaacctaccacatttaaaaatattattttaccatgtgaatgttcacattaaatataataaagataatttaggaatatcaatgtcatgcctagtcaagtatatgaaagccatataatctcattgatgctttatttctcatatctttgattgctagcaatggtgagcccatttccataagtgttttggccactgaggttctttgtgaattttcaattcatgtattttgtctgtattatgttggaatgtgcataatttgtttattgagttataaatgctacttacatattcagaatataaaaaccattatagttgatgtgaataaaaatacctagttggctaaatgtctttaggttttatgttgttttttttataatggatctgcagacatttttaattttcatgtatatattcaaatatcttgatatgatttggctctgtgtccccgcccaaatctcatgtcaaattgttagacctggtggaaagtgattggatcatggggatggtttctaatgacttagcatcatccccttaatgctgtctcatgatagaattctcgcaagatctggttgtttaaaagcgtgcggcacctccccttctcgctctcttcatcttgctccagtcatgtaagatgcacctgcttcctttttgccttctgccatgattgtaagtctcctgaggcttccccagtcatgcttcttgtacacctcatggaaccgtgagccaattaaacctcttttcttt

SEQ ID NO: 235177 - DNA, 589 bp, Homo sapiens
ccagcctacagcttattttctacctatgtttaacaggaagcttgataacacaagcaaatgtgatgccattctgggactgaaatgtcgtcttatgagtgtattcagatgaggtataccagtgtttaaagattagttggaagttattctcctagtgtgcatatttaatttctacttactccatttccctttaatgagaaaagaatcatattgtctgaattttcctgtataaagtttaaaaaagttaattattaggacttgtttttaaaggagtaagcaatggaaggatcaaacatttattaaatatattcagcaaatatttagaattaaatgtattcagcaaggaagagaatgggattcatactgcttggagtttataaaagcggagtttttttattttttgagacggaatactctgtcacccaggctgcagtgcagtggcacaatctcggctcactgcagcctctgcctcccaggatcctttccgggttcaagcaattcttgtccctcagcctcgtaagtaggtgggattacaagcttgagccaccacagccaactaatttttgtgtttttagtagaaatgagttttcac

SEQ ID NO: 235178 - DNA, 349 bp, Homo sapiens
attccagtggtattttgtatattttcttctggtttcatatgtgtgtgtatatacacacatatatataaatatatacattaacggccaggcgtggtggctcacgcctgtaattccagcactttgggaggccgaggctggcggatcactgagattgggagttcaagaccagcctgatcaacatggagaaaccctgtctctactaaaaatacaaaattagccgggcatgaaatcccagctacttggaaggctgaggcaggagaatcgcttgaacctgggaggcagaggttgcggtgagccgagatcgtgccattacactctgggctgggcaacaagagcaaaactccatctc

SEQ ID NO: 235179 - DNA, 534 bp, Homo sapiens
ttttttaatgccagtaccatgatgttttggttactataggctttgtagtgtaatttgaagtcacataatgtgatccttccagttttgttctttttgcttaggtcctttttcttttcttttcttttctttttttttttttgagacggtctctctctgttgcccagtctagaaagcagtggacagctcactgtaaccttaaattcctggcctcaagtgatactcctatctcgacctcttgaatagctgggactacagggatgcaaccaccatgcctggctaatttttatttatttttttgttgagatggggtctcgctatgttgcctaggctagtagaaacttcttataaggatgtggacactacttcttcaaaacataacagatttccctaatcaatatatttcattgaccatattatcttttgccttcacagcaaacaaaaacttctctttgtgccttcagtgttgacttaaaaaaaaagtttaatgcttacctgaatcaaagtgatctttctccaggatatccagaggttctg

SEQ ID NO: 235180 - DNA, 513 bp, Homo sapiens
cccgagtagctgggattacaggcacctgccaccacacccagttaatttttgtatttttagtagaggcggggtttctccatgtcggccaggctggtttcgaactcctgacctcaggtgatctgcccaccttggcctcccaaaatgctgggattacaggcgtgagccaccagggctggcctaaaatttaaaaatgagttcaaactaccagattaatatattcaaagagtgaaaataaaacacaaaataaatatttataataatacatttattcacaccttagaatgggggtataaaacatgggagagaggtattgtcctttaacctacaagttgaagaaagtctaggcttatctctgcttgcattaattttcattaaggaaagactccatactgaatgaatgaatgcttttcacaacaaagggaggtatggatgtattcccaaaggaatattccttgtgtgtgtgtgtttgtgtgtgtgcgcgtgtgcgtttcaataaagtttgtcccctttcca

SEQ ID NO: 235181 - DNA, 1732 bp, Homo sapiens
  misc_feature (740)..(741): n is a, c, g, or t
  misc_feature (786)..(786): n is a, c, g, or t
  misc_feature (841)..(841): n is a, c, g, or t
ataggcgaccctaatgggttttgtgagatgtcgtattaagtctgtggtccatagagtaatgcccttcgctgtcagggaatgcaagggaagagcagggaattccagaatgggaaggtgtgtgaatgtagaccttcaggttggtcacaaacagtgtctcgagattccactggggaagcgttcacttttagaatcaggccaagctgagggttctctgtcctcaggtattttcctttgtagcagtcactggctcgaaatggagaatgagagaaaaaggagcttgtttcaggccagagacctcactaaccgaataacaacactaaggccctgcagcagggggcacaaactacccagcctgtttccgtgtggcctatgatggtttttttgtttgtttgtttacattttttaatggttggaaaaaatcaaaagaggcatatctacctatttcataacatgataattataggaaattcaaatgtgggtgactataaagctttattggaacacaggcacgcccattcgttcctgtattgtctatcactgcttttgtgctgcgatgacagaggctgcatgtggcctgcaaagccccaaatttttatcatccagccctttacagaaagagtttgctggtccctctcataaagtatccttttttttaaatgtgacagagtctagctctgttgcccaggctggagtgcagtggcgcgatctcggcttactgaaacctctgcctcccgggttcnngcgattctcccgcctcagcctcctgagtagctgggatcacaggcncgtgccaccatgcccagctaatttttgtatgtttagtggagacagggtttcaccntgttggtcaggctggtctcgaactcctgaccttgtaatccgcccgcctcggcttcccaaagtgctgggattacaggcgtgagccaccgtgcccggcctaaagtatcttttttatcatgatagttcacgcttattcattgatgggctgccttcttaccacatgtccttgacatgttttaattccttaagtcctcatagtaaccctagtacatgtactcctgtgattgccattttactgatagggaaacacaggcagagtctcatgtaatctgccttctgtcacccagccagaaaagggcagaactaggatgcaagcacagggagtctgaagccagggtacccattcttgagcaccctgtcacgctacctctcattatcaggttctgcaatactttatccttggagcaagcaaggtgaggtgcctacattttcccatgcaagtgccccaatctgtccctgagaattaaggcccagagagaatgatgctttctcagaccctcaggaacattccttcctgatttgccagtaagtggcagagctgggaccaagacccaggtggctctaatctcatcttcattctcctcattctccaagatggtggccctccctcttgtgccagggactcccagatgcccactcttgggcacagcaaagaacccagatgctcaggcctcatggattccaaggccccagcaagtgacatccctattagccggggagaaggccctggctattgttctgtttgctttcctttgtgatgtattgttacataggaaatttatttcttaacaatttcacttacagcccttaaaacaaaatggggctctggagaactgcatcattagcattgataaacattttacaataccatcatgagcaaatggaagtgtct

SEQ ID NO: 235182 - DNA, 376 bp, Homo sapiens
gcaaaagagacaatgtgatgattgatcttttgcatgtttgcatatttaggacttttagatgattggctcctttaactctcaattcccaggaaatcatcttgccttatgcatgaaattgcaaataggtttgttttgtaatgcagctttggctagaccccatgtttttcactacttatggaaatctgcctggccttgggttggtacagttgatgtcagtattagaaagcacatccttagcactgaaacaaccggacaagtggttgatgagaaatgtctcacttctgtcaatttacagttattgaccactcggttttgtttttttaaaggtgtagataagcttatttttagtgtttacatctattcttttgggtctgat

SEQ ID NO: 235183 - DNA, 374 bp, Homo sapiens
aggtgtgtaggctcgaaaatgtggtcccaaggaaagtcatattcaacaacatacctaagagcctttgttgttagttatccctgaatgtgtctcactgtggatccatcccagaaatgactgatcttgtttacgaatgtgaagggattgtgacatgtggctgggttgggcgcagctgggtgagtttaacagtgagcagtgcaaggagcagctgtagagcttccaagcaaaatgctccaaggtcttcctctccctctctctctctcttcctctctctctctctctctctctctctactaagctgaaatctgaccctccctcacatacagacagtgagttttaggagaagcatcaaggccttaagtcagaaagctggg

SEQ ID NO: 235184 - DNA, 494 bp, Homo sapiens
aaacttttagctccatgggaactccagggaacttttagcttctctgtttgtgaaccaggagaatattatctggatgatcgccttcgtgtttcttctaatttttttttgttttagacttaaatagtgtgttcactttagctcaatcaattcaagcctgacagcttcaaaccgctttatttcagatgaagatgcatggctaagctaattatattttctcttcttcatcaacagttttctatacttatacagtgactttataaattcatcattattccatcccaaaacaaatatgaatactcttgttatggtaatgccactgcgggatatgaaagggcagtcctctaccagctcgtttttttcctagtatgtacccatagttgcttttctttgacatagtcagtctgttctccttctactccctctagttaaaaaaaaatagctaaaaaatatttaaagattttccatctgttacttgtgggaaagaaatacttaaa

SEQ ID NO: 235185 - DNA, 125 bp, Homo sapiens
cagcacagccatgttccttacagaccttcagatggagatttgcaatgagtgcactaaaagagactccatgtcagatgccaatctctgggccaaatctttgtgggatactttactcatagtaggaa

SEQ ID NO: 235186 - DNA, 2050 bp, Homo sapiens
agtgacttcaagacaatttggaaacgggagagtaaaaacatatctaaagaaagattgaaaatggctcaggaatcagtcagcaagttgacttcagagaagaaagtggagacaaagaaaatcaatcccactgctagcctgaaagaaagactgcgtcagaaggaagccagtgtgaccactaactaagatgaagacacatggaaatgatggcactggaggtggaggaccttgcacgcatactctttgtgaccacagggttgcaggacgttcttgaaagatgtgtcactaaatgtttgtttttgctcatctctttctgaggtcatctgcagagagtgccccatgccttctttaagaagtccctcattaagccgcaggaacaatggaaaactatttaagggaacattgcagaaatatttgatgactgtttcttgtggaagcccaaagtccactctaagagcagaagaaataccaaaatgtttccaaaatttttttaaaagctgagatttccagctttataaccaaagcttgatatatgtcacattgtcacagaagagagaaaagatcattgaggacagttgccttgggagagttcaagtctttgtcgttacacactgctgttttgattattggtcttagttttgatcctgttgcagcaaaatcctgcagcatctttctctccaataatgttgcaactcaccaaaactattcttgaagaggtccaagaacatgtattatccagactaaaaaaatgattttttgttgttatggtttacgtgatgaaaaggagaaaaaacagaatcatacctgggtggagagagggagacaaatagccataaacttcatcctggagaacaagttaccatgcaaggagttgacatcagttgttaagtgaggcccattcttgtttttacatcggtcctttgtggtttttctgggccagcagagattctgcaccccaactcccaggagaaaatgtaatacctgagcaagcacagccttgggtgtgcttggacaagagacccagcggcagagcaccttttacattttggaccgttcatgaatgggcaatgttgtgttgatacgcagccgagttctacgttatgtgctgtgactgtgcagctggacgacccccatccccaggaggcagtttccagacaggagagcaaatgcaactcacagcacctgctcatgaccttggctgataggcatgtgaagtaggatgaagcaggactctttaatgtcaaaaaaactgaagggcagaaaaaaggttccttacatcaaaatgaaagtaattacattaatagaaaacttccaagtggaatattgttcacaggcagctctttctgaccctggctcttgagtcacataaggaaaccacctttgacctctctgacacttttgtctttaagccacgtctctgaaatcttgtgaggggtgaagaaagaggactggagatgaatggacaatatgatcaaagactcatttttaggccttgaagaggccgagctttctcccccaattggtggaggacagtccagagatgagcagaaatcttaaattccttcctgatccagcctccacatgtggcctgccccttgccccagcatctttccagaacccctggacttgccaggtgcctgagcatcttcccaggatatgcctgccagccagcagcccctcaggaatgcttctataatagatcccagtaatgaaagcagcaccatatcctaatctaatgtcagcttcgagaatgaagactgcagtcaggatcaaatcaagtcacagaagccatattcatgcaggtgctaaccgccttttctactggtgcaactgaaaggaatatggtaacatggttggatttttaaaattcacaatgaaggaacgagacaagcaaaacagaaaagctgagaaggaacatgcatgactaaaaaggcttgaagttgcttgtgagcaagaagctttttatgctgctttcttacatagtttctcttcattttcacttaactctgaagacaaccaaaagaacggatcaattaaaaactgattccactta

SEQ ID NO: 235187 - DNA, 1766 bp, Homo sapiens
  misc_feature (340)..(340): n is a, c, g, or t
  misc_feature (1089)..(1089): n is a, c, g, or t
ggtgaacagaaaatcagcctcaaaaaacctccatcctttgccaatttacttaaggaaaactctccatagccaaacactgttgctggtaataaaagctgcaagctgtcactgaattctgctttcttggcagcacatctcgatatactgattgataaagactcagataatcaaatcaagaatgctacaggtggttactcctcagaaaccttgaaaggatttaaattcattctgcttaaagtcatgccatacaggaagccatcagaagttgcctggtaaggatttaagaaaaaaggaattaagtggttatttgggtcataaattttagggcatcaggttatgngtatctgatgtatttatattaataattacagcttaccatgggccagtcactcttttaaatgccacagcaaatttatgaagtaggatatattattatcctcatttgcacatgaggaaactgtgcacaaagacgttaaatggactgccaaaaatcctaaagctagtaagtgccagtaccagtattcaaacctaggcagtctagctcttaaccgctatactatatcttccattgaaatggacagctggttattttgactaaatatcctaagatatgtttggaagggaattaccatcactgacctcttaaatctcctttttctgtacttccaagctgatcaactctttttttgtgaaagactcaaattgttgtgttgtattacatgaatcgatatatgggataattgctaaacattatagacctgagagtcattctatctcttttagaaatctttttctttattccataatggataatgacaaattcaaaagctttaggaagtaggcagataacataagtgagggagatggcttggtataagtcaatttgaaatggcgagaactgtggcaaaccactactcactcgtcacttggctccagctgctctgtgcaaatgtggatccaatgttatcagatattttaaggccaggaatggtggcttatgcctataatcccagcactttgggaggccaaggtgggaggattgcttgagcctaggagtttgagacctgcctgggcaacacagtgagaccntgtctctaccaaaaaaaaaaaaacattagcgacatgtggtggcatgtgcctgtagttccagctacttgggagggtgaagtgggaagattgcttgagttcaggaggtcaaggctgcagtgagctatggttgtgccacagcactccagcctgggtgacaaagcaagactctgtctcaaaaaaaaaaaaaaaaaagatatttgaaattttaccttaagggtaagttattacctctgcaaatagctcatttcttcatcgtctgttttactctattcagtttcagagagagaccacagtcttgactttattttcaagttctgtgaatccattatttttagagcttttacctctttacagtctccatgtatatattcaataatgtaaaatatgttaacagttcattgtttggactgtgtcctttttacagacaattgactatataaaaggctgaagggcttttccagtatatccctagtactacaaagtacgttttggagtcagacaaatctgagtttgaattctgtttctgagacattaacttgtaatttcagcaagatgttttttcttcatctgtacaatagggttacttatacctcctaattagatgaggattaaatatatataaatacactgatcatagcagctgtcatatgcaaattctgcagcaaacaaaaaaaaag

SEQ ID NO: 235188 - DNA, 153 bp, Homo sapiens
aaaataaaagatgcctgctttgttcagattcagaaagcttaacctgtataacaacctattcttacaacccaccctttctctgcataaaacctgttaccaatgtggttaccacactataaatcacctccctgttcaaatcagctacttgcatca

SEQ ID NO: 235189 - DNA, 1798 bp, Homo sapiens
caggctttgcctgtaagagggctggtctggggggacatctgaacccaattcaggaacacctcacaggtctgccagcagggctagacccggggtgagatccagggcaacagggtctgcctgggaagctcagctccggcactgcctggggcgtctctgcctacacaggaccattcctctcgcctggactcctcttggagtttgccaaggctggcctctgcagaaataggagactcctggaggaagacagtggacttcagcaagctgcaccaaggagaatccacagcggcagctgccctgccaggcgcgggatctcggtcaaggtggatcaacacagcctcaggtgtgtgctctgccccactgagatggcaagtgcattcttttctattcctacgaggaaagagcatccgaaagagcctgccttcacataggatgaataacagtggaccttggctttgcctcagtgttatgtgctaataaaccatgtattctatgccctaaggaagcccagagagaactggacaagctggatatcccaaagagcatggcactggcccaccacattgattacattgcgctggccgggtgctaaccaagaagcagctaacacactgggagtcttggtaagatgcctgagtgcctgcagctggcagacaaatcctacaaagattctgggaactgccactaataacactcttggtggggaggtcccatatcccataaccaggagcatactgggcctcctgtccacagcaaagagccaattactgcatcttgcatctcccatgaccaagagagacagacaatgccagtacgccttctggaggcagcacgttccacacacatgaagactactccagcctatgtaccattgataggagaagctgtcggccttccctgagcctgcagcaggtcgaggctgcagtgctggcagccctgtgactcaggccctgcagctggtcggaccctgtgttatgagaggtatcagacgtgggaaagcaatgctgtgtgtttatggcaagccactatgccagaatcacagtgcaggcccctgggattcagaaacaaagccgtgccatctgcggcagaggattctgcgaaaaattctgaaaagtccctgttgatgtgctcctggggcctggggtgatggaatacctgattgtgcatgtggaactgctcagatgagctggattctgtctcacccctgggtcatgaggttggggactcagaaataacccatcacaggtgggagtgtgcgtgtggcagcagcagaagcaggagcaggaggccaagcagcggcagctgcccagtacccccccccaccctccacagcagtccccacagccccagtggaggaaccttctggtgaactgaggagggagggacaagcccggcctcagttcatggaggtgtctgctctgcctgtggggccagcccaaatcgcctggctgccatactccagtctcagcaagctgccctttaaagagggtgatatggtttggctctgtgtccccacccaaatctcatcttgaactgtaatccccaggtgatgagggtgagacctgatgggaagtgattggatcatgggggctgttttccccatgctgttctcgtgatggtgaaggagttctcatgagatctgatggttttataagtgtctggcaattcccctgcttgcacttgtctttctcgcccaccaccacgtaagacgtgcctgcttccccttctgccatgattgtaagtttcctgaggcgtccccagccatgcagaactgtgagtcaatgaaacctcttttctttat

SEQ ID NO: 235190 - DNA, 355 bp, Homo sapiens
ttttctccaggcaatatactcaggtcctaaatgaacatctactgatggaacgctggcctttagtcagttatctttatatgccgttataggtcaacattccgaaaaacttcaacagactctctaaaggggatgggattattggattggcaatttctcttaatctgagaaaactcatctcccactcccttccccatatcccctttccatcctctctcttccccttatacacacacgcacccgcatgcacacacgtatattctgaccattttattagagtggaaagttgaaaggaagcaacccgccagctacacccacccagcgctcctgggggtggaatagcaaagttctagggcag

SEQ ID NO: 235191 - DNA, 1266 bp, Homo sapiens
gatgtgcatataattttattatttgatttttaatatacatgaatagcatgcagttccaactttgctcgagacttcacaattaccattttaaagggctgcaaaataatcacatttcctcctcaacagccccactttacagatgaaggtagaggaatgctaacttgcctatgctaacccgcagagctctgaatcctccggatagcgcccccgctgtaatccacccagtgcttccctccagacccttctccctctcgtgcgcgcggaggtttcggtttcctcttttacgtaggccgccccactcgcttgaaaacaaagtccgcgatcctctagcccgcaagagagctccgggactcagaccccgggcgcgaggtcccacgagcggcggggcggcgctctcgcggtcctcctccccggcaagggccggggcagggggaggaggcagcgcgaacagtccacgccctccagccgggcgcgctcgacgcggacggcgggccagctgccggagcgcggcgactccaggggacccacagctggggcgccagagcgcggccatccgggcggggccgacggagcgcggcaggacttggctggacggcgcggccacggagaagggcgcggtgagcggactggcaccgcgcggggaacattccggaggccgccgggctcagtcccggtgacccccctggtcggggttcgcgcgccctcccccagcacgcccgggcaaggctgccgcggcgtcggagtaatccccaaccctccgccgccgcttcttccctcacccgggcctccagacgtttgccgcggaaacgaaagtaacgctcgggtgcttgcgtggaggccggggcggccgcgggcttcccggaaggagagggactctgcccggggtgcgcgcggcgggcgggccccgccggtaccggaagtcgggcggtgggcggggccgcgggcgctcccggaagtcaggggtgctccgctaggtgtctctgcttatccggagtccgctggccgcctctgtgccagaggtcggggcgctggactggtagcgggcggagacctgcctttgggccgcggttaccgcgtgagggtggaataggcagtcccacacgccattaatgttgttttggtggagaaggtgggctcctagtgccctatcattaagaaaaaacagtttgggctcttcccttaccagccctttgaaagggccttttactgttgcgcttgaggccgcagcaggttccaaaaacaaaagcatttctgcgtgatcttaga

SEQ ID NO: 235192 - DNA, 759 bp, Homo sapiens
gataataaagaagagtcagaaaagcaaagtgaattagctagccaataaatgtgtaacactctctaagactacatttgcaagcccatgtttctgcctagttttgttgggtttcacaaaaaatatgggtacttccaaagaattttacagtcgactggggaagaaaaggctaatgtgcaagaaacaattagagaactctatgtgacagatggtatataattagaggtgaagtggtgcagtgccaggggagttatgagaggagagagattctgctctgtgaagttttgatttggcttgggtggaactagtttagggaggggagaaggcgctggagaaaccaagtagaattatcatttctgttgggagccttgagggcccagcattgaatcccatgacagtggatattgtgcccaaacataagtatccaatagctctctgtcttatagtacagtggtgaagagccctgaccctggaccctgggtttggatctcagcctcatcgtgtagaagctgtgggaccttaggcaggttatgcaaaccttctgcacctcagtttccccaactctctggtaggtgtcataacagcagccatcttacagggttattgtggggactatattaacatttataaggtactgaatgcctggcatggtaaccacaacataaatgttagctgttattatgacaacttttgttaatattcatcaccttcctcctgtacctctcttgaggtgtgtgaggctttatgccccagaattggatg

SEQ ID NO: 235193 - DNA, 469 bp, Homo sapiens
gagcgtttggttttcgattgttttaaagacaaagtgatccatattgcctgtctacatggttggattaatccgatagttgccctcctgggggcagacctccacgggaagtttgtgtgatgggataatttaatgtcatctaagtcccctggaggggcggttcccctaactactcacccaggagaaagccagccaacacctacctgctcgttcccgcctcgggatggcccacctatcgccccttggcaggaaagcccccgcctcgaagggcgtttcgggggctcagagccgagctaagctgcaagagggggccatggggaatgcgggaagtgaatctttaactttggtgcccggcttcaaaagactcagggcttcttgtgttcaggcagaggtaaatggagattcaaactgtcgtcttgcattaacaatccggaataaaaataaaattcgtaaagggatagatgatcggaaa

SEQ ID NO: 235194 - DNA, 333 bp, Homo sapiens
tttcaagtagaggatttgtcagcacagtccctccaattcagccccgtccttagtagaaaaatttctgctcgttcccgcctcgggatggcccacctatcgccccttggcaggaaagcccccgcctcgaagggcgtttcgggggctcagagccgagctaagctgcaagagggggccatggggaatgcgggaagtgaatctttaactttggtgcccggcttcaaaagactcagggcttcttgtgttcaggcagaggtaaatggagattcaaactgtcgtcttgcattaacaatccggaataaaaataaaattcgtaaagggatagatgatcggaaa

SEQ ID NO: 235195 - DNA, 521 bp, Homo sapiens
ggaaccagagtaagacagtttctacttggacttggggaaccagcaaactcattcacttacaatcaagaacaaaccgattaaattgaataaaggtcactcaaaggagccaagcccctttgtcaaatcaggagctccatcagccaatcaggaacccagatgccagcgtgggagtttgtcagtggaaataacattgcatgacttccaagtctggtttcttcatttgcaagatatcaacccaataggattgtgactgaaatcaaatgaggcacccaagtctaatatgagaaaaacatgagaaaaattccaggagggggacattctacaaaatacctgaccagtacatctcaaaattgtcacgatcatcaacaaggaaagattgagatactgtcatagccaagagacgccaaaggaaaaatgacaactaaatgtaatgtggtatcctggataagatcctggaatggaatagaaaatgggcattgggtagaaactgaataaagtagagactttagttaataacagta

SEQ ID NO: 235196 - DNA, 1895 bp, Homo sapiens
  misc_feature (1341)..(1341): n is a, c, g, or t
  misc_feature (1355)..(1356): n is a, c, g, or t
ctttatcaaggaaattagcacaccagtctgacagaagagtagattgtgtttgtgcttacccttcttctcctaaaattaagtgttagctttcaaacttgcttttgaagtgctaagaaccctgatgataaatgatgaacaaagcctcctgtttacattggaagcatcaaaacagcaggactgggccaattcacccattcctgttgatcattagacattaactggttgtccaacttcaaccacatcaactacaaaatcctgaagtgaaacaaagtctaagttagttgacttttctttgattagtctctagtgcatttatcactttctatgaaagaagcatctaatttagatggcagttgatttgtgtcatgggatttcttctgacaggaggcagagttatgtatgtgtttatggcttctttgcctttaaaagattaatgttgggcaaatataaatcacaagacctggatagggggctgggaagatggagcaggagcttgccagggtgatggattgagacgtattttagaggattttcattgctagaaaaaacactgggaagatgtggcagaggggtggtggggcagggacagtgaagagagatggctttttctccctaagcacagagaaaggacaggatgggcacttgagccagggcaggtggctttctggctctgtttcagaagcaaaatgaaattgaattggtaacttcctgaagcttctttcctgccctgatacccagaagacaggattggaggacaaaggagggttcacagcacagctggaagtgctcaaggtacccagctgctccaggagataaagtactccctgcctgccccagtcacaggaactggcccctgaagccaggctgccacaccctatcttcccatagaccaagtctaggcttctgtcccctgaggctgtgtgtgtgtgtcagtgtgtgtgcatgtttgtgtgtgcacctgtctgtgcatatgtggaaaagtgtgagaggaatgtgcatgagagtgtgtgtgtgcatgtgtgcctgtgtgtgcatatgtgggagagtgtgtgtaagagtatatgtgtataagtgtgtgagtgcatgtgagagtgtgtgagtgtgttagagtgtgtgagtgtgtgtgagaatgtgtgtgatagtgtgtaagaatgtgtgtgtgagtctgtgtgtatgtgagtgtgtgtatgtgagtgtatgtgtgtgagtgtgtgagtgtgtatgttcatccttaaatatatgaggacaataagaatagctcccatgtgccgggcaacaccccgagagccacactcagtgctgctttgtatgtgttgcctgccgtaatccttcgctagggangagcacacgagggnncgggaggggtgcttggagttgggacccagagcaccaggacttactgtcaaatctctctggcaccaaaacgcatgctccctatgccacctatcaggatgcacccttaaagcacttttaagatgctttttggaaagagccatttgttggtgtgcatttgtcttcaccactgccccaaacatagctgtccaatattcaggtgaaaatgtcccccatcggccgggtgcagcggctcacgcctgtaatcccagcactttgggaggccaaggtgggcggatcacgaggtcaggagatcaagaccatcctggctaacacggtgaaaccccttctctactaaaaatacaaaaaattagccggccctggtggcacgcacctgtaatcccagctactcaggaggctgaggcaggagaatcacttgaacccaggaggcggagcttgcagtgagccgagatggcaccactgcactccagcctgggccacagaccaagactccatctcaaaaaaaggaaaggaaaggaaagaggaaagaaagaaaagaaaag

SEQ ID NO: 235197 - DNA, 1957 bp, Homo sapiens
  misc_feature (811)..(812): n is a, c, g, or t
  misc_feature (952)..(952): n is a, c, g, or t
tcactagaatgtaaaaatcacaaaaggaagttgtttgttttgttcacttgtgtatctctaataactagaacaatgctcagtatatgctggattgttagatgaatggacaggactttaaataagtgcttctttagctatgatgaatgactagtttttaattacgaatctgtcacaacctagtacttttgtaaaatgcggtggaaatagtatatatgtatttattagtgtcatgttattaaaatcaacaggcattaaattgtcagattgctataaaaacttctaaatgttttcaattttttgctcataatgaccttctaataaacttgttgtggtcagcacccatttgcagacgacactatcagtaccactgtactagaacatatttaccattttatagtcagcagttaaaatgtgaaagctaaatgaaggacgtattcttctccttgctagacaagaagaagccacttaagagctgatgtcacattatgatggctgaattcctgcaggattattaacttacaaaaaggtttttttagtaataccaggaaaatttgataagtaccaattctatgcagagataagtctttttcagtggactcaattaaaacatcataatcctcattttatgtctgtcatttaatttgaggtttgtttttaatagctgtttatgtgttattcaatgaagtctcagttttacaggtttaaaaatattttatctcagtaaacactgctgtattatacctaatatgtttccgaagatatattgatcatttttaacatgtcttgtctgttttagtatgttgattacttnnctgtttatgtatctgggatggaaggagagtcattaaataatgacatttggagtttgggatctgggttcacaagaagatatacagctgaaagtaaaagctatgaagtttttaaaaagccgtgcctcagtttccactggtgnattgcaaccagggttggtgttaattttaatgcttttcagctcctggatattcaagtcattttgcgttaggtatgtagaggtagatactgaattaagctcctttgggtgtcacttcatatgctcataacaaacactgataaactagtattatcagcttgagtagttggaatgctccagattcctcttgtctttgagctgttctctttccttatacagtttaattttacaaattattttaaactttcatagtgtagtccaatatactactactggcaacacacaaaactcaaaatcactgtcttatattttgaaacacaagaatatttctcagtttactgtttgagacactaccacagggaaagaaacattttcatttaattcatttctaatgcaaaaatcctgaaaaatccatttctggtcactaatttaaataaatttgtttttcaggatttttgcattataattttgcattgtaatggtcactaacttaaacacgtttgttttttcaggatgtttacatttgtttttcaggttttttaccttatattttggtttaaggacagcagcaattatttaataacatagaactgatcaaaatgtagatagagtttccgaataacaaattgagtatacgtgtagatagaaatacagatacagcatacatacatactatatgtatttagaaaacacatatgtttacatatgtaattaagaaaaaataggccgggtgcggtggctcatgcctgtaatcccagcactttgggaggccaaggtgggcggatcacctgagatcgggagttcaaaacccgcctggccaacatggtgaaaccctgtctctactaaaaaatacagtaattagctgggcgtggtggtgcatgtctgtaatcccagctactccggaggctgaggcaggagaatcacttgaacctgggaggtggaggttgcagtaagccaagattgcgccattgcactccagcctgggcaacaagagcgaaactccaactc

SEQ ID NO: 235198 - DNA, 425 bp, Homo sapiens
ctcagacccagagggtttggagcctggggtattgtcaccgacagtggccttagcctagctagcacagttagtgctgtgcatcacagcatagcttttagaggcaggatttgtagtcagtatagttgggaggcaccatggagcagggatcaccctccacctcacttgacaaggagatacaaaactatcagttcatagacaccatctgatagggaactggctcagcataggccaactgggacccaggttgccatcttgaagactttccatcacccaaatatcattcagctcttccaggtggtgagggagtaaaccagaggaggagagttgcaccaccagatataccactatggccacatcgaggaggaagaggaggcccggaccatgttcaggcagattctgtcagccctgcagtactgccacttaaa

SEQ ID NO: 235199 - DNA, 793 bp, Homo sapiens
ctttaagaactccaggagatcagaaagcaatacgaaagccagagcattgcacatgggatgggctggcgggtggcctttgggtccctatcttatggacgatttttgtaaatggggcattggagatgagtatcacctggatcacatttttaggttgaattcctccgtggggggaactttagcaatacgcatccaaataagaatgtagattgcaataattgtagtaaagtgtttgccagactcatctcagaaaaagacattatcaaaaggcatttattatcttcctaatgcgtgtctggcactgggcagacactgtagaatactatcttgattagagtctcaaggattttgtacttaaagtcctttacaaataaaagtattcaagtataatctattataaagactcttttctccactttggggatatacggtgtggcatcgattcattggtcataccaaaactgttacttctgttttggaggaattaacaaggaaaacccaggcttagtaaatcaacatcgaagttcagaagttcagagtaatttgtcttgggaacaaagtcctccctagagcgaagaggcattcacaggagctcttggtgttaatgggattattcaagatatacctgagaccagataaatatttgatgattttgccaagcactagggtttctttgcagtttgtctttggctgacgttttccccccgtggggtttggactttgtggcttcaccagattttgcaaatgaaagaaggctggggtttcccaagagtacacttgtgcaggaaacaacaga

SEQ ID NO: 235200 - DNA, 699 bp, Homo sapiens
cagtgttgactgccagagtatgtagagtgactatttgtaatttgtatattcaatatgtatatttcttcagtataaaattctgctatccaagtgttaagttttagtggctagaagaaataatgatatgttatggtggaagtgtggagctgtctgaaccatatgaaagccaggaatctatagtttgagacataccgggtaaacagttggtcactttcagcatcaagcagaaaaaggctaaccactcaagtacagcacagtttacaagcagtatgatgatgaacgttagttgatgacctgtataggtgattggtaccaccaaagtgcctgtcttagagaatgaaatctggacagaggatgtattcaacaatcctactagtgaggtaagtggcttgtggcaggatcagtactgggttcaggtacatgatcctctccctgaaggaggtaaagtatgacgggaactaaaaaaaaaaaaaacgaaaagtcacatgttagagcttgaacaaaggtcatgtccagggatgaatctctaaggatggatttgtttgaggtcatgtaggtgttgtcacagtcattggtagggaagaactttggggaagagttagatgggttactatgataatcagagctgtcattcactgatgattatgctttgttatatgttttttatatgctagtatgttttatcttcttcttaaaaaa

SEQ ID NO: 235201 - DNA, 2206 bp, Homo sapiens
ttcggcccatcctctctgcattcatgggcatgtgcttgtgtgtgtgcacaggcgtgtcttggaagtgaacactgaatggaggagtcagatgccctcctttggactggccagctctagcccccagactgggttttttctgttggagtaacactttccccacccccactgccccagtggacacacacacatcctgtttgtgttttcctcggttttctctgtttgttttgggaatgggcccagcaatgagcttgttgggaaagttttcatcttgaattttggtgcacactaaactacagcaaggacagattcggcaggggcgggatggcttgtcaattttgattgagtgacctcttcttttatgtaatgagtatcaagataatcctttttgcaaagtggtgaccctatggtagagtttggatctggggattgcagaatgtcactgggtgcattgaagctgaaggcgtgcatttctctgagtaatgagaagcacccttgagtcaccaaggcactggcatatcaaaaagcggtgccgctgtccatatcttgacgattgtagacacagttgtagctgtagagagatgatgggattccgtcatcatcagagacctgccccatctgttgacccccaggctgtgactccaggcaccctgcagggcatcccaccactgctcagagcaattctagggcccattctggtttccagcctaagtgctgccccacccagagggtctttctggcccttgcttccgtgtgttctgtgtgtttttctacagcagagctttgggtggcttggttacaggatgggttgctacaggattcactgtgggatgagggagaggcagctggacatgatgtgaaccatgctctcgaagcctccggagatcaggtctgcgttgggagagacaggcacccctgccctggtagcaccgcacccctgcgaacgtcctagcaagcaggcaaagaaccagcccagggtcttgccactgggaaggctttcaagcccaaaatgccccagtaactgctgttgtggcacctgcccctgggatgcccttgttcacaggtctgccattgctgtccttgttctctacatggccccttttgttactttcacaatacacacattttttaagtacctatttgcttaggccctatgaggctggagggtgttgtgaggatagatggctctctaggtgttcacagactagcagcagagagagataaggagcatgatgatggaggttcagggcagtgctgctagagtagagcgagtgcttagtgttgtcgctccgctgctttaccaggagggaggcaccgaggtcagctggctggggtctgggctgggtgcaggggtcaggcagttcagagaggaggaagtgctgcctgagccacactacattgaggagcatgccagtcccgtgttggggtggctttagggcctgggcctccagacattcaaaggcatggaccaggggaactgcgagcaggttagaggcgtgtatggggaatgtggctgaagatgaccctggaacggtgagtgtgcagtattgtaagaaacttgtatgtcctgcagaggagctggattatatctggaaatctgtgaagtcccaaggattttcagcaggggtatgacatacatctgactcgtgaatgagaaaatcagtgtggcctctggatggacctcgcatctggtctgagcactccctgcacccctcagcttctccatcattctctcatcgccctcacctcctagcctacctacgctactagcctccttagccatgtctgcaccctgaatcacgtctctcctacttggtgtccccagtccccagggatgcagcctgtatcttccccatgtgcccagcccctctgatgcctgaccttggttctggctcccaggtcaccccaactggctctcctggactccggctggctcaggctgctctgctgtggtctgaatctccctgcaactttgtgatgacctcctttggcctgttctgttcagggctttttattaatgacttggccgagatctttgagagtgtgctgatctcatttggggatgctgggaagacagaatcattatccaaaaagatcgaaatggacgagcaggatatgagaagggcattatatcgtttcagacttacagggaagaggtgtggacatcgatgagctgccaaccaaacaaaaaacacaggagagaaaaacc

SEQ ID NO: 235202 - DNA, 432 bp, Homo sapiens
ttcggcccatcctctctgcattcatgggcatgtgcttgtgtgtgtgcacaggcgtgtcttggaagtgaacactgaatggaggagtcagatgccctcctttggactggccagctctagcccccagactgggttttttctgttggagtaacactttccccacccccactgccccagtggacacacacacatcctgtttgtgttttcctcggttttctctgtttgttttgggaatgggcccagcaatgagcttgttgggaaagttttcatcttgaattttggtgcacactaaactacagcaaggacagattcggcaggggcgggatggcttgtcaattttgattgagtgacctcttcttttatgtaactattatctcaatattactgaaagctgcctttgtctcgtgtgaaaaagtacgactatacaattaggct

SEQ ID NO: 235203 - DNA, 475 bp, Homo sapiens
tctaaaatgaaatggtgtaattcattcagaaggtgccacctctgatgaacaaaatgtcagtcctagatgtttaattacaggcccaagcctgtagttgcctaattttccttggcactgataactccttgggtaatcaagtccaaatgacccttagcttttcaagacaacataattatgtcttaattactataatatattttttccctcaaactaatgggacaggacctggatatgtagggtattaagtagttacttacgaacattttaagatgctagatgatacagaaatgatttattgatccaaaatacttaaggggtaaatgtcaaacagatttagagtgtggattatttcaacgtgaactaaagtgatggtaatttgtacatcacactatttgtttgaaaatgctgtatttgaaaatcaagaacgttgtttcaaatcaaactcagttctggcaaactattaaaacacatacac

SEQ ID NO: 235204 - DNA, 533 bp, Homo sapiens
gcctcccaaagtgctgggatcacaggtgtgagccaccgtgcccggccccattttccgcatttctaagtgtgctgggaaggaaagggaggtggagggggctcccagcctgctccaagagcatatgctactgtcaacagctcaaaggtcatggcttgtacttcctggcaacacagggtacatttgtccttgagatctaagctgggaggctgtccacagtttgttcattttgactctgactggggtccagccccagggagttggaaagtaaaactctcaaggcgtgacatttaaatgcttggaatgctgccagccatctgtgcagcttgatttaactttggtgctattatcaatgtcattaataaagacccattccaccagggaagcagtgtggtggtgaacagcctgagctgggtttgaattcagccccaccacttaccagttgggtgatcctaaccagtcaattgacaacagtgatatctcctccctaatttgttcctttttgtttcttggagatggagtctcactctgttgcc

SEQ ID NO: 235205 - DNA, 204 bp, Homo sapiens
ctcatcatagatgtaaaattttagttaagcaagatgaataagctttagagatcttctgtacctcattatactctcttttgtcccactgaacctgcagccggaatcaccccaaacacagtggcaggggagtttccacaagagagttccccaaactgtcccaagatggggccggttgggattccaaaaagagaactaagtccacag

SEQ ID NO: 235206 - DNA, 351 bp, Homo sapiens
agtatccgccctgagctaggtaaaagtggcggtcaccttcccttcttgaggggtacctcacttctccagatctttctgaaaggcaggctcttcgaagcccctgggagggttttccttccacaggtgggcttagtgacccagcagggcctggagcttatgtgggaagcaaaagacctctttcctcctcccagtagaagggaaggcaaaataggaaacacactcctcgagtatctttcctcattgttaatcaggtgactgctcccagggatctgtttgctgtaaatgctgtgtgttgatggtgttgttctaatatagtcacccacgtgcaagtacatcccagtaaaaaaaaaa

SEQ ID NO: 235207 - DNA, 508 bp, Homo sapiens
tcatgatcatcaaaaacagacaacccaaatgttcttgagctggtcagtggataaacatactgtggtacatgcacagtggaatactactcagaaataaaaagaaaatgaagcatgatacacttaacaatgccaatgaatctccactgcattatgctgggtaaaagaagctggactcaaaaggctatatgatttcgttttaatgacattctggaaatggcaaaactgatagagctggagagcagatcagtgcttgccaggggtttggggcgggaggagcgtttgaccacaaagggatcacatgagggaatgtttttagggtgatacaggtgatacagtttgttctgtatcttgattgtgagactgatttgaaaaactatgcttttgttagacttataactgtacaacaaacatgtaaattttaccatatgtaaattttaaaatttaaaaacagtcttaggaaatcaaggtatggtatattaaatactaaaatacagtggattgttaagga

SEQ ID NO: 235208 - DNA, 450 bp, Homo sapiens
cctttgcccaggatgatgtttacacatagcaggtgctcaataaatatatgtgactgattgtgaaagtcatcattatctattaaatattactatcataagggcaaaatctatagggagaaaaatcagtgcatctatttatcgttctttttgttcaatgaaaatgtacttagaggttgggcgtggtggctcacgcctgtaatcccagcactttgggagaccaaggcaggcggatcacaaggtcaagagatcgagaccatcctggccaaaatggtgaaaccctgtctgtgctgaaaatacaaaaaacttagctgggtatggtggtgtgcacctgtagtcccagctacttggtagcctgaggcagaagaattgcttgaatctgggaggcagaggttgcagtgagccgagatggtggccactgccagcctggtgacagggactctgtctcgaaaa

SEQ ID NO: 235209 - DNA, 656 bp, Homo sapiens
gtttgccattgataagtataattactcatgtccttgtataatcgtcttccaccagtgagaccactcaggcaggaccatcaaggttcaaatgaggcattgatgattagagctgaggaatgacatgaaacaggttatgaagagtaaccccaaatatgcaggaggaatggggagatggtgcatgggagactgtagtcaaatgactaggttggtatggagagtctaagttatgtattaatatgggacgaggtaggttaaattaagtgatgacagtgaaaacctgcatctcatataattgtcaagcaaagctaccattagttcttgagcaaagatgtctttaacatttttggttaagtttattcttaaatactttattccttttattgttattggggatgggattttgttttaattccttttttggatagtttgctgtttgtgtacagaaacctgactgatattttatatgttgatttttgtatcctgcctcttaactgaattcatttattagtttgaacaggtttttttgcggcacttttagggttttatacatatatgattatgtcatcggcaaacagagataatattacttcttcctttctgatttgaatgccttttgttttctttttcttgtttaatggctctgattaagacttctt

SEQ ID NO: 235210 - DNA, 477 bp, Homo sapiens
ctttctatatttatgggaaaattttaagttgtgcccttgtttcatgtgtgtttctatttaaagataccatacttaatatatattgttgattcattaacattgaactcatggctaacagcactataaatcatgtctgatcaaaacttatgatacatgtactttcttcgtaaggtacatcatagtcttctcgtacatgggaactctaggtagtacttcaggactatgcatagaggccattttaaacagcaaaattcccaacaaaaagcacaaaactcaaaaaatgtgccactaaatttaccatgaaaaggacacttgtttacagtttgagagctaaaacaagaaggtggcgtgtcacttcgtttgacttcagctgggaacatgcatatcagtcgactcaaattttttgctattctgtgcttatccacgaatcgataggaaagcaagtgtggatttgggggttacaaataaaatgtagca

SEQ ID NO: 235211 - DNA, 729 bp, Homo sapiens
  misc_feature (399)..(399): n is a, c, g, or t
  misc_feature (433)..(433): n is a, c, g, or t
  misc_feature (457)..(457): n is a, c, g, or t
  misc_feature (683)..(683): n is a, c, g, or t
  misc_feature (728)..(728): n is a, c, g, or t
tgatgatgtctgcaactttcaggtgttccaggagaaaatatgtctatgtctatgtctgtgtctgtgtgtctgtgtctgtgtgtctttttcctcctttcttttggggaatcctgtaatatgaggtagcttatttcgtcaattaattagggtgctggatggtagagaattttgtcagtcaactatgtacacacagtaaatactgtttcttaggcaaaggtaacttttttatatagttgtaaaattccattatattccattgccaaagaaacattaagaactttgtatagctgtataaaaagcaactaattttttaaagaataaacattttaaagtcagcaaacatactgtgtccttgcagaagttgatgtgctgagcagcagccttatgggtgggtctttntttcttagttttccaggcttaacatttttgattntgttttttaatgtttggaacatanatgaagatttgatacattatttcattatctaggattaattattcatgctcattgtaagaacttcattttgtagcaaatggcatatcacaggatctgtccagataatcgatattttcagtatacaaatgtaaataatcacagatgagaatgtacttagctgtattttcaaataagtaatcttccccccttttgtaggactttataccttgactcattccatcatatntcaagaggattcagagtgctagttattttggtagcctgtcacacng

SEQ ID NO: 235212 - DNA, 405 bp, Homo sapiens
gtcgtgttgctagttaatgaaagtcagagtcaggttttgaacgagatctatcttacttcaaatcctattattttcctgctgccacagaatggcatcaggaaacaaggaccatagggccagacagtgctgggttccatcttgactctgctacttcctaacgtcgtagactcaggaaagttatttaacctccgagctttagtttgttccttggaatatcagggctggtataatatatttacagcatcttgtacagtatctggcacagaataggtactcattaaatgatagctgctattattcattcattcattaaacaaaatatttattgaaggcctattatgtgtcaagcagtgtactaggtactatagaaacaggtgttgtgggaggacagacaacaagtaagca

SEQ ID NO: 235213 - DNA, 163 bp, Homo sapiens
tgaactgagttgaatcctctttagttaatgaagtgtcccggtggggattgaggaatcttgtcaacataggctgactttctcacaagccattgtctgttctttggcccattcaactctcctgaaaacacattcactacccctcagaactgcctacgcctcctcc

SEQ ID NO: 235214 - DNA, 1381 bp, Homo sapiens
  misc_feature (435)..(435): n is a, c, g, or t
  misc_feature (975)..(975): n is a, c, g, or t
gtgttactgatgtcaaccttaaataacaatatccagataatattgttaccagcggtgagtccagctatctggagaaactccagaatggcaactttgtggcaatttcagttctttgtcttctggaaggaaagatttcaaatgagagacacaggcaaggtttaaagcaggagggagaatttattttaagcaaagcgagaatttattagagagagtacacttgaaggagagccatgtgggtgacttgaaaaatcaagtgtgttgtttgcttcagtcacgccccccacagccatgcctgggcagttgtttaaaggtattttgttcctaactgcctcccccattatcttcatgtacctggaatttgtgatacaatgaacaataatatagccaatccatagcttatgttattttaatgtaaattctttgtaaacaacttangaacagcctcttcctttatctttaaaatcccacttgtaactgctactaattgaagtgtatattcagggcacttgaatctatgctcccactgagctgttcttaagttttgggctcaggtgaactctaaacttagtcatagaatagggtgttagacatgagcagggcaggagagagggcccccaagaatgttgggcagttgtcaagccatggtcaggcaattataaatctgtccccctgaaataatgagcaggagaagggaggaaccccagagctgtctggttctcattaagtaacggacaggcaggcataaaaccgtccctctaagataataagtggccatgactggtgcctggaatgacaggagtcttagaacagacagaagacacctggaattagcaagccataatccccgatagggttttaagcatgtgcagtgaaagggcaagatggtgaaatttaactggtatatgaccttcctctggagcgctggaccagtgagaactgcccctactgagcatgtgcaccacttcaataaacacnctgcacatgcagctctcccaagtgctggcagggccactgcacatgtgatagataaaggcccgcccaggggaagaacaaaaggaggacacagcccaggaaaagatagggggtataaaaactctaaacaggccaggcgcggtggctcacgcctgtaatcccagcactttgggaggccaaggcgggcggatcacgaggtcaggagatcaagaccatcctggctaacacggtgaaatcctgtctctactaaaaatacaaaaaattagcaaggcatggtggcgggcgcctgtagtcccagctactcggcaggctgaggcaggagaatggcgtgaacctgggaggcgaagcttgcagtaagccgagatagcgccactgtactccagcctgggcaacagagagagactgtctc

SEQ ID NO: 235215 - DNA, 478 bp, Homo sapiens
ctcctttgtcagacttcactttggcaaaatgatccttggtacattggcaatggatggaacaaggaggcatgggcactcttgacacattctccaataggcccctctgcctttaggcagaaccacctgcccattccagccagatggcaacaatcatgttgttgttgttgtttagagaaagggccccactctcttgtccagcctggagtgcagtggcatgatcataggtcactgcagccacaaactcccgggctcaagtgatcctcctgcctcagtcctgctaattcctttatttatttttttttttttttgagacacagcctgggtgacagagcgagactccattgaaaaggaaggaagaaaaaaaagagaagagaagagaaaagaaagagaggagggagggagggagggagggagacagggagggagagagagggagaaaggaaagaaagaaaaagaaagagagagagagagagaaaga

SEQ ID NO: 235216 - DNA, 220 bp, Homo sapiens
gggaatcacttagacagcatttaataatgtattatccgacaatatagataatagaaatatacatacatgctaactttagagaggataaaaatatgtatagatacactagaacatgtttcttaaacactatactcaatagtcttggctcctacttttacaatacctcgcatccattcttattcattttctcgactttctattttcctaattttagttcgca

SEQ ID NO: 235217 - DNA, 415 bp, Homo sapiens
agagtgctcgccgcccttggtcccccgggtctgggcggtgctgttggtaaggactgcagccaacccccagggacctggcaggagaagatacctgccctgcccttctgctagggccaccagcatcggccagacctaaccaaagacgtggagtctccaggcagtctataaaaaccagctcccatggcccggggcagggcaaagagtcagtctggaggggagaactgaagacaactggcactgctaccgtgctgagatgcctcggggacttgtcttactcgccgccaagcacttggcccctgcaccaaatggcccccaaactgtggccttttaaaatttgtgtgtccacttctcacagtttcctctctcttcatgcatatgaaaataaaactattttatgtatctaggacttggattc

SEQ ID NO: 235218 - DNA, 367 bp, Homo sapiens
ttaaaataagcttttggtaattgaagaataacatacattcagaaacgtacagaaatcaagtgtaaactcagtgaattgttcacagttgatgcacctgtgtaagcagcaacccagaagccctctaccagtcactgcctcccctgagccaaaagaactactatcctgacttctgaaagcattgattagtttggcctggttttgtttttgctttttttgttttcgtttttgagatagggtgttgctttggagtgcagtgatcatagctcactgcagcctcatcctctcaggctcaagcaatcctcccacctcagcctcctgagtagctgggactataggcatacgtcaccgtgcccggctaatttttttt

SEQ ID NO: 235219 - DNA, 450 bp, Homo sapiens
agcaagtatctagctcccttagagttttttgatggcctcctttgatgctccctgctattcttgggataaaccctaaagtcttgaggtgatctgtggggttccttcttctctgtgccctagctatctttgagcctcagtttttatttgcttcccccttctaccctcaggtttgtcatgctgccttatgggcagggcccctgtgcctgaatccccacctcacctacctcttcctgcttagtgctttctttctctctgatatcaggtctgctacacttttctaaggaaagcagttctgacccttttatgcatgtcaattctccttctgttatatgtcttatttaccacataactcttggaatcattttattatgttgctgttgatttgtgagttacctttttttttttaaaaaaaagagcataacaataaactccataaggtttgagatcaaa

SEQ ID NO: 235220 - DNA, 1820 bp, Homo sapiens
ttgatacttattttggggcccctgtgatgaggcactatcttggctacccggtggctgtaacatggacctgccaaaaagaacctcatagtttagtggggaagacatacccaagaggacaatttagaactctgtgcaaagtaaagtattctagttttgcacaagatttcgaaggcaaaacttggcagattttgtcaatactaattaggtgaatcctttaaaacttcatagacaggagtaatggtttgttttgcggttttgttttgttttttatacatcgtttgatggcagatcattctgaaagtcgttgttgtgtatcattgcatgtctggtgtcatgagataggcagaactgtggggtagtagattaattttctatggtatggtgtgtgactgttcttcaaagacagcttctttctgcctcccttatctctggtccttaagatggcaataaactctggggcctaagataactccagttcttctctggggctatcaacactgtctttggtttctaatactgcagtcatgaccagttttctgtatccttttcacttactgttacccactttgccttgtcttcaccctgtcaaaacaccggtctccctttcagcagtcagtctcattcccttttgactttacagtctcttatttggcaatctcatccagtttcttgcccacagttactgctatcctcccccagaccttgaacatcagtcttacagttatccttttcataggaaaacagaaattaaagacttttaacttacttgttcgttgtattctgggaaagggaaacaggataaaatttaggcattagttaaattgaagggattggttaaagtccctaacttataggcaccccagagaggacagatgtatggaaaggatcagaaaagattaaataatattatttaaaaacaaatatgaaaatgctgcaactcaacactacttttattatgattgctgttaatctgcagagagactgaattatatgactgcttattaatgcaattaactactttaagaaagaagaatatatagaatatcagatctataccaggaataggagatggaaattttttattaaaaaagaaaaatcagatctaagtgcaacttggtgggaggtagagaggccaatgtagagaaaggggcatccttcacgcaataaaggaaaggatccaacagaaaattcattaaggaatctttacaagggtctctgcgataggtcttcaaatacatcaatataaactagagaaccatacccatcccctagagagatgtttcagaaagataatatcaggtgaaaaaggtagccaaaagatgaaattattttccatggtcttagaaaaggattcagaagattcacttaaattattttttgaaacagacataagaaggtattaaatagttttttgtacgtaaaagtcaatgataaatggtgagagttagaaagggagcatagataaaattcttcacacttttgcagggcttttgacaagttccacatacaaaaggtgcttttaaaaaattaaagtattgtgggccgggcgtggtggctcacgcctgtaatcctagcactttgggaggccgaggcgggcagatcacgaggtcaggagatcaagaccatcctggctaacactatgagacctcgtctctactaaaaatacaaaaaattagccagtcatggtggcgggtgcctatagtcccagctactcgggagactgaggcaggaaaatgggtgaaccccggaggcggagcttgcagtgagctgagattgcgccactgcactccagcctgggcaacagagtaagattccatctc

SEQ ID NO: 235221 - DNA, 315 bp, Homo sapiens
gagctcaatgaaattttgcagcagaaaatgttggcatgctgccccaaagggtgagaagaccaggatcttgatggacagaaaactgacacaggctcctctggtctttagagtgcacggcagcactgcttgctctcgagtctgcctcatgtgccagttaacatgggcatagcagtcgactgtgagaaacattgttgtgtttagacaggaaggaagtccttcctttgggaacttagttctgggttcagagactgtatggagtgagagtcctttttaaaaagtggtagtacatagaggaaacaaataaacaaacaaaca

SEQ ID NO: 235222 - DNA, 373 bp, Homo sapiens
gagggagttcaggtctcccaggcctgcctgagcctgtccatgtcagggcgggaggctgtaagtttggggagaaagacaaagacacaggcctacgaaaatcacttccttactttactcattatcttccctttcccacccactccaagccgttcattaagaaagtggtgggcaacttgcccagatctaatggctgcttgccaaggccacatgaaccctgtacaggatccacagaggaaagtgctgttgcagtggcttctggcgctcaacccccaccacgatgcacagtccagccctctgttgctctcagcaccttcccacccatgtgtggttagcagttgtgtgcagtggttcccaattagcacttgggttggga

SEQ ID NO: 235223 - DNA, 648 bp, Homo sapiens
caggagaatcgcttgaacctgggaggcagaggttgcagtgagccgaggtggcgccactgcactctagcctgggcgacagagtgagactgtctcgggaaaaaaaaaaaaaaccttgttactttttcatagcgtagtttagttagctaaattgtacttgatagaccaagtactttgattaacttcgcaatataggaaacatactggaagaaaacttttaaaagagttttaacatcaacgatgctacttcaagataacttgaatgtggatgtggcagccagaatcctagtgagagagtaactgacttaaaatgagaaggaaaaggttgattgtcagaatttcagttattatagcaggcactaaaaaagatgattttttggccaggcgcagtggctcacgcctgtaattccagcactttgaaagccaaggcaggtggatcacctgaggtcaggagttagagaccagcctgaccaacgaggtgaaaccctatctctactaaaaatataaaaattagctgggcgtggtggcaggcgcctgtagtgccagctgcacaggaggctgagacaagagaattgcttgaaccagagaagcggaggttgtagtcagccgagatcacgccactgcactccagcctgggtgacagagtgagac

SEQ ID NO: 235224 - DNA, 272 bp, Homo sapiens
gccaaaatggcttctttgtgagcccttctgactccctggccatcattgctgccaacctctcttgcattccatatttccgtcagatgggggtccgcgggtttgggaggagtatgccaaccagcatggccctggacagagagacatctggtgatactatctgttgattgcaaagaaaaatatacccgactaataagaagaaaatgaatggtgcataatgacccaatctcctttggatataataaaactatgcctgatttgtggtcttcatttac

SEQ ID NO: 235225 - DNA, 513 bp, Homo sapiens
agactggatcctctgcaacactgttgcagtcctgaagctgggtactgctttcaccctccagaccctacagcatagccttagtgattaagacagagagctctggaagcctctaggatttggcaaattacttaacttctgtacgcctcagttatcacatttataaagtaggaaaaataagaacccacctcacagagtttgttgtgaggatcaaatgagttaaaagcatgtaaaaggccgggcacggtggctcacacctataatcccagcactttgggaagctgaggcgggtggatcacctgagatcaggagttcgagaccagcctggccaacatggtgtaaccccatctctactaaaaatacaaaaattagccgggcgtggtgacaggcacctgtaatcccagctactcgggaggctgaggcaggagaatttcttgaatccaggaggcagaggttgtagtgagctgagattgctccactgcactccagcctccacgatagagtgagactccgtca

SEQ ID NO: 235226 - DNA, 907 bp, Homo sapiens
ctgagatgtttgggtggagagaaacataagtctggcctacgtgcacgtccaggcatagtactttcccttgaacttaatcgtgatatacattcttttgctcacatgtaatttgttgaccttctccttattatcaccctgctgtcctactacattcctttttgctgaaataatgaaaaataataatcaataaaaactgagggaactcagaggccggtgccggtgcaggtccttggtgtgctgagcaccagtcccctggacccaccgttgtttctttatactttgtctctgtgtcttatttcttttctccgtctctcatcccacccgactagaaatacccacaggtgtggaggggcaggccaccccttcaataagtaaaatttaaaaacaacaaaaaagccacttagctactacagtctagatttgattccccagcaacagaatatcccacaactcacactggggtcatccagtcctttttgtttcagtgttgtcctttttggtgtatgaaacaaggacctgagaagctggctctttggtcttccttttcttttcactgtctatgtaagaaaccatctaaatctaaaagtgcctcctcctatctttaccagtcaaatcaaccaaaccttggaattgccttgtgtgtgtatgtttgacaatttacaaggttcaaaagtaaaaattaggctgggcacagtggctcatgcctgtaatctcaacactttgggatgccaaagtggaaggactgcttgagcccaggagtttgagaccagctcaggcaacatagtgaccctgtctctacaaaaaatacagaaatagccaggtgtgatggtgcacacttatagccctagatacttggaaggctggggtgggaggagaggaagtgtatactctagagtcggccatgagc

SEQ ID NO: 235227 - DNA, 711 bp, Homo sapiens
ctgagatgtttgggtggagagaaacataagtctggcctacgtgcacgtccaggcatagtactttcccttgaacttaatcgtgatatacattcttttgctcacatgtaatttgttgaccttctccttattatcaccctgctgtcctactacattcctttttgctgaaataatgaaaaataataatcaataaaaactgagggaactcagaggccggtgccggtgcaggtccttggtgtgctgagcaccagtcccctggacccaccgttgtttctttatactttgtctctgtgtcttatttcttttctccgtctctcatcccacccgactagaaatacccacaggtgtggaggggcaggccaccccttcaataagtaaaatttaaaaacaacaaaaaagccacttagctactacagtctagatttgattccccagcaacagaatatcccacaactcacactggggtcatccagtcctttttgtttcagtgttgtcctttttggtgtatgaaacaaggacctgagaagctggctctttggtcttccttttcttttcactgtctatgtaagaaaccatctaaatctaaaagtgcctcctcctatctttaccagtcaaatcaaccaaaccttggaattgccttgtgtgtgtatgtttgacaatttacaaggttcaaaagtaaaaattaggctggtaaagacaggaaggttgctaggg

SEQ ID NO: 235228 - DNA, 837 bp, Homo sapiens
ctgagatgtttgggtggagagaaacataagtctggcctacgtgcacgtccaggcatagtactttcccttgaacttaatcgtgatatacattcttttgctcacatgtaatttgttgaccttctccttattatcaccctgctgtcctactacattcctttttgctgaaataatgaaaaataataatcaataaaaactgagggaactcagaggccggtgccggtgcaggtccttggtgtgctgagcaccagtcccctggacccaccgttgtttctttatactttgtctctgtgtcttatttcttttctccgtctctcatcccacccgactagaaatacccacaggtgtggaggggcaggccaccccttcaataagtaaaatttaaaaacaacaaaaaagccacttagctactacagtctagatttgattccccagcaacagaatatcccacaactcacactggggtcatccagtcctttttgtttcagtgttgtcctttttggtgtatgaaacaaggacctgagaagctggctctttggtcttccttttcttttcactgtctatgtaagaaaccatctaaatctaaaagtgcctcctcctatctttaccagtcaaatcaaccaaaccttggaattgccttgtgtgtgtatgtttgacaatttacaaggttcaaaagtaaaaattaggctgggcacagtggctcatgcctgtaatctcaacactttgggatgccaaagtggaaggactgcttgagcccaggagtttgagattgtactgagccgggatcgtgccattgcactgcagcctgggcaacaagagcaaaactctgtctcaaaaaag

SEQ ID NO: 235229 - DNA, 511 bp, Homo sapiens
ctaaaagtagtgagcagacaggattgtaagaggtgaaaaataggagcttgtgatcagagactaattgaaaatgaaagatctttgatgtggacaagttccaagtgatgaccgagtctaaagcctgatcttcccagacagctgaagtaagagaggacacaggttgaggaaacctgaagtcaagttatgagaaaggggtggtgttacttagatttatttaggatggccctaagatctttggaaaacaaagagccttctcattctttctctaagttctacataaagggatagcttgggcaagtgctgttttagagagtgtgggaagagtgacaggaaacaagtagcacctttaagtgctaacacacctagaatatctatagaagcatacactagaagctactaaggtcagggaagggacagtatggctgggagacagaggtggaaagaatattttttactgtacatctttttatacctttatacctttcaaattttaaactacgtgtaacaatta

SEQ ID NO: 235230 - DNA, 225 bp, Homo sapiens
cgaggaaggctgtgtcgtgggaccttcaggcattgtttaatctgtgcagggcgcagtcttgggcaggccccagccctctcctctgcccactcgcaaagcccggcctgcttgctccaccggcaactgggctggaggagaggcgaggggcagggtgggtgctaagatcctgtgcgaaaagccaggaccctcgtggtacctagggaaatgaaaatcgcgttgacagta

SEQ ID NO: 235231 - DNA, 168 bp, Homo sapiens
cagattgataaactaacagcttctcagttccttctcagcttctggctcccccatccctctaacccccatccctctaacccccatccctttactatttttttccatgagatttgaaggctcataatgtgagcagttttccaaacttatggcatctttccaacacaaatc

SEQ ID NO: 235232 - DNA, 359 bp, Homo sapiens
atagatagtatgtatagtagtcctatgtttcgcttttggaggaagcactgtcctgttttctgcagtgactgcaccattttacatgcctaccagcagtgtctgagggttggtccgctctaaagttattcttcctacacctcccaaagtggaattccaaaaccgccttgttagaccagcctgacaatttacaatattcatggaaagacacgtcctagtatgttcaaaattccaaggttaagatgcctggaagttatattaaaaaagtaaaactgctgtctttgccgcatctactgtgagaatgaagaccgttcccagcaaccaacccatggatattccagaaaaggtcaacattactctaa

SEQ ID NO: 235233 - DNA, 245 bp, Homo sapiens
tgagaaacacttgaacacaggaggtggaggctgcagtgagccatgattatgccaccacactccagcctgcgctacagagagagactctgtctcaaaataataataataaataaatttaaaaataaatgtttgctttaacaaaacttttgtattatgtgttcctaccataactttggaaaactaatagtatctattctacttacagcaagtgcagacacaaactaccaataaagcctattttgttt

SEQ ID NO: 235234 - DNA, 415 bp, Homo sapiens
aagtgaagactaaacttgacctttgttctgtttcttccttgggggattagagaaagtcactccctgtaaccagttatttttctactgacccctgtcaggcctctgagcccaagcctgcacgaatacatccagatggcctgaagcaagtgaagaatcacaaaagaagtgaaaatagctggttcctgccttaactgacattaccttgtgaaattccttttcttggctcagaagctcctccactgagcaccttatgacccccactcctgcccgcgagaaaacaaccccctttgactgtaattttccactacctacccaaatcctataaaacagccccacccctatctcccttcactgactctttctggactcagcctgcctgcacccaggtgaaataaacagctttactgctcacaca

SEQ ID NO: 235235 - DNA, 370 bp, Homo sapiens
ctgatacttaatacacaaatatatgcagttattgacctaaattatgctttaattcctatttatatcagaataataatcagaagcagtttggtttaatagtgacagaaggcagtcaaatgcctagtcagataggggcaggtccccagtgaaacctcaccttcaagccaaagacaatttaaagcctgaaagccaagctacaagtcaaatccactgatcagaccgagaacctctcttcctgtttggcacactttcctgtgattgaccctcatacttcacctattttacatgtacctactcttccctaattgtttttttttttttttactgttctgcccacctttgagtggtgtctttgttttagcttttttgc

SEQ ID NO: 235236 - DNA, 350 bp, Homo sapiens
ctgctgggttagagacaggagaggaaaaaagaatagacagcgattcctggtgtaaaagaaagagctgaactcacaatagaatagacattactctgataaattaaggcccatcataaaaacaagatatttctacaggagtttaaagcctgtagtatactcagggtaacaatagtgctaacttcaaacccagcccagtgcctaactagataaactctaacccttcagtaaaggcctaggagaagaaaagtcttgccccattttaggcataaaaactatttagtttctactgttgcacacaagaggatcagcttccaataacaacaacaacaaaaaaccatgagatgtattta

SEQ ID NO: 235237 - DNA, 2094 bp, Homo sapiens
gatcttggctcactgcaaccaccatctcctgggttcaagcgatcttcccaccttatcctcctgagtacctggggctacaggcatgtgccaccacgcctggctaatttttgtattttcttagtagagatggggttttgccatgttgttccggctggtcacaaactccagggctcaagcaatccactcacttcagcttcccaaagtgctgggattacaggcatgagccacaacacccagccctttatataattttaaaagtgtaggtaattaggtaaaattaggttaaaagtatatgtatatttacctgatatttaaatattacctaagtgtttaatgtggacatgtaagctctttaaagatagtgcttatgtattttatatctgtttcacatactccttatatatcccccacagaaatggtcacaaataggttccttaataagtatttttgaattcagccatgctatatattcattagtaagtgagttttcttttattatgaactacaaactttaacctttttttgagtagtgagcagttattcatttaccttcacactctttaaataccaaattttgagtgagtgagtgtgtaaggttttgtcatacagacttgcaattcctatatgggataaagtagactagcacaggaatttttcttgtatcactcatgcaagactctaaattccttaaaggcagggatcatgtatattttgatcactgttgtatcctcagcacttcacatggtgcctgtcacataaatatttgttaaatgacttctccaagcaatagctttgtctttatgttatcctgtatttcaaaacgttcatatataaattctctcaactatgacttgtttcatagggtctaataattgttcctctgctgagttattctcagcagatttagattcatttagcaaatgtttattgagcactaactatataccaggccctgttctgggcattcaggatatagcagcaaacacaataatttaaaatccctgtccagtgaagtgtatattcttgtaggctctgtaaaaagatgccctgtgcattgtcatggttgtttctcagtccctgactcttcttccgtgactagatgtttttcttactcatgtgatcagttgctaattcagacgtggctgtcatgcctgtgttattaagtaacgccatgtttcccaatcaaaaccagtctctattaagcaactccaaatattccaaaagcattctttaaggaagaaacaaccggattgcaaaatagttttttctgaaatttcaagaagtgaaaagtttgatcagaatttattatgtcaaatggagagtttgtgtttattattaaaatatgccttatattttaatatggtctagcttgtgtctatctggctatttctctaagtgtttagttaactgttataagaagataacaacattacaaatgtccttgggggtgaaaaaacttgccagaaaatactaaaaagcttaatttacttgcgtttttttttgtagtacttattgtattttagttacaactttcctatgtctattgaaatataaatcctgatagctttaacttcatagtagtctctactatgtggagaatcttagaaatgttagcagtcatcattgaagtatagcttaagactgtgtttggttaattgaattttctggttatctgagtttgttttacatgggttatcattatcgtttttcaaaatataagagaatatgattcagaccattagaagattatgaagataataattattaacatgtaataattattataatttatcatgtgcaggcattgttgctcactttacaggcaatctcatgtacatacaactttatgacatagttactgttattatccccaattatagatgaagaaactaggttttaaataggttacatgacttgaccaatgtcacataacttgtacaggtgatatctgaaccaaagagtctgaggccagaacctgcacttctaaccaccttactatatagcctcaaaaattcagacatcatctgatcagcatcatcagttaattagtatatgcaatgttagccttaaaataaaaatgatgatttaagattc

SEQ ID NO: 235238 - DNA, 186 bp, Homo sapiens
tcaggctgaagcggatgcagagatgaaaatttgggtgcaagatgtttattaaggatcaacatctgtggcctggtgtggtggctcacacctgtaatcccagtactttgggaggccaaggggagtggatcacctgaggtcaggagttcaagaccagccaggccaacatggagaaacccagtctctact

SEQ ID NO: 235239 - DNA, 444 bp, Homo sapiens
attatagtccctctgacttaattctagtggtaactgagaaaccaaactgccagtttagttttgtaaaagttcaacaggggcaaaaatgggttcatgtctacagatccatgtactctgatcttaaaggtcctcaatgggatggtactatgataggtaggtggtggaggaaagcttgtagaggcagtagtatatcgtggatgaaaacactggctttcgagctgggtaaacttgggcccaaatctcaaccctgcttctgagaagctgttgatttcatgaacgttccttaacaatctgtgtctgggcttccttacctgtaaattaggattgataatgtaatttcccacaggtgggatcacctgagcctaggagtttgaggctgcagtgagctatgatcatgccactgcattctagcctgggcaacagagtgagaccttgtcccctaaa

SEQ ID NO: 235240 - DNA, 1938 bp, Homo sapiens
  misc_feature (703)..(703): n is a, c, g, or t
  misc_feature (712)..(712): n is a, c, g, or t
  misc_feature (1220)..(1220): n is a, c, g, or t
actatccttgagtgtttcactacgtattaaatttccacaatgcatcactagagcctatattgtatctgtggacactctttaaatgtggacatttaagcaaaagtcgaaagaataaatctagaaataaaaatgaatgtgaaatttgatgagaaggattggctcctgctgcaaataaatttctgttcattatacattacagtcagtggtattctattatagcagcatgaaatggtctaatacatctgatcaagaatggagaatctcagtcctatgaggacaaagaggcttccatgacctactaagttgcctggtattgttcagtctctcctgcaggctctttgtcttgtagcctaagtatctcttggtagaaaaaagaagtctcaggacaggtgggtgaggagatgcactctcatgtcttaagttcagctggtgctatgctgggggctactgtttgatctggagaaacaatgggcctatctgggctgccttctgctactatgtcatgggggaaagaagtactggatatggatggccttcctctcaggtgggaggacacaaggcatcttgatgttgtgttgttgctcaaatcctgggtccccacaccagctcttctatttttaccacctgcagagttctcctttatttgctttttgtaccatttgcagtgcttaaggttgtgcctagtgagagggagcgggaagangtgggtctntgccttcttgtttgagctacagcttacttagatgtttttgatccttgtttctccaatattaatgattaatttttaaaactttaccctaaattaatctgtattaccttttttccataaactccataaagacagaatgtgtttcatttttatataattaaacaccctgcctgcaatttacaaacaaatgatatgtcatttaagtttcataaatgggaaaaagattaatcacagacagtttatttctttaaaaaataacacaaatttcttatttctgtatttgtcataagttcaacctttttgcattatcttgatcagtgtaaaatgcttggatggtcagtgttgtttgacttgtgtctgtatttggttaggatccatttaaactctctaggataatgtcaaaatcaatttcttcctttatactttcttattttcaaagaaatggtgctaaatatttctatgaatatatggaaatatctatgcgaatatgtatctgactaaaaatgttgcnggcatcttttctgtttttttaaccctttgtaatatttttattttgtttatttagtgatataagggaaaattgtgagcatttaactacataatctttatgtttccaccaaactcaattttttagttcttagtatatggcctataatctaactttaatttatcccttttatattagcttattttcttgttaacaacaaggatatctcttctggagtatctcaagtcaaggtagaaaaagtagtcaacaggaaaatgaacagaacagttttggatatgtatgagaatttaaagcaaatgtttctaaatgagaaattgtaactcaggaaatatttggcacattctatcaaaattttgtgaattttgataataaaacattcacaattcaattaggagtaaaggaacatcagaagaatttgagagcataccatggctggcagtccataaaagactagttaggaacatcagcttttaatcatcgaccctgctttcaggtttcattttaaacttatagaagaggggaagacatcagtgtgcttatttggcctttactctaaatcttaaaaggaagaaaattttaatatttcttagtttgagcccaggtgcggtgtctcacgcctgtaatcacagcactttgggaggccaaggcaggcggatcacttgaggtcaggagttcaagaccagcctgccaacgtggtgaaaccctgtctgtactaaaaatt

SEQ ID NO: 235241 - DNA, 815 bp, Homo sapiens
tctttagatgcacatctaactgaaatggagaaacctgggccagctcatgtttcatgtgctgcactcataaacctgacctccaggcagaaaaagtcctttgtgaaagtatgagaggctcctgacccagcactacccagaagagcacgagctgagagtgttctgaaaaggcggtgcttgaacaactctttgggaagcggctctgcagaggaaaccataaagatgacggtgctctatacctgtaagatgaccagagtatactttccagagcacttccaaattgcacatgattcctccatagctcagtcaagtagccgggacagatcttatctccacttttcactaacaaaaacgagggccaaggagattatgtgacttgccaaaaatcaaaacgtgagtacatggcacaggacccaggcccaaaccagtgagattaatctaccaccctgttggctgacgtttcacgtgtatctggtttgtttgttgttttgttgctgttgtttttaagatatgggttatctctttgtcgctcaggctaaagtgcagtggtgagttcctggctcaccgtggcctcgaactcctgggcggaaagaaaccctcaagtgggctctgtctccctcaccacttaccctggcaataagaggaacctagtcaagcaaaattaagccctgtcaccaaattccatttctaatttaatcaatttttaaatttctaagatttggccatattgttgtatttcactgtagttcgcccattttcactgctgtatcatatattcagcacatgaatatatctcagtttatccaattccaaaaaaa

SEQ ID NO: 235242 - DNA, 466 bp, Homo sapiens
aatcttcatgacaattctgtggggttttatggcctcccttttacagatggggaaactgaggttcagagaagttaaatctttttctcagggtaaacacaattagagcatggggagcagggactccaccctagcctgtctcctccaatgatcagactctttccagacaccacaactcctctcttaagaccccagggtcactctccttggggtcagaggcagccacactccatgtttctattgcctgcatccacgtcacagatcagagtttgagaagggtcagagtcagccaggtcagttctctccatgcccatactttgctttaaaggcttttcactcgatttgggttgttaattctcaaagtatgtccgtcaacgtgcaaaagttactgtgcatattcttttcccactgttttcttgtttttctgttgtttgttacctaaggtagctcctgccagtctctgtgtgta

SEQ ID NO: 235243 - DNA, 520 bp, Homo sapiens
atgctcagggcacactctggaccaattaaatccaaatctcaaggagagtgacccaagcatcagtattttttacagctccccaagtgatgataacacatgtcaaggtcatgaccactgggtgagggtaaccaacaaggctgcatctaacagactcctgaaaaattaagcacctgatcctgcgacattctggatcaccatggccatgcatctcggacagacaatagcatcacctcccagttctcagaaggaaactctgggaatgaacactgggctcaaaaccaaggcttttcctccctcccagcagagaaaagaatggttggtggaaggtctgggctctccctccacaacccttgtgagcagccctcaagcgctgcctccagacagctcacgccagccttctttatccacctccctgactcttacaacacttttgaatctggacattcttctcaaaatgaaggatagggcttttgcctgggatataatgagttgaataaaattttatgggtctctctgggaa

SEQ ID NO: 235244 - DNA, 418 bp, Homo sapiens
actgcttgtagttcaggctgctggagcatgggctgggaggtgggtggtgcacgagagaagatgctgagtctcaccacccatttcctccaggggacattttcttccccttcccagttttgctagccaagtggaacggaaaagtatattcttcctcaagcaaagagacaggaagggattgagtagttggtgggtattgagtgaggttgccaggtcgcaggcagcactggggacttgacccagagagtcccagagactggaaatagaggactggagccattttaatgccagtgaagatggttaaaactggttcagaggaacaactctgtagtcatttgttttctttaagtcttcctctttgctctaatttgatttaaatagagttctttgattttcagcctaatttaaaagtagcatttac

SEQ ID NO: 235245 - DNA, 491 bp, Homo sapiens
gaaaaggacttagaaaaataaataagaatggaagaaaatggcaatgttattttctctgacgttataggaaccttcaaggagtctaatgatctgatagatttagtgctgggtatggataataaagtttctatatgttaggaatgggcaaaacattcagatattggataactgaaatgggtttaagaaacccagatatcggctgggtgcagtggctcatgcctgtaatcccagcagtttgggaggctgaggcaggaggatcacctgaggtcagcagatcaagatcagcctggccaacatggtgaaaccccatgtctactaaaaatacagaaattagccaggtgttgtggcatgcacctgtaatcccagctacttgggtggctgaggcaggagaactgcttgagcctgggaggcagaggttgcagcaagccgagatcacgccagtgcactccagcctgggcgatagagcgcgactcagtctcaaaaaaaaagaa

SEQ ID NO: 235246 - DNA, 495 bp, Homo sapiens
tccccagggttactgatctgtgtcacttgcagccccttcagagagcagagaccacatggtctggtctgtgtcctggcattgtgctcatcacaaacatggtccttggcataatgctgagcacccaacaaataaatgtgtgctaaatactgaatacccaagcctggagctgtagaagactatggtctacttgtttctaatgcacagacttttggttgcaccatcatatttgcgtggctgcaatgaaagatgactttagaagaatgggtttggtgaaggcattgaaaggctacttacctgccggacatttgccccacgaaaactatcttctagaaagaattctgaccatctttgttctcaatctatgaacattttataaggcatcctaagggctacagaagcaattcccaactggtaatacaagaaaattgttttgagggcaatttaatggttaagtgtaggaaaatccactcttacagtgttaactaccaaccatga

SEQ ID NO: 235247 - DNA, 355 bp, Homo sapiens
gagaccagcttgagcaacatattgagaccctatttatcagaaaaactaaaaattagtcgtgcatggtggtgtgtgattgtggtcccaactacttgggagctgacccaggaggatcacttgatcccaggagttagaggctgccatgagttacagtagtactactgctgcactctagcctgagtgatagagcgaaatcccatcaatatctctttctcttttttttttcctaaagagaaaggctgggtgcagtggttcatgcttataatcttagcattttgggtggctgaggctagaggagtccttgagcccaggagtttgagaccagcctggacaacatggtgagagccgtctacaa

SEQ ID NO: 235248 - DNA, 448 bp, Homo sapiens
cgggaccaaagctcccccggcttgggaggagggcactggcccgccgtctgtggatccttccagaaacacgggcgctcctgcagggggaggggaggcctggggcagaaacactggaagagtttgctagaaagtgtttccctctgggggtggggccggcctggcgctccccagcacgtgcgcgcggtacctggagaaggtcctgctgggacgcctttccttcctgcggcgccccgagcttgcccggccgctccctcccgcggcagcgcctttcccacggttctaggggagctggggtggggtggggtggggtggggcggggcggggacagctgcgcttgcagggtggacgcggcctcctgggcgccccccagcccccagccccccgccccggctcccgcccccgcgccccaggcctgggacacgcggccagcggggggcgcctgcggccg

SEQ ID NO: 235249 - DNA, 901 bp, Homo sapiens
gggcctttagttttttgtttgtttctgttttgtttgtttttgtatttgttttttggaactgaatgaagtgcactgtgttctctcaaaggagatttgcgttgctttctaggggtttgggtgcacaaatccacagcttccggccttttaagccacttgtcaaggtcactctgactgcagggccagcagcctgggaccagtacagaccatcacggcacaggcttcctgggctagtcggagaaggtgaagctcgcatagtggccagggacttggcctttctgccctcacctccctgaggccacacaaatcctcagcctgtgtggctggaggtgccgccatccacagctcacctcagtttcaatatcttgtcctcattttcttttccctttttacaaaatgaagcacatatttcttctggcttttgtggcgtttctctgtgggagaggccatctgaatacctaaccagtgtgttacccagataatgaaagttagcattcactttttaaatagcagtaccctcaaaaaattgaaaaagtcctatgtagtaatgatgctaatgaagaattgaaagtgtttattaggtaaataatatggtcttgcacattgtttatgtggtaaagactgatttttgtagtcttgtaaaagacattttctgttcatttacttttttcattataagatatgtataaaataaaacttgccattttaaccatttttaggtgtatggttcagtgggattccataccctcacattgttgtgcaatgtaaaaaagcctttttgaaccatttgcttaattaataacaaaggaatttatatgtatatatacatttctagtaaaaaatttttggaaaccttgactaaccaatattaattaaaatggctaatagttggaatcatactaga

SEQ ID NO: 235250 - DNA, 623 bp, Homo sapiens
ttagagatgcggtttcaccatgttggccaggctggtctcaaacttcttgacctcaggtgatctacccactttggcctcccgaagggctgggattacaggcgtgagccaccatgctcagccgcttccctatattcttatcactgagaaatctcatcccccttttgtttttatctgttcataatgctcaaaccttacctatatgtctgacctcctgatctgcctacccaaatgcctttttaaaatctctctacctggatgtctcagatgtatctcctattctccaattccacgactgaattcaacctctactcaaaaggtgaacagaaaccacttgttcctacactatattctaaattctaagtctagaaatctgagtgttaccccaaccgctccccctctaccacaaattaaatcaatcaagtttctccctccttaatatctcttactgtatttgttttaacatcccacaacctataccttgtcagggcctcattatttttggccaggattactgcagtctacttaaaactccttatcttagccaacatggctaagatactccctctttgttccagccagacaaaattacctctggattctccactggcatggttacctctaag

SEQ ID NO: 235251 - DNA, 664 bp, Homo sapiens
gtagcacactcctgcagtcccagctactcaggaggctgaggcaggaggatcccctgcacccgggaggtagagttgcagtgagatcgcaccactgcatcccagcctgggtgatgagagcaagactctgtctcaaaaaaaaaaaaaagaagaaaagaaaaaaaggaaggaagagaagagtagaagagaagggaaaagaagaaaaaaaaaaagaaaggaaaatggaggaaaacaccaaaatagtacatgattatctccagatgatgggattatatgtggttttttttccccttatttttctacagtgtacatatgtcactttcataattcttaaaagcttgagccattatctaaggacaacactgaaataaatatacaggtaagacaaactagaagagaaattctggcagtcaacaccagtgctgagaaaaaacaccctattgatatagtcagtgtgctcccggagagagcgctgggagggctagagtttcctggtaaccaggagcctaaatttatcattcctaagggcttgctgatggcacctgagtaacttaggaaaccaaaggtgtggtcaaaaggtaagcgctcttcatactcggtaaacctactgtgttcaggggttcctgattttccttaaatcctttttattcttggatctcaactcttc

SEQ ID NO: 235252 - DNA, 2040 bp, Homo sapiens
agaatatgatgcaggtcatcaaaatctgagttccaaatatgttttgaacaatagaaaacatgagaaaaactacataaccttccaaaaccattactttgaattgtgacatttatttgaaaataaaacttccagatattttatttaaaggatcttatgttgtttgagtcacacttcgtcattatcagtccttcctgtcagggaaaagtgtgtttgggagaaatacaaagaaaagctttgagttgccaagatagcatttactaaatttggtcataaaaaatgttctgaaacttactttctgtatgctgttctagaggcagctcaagaattacagaaatttccttttttctacactcttaatttttctactttatgtatttctttttggctctttaaaaggcaacagattaaaaaaaattagaggaaaaacatttgttctactaatgtgtcacttgagaatcccagacaatacatagtatcattgagctaaaatgtgttgtagcctatagaacttagcacttctctcaaagagagaaggggagacccaatgagagaggcagacatggggtgaggccaatgaacactcagaaattaaaaagaatagttctaccttcttgacttatgtgtagcaactaaatcacaattagagaaagatacatgtgtgagtgtgtgtgtgtatacttgtgtgtgtgaaggtgtgcatgtgtacaaggaaaatggaaaatgcatttctacctagtgtcataatgaaactaggttttcggccaagatattttccttttgcctttgcatatctgtggcctactggacccttatattgtacctgtgtagaaaggaagcctctaagtctagttgagaggcaaagtgccttgaaggccgtgacccattaaggaaccatattgaagaaatgtaaagccaggcagtaatgaagagcatgacccattaaggaaccatattgaagaaatgtaaagccaggcagtaatgaagagcaaatgaggccagaggtgagcacggtaagtaaattagacccaagtgggcagtgaaatctgagagcaaatgagagtggtgaggaaagaggatgagaacgtaaggcacgggccacatggactctgcatctttagcgtgctgtttggccacagggaatagaaacccaacaaatagtggcctaactcctagatgcctgtttctctcaagggaatggattcagaggagccacttcaaaagctagtgcagtgcttctgcagtttcattaatgcatcaagcccgttccatctttccacttaacagagcttctctttggtcctcatagtttcaagacggaagtgaaaggactgtgggagtcaggacctcacatggaataaaccaggaaggcaggaggtgaagatgagaatggaatgcatgaatttgaagttgaggaaggtacagtaggtattcataatgataaggtctactatggtatgattatggaggtgagtgaggttggatggacaagacccttggagaagaaatcaagaaatggagaagcaggtattaaaaagatcatctacaggtacattgaaacctccaaatattaaaacagaagtggtattttaaatgaattatgactcccgcctccccatcccacattctataaccttccattgtcttcatggtgagtgtagagaaataaatgccttggtggagtcgctataacatgccatgagtcgcttgtttttcctcatgtgcggtttcctcctagcctcttctacagacctcatattgccctgtgttggagagagtgccaccctttagcctgggctgccatgctcctcggctcctgctgactgagacactctggcagaaggctcttccctcctttcttcccataggacatgctctcagctctcctcccaagtcctagcaatcagctacaagaatctgcttcattactttcatcctccttccctccactgcccggaggaccaggcaggctgctctcagctgcctgatctattattggggctcaaaatacatcaaactctcttaaaagccaaaacatttttt

SEQ ID NO: 235253 - DNA, 417 bp, Homo sapiens
tattacaaggaattaatctggttactagaaccagggtagatgatcagaccaggcagggccaccagtaccatccacccatttttcctgagaaaagaaaaatagggtagtctgagctctgtgaggtgtgcagaatgatcaggcccagagaggcaggagtgtgggacttcattcagcgcctcttccaccatagaagcaactgtccagggcaattgtttgatggaatttttgctcctgacaggctgcctcacccattatcttcttgttcacatggaattagtgatgctaagaacgatgcatagccaatcagcaccttctgttattttaatgcaaattcttgctaacaacttagggactgcctcttccttttccttaaaaccccactgtgactgctgctaatgggaacatatgttcagggca

SEQ ID NO: 235254 - DNA, 275 bp, Homo sapiens
tagttaaccctctgtggagtagggttaagaattctttttatgggcccataatcatagcttacactaaatgacgtctccttgtacgccaggcagtgttctaagcattttatctacgttaaactcactaaatcagcacaataactctacgaagcaggtactaccacgatggcgtggcacagaggaatttaaacctggacagtctggctcccaggatggagtgcagtggcgtgatctcagcaattctcagctactcaggaagctgagacacagaatta

SEQ ID NO: 235255 - DNA, 385 bp, Homo sapiens
tccatgaattggaggaggacacccagtgaggagggaaaagggattggactgtgccaccatctctgtaggggaggtgagacaaacgtccggtgcagctcggaagatggcctggaaggcctaacccttccacctgcctgactcctgacaccacgacatacacagttatttttaaagtgtttaaaatataaaccacattcatgggaacttgaagtcaggtctcaccctgacatccatccatctgtgtattttcaaggttgactcaaatgttgaaaagtcacctgtgatgtgttgtaccatttgagcttttgacaaaaactataaagaagcaaattaaaccaggagggaaatttctagctgccacactaatcaaaaactgtcgggtaat

SEQ ID NO: 235256 - DNA, 462 bp, Homo sapiens
agataaacataacataaggggaaagaaacgaattgcaaaaagttggtaccctgtttgagacaagtccactcatcaatgtcaaattgccatagaaggttctaatcatactttgaataatactttgactagaccagcagcattgccatcatctgggaacttgttaggaatgcgaaattccaagccctacaccaattctgctgaatgagaatctgaattttaacaagatccctaggtgttttgtgtgcatgttaaagtttgagaagcactgggctagagttttgtgtaggggattcttttgcccctcaaattgaggaatcatcttctagtgtgtccagtcttcaaagaccttaaaacaaattgtgtctttgttttgtgatccagatggaatctgcagagatgcagtcctctcaaagtgttaaagctgtttattgaaagtaataaatgctgatttgcctggtaccc

SEQ ID NO: 235257 - DNA, 1877 bp, Homo sapiens
gtttttttttttgtactttggtcactatttagaaagggtgatcagttagacacaggccacatgtttaaggtgatatttctgtgaaacattttcatcttaataattatttcatatttattatgatgaaaggcatttaaccctagagcatgtacaaagctgagtcgcaagtctcagaaatagtgtcctaaagtgatgtattggcctcagagggaattcgtatgtacttatacacaaattcaccataatgaatgcaccaaatcatacttttaaatgcccaaataattcatattcataaatttttcattttgagcccctagatattttttaatcaaaacccataccactatccattcatcttccattcaatcaaatggaaaagagccatatttttttcaaaaatagcaaaattatctaatttcccttctacttctcatgtccataggataagcaaaagaaaaaaaatctgaaacacctgagttggcactttaaaaatttttcccagaaacatgagatgggatggtcagaggtcatgcagttggtgtcatgggggcaccctgcctgttttcttctgtagctcataccggtcacgccttgttggtgctaatgacttcccaggtgcctggtaccaattcttcattagttgctgttgtcctagaaatctgtgtaggtcatggaacctattttctggaaaaccacttaatacttattttaatttctgtaaatgttgtctgtggaaaagaacatttccacattttgcttgccattgttctgaatctgactggcagataacacactttggcatctgtaatgaaattacattaatcgtctgtccttaactcttttcctggtaaaaggaatgggaaatctttgttcagatatgcaataacagtattttaaaattgttcaaattatatagaattctttgcagattatgttagagaattcattacaatttaaattcattttattatcaaaattattctttgttttttggtattacataatggtcttccttataatggagtgttttacttctatttatagaatatagagaatgttgtgtagtttgctgttttatttttttaaagaactatttttaacaaaaatttgattcaatgaaatgtaattctatttcctgaataaaacgtaaaataaaacataattttttaagaaaagctttaaaaaaacgtaatttttttaaaaagctttctgttattgagttgtattgagtatgatattttaatcaaaaatttgaatttaaaaataatcttttctaagattgagtttctcttaagtcataaaatattttactgcccccagatgagcaccataattttaatgtcacaataaattagaaaaaaaatggagaaattccaggttgcaaagccagatctgatacaaattttgcctgatgcctttatcattaccttacacttccacctagcctatgtgcctcaacaggatagacatgtgacatttttctttggaaatttgacttagtcttttcaatggtgtccctagtttaacacaacatggaggcaaaatgttttctagaaggatctcaacttacccagggatgcatttctcttttgcttctctgtttgtttgtgtatgcatgacataatgacctttttagaaaatagatgtttattataaaaatagcatctggtatcctctaacattttattgcataaagataaattagtttaattttatataatatattttaacttcttcccaatggtgatggccttcttcaatatttaataaggtaaaattagcatagtattacaataacaattgcgaataatcaaatatgccctaagcagtgtttttttcaatatcagggctttgtctctcttctcttgctcttttgt

SEQ ID NO: 235258 - DNA, 412 bp, Homo sapiens
ccaggaacaatataactgtagccattttagtttgtatttaatgcatgttcctgtgccctggctattatgaaatcacagtgctttcccgtgctgggtataggttaatttcaatcttcatctgtttttccctgtaggatttcctgaatcttaaaacaaataaataggtggagttttcatttgaatggtggtatttgagataaatatttaggttctaatgaattttaatgaatctaaatctgcagtccaggtttgctaagagagaatcataaaatacataaactagctattgagaggggtgggtaggtgtagagtctgattatttgggagacatttgatgaattaggactggaagaaaaacaaatttccaacaccatgattttatagaactgtcgtaaggaaagaagtatcatta

SEQ ID NO: 235259 - DNA, 455 bp, Homo sapiens
ctggtgacctataaatatccacaaggtgccggaacacatgaacaaagagatagggacaagtattacagatgtttgagagtctggatctccagtcgaagaaagaataaaaagagccctggtacaacactggtagacagagaactggtaggcgaggctgggaaaccagataacaaagcccacggcgattcagaacccagagtaaacaggctggaagtgaggctgagcagctctcctgcctaaggcatggactttgccaggtacatttcaactgctcggagacctggagccaggtcctggttctcaaccccacttgggatagctgcaatgaacatgatggctacaaaatgaacctgtagaagaaagggacttgctgcgatcatagaattccctgtttcacccatttccccagcacatgaagtagataaaaagaaatatttattgaaaatgcaaaaatt

SEQ ID NO: 235260 - DNA, 365 bp, Homo sapiens
gaatagaaactttaacctgagtttaacagtgcatatggctgcctagctagagattaggttttccagtctctcttgcagctgcttacgatcatttgactaaatccttgccaacttaatgtgattagaagtgatgtgtgtgacttcccactcactttcttagaggaaattgcttgtctttacctcctctcattccccttccccacgtgctaaaatacctacaaactgctggtaatccagtctcaatcctcaatcctgaaggcacagactgtaccctggggcacggatcatggtccttgggccaaaggtctcatttcatatgatctttgagctaagattctgttttaaaataattttgaagagttgtg

SEQ ID NO: 235261 - DNA, 366 bp, Homo sapiens
gtttgagaccagcctgtccaacatggtgaaaccgtgtctctactaaaaatacaaaaattagccaggcatgttggtagatgcctgtaataccagctacttgggaggctgaggcaggagaattgtttgaacccaggaggtggaggttgcaatgagcccagatggtgctgttgcactccagccctcaggtgatttttatgcatattaaattttgagactcactgcaatagatcatttttgtggagggcaggattttatctttatgtcttgaaaagtgcctaacagcaatataatatatgaggtcatccttcagtctaatggttgatgggtggagtttttctagacagcgtcattgtgcttattcacaaa

SEQ ID NO: 235262 - DNA, 365 bp, Homo sapiens
tttcaggggtttattgagattcttggacgtcacattaggaatccctgtatctgcctgtgtacctcccattgggggctcgcctgggccactgtgatcatgtgctcttccctggtcccaggctgtctggcacctccctgtcactatcacccctgcactccccatacacgccgtaccgacagggtacagtgcaaaccttccttcatgtgccaacagcagtggtctccagtcgtgacatggaccaaagtcccaggaagcaggtgatggcctctgtggcccagccagcctccttcctgctggccatgtggaaccataacttgttgtgtctctcttgttccagtctctttggctactccacaagttacccc

SEQ ID NO: 235263 - DNA, 144 bp, Homo sapiens
gaggaattcatgagagtagacagagttagccacctccaaatagggaattatggaattttcatggagaaaaataacattaaggtcgaagtcttttttctttttaatgccttcatttcttcatatttacttacttattttcaactt

SEQ ID NO: 235264 - DNA, 486 bp, Homo sapiens
gaagagaagaacttgaaaaccagtgaacattagtgatcttgccacatttgctactttttctttctctctttggtatcacctccctgttctagttcatctctacattgatatacctggctaaggcagttcaggctgctggaacaaatgacaatagactgagtggcttaaacaacaaacatgtatttctcatatttctgggggtggggatgcccaagatcaaggtgctggcagagctagtgcttggtgaggacttgcttcttggcttgtaggcagcctccttctcactgtatccacatatgatgcaaagtagagagtgacaggaagctctcatgtctcataagggcactaatcccattcatgggggctccaccctcatgacctaatcagcttccaaaggccctacctcctaagaccatcatattagtcattgagatttcaacatataaatttggggaagggggacaacacagacatttcataaaaata

SEQ ID NO: 235265 - DNA, 354 bp, Homo sapiens
  misc_feature (276)..(276): n is a, c, g, or t
  misc_feature (332)..(332): n is a, c, g, or t
  misc_feature (341)..(341): n is a, c, g, or t
tcagaaggagtttcgctcttgtcgctgaggtgggagagcaatggtgtgatctcggctcactacaacttctgcctcccgggttcaagcgattctcctgcctcagcttcccgagtagctcggattataggcatgtgccaccgtgcttggctccatctatgatttctttcagtagcgttttgtaattttcattgtagcggtcctttgattcctttgctaggtaataacaacaaaaaaacaaaacttagggctgggactttccatttctaaatctgtganttcactgttggaggaaaaggaaactgccttgggataatgggcaaaaggaaggggantaagagggnccattgcccataa

SEQ ID NO: 235266 - DNA, 499 bp, Homo sapiens
tcagcctctgaagcaatggcctgagctctacattggcttcttttagccacggctgaagttgaagcagctgggacataaggcaccaagtcccaaggctgcacacatcaggggtctctgaacccaacccaagaaaccatttctgcctcctaggcctccaggcctgtgaagggaggggctgctgtgaagacctctgacatgtcctggagacatttgcccattgtcttggtgattaacatttggctccttgttactcatgcaaatttctgaagccagcttaaatttctccctggaaaataggtttttattttctatcacatcatcaggctgcaaattttccaaacttttgtgctctgcttcttcttgaacacgttgccacttagaaatttcttctgccaggtaccctaaatcatctgtctcaagttcaaagttccacagatctctggagcagggacaaaatgccaccagtctctttgcatagcaagagtgaactttactccag

SEQ ID NO: 235267 - DNA, 729 bp, Homo sapiens
aaaagaggtttaattggctcactgttctgcaggctttacaggaagcatggtgctggcatctgctcagtttctggggaggcttcaggaagcttacaatcatggcagaaggcaaaggaggaacaggcatgtcatatgtttttttttttttaatgaatccagacaaggtctcactatgttgcccaggctaggctggtcttgaactcctgggctcaagtgatcttcctaccctggcctctgccacacacttttaaacaaacagatctcgtgtgaactcagaacaaaagctcacttatgactaagttgatggcctaagccattcaaaagggatctgcccccatgatccaaacacctcccactaggccccagctccaacactgggattacatttcaacatgcgatttgggtgaggacaaatatccaaactatatcaccatcctatttcaagcttgctgacagatttcatcaaatgtgaatacaggatttgtaccaaattagtcattaggaaaatgcaaataaaataccaatgagggccaggcgcagtggctcacgcctgcaatcccagcactttgggaggctgaggcaggcagatcacttgaggtcaggagctcgagaccagcctggccaacatggtaagaccccgtctctactaaaaatacaaaaattagcccagcatggtggcatgtatctgtagtcccagctactcgggaggctgaggcaggagaatcactt

SEQ ID NO: 235268 - DNA, 511 bp, Homo sapiens
tttgtagcgttgaatagttttgattagatttggttattatttaaagcccagaagtcattttaaggtatatttgtatgcttttcagctttctcattttatgagcctgtatttaaagcaaatctctctatatagtcacgtgatgcctaatgttattttggacaacggtggactgcatgtataatcgtggtcccatagggttataatggaactgaaaagttctcacccattgacatcatagctgtcctaatattgtagtgcaatgaatatattactcattagtttgtggtgatgttggtgtaaacaaacctattgcactgctgctagtctcacaaaagtatagcatatacaactattacacattctgtgatattcacacaaccacagaattgcccagtgacacatttctcagaacatatctctgttgttaagtgatacatggttatatttgtagtcttactgcacaagaattaattttaatgattataatttttagattaacttccccaccatt

SEQ ID NO: 235269 - DNA, 467 bp, Homo sapiens
tctaggtatcacaatatgtgatcttttatgcatcaggtccattattaaaagaagcaatttgatactgctggaaaaatcaaatcaataaatggatttgaaatctaaaaaaatgtaatagggaaataagctttcaatatgaatacacacacaaacacacccaggttgcttcaggatattgcttcagtgctgctaatttctaaaacatttggaatagttatttagaattcggataaaggtcatgctagaccacattactcagtaaaagcagtaaacatggggaatgacttcaggagtcccatatcatgctgtggctacagcctctgctactcaagctgcaaaggctagctgatgttccgagcctggctgcctccactaaaaaaaggaggaggagaaggagaaggggaagaaaaagaagagaaggaagatgaagagaaagaagaagatgaagaaagaaaaagaaaaacaaa

SEQ ID NO: 235270 - DNA, 815 bp, Homo sapiens
ttatgtaggtcaagctggtctcgaactcgtgacctcaaatgatctgcccacctaggcctcccaaagtgctgggattacaggtgagcttattaaacaagtgtgtaaatgaataaaaaaagaaagccaagcatgaaccaatggattattattatgtttttgaagcattgaagtcaataaaatacacacaagcccagggctggatggttgctcttacttctaagggaaagatttttacataaagaagaaaatggaagaggaccagtgttgagaatgtgtcaggtgataagaattaatattaatccagttctagtcattgagttcattgaataacaatgagaatgaagatctagttgattatctctgtgggtgatgggcagattgacagatgttagttttattcagagtttttgaacagttttctttggattctcagctatggattgtaagggaatgaatgaataagtttatgtcacaataagttaaaagaggacagatgacagaccagtgatggtcataaattttgaagcaagtattaggataatacatttctatactgctgatgtccatgtaaaggatataatgtctggactcctaaatgcttaatgttcacagatgtgttcttgttatagtcagttttggatgctggtagatttatccttcttaattttctttcaaaagatagatatgagattaaattaacctattacaaattaaatagtaaataagcaaatagatgaatacataaagagggacaagaaggatttgtcaattaaataaaattttattttattttaagaataaaataaaacttaaaa

SEQ ID NO: 235271 - DNA, 438 bp, Homo sapiens
caaatattgttggatggatgaatacatttttgtgacaagactaagataaatcagtctttgtagattaaagccaccatttacaagctgtataactgtctaaattacttaatctttcttagtctcagattctttatctgtgaaaaaaaagatggccaggcgcggtggctcacgcctgtaatcccagcactttgggaggccgaggcgggtggatcacccgaggtctagagttcgagaccagcctgaccaacatggtgaaatcccatctctactagaaatacaaattagccgggtgtgttcgtgggcacttgtaatcccagctactcgggaggctgaggcaggagaatctcttgaacccaggggacggaggttgcagtgagccaagatcacaccactgcactccagcctgggcaacaagagcaaaactccatctcaaaacag

SEQ ID NO: 235272 - DNA, 466 bp, Homo sapiens
cagttgacaacaccacctgcttttttgaggccagtgaagaagtccacaagtgcctgccttggttctgctgtgcttgcagctgtcacgggatctgaagccagcccactgctttcacagaatgaagctccagctcatccacccagatgccaaggaccaggacaccctcaaccagtaacacacactctccttcttcaatgacgtttgtgttcctagaatccattttcctcagtcaggccctggccacgaagacccctgcctaccgatcttctgtactagcccagcacgcgtggacacattcatctgcacgacagacatcatggggcaccttctgtgagcaggcgctggggagacaaggccagcccgcctcagttcccacggtactcaagagacagcaagccaggccaccccagcatggtgaggtgggcactgtgttcaccaacaataaaggcggacaaaggttggtgca

SEQ ID NO: 235273 - DNA, 482 bp, Homo sapiens
ttctgttgcccttaggtgtctgaagtggtcccccaacctctctaaagtttcagattgaggaataatcatgagttctgagaagtgcttgaaactggaggatggggtcccagtgaagtcaaacagcacaaccaacactgaaacctctgcagttgaacctcattagagctggtcctcctcactttcttcccatcagtctctctgtctcaaagacattcttggcagagttggaagggaattccagcaagataataccatccagtgcccaaggcaggggatgcagtgtccatgtggccccccaaaagatcactgctcccatgttcctgagagaggaacctgatggatatctgaggtccccatgccagtcctctgatattggccccactgaagagattggtggcttgttgaccacagcctgcccaggataaaggctggactagtcttacttttgaagctgagcaaataaatatagaagcacaatccat

SEQ ID NO: 235274 - DNA, 224 bp, Homo sapiens
cccaccaacctaagtttctgtacccactgaaaccacccttcaaaagtgaaggagaattaaggccttcctcagaaaaataaaaattcaagaaacttgttgccaggagacctgtcttgcaagaaatgttaaattaaattctttagggaaacaaaagatatataactgaaacctggatcaacatttttttaaaaagagcattaaagaaagaattgtggtacaataaa

SEQ ID NO: 235275 - DNA, 485 bp, Homo sapiens
aggctaaggcaggagaattgcttgaatccgggaggtggaggttgcagtgagccaagattgtgccactgcactccagcctgggtgacagagcaagactctgtctcaaaagaaaaaaaaaaggtaaaagaaaaggagcagcagtttcctgagctgcgagctgatgttatctgttatggacaagagtttatgtgaagactggcagtctcccaccacactaggagacacgctacctctgtctccatgcacatgcttcaaggatgtgacgacagcttccttcagctgtcagcagtaagtttaaaagttaaaaactggccgggtgcagtggctcatgcctgtaatcccagcactttgggaggtagaggcaggcagatcacttgaggtcaggagttcgagatcagcctggccaacatggtgaaaccccatctctactaaaaatacaaaaattagccaggtatggcacacacccatagtcccagctccgtctc

SEQ ID NO: 235276 - DNA, 462 bp, Homo sapiens
ttattttttttatcatcttgcagagattagtgtttaaaaaacaatgcagctatagttagccctctgtatcctctgggattcaaccaactgtggatcgaaaatatttgtgggaaaaaataatacaaatttaaaaacccatacagtacaacaactacttgcatttcatttacattgtattaggtattataagaaatctagagatagtataaggtatacaggaggatgtgtgtaggtatatgcaaatactgtgtatgctattttatttatttatgtatgctattttatataagggacttgagcatctgtggattttggtatcctcaggggttctagaaccagtccccaaaggatactgagggatgactgtatatccagttgtatgttggtggttatcttgtttgaaatagaagacacacagagttaaactttaccttgcatgtatatacagaaaatggaaataga

SEQ ID NO: 235277 - DNA, 515 bp, Homo sapiens
aagcctttctatggctaatgctcgaactccatcctctctttcctagaaggcaatctgggataaatttttcagaactccatttgttgcctctgttagaaagaaaacactgggcaagatgaacctgcaagtagagtaaatggtttatttcttatttgcttttaggagtgtgtaaggagattttttggtctcccgtttttactttataaaaaatgagtgagtgtgccaagcgctgtggctcatgcctgtgatcccagcactttgggagaccgaggcaggcagatcacctgaggtcaggagtttgatatcagcctgaccaacatggcaaaaccccatctctgctaaaaatacaaaaattagccgggtgtagtgccatgcacctgtaattccagctatatgggaggctgaggcatgaacattgcttgaaccccggggagacggaggttgcagtgagccaagattgcaccactgcactccagcctgggtgacagagtgaggctctttctcaaaaaaaaaaa

SEQ ID NO: 235278 - DNA, 624 bp, Homo sapiens
catggcatctaaatgagtaactatacacattcctcctctccagcaagtatacagaaatcttcccttactccaatttgacgctgcaaaatcatacatgcacccctactgatctgtgtgttgatctttctcttcccacaaggcagctgctggaggaggtgaagtggcatcgatgtcatctttgaaaagtttctactttgtcccttaatgccaccctgacgtatgagcctctgcttcagaggtttgcaagcctggctgcgtattagagtcacctaggagcttaagtggcttttgatgcatttccaagtagaataaggtaggtcagtagatggaggataacagtaaaatgctagcaggccgggtacagtggctcacgcctgtaatcccagcactttgggaggccaaggcaggtggatcgtttgaggtcgggtattcaagaccagcctggccaatatggtgaaaccatctctactaaaaatataacaggcactcagtagtggcgtatgcctacaatctcagctacttgggaggctaaggcaggagaatcgcttgagcctgggaggtggaagttgcagtgacctaagattgggccactgtactccagcctgggtgacagagaccctctca

SEQ ID NO: 235279 - DNA, 571 bp, Homo sapiens
atatgctaagaccctggcgtgtattggatatgcctagccacaaacgaggcaaccatgattgttaatatgcttctcttacaaatagggaaagtgaggctaagcaaactcggcctccttgtgcagagttccaaaactggtgtggttgagtccggtaggataaaccctagcagtgtgattctgctatctgtgtggaatcccatctgtcgccagcaagtgagcctccgctgttcagggtttcccggctacaaaaagtagaagggctgccttctgtcgggaaattgattgcttggtgatgagtccacagctcaaaattcatacttaacacttttaagtagttgagctgttttccaagcgaagtggtcgagtggggctgaagtacttacttgacgagtctggttcagaaaaggtcaggtcggaacccacccagagacaccggctctaggcagcgtgatccgaacaataatttgttctcgccaaagtgacatttttccaatttgagtccagcattgttcagaagcaaatgcagtcccctggggcgcctcccgcatagatctgcagcagatgacaaact

SEQ ID NO: 235280 - DNA, 414 bp, Homo sapiens
aaatataaatgtgaaaattaaaaagttgaactgttagaaaatatagaagactatctttgtgaccttgaaagatttactgactagtacacagacagcaagaaaaaaagcagatttatattttcaacattcaaaactttttgtatgatgaaatgcatatatactagctaaaatatatcagaagaaaatttacagaagaggaaacccagctgggcaatattcacataaagaactgtacaacctcaagagcagttaaggaaatgcaaagttaaactgcgattccatttcacatccattggttgtggagatatttggaaacataaacctaaactggaactcttacttgtgtttgtatgcagagacactttggaatgcaaattatcaatatttatacaaattaaagatacatacactttt

SEQ ID NO: 235281 - DNA, 535 bp, Homo sapiens
caatgggaaaatcaagcatggtcagcctcaagcactcctcagaaggcactgccgggagctgcccccacagtgccaggaccacactgcccctgccacacaagctgcagcactgaaggcctgcctaagtgagcgcagtcactcctgccctcactgacatctccgcagaagcaggctctcccagccccagctcaggagccagccagagcacgcagcttgccctgcatcctctggcaggccctgccccgacccctcaactggcctgcaaggcccagacagactggagggcgggggcctgcacttagccacggggggctggggggtggccagggacacccactacgagggtccatgccatgccgtctgggcaacccaagagggtgaggactgcatgcccaggtcccgcagggttgctggtgaatcaatgagcaacgtctaactagtcggcatggaaaataatacttttaatccaccaattatcatactcaaatcctttccttttcccccagcaataaacactgagcaaactattcacaat

SEQ ID NO: 235282 - DNA, 595 bp, Homo sapiens
ccttctgactgatagaacatgccatattctttaactatctttccccaactcttcttgtgtttcaaatctcagcttaaatgtcacttcctagtgaagctttccctgaccaccctaagtagatcagctcttcttgttattcatcataacactgcttattttcttcacagcatttttctcaaactatacttcttttgttatttgtttacttattgttattgttaatattattaatagaattaatattacttgtttacttattattatttttgctaatttcctatcttccctactagacagaagacagtttctgaaggcagaggccaagttggtcttgttcactgctgaatccctcattgtctcgtacagaaccttgtatataataggtgttcagtaaatttttgctgaatgaatgcatgaatctaaaggatcattatgggggaaaagtagactaatgtagtataactataaatggaaaatctacatcaattgggagagctccatattaaaaaaaaaacctttctgttagagatgtccaaagatggaaggcactccttcaggagtttcctgaccctggagatatcatgttgaatctggg

SEQ ID NO: 235283 - DNA, 151 bp, Homo sapiens
caatttgcttatgtaatgtttatctaatttcgtgtttaatcatttttgctataggtattcttagttataagataaactttattttgaactagagtgggaaggtgtgtagacttcattgtgttgatttaataaactgtgatcatagtttatg

SEQ ID NO: 235284 - DNA, 468 bp, Homo sapiens
tagatggcgctgtcaacttggacagcatatataacatctagaaatttcgattctgttataatggaagttatggaattgtccatagggttattgtggggagcaaatgaaataatccccataaagcagtgattttaagacttcttaaaatgtttacctatagtaagaaataaattttatatgggacatatgtgtacatataaactataagtttcactgaagaatttttattctactaaatgtaataaactctgctttctattctgttgcattttcataagcctctaggtcatgactgtttgcgacattgagaatactaagttatgaagcatgtgttgttctgcataatatgcctactatgtgtcagtgcctcctactatgtgttaagcatactaggtgctaggcatgcagtaaggaacaagacaaagttcctatccccatggagcttctggattagttggggagaaagac

SEQ ID NO: 235285 - DNA, 2115 bp, Homo sapiens
accggaaaacgttgtcgctcatcctatgacgcgaaagtaaccgagactatcaggatccggagacggaaatgtccgaaggccgcagtacttgaccctgtattttgggagtcgaacggagaatggaaactgaaagtggaaatcaggaaaaggtaatggaagaagaaagcactgaaaagaaaaaagaagttgaaaaaaagaaacggtcacgagttaaacaggtgcttgcagatattgctaagcaagtggacttctggtttggggatgcaaatcttcacaaggatagatttcttcgagaacagatagaaaaatctagagatggatatgttgatatatcactacttgtgtcttttaacaaaatgaaaaaattgactactgatgggaagttaattgccagagcattgagaagttcagctgttgtagagcttgatttggaaggcaccagaatccggaggaaaaaacctctgggggaaagaccaaaggatgaggatgaacgcacagtgtatgtggagttacttcccaaaaatgttaatcacagctggattgaaagagtatttgggaaatgtggcaatgttgtttatataagtataccacattataagtctactggagatccaaagggatttgcgtttgtggaatttgaaacaaaagaacaagcagcaaaagcaattgagtttcttaacaacccaccagaagaagcaccgacctggcatatttcctaaaacagtgaaaaataagcccattccagccttaagagttgtggaagagaagaaaaagaaaaagaagaagaaaggccgaatgaaaaaggaagacaatatccaagccaaagaagaaaacatggacacaagcaacaccagcatcagtaaaatgaaaagatccagacccacatctgagggctctgacattgagtccactgaaccccaaaagcagtgctcaaagaaaaagaaaaaacgggacagagttgaagcatctagcttacctgaagtcagaacagggaagaggaagagaagcagctctgaagatgcagaatccctagctccccgatcaaaagtaaagaaaattattcagaaagacatcattaaggaagcatcagaagcttccaaggaaaatagagatatagaaatctctactgaagaggaaaaggatactggagatctaaaagatagctctctcttgaaaacaaaaaggaaacataagaaaaaacataaagagagacataaaatgggagaagaagttataccattaagagtgctatcaaagagcgaatggatggatttgaaaaaagagtatttagcgctacaaaaagctagcatggcttctttaaaaaaaacaatatcccaaataaaatcagagtcagaaatggaaacagacagtggagtacctcaaaacactggaatgaaaaatgaaaaaacagccaacagggaagagtgtcgcacccaggagaaagttaatgcaacaggaccacagttcgtgagtggagtgattgtgaagatcattagcacagagcctctacctggcaggaaacaagtccgggatactttggcagcaatctcagaagttctttatgttgatttgctagaaggggatacagaatgccatgctagatttaaaactcctgaggatgctcaagcagtaataaatgcctatacagaaattaacaagaaacactgctggaaactcgagatcctttctggtgatcacgaacaaggtattggcagaagattttggttgatagacaggcaaaacttaatcagcctcgggaaaagaaaagaggcactgaaaagttaatcaccaagctgaaaagattagactggcaaagactcaacaagcgagtaaacatataagattttctgaatatgattgaaaaaaaaacagttcacctcttaatacttcacaagatacttgagctgttcttgggagattcacttttattatggtagcctgcataattaatgtgtttttaattaaaagaaatatctttgttcctcaacttgtaaataagacttttttctagagacaatatgatgtataccacatttttcttaaacattttatttgttgaaattatcttagatgtcagtgtcaggtgatttagtaaataaatgtgttttgaacatt

SEQ ID NO: 235286 - DNA, 2323 bp, Homo sapiens
accggaaaacgttgtcgctcatcctatgacgcgaaagtaaccgagactatcaggatccggagacggaaatgtccgaaggccgcagtacttgaccctgtattttgggagtcgaacggagactctgccatcgtcctcaaagagtaaaaaatccagttacggaagggaactaacacttgctagatatggtgtgcagagtgcgtttgcaaagaaacttaagagaaaacaaatgataggacacagggtggtggaagatctcaaagagataatctggccctgtgttttaaaaggtacaaagaaactaaagctatgatccctaacatagaaggaatggaaactgaaagtggaaatcaggaaaaggtaatggaagaagaaagcactgaaaagaaaaaagaagttgaaaaaaagaaacggtcacgagttaaacaggtgcttgcagatattgctaagcaagtggacttctggtttggggatgcaaatcttcacaaggatagatttcttcgagaacagatagaaaaatctagagatggatatgttgatatatcactacttgtgtcttttaacaaaatgaaaaaattgactactgatgggaagttaattgccagagcattgagaagttcagctgttgtagagcttgatttggaaggcaccagaatccggaggaaaaaacctctgggggaaagaccaaaggatgaggatgaacgcacagtgtatgtggagttacttcccaaaaatgttaatcacagctggattgaaagagtatttgggaaatgtggcaatgttgtttatataagtataccacattataagtctactggagatccaaagggatttgcgtttgtggaatttgaaacaaaagaacaagcagcaaaagcaattgagtttcttaacaacccaccagaagaagcaccgacctggcatatttcctaaaacagtgaaaaataagcccattccagccttaagagttgtggaagagaagaaaaagaaaaagaagaagaaaggccgaatgaaaaaggaagacaatatccaagccaaagaagaaaacatggacacaagcaacaccagcatcagtaaaatgaaaagatccagacccacatctgagggctctgacattgagtccactgaaccccaaaagcagtgctcaaagaaaaagaaaaaacgggacagagttgaagcatctagcttacctgaagtcagaacagggaagaggaagagaagcagctctgaagatgcagaatccctagctccccgatcaaaagtaaagaaaattattcagaaagacatcattaaggaagcatcagaagcttccaaggaaaatagagatatagaaatctctactgaagaggaaaaggatactggagatctaaaagatagctctctcttgaaaacaaaaaggaaacataagaaaaaacataaagagagacataaaatgggagaagaagttataccattaagagtgctatcaaagagcgaatggatggatttgaaaaaagagtatttagcgctacaaaaagctagcatggcttctttaaaaaaaacaatatcccaaataaaatcagagtcagaaatggaaacagacagtggagtacctcaaaacactggaatgaaaaatgaaaaaacagccaacagggaagagtgtcgcacccaggagaaagttaatgcaacaggaccacagttcgtgagtggagtgattgtgaagatcattagcacagagcctctacctggcaggaaacaagtccgggatactttggcagcaatctcagaagttctttatgttgatttgctagaaggggatacagaatgccatgctagatttaaaactcctgaggatgctcaagcagtaataaatgcctatacagaaattaacaagaaacactgctggaaactcgagatcctttctggtgatcacgaacaaggtattggcagaagattttggttgatagacaggcaaaacttaatcagcctcgggaaaagaaaagaggcactgaaaagttaatcaccaagctgaaaagattagactggcaaagactcaacaagcgagtaaacatataagattttctgaatatgattgaaaaaaaaacagttcacctcttaatacttcacaagatacttgagctgttcttgggagattcacttttattatggtagcctgcataattaatgtgtttttaattaaaagaaatatctttgttcctcaacttgtaaataagacttttttctagagacaatatgatgtataccacatttttcttaaacattttatttgttgaaattatcttagatgtcagtgtcaggtgatttagtaaataaatgtgttttgaacatt

SEQ ID NO: 235287 - DNA, 497 bp, Homo sapiens
tgcatccagcctgagttggggataagaaattatgctcttactggaggcaaaaccagagctgccagtgtacatccagccagctcggccccagagtttcccttaccaggtcagcagtggccccaggagccctggagattgggcacggccccctgccccagctctctgggacgatggtccggctccagccgctctgataagagtgcccgctacccccagatggctgcctcagtcctttcacagccaattctagagagaaggaaaaggagtgagacgagctggccagcacacagtcaaggcccaggggctgggatgggcggactgtggcatccaccaatttgtcatttgtgcaaagggcccggccttagctttccccaaagggaggcccggcccaaccactccctagaggcccaggagtgtggctgggagtcaggacgtgtgtggcagggaaccaaaaggccggtcagagggacggggtggctgcgctgccaggcttccag

SEQ ID NO: 235288 - DNA, 356 bp, Homo sapiens
ttacccaaaacctatgtagcaataacagtcctaataaaaatgcatgttagattcttttaaaatttaaggaataggctgggcgcggtggctcactcctgtaatcccagcactttgggaggccaaggcgggtggatcacttgaagtcaggagtttgagaccagtctggctaacacggtaaagccccgtctctactaaaaatacaaaaattagtcaggtgtggtggcacacgtctgtaagtccagctacttgggagggtgagacaggagaattgcttgaatctgggaggcagaggttgcagtgagccgagatcatgctattgcactccagcctgggtgacagagcgagactctgtcaca

SEQ ID NO: 235289 - DNA, 448 bp, Homo sapiens
caagaagactgtgatgagatttactgagaaaagaagtctgttagataagctttgttcaggccgaaatgatagtgttgtgggctgtgagttcaatgttaatgaatcaatgatacatacttcatagaagctcataaaacaaggctatgtattgattggttaatgaaaatgttctgaccagaggttcgaggtctgcagtgattttgtagggcgtaagtaccctaagtaatgagaatgggcagtatgtagaagtgcctatatagtgcatggtgtagacgagacgcattgagaagtgctgactcctgaacttggtgagaagatggcagaaagcactccaagcagtttctttccatggttgtttgtgctttgccgggaatttggatcctgtaagagtcaaacaatttttgctcataagtttctgtccctttgcatccattgaggtacagagtta

SEQ ID NO: 235290 - DNA, 421 bp, Homo sapiens
gccaggccctggagctcagcttgcctcccagggttgctcaatgccttccttctccctgtcctccagtcctcctcttcctgagcagccaccactcctccctctcctggcactcaccttcagagccacactggctgccctccctctactcttttgttggaaggactcaactgtgccagcaccgggctttgttggctatgccacacctggatggggcagtcctggagggctgctgcgtagggggatcatttgagcttcctgctctctccatcctccagagagtagcggcttccaggatagtgtgcaggaggaagcagggcagctggagcaacctgtcttcctcctctctcctgtgggcttttcccgtccacctgccagcatcaccctgtgtgccctagatgagaacgtatggctttctctagcc

SEQ ID NO: 235291 - DNA, 533 bp, Homo sapiens
tcaaaccaactctcctctccaggacagaggcaggactcagaaccagcactgatttgggtcctgggacggggctctcagtacctgtcagcaatgttgagcccaagcccagggtcagttgatcccctcccagcctcaccccaacagggaccagggacccagatccctgccaacgttaaaaaaactcccacatggcacagaaagcctcaactagcagcaagctctgctgggacagtcatgtggctggtcattagatgggcaccttcccccagaatctggggcagggcccagcctggacggcagctctaccccgccctggctgtgtcatgttgggcacacaccttaataattctgagcctcaactaactccttgtaaaaagtgcccagctaatagagcaggcagtgagctcatccgtggaaaccctgggcatgtctggtctgtactaagcatcatgtaaatgtcagctgcttgtattattacaaatggcattattactattcctactctcacatcttaagaaactctgaaaaaatca

SEQ ID NO: 235292 - DNA, 300 bp, Homo sapiens
cttgcctcctttctccgggaatactgtggttagactcaggacagccccctggaggctgtgtgctgaagctctgtgcctgagccgcaaagaaaaaatagaacatgggcccctgatggatgattcgaccttttatttcaacttaaaaaaatgtttccaagttttctctgttgtatttttttctacatgcattatttttttaccatccgtaaaaaaataatttgaggcctattttaaatcttactttattgacttccatgattttctcctatcacagaaaaaataaaataattgataactaga

SEQ ID NO: 235293 - DNA, 631 bp, Homo sapiens
tactaccacttcatggggctgttttgaaggtacaggagatgcctgcctgaagtgcttagcccttcctgatacatagcagaatattgatatttattattatttttgctcttctccaacttctagtactagtatctataccactcatttgtactcaagttatgtctgctttatggcagctcttgtccttgcactagcatttaactttgatgtgattattttaatgttgatataagctttctcctaacagataaattgtaaacttcttatttatctttataggtcctaagaataacagatgcttaataagtattggtgaaaaaaaagcaaccacctgttagggctcataacctatacctggtaatattacaacattcaggtcaagaactcaataaaccttgaattagagtaactctaatccccaaacatttttgttttccaggaaagggatgattaggaaaactttacaatttttttttcatcctgcaggtttcgtttaagagaagaaaatgcagactctatcctcttaagaaactacttctgggaaaatgcaatggagacacaaggtctaccttcctaggttttggttttccaaataaaagtttatggtcaggtcaaaaataattgctgggaa

SEQ ID NO: 235294 - DNA, 512 bp, Homo sapiens
acagatgccagaggggattcctgagagatggtggttttactctgttctgtgagtttatgagaatgaattcttatgaacctggaaggtccaggagcaactgctgaagacattcatagaaataggagttattttagaaatggaacttcacttcatctgaagttctgaacctatgagtaagagtaatagggtggagtttttgtgatgtcttatattcctttcctgaaaactgaaaaatatagataatactcatacctcgatttcacacagatgacttggtgatactcaagagacagagacttttatcaggggtgtcaaactcaaatgactaccaggtcagaaaggtaacataaattagtgaagccggctaaggaatacctatcccatatagagaaatttcccatcactcggttacattccaaaatgtatgtcagtattgtaaaatcatccagcctttcaagaagcttttaaatgggattatttttcaaaataaaagtagctaagtaaccaaatgt

SEQ ID NO: 235295 - DNA, 330 bp, Homo sapiens
tgcaatcacggctcactgcagcctcgatctcctgggctcaaacgattctcccacctcagtgtcctgagtagctgggactaccagcatgtgccaccatgcccacctaatttttgtattttttgtagagttagggtctcaccatgttacccaggctggtctcaaactcctggactcaaccgatcctcctgcctcggtcctcccaaagtgttggaatttcacgcatgagccaccatgctcagtcagatgttttagaaaaaagtcttgcactgtttggggcatacctatggtaaatattgtttacggattagctgaaattcaaattgaactgag

SEQ ID NO: 235296 - DNA, 340 bp, Homo sapiens
aagcatgtgcaaaagctgatcatgtgcacgaggaagctctcgagaataaagaattacctctttgctgtttttcacctactacgtcacacactacacaacacacccagggcttacccctactccagtgtcattggcaagtgcctggcctggtataggaggaactgtgacaccagaggaatttggcttgggttacctcactttctaggttcccaagattcccaagttaaggaagctttggttattacatagttgaacattttcttatttcatgtaagttttgtaaatcttctgtgatttcttctcctctttggcacatttacattaaattttattctagtta

SEQ ID NO: 235297 - DNA, 718 bp, Homo sapiens
ctcttaacttgttacactttgttctttactcttcatcttcattgccatgactcagatttgggccctcatgacctaaattgttatcacagacccataactagttgctgaactattctagaatgaatgttttaccgattttcttaaaatacacctgagatcagttcagtcccctgctccaaaacctttagcaactttccattacctgtcaaatgattgttcaattctttaaccagtattttataatttttgttctctgaactcagcctctttggttcagtcttagctctctctgttctcctaaaaatactcaggttgtagtcaaatcccatattttcttgtcacgtcactttgatggactgttccctcttactgaaaagtcttgccaccaactctttgcctaccaaatctgtttttccaggacaacttaaatgccactctttactgcttacctcaactaaccatgacctatcttctgaaccctcataacagtgtctgtacctctttggcacttattactgattgttattggtgtattactactgaactgtattctccttaggggcaggaaaagtatcttttaaaaaacactgtacctagacagtcattagcagagcctttgatatatatgttcaacaaactttttattaagttattgaggttactacatttctactgtaatcatgataatataaaaattataatttaaaacacagttata

SEQ ID NO: 235298 - DNA, 1240 bp, Homo sapiens
ttaagtcaaccatgttgaaaacaattaatatttacaacataagttaaaagaaccaggttcaaggtgcatatttaacgtttagccataaattacatgagagttgcagtgtctattggatttgtttcttcaagaacttctatccaaatcccagtacagtacaccaccatccttacaagcaattactcttttagagctgtttttttttaaaaaaatcaatttgtgaatagagttcaaacaaaaatgccttttttaatttcagcagatgctcgaggatttcttaccttgaagtcaaggttgccaatagcaacaaacttccgcaataaatatggcaaaatgcaacgcacatctttattctaatgccttgtacttttatacagtctttcatccatagattttcttatttgacagttaatatttaatatttaaaatacccgtaaaaggcacacatgtcttatcaccccctctttttgccattgagagatcctagaactcagaggttccaacacctcaagatacttgggcatagagctaaacttggaatctagaatcctgaactcattgggactcatctgtgaagaataatgaaacaagatttgtaaaaactggctgggtagtgtactaagcatttactctatatcaggaatacagttaagtgccttgtttacatttgttcatttagttgattaattttacaaataagaaaattcaagttcacagaggtggtcacttgctcaaagccatattccaagaaaatggtagagctaagacttgagctcaggcccatctaactccaaaactcaggctcagaaccatctaagctgtaagttgtaagagctactgagaatcaaggagcttggctctgggagaagtttgtgattctttggtgctctcttcacgtcactctactacctcactttagccagtaaaagacacatcacagattggcacaataagaggcatattagtgggcagctgaaaactggaaaaagagaaaacaggcctgcgtttacaacccttaagagtgagagactgagaccacaagcaaaacaccaagaattatttggtcacacaaaaacccggctgagtcactggagacaaaagcttaattcccttattggttttgtgtgcttgccttaattccatactatcctttaaatattctacaaataagagcacggcatattctatcgctatttacaacagggctttgctgaagattttatccagggcaaggtcatca

SEQ ID NO: 235299 - DNA, 172 bp, Homo sapiens
ctcgtgcctccctgccagggtgggtggacagtggattgattacgcctgacaactcctacttgggccctgtcactgttgtgctgatatagaccttgaggagtatcagaagggagtaacaaaatgacaaatcctctacccacatgttttaccctcaggacaaaacatgcttctg

SEQ ID NO: 235300 - DNA, 1003 bp, Homo sapiens
  misc_feature (474)..(474): n is a, c, g, or t
  misc_feature (499)..(499): n is a, c, g, or t
  misc_feature (517)..(517): n is a, c, g, or t
  misc_feature (699)..(700): n is a, c, g, or t
tttagaggctcagtccccgcgacgccgcgctggttggtgctcctgcgccggaggagttctgcgtctcggggtggtgactgggtccagaatggcttcggattcggggaaccaggggaccctctgcacgttggagttcgcggtgcagatgacctgtcagagctgtgtggacgcggtgcgcaaatccctgcaaggggtggcaggtgtccaggatgtggaggtgcacttggaggaccagatggtcttggtacacaccactctacccagccaggaggtgcaggctctcctggaaggcacggggcggcaggcggtactcaagggcatgggcagcggccagttgcgtgagtgaccactgtggccttggcccctctcggagggaggtggctcagagctggtacaaatctaatcataggattctcaggctctgggttggagtggctttgaggaaggtgtgttatgtgagactccctgcccttnccgagctgctgaagaggtgtgctgngtgaggtggcaagccagnccaagtgtctagaatctgggggcagcagtggccatcctgggggggcctggcaccgtgcagggggtggtgcgcttcctacagctgacccctgagcgctgcctcatcgagggaactattgacggcctggagcctgggctgcatggactccacgtccatcagtacggggaccttacaaacaactnnaacagctgtgggaatcactttaaccctgatggagcatctcatgggggcccccaggactctgaccggacagggccaagaggaaccttgcctggccagtcctcggggagctcagattcttacgagaactggtacgcacagggagggcactgggtactttaggggaaccaggacgaaggcgtcgaatcagggaatcagaagaatgcggcttcgcaccacgtggcacccttccctataacacctggagttcatcaccaccgcgggaaccgggcaggcgggaaagtgacaggcggccactcagaaggt

SEQ ID NO: 235301 - DNA, 975 bp, Homo sapiens
  misc_feature (510)..(511): n is a, c, g, or t
tttagaggctcagtccccgcgacgccgcgctggttggtgctcctgcgccggaggagttctgcgtctcggggtggtgactgggtccagaatggcttcggattcggggaaccaggggaccctctgcacgttggagttcgcggtgcagatgacctgtcagagctgtgtggacgcggtgcgcaaatccctgcaaggggtggcaggtgtccaggatgtggaggtgcacttggaggaccagatggtcttggtacacaccactctacccagccaggaggtgcaggctctcctggaaggcacggggcggcaggcggtactcaagggcatgggcagcggccagttgcagaatctgggggcagcagtggccatcctgggggggcctggcaccgtgcagggggtggtgcgcttcctacagctgacccctgagcgctgcctcatcgagggaactattgacggcctggagcctgggctgcatggactccacgtccatcagtacggggaccttacaaacaactnnaacagctgtgggaatcactttaaccctgatggagcatctcatgggggcccccaggactctgaccggcaccgcggagacctgggcaatgtccgtgctgatgctgacggcgcgccatcttcagaatggaggatgagcagctgaaggtgtgggatgtgattggccgcagcctgattattgatgagggagaagatgacctgggcggggagggccatcccttatccaagatcacagggaactccggggaagaaggtttggctgtggcatcatgtgcacgctccgttggccttttccagaacccgaagacagatctggtctgtgcgatgggctcaccaatcttggggaggaagcgaggcggcccaatcgtggcaaggcgcgaaagggagtcaaggcagccccggccacctttggagaggaactcacctgggtcttggtgcgcctccaggggagcctttccattccagagg

SEQ ID NO: 235302 - DNA, 771 bp, Homo sapiens
  misc_feature (474)..(474): n is a, c, g, or t
  misc_feature (499)..(499): n is a, c, g, or t
  misc_feature (517)..(517): n is a, c, g, or t
tttagaggctcagtccccgcgacgccgcgctggttggtgctcctgcgccggaggagttctgcgtctcggggtggtgactgggtccagaatggcttcggattcggggaaccaggggaccctctgcacgttggagttcgcggtgcagatgacctgtcagagctgtgtggacgcggtgcgcaaatccctgcaaggggtggcaggtgtccaggatgtggaggtgcacttggaggaccagatggtcttggtacacaccactctacccagccaggaggtgcaggctctcctggaaggcacggggcggcaggcggtactcaagggcatgggcagcggccagttgcgtgagtgaccactgtggccttggcccctctcggagggaggtggctcagagctggtacaaatctaatcataggattctcaggctctgggttggagtggctttgaggaaggtgtgttatgtgagactccctgcccttnccgagctgctgaagaggtgtgctgngtgaggtggcaagccagnccaagtgtctaccgtgcagggggtggtgcgcttcctacagctgacccctgagcgctgcctcatcgagggaactattgacggcctggagcctgggctgcatggactccacgtccatcagtacggggaccttatcaactaattgttacatcgtgtgtgtccacttaatccctgacgccacatcataatgtggggccccttcagtatctctgtaccggctacacgccgtatactctgttggttggcccctgctcccg

SEQ ID NO: 235303 - DNA, 214 bp, Homo sapiens
agtgtaaggatgttagccaaagtgttagatccagatataagccaccccacctctctaagccttgtttttcccagctttaaaataggtacaataggccaggcacagtggctgacgcctgtaatcccagcactttgggaggccaaggcaggtggatcatccgaagccaggagttcgagaccagcctggccaatatggcaaaaccccatctctactt

SEQ ID NO: 235304 - DNA, 542 bp, Homo sapiens
cagatggagtcctgctctgtcacccagactggagtgcagtggtgcaatctcggctcactgcaacctccacctcctgggttcaagcgattctcctgcctcagcctcccgagtagctgggactacatgtgcgtgccaccatgcctaattttttaattttagtggagatggggtttcaccatattggtcaggctggtctcaaactcctgacttcatgtgatccacccacttcggcctcccaaagtgctgggattacaggcgtgagccaccatgcccgggccgaagattatacaatcttaagtgttagaagagatgttagataccattccatttaatatctcattcaaagtttgagccctttctatagtcttcctcacttttgatggctaaggtagtcattaagtctaagctccaaaaaaaagtacagcttttctgtcactattttgtactatgtactttccaagcatgctaagcagttcagtgtcagcattaagaaaagtcctaggatctgggctgggtgcaatggttcatgcaagtcctaggat

SEQ ID NO: 235305 - DNA, 593 bp, Homo sapiens
aaccttaacaaactatcccagactcattttaaagcagatgaggaacctaaataaaccctttcataattttaaaaaagacaactgggactttaaaacataacagcaacctatcccagaaaataatgtgagaaattagttatgaagtatttaaataaacttttttaaattaaaactctcatgatctacacaggcaaatatgagcacagctgcaatatgccatgttagtatcattattaatcactttattaatcacatctgaggaaaaagaaatgctttctaaatcattctaaaaggtcttacaaaaaaatgaactaccctctccccaacagacacacataccctgatgaagaaaacaccaacatttcaaatattccagcaattataacacaagataatcctgaaatttatttagcctcaaaacattacgaactactccaaggaaggaacaatactttgaaaacactagtatttttaaggtacaaaaaaaaaaattatggcctggcgtggtggctcacgcctgtaatcccagcaacttgggaggctgaggcaggagaattgcttgaaccagggaggtggaggttgcagtgagccga

SEQ ID NO: 235306 - DNA, 190 bp, Homo sapiens
cagcaggtctggcatcagcctgggctgttttgctgaagtaagagatgtgcctgcacagcatggacccctgggcaaggcatgaagggtactgactggtggccatgggtggagacaagtttcagggtgtctgatatcagcttgtcagcattgtttgagggtcacaatgagactgatgacctgcaactggcct

SEQ ID NO: 235307 - DNA, 234 bp, Homo sapiens
aggggatttagatgtatgtttctcccaaagcagaaacgctcggggctcttccaggctccgcggctctaaccgcatcgggtcccagccccgcgggcggcggcggcggcgccgagggagaggagagcgggcggcacggcccccgcctcccggcccctctcccccgccgctccggagctgcccggccgggcccgagccctgcctcgccggcggccccagccccagtcccagcggccg

SEQ ID NO: 235308 - DNA, 2268 bp, Homo sapiens
  misc_feature (1074)..(1074): n is a, c, g, or t
  misc_feature (1667)..(1667): n is a, c, g, or t
  misc_feature (2161)..(2161): n is a, c, g, or t
catttagttttttatcaatagatttggaccactatgcttaaagctaatcagcaagtgattctgactagcagaacacctttgaatttgagcaaacgtactgtggttccaattgttgtcactcagaggtacaagaagagttgaattaattctcagtggcctgagtaaagatctagaggcaaccactcacatattttagaataataataataattctcttggaattcttccaggtctgttttattaacttcctactttctatactaaaagaaaaaaatagattagtaatattgttaacctgatgatgatagaagacttactctttttaaacaaattttcaccctttctaacagtttagctgaacatcctgaagcaagcgagggaaaatataaagcattgcaaactcaaaagcacatataaatcaagtcacttaaaataatggactcaagaaaaaaaaagaaaacatgatattcctggtgaagcttttgttttcacaacaaaattttccctggttacagaaaaatatttctgaagtataaaaaagtgaaggcataaacatgataatgaatgacaactggcatcttcattatggggatagaagagattggtgtggtctgtggcaaaatgaagaatgcatgccctgtcttatcagacattatgctcagctccagcagatggttatcatttggggagtcagagccggcagttttagattttacttttttccccaaagaagccaaatccagatttttaacatgaaatgtcccggcttataaatgttggctcaatttttttggacagcatgtagaccaaacaaaattgatccataagctatttggcctattggttgtcaattgatgacccctccactgtagattttctaacaagaacagatggaacattttctttgctaaccagggtaataatttagaagggctctggaaccccctcttttgaggaagcagaaccctcatgtcaggatttaataaaaaatgttttggtcattaatttataaaatttcatagaatgcaaaagtttctggattgatgacatatcacttagcttggagaaggaagncaagataactaaggcagaatgaaatgtgtgtttcaatagagatttggacaaagctctgtgacagtaataaacctaccctaggtactagcaaagcttcacaaaggaagtaacaaaaaaatgagactctgaaatattaataggatttttatagaaaaagaagagaggatttgccaagggaggaaaaagtataagcatctctacagttacattgtgggctttgctaagtcttaagatggtgattgattgggtataattggaaagtaggatacatgagaacatataattagggccaaagggacctcaaatatcagtctacacatctaaaacttgattatatagttaggggagccattcaggtttagaccagggaagatacatcatctgatctgagattatctgatctgcatgttcttattccaaatcttggtttgagttcccttaaagtaattggacactttctgtaaggaattggataaaaataaggaccctacctagatactggctaaaaagctatatgatatctggagatactgacaattcttaagaatcgactttacactagtcatgataaatcacatccttgtgatttccanatgaagctagaaagcaatgttcaagaggctatcagaatacctggtaatttcatggaatactacacagccataaaaaagaatgagattctatcctttgcagcaacatggatgaagatggaggccattattctaagaaaactaaactaattcaggaacagaaaatgaaacactacatattctcacttgtaagtgggagctaaacattgaattcacatggacacaaagaagagaacaatatacaccagggcatacttgagggaggtgggtgggaggaagctaaggattgaaaaacaacctgttaggtactatgcttattatctggctgacaaaataatatgcacaccaaacccccatgacatgtaatttatgtataaaaacaacctgtgcacatacccctgaaactgaaataaatgttaagaaaaagaatgcctggtaatttgactggcatgcagaacataatagcctgtcctgcatttgggttctgtgcagagaanattgcacctctattagaatcaactaatataagtcatgaaaacaaaaattgatggaattaggttgaaatagactggaaaggaaatgtgatgaccttaattattttagc

SEQ ID NO: 235309 - DNA, 382 bp, Homo sapiens
aattcccagctggctccctgtacactgcagatacctgaagtggttttgaagactgggcagctaagacctaagtgaagaagaattcctcccctgcaaggatgaccaagaacccagccgctctgtttccttcccgactggagtcctcttctccactgatcttcaggctcgtgtggaaaaaccgataaaatagaaaaagcaatcggaagaatataaaaatcactgataatcccgccacctagagaaaactactgttagtattttgagtgtatttccctccagcttttttctatatatgtgtatgtatttataatatataaataatatactatatattaatcaaatactatatataataaatacattatatatcttacatagaaca

SEQ ID NO: 235310 - DNA, 561 bp, Homo sapiens
gctataaaaaaatagcattcctctctcacttctcttaccaacatcttttgattccctttaccccactagaatgtaaacttcaagagaataaggactttttaaaaactgctttattaccagcacctacaacaatgcctggcatgtcaggagtttaataagtattaaatgtatgaattggttcatactaaatccttttgtgcttaagctagagtcaggactgtgttgtagacaaagcagaattttatagaagattgtaaaaagtactttaaagtctgatatagtctaatgagataccataaggtggtaaaaaagttatgaataaacaaggtgattatggttgactgactttcctcaaagtgtatgaccaaaaaatgtcgtattaagcactatacattatttgtcaatatagaggtggagtccaactatttaaagctcagtaaataaaaacctttaatgtgttatgaagtttaaggattactttctttttaggccttaattagctcaacaaattaaattgtattccctttccattttccttcacagcatcacacaaataaatac

SEQ ID NO: 235311 - DNA, 418 bp, Homo sapiens
cattcataaaattattaatccaaattgcgaaagtagacttttacagagtcacaggtcagtaacaaaacaggaaatgaaatgttccagagccttgaataactcttcacaatattgctttctagaattttagttcctgcctctttttaaactataaactagtattacatttatagccagtatttaggtgtaccctccctctcattagtttatgcccctagacaaattctctttttgcttaagtacacctactttcttccactaaagttttgtacattgcaaactgttgagtctttgcatgtctgaaaatgtcttcatttcccccgtgctcttgaatggtgtagctgatagcaaattcaaggctgagttttctctaggtttgaatggactccaggtgtctactgtagctaactagatgtct

SEQ ID NO: 235312 - DNA, 688 bp, Homo sapiens
agatactgggcagccaaactgaagagaatgattctgagtttaaaaattttttaagtttcatcttgaatggatttgagagcactttaaatattggtagtgatttcgtagtatagagattcaggagaaaagtaaccagaaaagaaatggcatttcaggcagaaataacatcagaaaaattttaaaaactaagaaaatagtaataaccgatttaactaagaaccagtaccttttgtatgtagccactagcttcatgctttgctacatcctttctttgcagaatctgatatttagagtttctgtaatgaatttaaggtcacagaactattgaaaaagttatcagttgcacaaataaaattactgtatttttaacattaaaagtcagcaaaagaaattatatcgtggttgttgttttcctgatattattttaataacaattactacaatttacctgaatcaataactacagtagtatttattaccaaaacgaagattaagaactaggattgtttagtcagccacaatttattacccctagaaaaatacgtatatacttataatttgtgaattttattaaaagatttcacaaaatacccaatgatatcctagctctcaaaggccttgattaggtaaggcccaatgttagtccatttgtgctaatggccaagagggcgtgttaggttttacagac

SEQ ID NO: 235313 - DNA, 345 bp, Homo sapiens
tgcccatgtattccctgaaaagtcttcatgtaaccctagagatgcagacattctagtttgaagaaagcttcctttaactttcttcaactaaagatgtcaacagacatcatcacaattagagtctattttaatttaccaaaggagaaaagttaagcctggcaattactaattattaatacaggttgaatatccctaatccaaaaatctgaaatgctccagaatctgaaacttttgagcagtgatatggtgcttaaaggaaatgctctttggagcatttcagattttggatttttgaattaggattgctcaggcagtaagtatataatgtaagcatccaacatctga

SEQ ID NO: 235314 - DNA, 440 bp, Homo sapiens
cacagcaattctcgtgaacactaaattttaagaatttctggactagtacagggtgacaacagaaataaaatctacaagctgggctgtagtctacaaactgaagtctgggctggcaaaagccacatcagctttacaataactgtgccattactagtcatgaacgggggagggcacagtgtgccaaggggctcctgctgtcctcaggctgccacgacatgccgggattctcctgggcttatagcgaggctacttcccgacaaccccaccatacactgacaacaccgtgaagtggaaaatgcacagaatccacctataacccaccgaacaccatggcacagcctcacctgccttaaatgtgctcagggcacctacagtagctgacggctggatgacatcatctaacacgaagcctattttataataaagtttttagtatctca

SEQ ID NO: 235315 - DNA, 585 bp, Homo sapiens
ggtgatccgtttcactccattgttgtctccaggaaagcatggtttctgtctcctcctgtccttcccccatccccaaccgggggccattcagtagacatttgctgaacacacggatgcgtggagactgaagcctctgcttggctgccttgtgcatttcttcggagtttgaaataagataaccaaagtgagagtaggtttagaaaaagccccctcgaatggaagggtttttgattcctgtcttttccctactctttgatgatggcaaaatgctgataaaatctgagggttggatgaaatgaaatagcccttcagggtcctctgccatctgggtaggtggtgattaaaaatggcaagcctcacagcttcccttggagagctgtctgaggcactgctgaaggtggatgtgcaaaggggcttggcattaggggttggctgaggactggcagggcagctggggaacgcctctgaaagcaacactccccaagatctcattaaaatgcttcctctggccgggatttataggcatgagccactgtgcctggcctggtttgtaccttttaaacgtattattattattattttaaa

SEQ ID NO: 235316 - DNA, 436 bp, Homo sapiens
tttttaccagagacagggttttgtcgtgatggccaggctggtctcaaactcctaacctcaggtgatccaccagccttggcctcccagcatgttgggattacaggcgtgagccactgtgcccagcagcttttttcgtttagatgccaggattcaggtagttatttgttaccacggtataacctagcccatcctaacaaatatgggagtggatcatttgtcctcttgcctggcccctgtcacttcttctctgggactaagaaggattaggaaagagacataaaagttcatatgtaccccgtagggactgctcagagatgggagcagaaagaggagatcttagaaccagacgtgatgactgtcagagtgaagtcccatgccctcaccccaaccctttccttccatttatatcttcatttttttcacacaacaaacacta

SEQ ID NO: 235317 - DNA, 377 bp, Homo sapiens
tgtctcagagcatgccctctctcctgacttttcggggccattattgactagagctgcagttgccagattttttcctaaactgaggcaagaattgagtctacttttttttgtttttcttgagtctctgtttacctcaaatctagagacactctgccctctagtggaaatttcctaaaggtcaggtaatcagttagtcatctaagttcagaggccaacagctataatcaactgtagaagacccatccaacacaaattcaaggagctgatccaaagcaaatgcccacctccttggcaacagttgttacagctgtgttccttttcacttccttctctcctttacttaaaccacatttattatccttcagttctggaggtca

SEQ ID NO: 235318 - DNA, 402 bp, Homo sapiens
gaaatagggtcttaaaggatgagtcagataagaagataggtttaaactagacagagagatggtatatgtaaagaccaaggtcatgaaagacattattattataatggtgagaggtgtgtggccctagatagcatttgccatgtgagaagtaaattggaaccccaaactaaaagtcttgttaggctaggtgtttagcccttatctcatcagcataggggagccatggtgatctgagaactgggagagtattcagggcaatattttttatgtatagcggttaccacattgtattacagtgttctccttcacttgtcattggagctcttcaagtgctgtgaccattagttattaatctttgtgtgctaagcttttggtagagtaactgataaaagtaatgcttag

SEQ ID NO: 235319 - DNA, 500 bp, Homo sapiens
aatgtttgaaaagtttaaaagaatggttgtttctgtactgaacaggtgcatcttcaatgttagctaaatacacctctaacgtattgaaggaaaaaattcaaaccagacagagaggactggaatatataactagcgcttcagtgcaaagacacagacctacatcatgagaaacaacagcccactaggaaccataacctcccccacccaaaaaaaaaaagtcactgaccatagcaagatagcaatatgtgagttctctgaccaagaatttaaaatagaagttttaagaatatgcagtgcatagcaattcacaaatttatgaaagtaatttaacaaataaattgaaataatttttaaaaatcaaatagacatcttaggaatcaaaaatgaatttgctaaactgaaaaactcattggaggctctgaacagaagaatggaataagcaaaggaaagaatcagggcgcttaaacacaggctatttgatattacactgttagagaaaa

SEQ ID NO: 235320 - DNA, 354 bp, Homo sapiens
gtccagaattcaggggtacctttcgtgggggggtctggcttggggtctcttttgaggctgcacatcagctggacagcccacttccagggtgctctcacagggcaagggcaggaggcctcagcccagcaccttgcggcctccccacagggctgcgtgcgtgtctgtgggattgccattcacttttcctgagcaggcgattggagagagagagagagagcaaggaggggtcacggggcctgcatgtcccagtctcgggtgttacaccctgtcccttctgccacactatgttctttccatgtgcgttaccaagtcagtcctgtcttaagggagggtaattgtgcttcacctttttct

SEQ ID NO: 235321 - DNA, 180 bp, Homo sapiens
aagctagagacaattgggaagcaatagtttatagaaaaggtctgtttgagctgctccttcttacctatggctggccataaaaattcccgtgaaaaagatgcagaagggatcctgcctgtcctttctgcctaaagacagacatgcagattatcatccacttagctcggagactggcaccag

SEQ ID NO: 235322 - DNA, 380 bp, Homo sapiens
gcagggtccaaaataagtatatgccgttccatggaaaatctgcatcttaatattgccaaggttttgctccagggtttcatgcaaaattaggtttttaagggtagttttagtaacttattgagatcatcaagaaacattactttgtttggaggtgtgagagtagccaagggcaagagtaattctttttaacgcaacttatttaacatccatacgtttgggcaataatctgaactttaatcagatcttacattactcttcacagtcaacccagtattgagtttcttgcaaaactgtagagaatgaagaatcctatcttctgctaaacagtttattatgctatcatattaaaatattaaaataaaattaatattattttaata

SEQ ID NO: 235323 - DNA, 618 bp, Homo sapiens
cagagaacaggtgagaggagcccccggtgaagccagattggcaagctctgcctctctccgcactcagtgttctgtgacttgtgcctggatgacttgattgctttgtccttcactccggcacagtgattcttgggtacagtacctcagtccttggaagggcagcatggagcctcagaattgattgccacactacccggtttgctccttgagaaggaaacatctttgattcccctcccctacccccaatttcagaaaatctggttgtatccttagaaatgacactatccgttcatcagttcatggatattttggtttctagtttttggctcttatgaataatacctctgtgagtgcccacacacactttttatgtagaaatgtttccctttctcttggcatatgcgtaggggaggaatttctgggacattcattatttatgttttaaccttttggaggaactgccagactgttttacagtggctgccccattttacattgctggacatatgagggttccagtttctccacatctttgccgacaattgttgtttgtcttttagatgatagcaaagattccttttaaacctaccagagattgacagtttgttggtttttttt

SEQ ID NO: 235324 - DNA, 523 bp, Homo sapiens
actgggagtgagagtttaagtgccatcccaagatcacacagctggtccctgcattagactgcctttctcattcacttgcaccttttctagtaggaacttgaccatgtacttttaaagtgtattaaatatggggtcaggcacagtggtttatactcctgtaatcctagtgctttggaaggttagcttgagctcaggagttcaaggctgcagtgagccatgattgcgccactgcattctagcttagccaacagagtgagaccgtgtctctcaaagaaacaaaaaacaagcatcttaaatttgggtgttgcggacatataatttaaagaggattaaatgaaactctaacctaaaaagaggattttgcaacaagttataaaaataataagctaattttggctgggtgcggtggctcacgcctgtaatcgtagcacttcgggaggccgaggcaggcggattgcctgagctcaggagttcaaaaccagcccaggcaacaaggtgaaatcccatctctactaaaatacca

SEQ ID NO: 235325 - DNA, 238 bp, Homo sapiens
agagaaagaaaaaaataaatacaaaataacatgcttaactatgtatttctctctcaaggaaatccaaaagtggacagtctaaggctgctacggtggcccttaaggacatcagagatccaggctccttttatctgtctgcttcaccatacttagccagagagggtggcctcatggtataagatgactgctggagtaccagccatcccacaaacattctggagaggaggagggaaagaac

SEQ ID NO: 235326 - DNA, 520 bp, Homo sapiens
cagcactgggcaagaggagctggcttcagtcataagcttatttaggatctgagattaaaacctacccgttggattgctcctgcaaataacctttcagaatcccaatatgcattttataagtttcatttctcttgctgttcaaagctgacataagctggcttgttttcttattcaattttcagtcctttcttggacctcatgctgtcttttgggctgtattcttatagatggttatatttattattttaggctcaaaatagagaatttaaaaatctttttactgaaaggattgactgaacagtgatcgtcattcagcaagtatttgagcatctaccagggccaagcattgtgcttggcattggaaatctgatggggagcaaaacagatgtggttccttcctgcacaaagcacattatctagtctagacaacaaacaagtcaatagacatatgcatcatatatattggattgtaatatgtgtaaaatctccttcctctgaaggaaaagaacagggcaccaag

SEQ ID NO: 235327 - DNA, 425 bp, Homo sapiens
agccatagaggggctttatttttatacttgtctgtacacacctttttttggatatatgatttgcaaatatttttccccactctatggcttgtctttttattttcttaatggggaattttgaaaagcaaaagctgttaattttgataaaaatttatcaatttttaattttatggatcatgcttgtagtggtttacctaaaaatctttgcctgtcccaaggttagaaaattttacttctatgttttcttctagaagttttatagtttagcctttacatttaggtatgtgttccatttaaatttttgtgtatagtgtaaggttatggtctatgttcattttgttaaatatgggtacccaatttctctattaaattgccttggatcctttgtcaaaaattgactgtaaatataaatgtttatttctgga

SEQ ID NO: 235328 - DNA, 253 bp, Homo sapiens
aaacatcacctagttctgttttcaggcatcagaacatgtaaaccactactggaatctgtaagaagacccagagccaccagcccagccctctgaccccaactccccaacaagtccaggtcactccagaggcccccagggcctgtttaacagtggccaaacaattcaggaaatggtctagcctcactaagccctttgtgctattttattttcaagacctctcagcacggaggtgaggagtatgccggacaacaga

SEQ ID NO: 235329 - DNA, 423 bp, Homo sapiens
aaaggaacaagaagagggactgacacctgtccttgaggagagtggggggtgagctgaagttgaaacactggtgaaaattggatttggacaactcaaaggtggtcatgacacttaagaaatatgcttgtctaggctgggcgtggtggctcccacctgtaatgccagcactttgggaggccgaggtgggcggatcacctgaggtcaggagttcaagacgcgcctgaccaacgtggaaaaaccccgtctctactaaatacaaaaattaaatgggcgtggtggtaggtgtctgtaatcccaactactcaggaggctgaggcaggagaatcgcttgaacccgggaggcggagattgcagtgaattgagattgcgccactgcactccagcctgggtgacagagcaagactccatctcaaaaaaaaaaaa

SEQ ID NO: 235330 - DNA, 536 bp, Homo sapiens
ctctgttgaagagtagcaagactctcgcgagttcttaaaaatgcacttgtttggtatgagaatgaaaagcagtggctgaagaaccaatcttcaatgggcaagccttctctgatgccttgttggtggtatagtgtgaatccattagcactgaactcaggaccagcaatggtgtgactcaggcctgaaggaagcttttctagcacatggatttcctctgtaaggcacctcacagcctctcgtgcctgggaactctagccagcactgtagcacgatgcctagggccattataaatgtgaaatcaccaaagaaaccccacaaaaatgtgaaaatcacggcactaaatagaccacaaaaaggatgcttgtttgcagtatgagaactggaaccagaaagtaggatgtcaccttgttcttccttagcactggatgactcaaatttctctccactctgccagtgtctttgaatgaccaggaaattgctgggaatattgattttgggataacaaataaattttatcgactagctgaatttgcaaa

SEQ ID NO: 235331 - DNA, 536 bp, Homo sapiens
tattgcctgggggccctgtgtggacccatcccttggagctgttaaacacaatcacacaatctttattgcttgctgaattgcaattatcagattatataggaaatgtttaaggattttatgtatgtgtatttttatttgttttgagtcaaaaatcaaaagggaagaatggtcattggagctagaatatacttgtggctgtcccagtgaactcctagaaaaagtaatccctccacttgcctttgctggagcacatggttcagggatagtttaggatcccctctctcctttcccaaatcctcccatgcatgagcttatctgctgtgatgctgatgtcctggatgtgattgattacccaccactatcttggggacctgggaatgaccttctggatgcatttgtaaggaatcagcttgggaagaaaaacaaaaacttgaaggcatcctctagttggcctgagataaggggacctcagagtcttctttcattagcctggcaaaacaatccaaacaataaaaaatccataagaaaatattctg

SEQ ID NO: 235332 - DNA, 910 bp, Homo sapiens
actggaggcggcggcagcggaggcgcgagctgcccgataatggcggcctgcagagcccatgagagggagaagcggcagcgtctaccctgagaaacctcgaccttgaagatggtgagtagccagccaaagtacgatctaatacgggaggtaggccgaggtagttacggtgttgtgtatgaagcagtcatcagaaagacctctgcacgggtggcagtgaagaaaattcgatgtcacgcacctgaaaatgttgaactagcccttcgtgagttctgggcactaagcagtatcaagagccaacatccaaatgtgattcacttggaggaatgcatcctacaaaaggatgggatggtgcaaaagatgtcccacggctctaattcttccctttatttacagcttgtagaaacttcattaaaaggagaaattgcctttgatcccagaagcgcctattatttgtggtttgtgatggatttttgtgacggaggagatatgaatgagtatctgttgtccaggaaacccaatcgtaaaactaacaccagcttcatgcttcagctgagcagtgccctggctttcttgcatcaggttggataccagtgacttggaacctaccctcaaagtggctgattttggtctaagtaaagtttgttcagcctctgggcagaacccagaagaacctgtcagtgtaaacaagtgtttcctttccacagcatgtggaacagatttttacatggctcctgaagtttgggaaggacattacacagcaaaagctgacatctttgctctggggattatcatctgggcaatgctggaaaggatcacattcatagacacagagacaaagaaggaactcttggggagttatgtaaaacaaggaactgagattgtgcctgttggggaggcacttctggaaaat

SEQ ID NO: 235333 - DNA, 431 bp, Homo sapiens
tgttgaactagcccttcgtgagttctgggcactaagcagtatcaagagccaacatccaaatgtgattcacttggaggaatgcatcctacaaaaggatgggatggtgcaaaagatgtcccacggctctaattcttccctttatttacaggtatgtgttgttgattgggaaatagaaatgatttgaacatggcattggccagcaagaagaggaatgaaagggtcagacgaacgtttccctttaaatgcaggtgtttgtagttagaagtagataagtgtctgccaagaattgagtagatgtttgctttaaaacaaggttttatttaaacctgtgaggcacatacctaaaaataacataagccacctgttatgcaatggtacttgccagtctgcataggaatggggcaagataggaactagagaggtgcttgaga

SEQ ID NO: 235334 - DNA, 1157 bp, Homo sapiens
actggaggcggcggcagcggaggcgcgagctgcccgataatggcggcctgcagagcccatgagagggagaagcggcagcgtctaccctgaggaaggtgctcttccccatggggactgtaccaggctggagaggacatggcactgcttcagagacacgaaccaccttgagtggatgtgattggcgatccccgtagagcaggaaagctcgtctgctgtgcagccggcgcagaggattctgtggcaggaaattagacactaggaaattcagtagcgatttgaaggaaacctcgaccttgaagatggtgagtagccagccaaagtacgatctaatacgggaggtaggccgaggtagttacggtgttgtgtatgaagcagtcatcagaaagacctctgcacgggtggcagtgaagaaaattcgatgtcacgcacctgaaaatgttgaactagcccttcgtgagttctgggcactaagcagtatcaagagccaacatccaaatgtgattcacttggaggaatgcatcctacaaaaggatgggatggtgcaaaagatgtcccacggctctaattcttccctttatttacagcttgtagaaacttcattaaaaggagaaattgcctttgatcccagaagcgcctattatttgtggtttgtgatggatttttgtgacggaggagatatgaatgagtatctgttgtccaggaaacccaatcgtaaaactaacaccagcttcatgcttcagctgagcagtgccctggctttcttgcataaaaaccagatcatccaccgagatcttaagcctgataacatcctgatttctcaaaccaggttggataccagtgacttggaacctaccctcaaagtggctgattttggtctaagtaaagtttgttcagcctctgggcagaacccagaagaacctgtcagtgtaaacaagtgtttcctttccacagcatgtggaacagatttttacatggctcctgaagtttgggaaggacattacacagcaaaagctgacatctttgctctggggattatcatctgggcaatgctggaaaggatcacattcatagacacagagacaaagaaggaactcttggggagttatgtaaaacaaggaactgagattgtgcctgttggggaggcacttctggaaaat

SEQ ID NO: 235335 - DNA, 678 bp, Homo sapiens
cagcctcgatctcctgggctcaagggattctctcaccttagcctcctgagcaactgggactcaaggcatgtgtcaccaagctgggctaatttttttattttttgtagagatggggtctgcctatgttgctctggctggtctcaaactcctagcctcaagtgatcctcccaccttggcctcccaaagtgctgggatcaaggcatgagccaccacacacaatcttcagtgtttattttgtcctctctgatttctcaacatttaatattaatatgtaagttggatatctccactcctacctacggatctgatccctgtgcttaatccttttacagtgttgccaataatcaatgatggtcatttcccagttccagtgaggtagtggtatcttatccaaagagaagagattaatttgggggttggatttttcttttttctttttttttttccaagtcagggcttccctctgtcacccaggctggtgtgcagtggtacaatctcagctctccgcagcctcaacctctcagtctcaagtgatccttcctcctcagcctcccaaagtgctgggattataggtgtgagccaccaatgcccagccaggattttaagacttctttgaactatggtttaggttttcgttgtaggattcttactgatctggtaaatgtaggctctgatcac

SEQ ID NO: 235336 - DNA, 483 bp, Homo sapiens
ttcttagggcttagactcatatggggacacagacactaaacagataatcaaaaatcactacagaattagaactgtcacgaggtctatgacggcaaatcacaaggtgctgtaagtgtgtacaaaggaatctcacctagtcggagacattatactttcaggtgtgtatcccacagtcaaagggttgaaagggattttttaaaggtcagagcatacaaagtagcaggtatgtaggatgaacaaggctagaatctactgtataacatgaggactgtaggtaataaaattgtactgtatgtggagttcatgctaaatgagtagattttagctgctcttgccacaagaacaaaaaatctaagggaactgtgagatgatggatatgttaactgcttcatcatggtaaccatctcactgtctatatgcatcccatagcatcatgctgtatacctgaaatatgtacaataaaagttattgttttaaaagatg

SEQ ID NO: 235337 - DNA, 433 bp, Homo sapiens
atgagttaaatgttaatcgcgttgaatgtgccttcccagcaatacctgggactgctggttaatctcgcagttaatctagttgggtgctacagcctagccaaggggacacataaaatgaaccatcacacacagaaagtacaaaagagagtgaagagagcaggaaagtctgaatgcatgtaataagagttccagaaaaagtaatggaacaggagagatatttaaagagatcacaactaagaatttccaagacaaacaaaaagcatccaaatgcagatttgaaaagcacattgtaccccaagaataactttttttaattctcatctcagtggttaaattgctgaaaaacagagaccaaaaaaatcttaaaagcagtcaggaaatgaaagacaaactcacttcaaaggagctaaatcagactggtaactgattctca

SEQ ID NO: 235338 - DNA, 398 bp, Homo sapiens
gcttgttgcctttgagggtctgtgggagagaatcataagcctgtccagatcttatcttctcaggaaggggcaggaaaacaacacagcaaaacagctgcccggacgagaacaccatctagtgtcttcacacaacacacccacatttggtggtttctgtttcccatgaagatgaaagaggaggggagaggcgtgtcagggattccctgagccctgataggagggttcaactgggcgaggaagggaccatcaggccaacccatgtaggtggacccactcagctctcaggactcatctcctccacctggaccgctctccctggtggggcattgagggactgagggctctggttttgttctctagaagaggtgatccatcattaaaaatctattaaacatgca

SEQ ID NO: 235339 - DNA, 787 bp, Homo sapiens
ctcgaagggaaccatcagcgcctcctgtccacggagctccaggtctacaatggcagcggccgccagccccgccttccttctgtgcctcccgcttctgcacctgctgtctggctggtcccgggcaggatgggtcgacacacactgtctttgctatgacttcatcatcactcctaagtccagacctgaaccacagtggtgtgaagttcaaggcctggtggatgaaaggccttttcttcactatgactgtgttaaccacaaggccaaagcctttgcttctctggggaagaaagtcaatgtcacaaaaacctgggaagaacaaactgaaacactaagagacgtggtggatttccttaaagggcaactgcttgacattcaagtggagaatttaatacccattgagcccctcaccctgcaggccaggatgtcttgtgagcatgaagcccatggacacggcagaggatcttggcagttcctcttcaatggacagaagttcctcctctttgactcaaacaacagaaagtggacagcacttcatcctggagccaagaagatgacagagaagtgggagaagaacagggatgtgaccatgttcttccagaagatttcactgggggattgtaagatgtggcttgaagaatttttgatgtactgggaacaaatgctggatccaacaaaaccaccctctctggccccaggcacaacccaacccaaggccatggccaccaccctcagtccctggagccttctcatcatcttcctctgcttcattctagctggcagatgagga

SEQ ID NO: 235340 - DNA, 578 bp, Homo sapiens
aaactgagctctggaatgtttgataatatgccaacatctaaacaatcctttagctatatgtattaccttgaacatgctatttattcttacttaattcaaagaaagttcagaggtctgattattttaattgcaggaaaaacaaagcagttttgaaaaaacagtacctgaataaaactatattaaatagataacatttaaaatgacaatttattttccattcttactctccaatagaattaatgctgaaggactgttaaacagaattttggtttcatactgtctctttctgtttatgctcataccccattctactaagcttcctctcattagcttcacatttatatcacttgtaatagcaatagctgtaatttctacagttcctattatgaactatgcactgtgatttataagaataattgaaaaatcagagttaattcatattcagcattaaaacaaatcttaagtatagtcacagtcatataatccaatgaaataaaattgttcatgttgtaagtctatgttttttatatgccccatgtatttaaaaaacaataattttgatacatataaagttttaa

SEQ ID NO: 235341 - DNA, 333 bp, Homo sapiens
acctctgctgaagtctgggcttctgtgtgttctacggtgacaagccctcatcaagcctcaccttactctgaggctctgaaaggggacgcacaaggtgacagcatgtgcccaggtcatcctgctgccaggagcgaacccacaggtggggctgaggctaggtcagctgggacctggctttgtgggacacctagctcacaagacgatggggcagggggctgtccagagcgtccctggatgtccagcccagggctgagagaagtcatccgtgctccaggatgctgcagttagaaccatgtttgaaaatgaacatcttgccatgccactcctaacgca

SEQ ID NO: 235342 - DNA, 261 bp, Homo sapiens
tccagttctgatatttcatgtctcaattagaaaagacatggttggtagtgtttttgtttttttaatatgttttatatcatttttagttaatttatacaatggaaacacattgagttaccacagtatgctttgatttatagttctagatagcataggacaattaatgagtgcttagacatcatccagatatgtgaagtctggcaggcttgacatctacttttatcttacttacatttaattcccaattaaaattttttatta

SEQ ID NO: 235343 - DNA, 381 bp, Homo sapiens
taataacacacatgagaaagagctcacagtgttttccagaaaaaaacactttgattctataaaagaggtcagtagactacaatatgaagaatccttctgttggcttaacttttagactatatgacaagttctctgactataaagacactgatcaaaagaactcagtttagcacaatatccaaagtccaaagtacaagcaataaaagaagaatcaggtaaattagactacatcaaaatgttaaactttttgcctcaaaggacaccatcaacagggtgaaaagacaaagcatggaatgggagaaaatatttgcaaatcatatatttgataaagggttaatatctagaatatataaagagctcctacaactcaacaacaacaac

SEQ ID NO: 235344 - DNA, 217 bp, Homo sapiens
aatgcagagatgtgggaattttattttaattgtaggtggcttaattaatttacagactagagaaagggatgagtacagaaggaaaaaatgaaattacaggattaacagcacacatattgggtgactttaagtatttagtggccaaggaggtgatgacaatgggttttcttttcatatctaaaacagttttcattgagaagataagaaaaaaaaagaa

SEQ ID NO: 235345 - DNA, 459 bp, Homo sapiens
aatcatttggcatctgattggttctcagtaccatgtaggtctgttatcaggactcagatcattgcaaaagtctttttaatttttttgcctgcatacctgaggcccacatccaggaatgtggtcagccaagtgcaatacttgtctgggaagttttgcctgcaacccagggcattccttgccgatagccccatgtacactggctccgggcttctcagttatttcctctgatggtccatgagtcagtcattttcagatccaaagcccgctggacatttcaggattggttttcttgtgggtacctataagaaactggtgtcttattttgcctttcataaaatggaaattgagccaggcatggtggcatgcaccagtagtcccagttgctcaggaggccaagacaggaagatcgcttgagcccaggagtttgagcactgcctgggcaatgtagaccccatatct

SEQ ID NO: 235346 - DNA, 292 bp, Homo sapiens
tgaatgttgtggagggaaactgtttccagttggaggtggggcctgatttcttggcaaacgcgtaatagttgtcaaagcagctactgtctaccttacagatatctttgagtatctcccattgattatctcacatgatcaatgtgcagaatttttactttatggtcagccatctacccttccttgcatgctcttgggtgcctagcatttgtgccctcagcaggactaagtcggaggggctctatttccttccagggtatcttactgggagaagtgggacaaagaagggggaaga

SEQ ID NO: 235347 - DNA, 349 bp, Homo sapiens
agagttggagcatcgtaagggtatggaggagaggggaggagagtagtagaggtctcagcagttgtcagatgacaaaaagtcttgcgttactaattttatcgtatgaaatgaggatattttttaggtttttaagcagagagaatggcaaggtcatttggttttagaagttagtccgagctaggcatggtgacagatgcctgtactggacaagctgaggcaggaggatggcttgagcccaggagctggaagctgcagtgagcagtgatcacatcactgcagtccagcctgggcaacagagcaagaccttgcctttaaaaaagaaaagtctgaaatacccctcacaactgtt

SEQ ID NO: 235348 - DNA, 411 bp, Homo sapiens
caggcttcctcccttcagtcagtccatgttttcctaccatttaccatgacacacaaccagcatctgttcatgaacctgcagtgagctcttaccactgcaggcgccaccctctgcttggctgcagcagatgcagagtgtggcgaaaagtcaggagcaagggggctctgtctgttgagacacacactcctactgcaagcctcacccccagaccaactcactctactgtgacagggtttctccaccgtggaccagctgatttgtcctcatccccaaacctggagttggacatgttttcattgcaaatgcagaaagataaatctttgctgaggggaccagtagttgcccagtccagagctaaaaggaagtacatgtttttgtcttctataatataaaacggtcatattatttcat

SEQ ID NO: 235349 - DNA, 767 bp, Homo sapiens
gggcaagactccatctcaaaaaaaaaaaaaaagaaaaaaaagaaaaattagggcagcttttagacatgaggccccaaagtgccaactagtgctcctaaacttcaactctcttttgagtgttttatgtatctactcagcatccagttgtaaatatgcaaaaatcaatgcctactgtatttaaaaattactaaattcacaataaccacacagaatctataataaatagaatcaatgtaataatgactcagatccaggggaagaaaattataaaattttggaaaaaatgatgagctattaattaagaaaatagtttgttccttggtgagaagactcaatgtaaatatgtcagttttctcctgacttaagtcttcaacacaggcctaataatattgcagtggcaaatgattgccaggggcaggaggggatttggggaagtggtaaaaatgatctgtgtcttggtagtggtcgctgcacaactgcatacatctgtgaaaactcactgaactgcgcactttaaaagggtgaattgtaatatacatacctcaataaaccttacttaaaaattacagtgtcttttttttttgtagctcaacagaaagattctgagatttggaaaaataaatgtgaaaaataagaccaaggaggaaagacctgccttatcaatagtaatctatattgctgagccataatactttttttaaagtgtagtacttatgtagcatttaacagaaagatccagttggaaataaaagtatggaatagatcca

SEQ ID NO: 235350 - DNA, 659 bp, Homo sapiens
gtgaaaccccatctctactaaaaatacaaaaaattagctgggcatggtggtgcgcacctgtaagcccagctactcgggaggctgaggcaggagaattacttgaaccaaggaggcagaggttggagtgagccaagatcttgccattgcactccagcctgggaaacagagcaagataccatctcagggcgggggaaacaaaaaggggggaatctcccctgcagatttccaaataattcgtgtatgtacgttttcctctcacagtagtagagcataatttcccctaccttcctaacttgtctccacctaggtgaagttattatattattatcacacaatgtagctagacactaagctagttttacaatggacagaaagtaatttcattcctgcataccttgggcaaataaaactttctgtgtatctatgtcagaaaattcataatggggaaatgaagattaaaaaatttaaagtaggcagggtgcaggggctcatgcctgtaatcccagcactttgagacgccaagatgagaggatcacttgagcccaggagttcaagaccagctggggcaacacagactaggccctgtttccacaaaaaaaatttaaaaattagctgggtgtggtggcagctacttgggggctggggtggaaggatggctt

SEQ ID NO: 235351 - DNA, 953 bp, Homo sapiens
aacccgggaggcggagcttgcagtgaaccgtgatcgcttcactgcactccagcctgggcaacagagcgagaatccatctcaaaaaaaaaaaaaaaaaaaaaaaaaaaaaaaaagaaagaaagaaattacaggtaggctagagcacggatgagcaaactgtttttataaaggaccagagagtatatatttcaggctttgcaggccctatgacgtctgtcacaattcacttctgcctttctactgcaaaaacagccatggacaattcataaattaatgtgcatggccgtgttctgataaaagtttatttatagacactgaaatttgaattccatatgtcatgaaattatatttttttgattttttttttcataaaaccagtctaaaaaagccatgggttattttgtcatggcacgttttgatatgaatatttccacccccattatttgcataacaaattacagattatccagaacaggtgggctgtacataaacaggctggtgggctggatttgtcctgtggactgtagtttgctgacatccaggctagatccttaatatacaatgaagtagtaaaacacatgtaaaagtaaaaagcaggcgaaatagaataaaatacacatttgcacaccacagtatccaaaaaggttatgtactggggctaaagatttggcttggagtttcctggtagtcaaggcaaaaaagggaaacaaaactagttacagagtttctcggacctatgagcaaaaggatttccatttctaatcggaggcagaggtatcatggccttcaagaatcttccggttaaacacggtactgaaatttgattttattgtctatcgttgagtccctagttattttgcctttaccaaggctagttgcagagtatttgttctagtatgtaaaatcagcaatcagccattttctggtcattgtaatggtgtaaattatatctg
